United States Patent Application Publication US 2007/0277269 A1 - sequence listing, part 2

SEQ ID NO: 2804 - protein, 242 aa, Triticum aestivum
  misc_feature: Ceres CLONE ID no. 684441
  misc_feature: Ceres CDNA ID no. 25892975
  misc_feature (153)..(218): Pfam Name: RNase_PH_C PFAM Desc: 3' exoribonuclease family
  misc_feature (19)..(150): Pfam Name: RNase_PH PFAM Desc: 3' exoribonuclease family
  misc_feature: Homolog of GI Number: 28973161 NR Desc: putative exonuclease RRP41
  misc_feature: Homolog of GI Number: 50899014 NR Desc: putative ribonuclease PH
  misc_feature: Homolog of GI Number: 62858329 NR Desc: LOC549190
  misc_feature: Homolog of GI Number: 57095694 NR Desc:  similar to putative exosome complex exonuclease RRP41
  misc_feature: Homolog of GI Number: 29611663 NR Desc: exosome complex exonuclease RRP41
  misc_feature: Homolog of GI Number: 33411774 NR Desc: putative exosome complex exonuclease RRP41
  misc_feature: Homolog of GI Number: 34866849 NR Desc: similar to putative exosome complex exonuclease RRP41
  misc_feature: Homolog of GI Number: 41152247 NR Desc: putative exosome complex exonuclease RRP41
  misc_feature: Homolog of GI Number: 58394004 NR Desc: ENSANGP00000017010
MEYVNPLTGFRVDGRRPNEMRQLKGEVGVVSRADGSALFEMGNTRVIAAVYGPREIQNRSQQQNSKEALVRCEYRMAEFSTGDRRRKPKGDRRSTEISLVIRQTMEASILTHLMPHSQIDIFVQVLQADGGTRSACINAATLALADAGIPMRDIVTSCSAGYLCSTPLLDLNYIEDSAGGADVTVGILAKMDKVTLLQMDAKLPMDTFETVMDLASEGCKAIATYIREVLLENTKQLECQRG

SEQ ID NO: 2805 - DNA, 695 bp, Triticum aestivum
  misc_feature: Ceres CLONE ID no. 684470
  misc_feature: Ceres CDNA ID no. 35383254
  CDS (169)..(504): REFERENCED BY SEQ ID NO: 2806
ctttagacgcagccgcttcacttctcccaggtaaaggtaagctccccccacgcgccgccgccgccgccgcggatccaaaatcctctcccctctccgttcaccgcctcgcttctccccgtcgctaacgtgggctggggcttctcctggttgtgcaggaaaggttcgcccatggctccgtcgcagcccaagtcgggcctcttcgtgggcatcaacaagggccacgtcgtcaccaagcgcgagctgccgccacgcccgtccgaccgcaaggggaaaggtaccaagagggtgcatttcgtcaggaacttgatcagggaggtcgctgggtttgctccgtatgagaagcgtatcactgagcttctcaaggttggcaaggacaagcgtgccctgaaggtggcgaagcgaaagttgggtacccacaagagggcgaagaagaagagagaggagatgtccagtgtcctcaggaagatgagatctgctggaactggaaccgagaagaagaaatagagcatcccaggctcatgaagttgatggaaaatcttctgttctggtgtccggtttttactgcatgtagaacctgctagacttgaaactgttatccgccagctaaacattatgctatgttgaacctcctgtcttgtgagatttttgagctaacttgcaatgcatcgtttgccaccctaaaaaaaaaaaaaaaa

SEQ ID NO: 2806 - protein, 111 aa, Triticum aestivum
  misc_feature: Ceres CLONE ID no. 684470
  misc_feature: Ceres CDNA ID no. 35383254
  misc_feature (5)..(103): Pfam Name: Ribosomal_L36e PFAM Desc: Ribosomal protein L36e
  misc_feature: Homolog of GI Number: 57471698 NR Desc: ribosomal protein L36
  misc_feature: Homolog of GI Number: 50931673 NR Desc: putative 60S ribosomal protein L36
  misc_feature: Homolog of GI Number: 34908154 NR Desc: putative 60S RIBOSOMAL PROTEIN L36
  misc_feature: Homolog of GI Number: 56182368 NR Desc: putative 60S ribosomal protein L36
  misc_feature: Homolog of GI Number: 20148501 NR Desc: 60S ribosomal protein L36
  misc_feature: Homolog of GI Number: 12642884 NR Desc: putative 60S ribosomal protein
  misc_feature: Homolog of GI Number: 21592383 NR Desc: 60S ribosomal protein L36
  misc_feature: Homolog of GI Number: 21554932 NR Desc: 60S RIBOSOMAL PROTEIN L36 homolog
  misc_feature: Homolog of GI Number: 1276967 NR Desc: putative ribosomal protein
  misc_feature: Homolog of GI Number: 17865758 NR Desc: 60S ribosomal protein L36
  misc_feature: Useful for sterility
MAPSQPKSGLFVGINKGHVVTKRELPPRPSDRKGKGTKRVHFVRNLIREVAGFAPYEKRITELLKVGKDKRALKVAKRKLGTHKRAKKKREEMSSVLRKMRSAGTGTEKKK

SEQ ID NO: 2807 - DNA, 563 bp, Triticum aestivum
  misc_feature: Ceres CLONE ID no. 684493
  misc_feature: Ceres CDNA ID no. 36707414
  CDS (68)..(406): REFERENCED BY SEQ ID NO: 2808
ctcggacgcaggcggcggcttagggttttaactcgcatccattctcaaggttagcaggagaccggccatggcgccgttgcagcccaagtcagggctcttcgtcggcatcaacaagggccacgtcgtcaccaagcgcgagctgccgcctcgcccgtccgaccgcaaggggaaaggtaccaagagggtgctgtttgtcaggaacttgattagggaggtcgctggattttctccctatgagaagcgtatcactgagcttcttaaggttggaaaggacaagcgcgcactcaaggtcgccaagaggaagcttggtactcacaagagagcaaagaagaagagggaggagatgtcaagtgtcctcaggaagatgaggtctggtggtggtggtgctacggacaagaagaaatagattttgcatgttgatttatctcaatgctttgccctgtatttccacattatgccaagtttgtagcctgtggcaattggagacgaatgtagtacattgcacttcaagttcagagtcaaactatgaatttttgacactatttgcaaaaaaaaaaaaaaaa

SEQ ID NO: 2808 - protein, 112 aa, Triticum aestivum
  misc_feature: Ceres CLONE ID no. 684493
  misc_feature: Ceres CDNA ID no. 36707414
  misc_feature (5)..(103): Pfam Name: Ribosomal_L36e PFAM Desc: Ribosomal protein L36e
  misc_feature: Homolog of GI Number: 57471698 NR Desc: ribosomal protein L36
  misc_feature: Homolog of GI Number: 50931673 NR Desc: putative 60S ribosomal protein L36
  misc_feature: Homolog of GI Number: 34908154 NR Desc: putative 60S RIBOSOMAL PROTEIN L36
  misc_feature: Homolog of GI Number: 56182368 NR Desc: putative 60S ribosomal protein L36
  misc_feature: Homolog of GI Number: 20148501 NR Desc: 60S ribosomal protein L36
  misc_feature: Homolog of GI Number: 12642884 NR Desc: putative 60S ribosomal protein
  misc_feature: Homolog of GI Number: 21592383 NR Desc: 60S ribosomal protein L36
  misc_feature: Homolog of GI Number: 21554932 NR Desc: 60S RIBOSOMAL PROTEIN L36 homolog
  misc_feature: Homolog of GI Number: 17865758 NR Desc: 60S ribosomal protein L36
  misc_feature: Homolog of GI Number: 1276967 NR Desc: putative ribosomal protein
MAPLQPKSGLFVGINKGHVVTKRELPPRPSDRKGKGTKRVLFVRNLIREVAGFSPYEKRITELLKVGKDKRALKVAKRKLGTHKRAKKKREEMSSVLRKMRSGGGGATDKKK

SEQ ID NO: 2809 - DNA, 646 bp, Triticum aestivum
  misc_feature: Ceres CLONE ID no. 684766
  misc_feature: Ceres CDNA ID no. 35383255
  CDS (73)..(468): REFERENCED BY SEQ ID NO: 2810
accctatcgactcggcgcagccacccccacaaccgaagcagactccggagagcaggcaaggcggagaccgagatggcgcgcggcgtgccggcggctaccaagggcggcgcgggcgccgggaagaagaaggggtcggtcaccttcgtgatcgactgcaccaagcccgtcgacgacaagatcatggagatcgcgtcgctcgagaagttcctgcaggagcgcatcaaggtcgccggcggcaaggccggcaacctcggggactccgtcaccgtcgcccgcgacaagagcaaggtcaccgtcacctccgatggggccttctccaagaggtacttgaagtacttgacaaagaagtacctgaagaagcacaatgtgcgtgactggctccgggtgatttcatccaacaaggagcgcagtgtctatgagctccggtacttcaacattgccgagaacgagggcgaggaggaggattagatatgcactgccttgtttctgtgtcgtgtggaactttgaacttgttgagcacttttgcggtagagttttgatgtttatttttccaccggtgttttgaattgtggccaggacgccatgtgatggatgcttagataaccaacctaaagaattgtccgttctcgtaaaaaaaaaaaaaaaa

SEQ ID NO: 2810 - protein, 131 aa, Triticum aestivum
  misc_feature: Ceres CLONE ID no. 684766
  misc_feature: Ceres CDNA ID no. 35383255
  misc_feature (17)..(131): Pfam Name: Ribosomal_L22e PFAM Desc: Ribosomal L22e protein family
  misc_feature: Homolog of GI Number: 42733478 NR Desc: BRI1
  misc_feature: Homolog of GI Number: 50939919 NR Desc: putative 60S ribosomal protein L22
  misc_feature: Homolog of GI Number: 6714454 NR Desc: putative 60S ribosomal protein  L22
  misc_feature: Homolog of GI Number: 12642842 NR Desc: putative 60S ribosomal protein L22
  misc_feature: Homolog of GI Number: 6056419 NR Desc: 60S ribosomal protein  L22
  misc_feature: Homolog of GI Number: 33150766 NR Desc: heparin
  misc_feature: Homolog of GI Number: 73956651 NR Desc:  similar to 60S ribosomal protein L22
  misc_feature: Homolog of GI Number: 45383834 NR Desc: ribosomal protein L22
  misc_feature: Homolog of GI Number: 15293911 NR Desc: ribosomal protein L22
  misc_feature: Homolog of GI Number: 13592059 NR Desc: ribosomal protein L22
MARGVPAATKGGAGAGKKKGSVTFVIDCTKPVDDKIMEIASLEKFLQERIKVAGGKAGNLGDSVTVARDKSKVTVTSDGAFSKRYLKYLTKKYLKKHNVRDWLRVISSNKERSVYELRYFNIAENEGEEED

SEQ ID NO: 2811 - DNA, 994 bp, Triticum aestivum
  misc_feature: Ceres CLONE ID no. 684810
  misc_feature: Ceres CDNA ID no. 25445507
  CDS (208)..(690): REFERENCED BY SEQ ID NO: 2812
atcgtcttgagccggccctcttctccttcctcccactcaaggatacaaggggaacaaggcaggggtctaggtgctactccggcacggtggcacacccatctctcttcaagcttggcccgcccagcaatttgtttgtagctccgccactgctgagacccctacgttcccagccacgccttgcccactcgcgctgtgtgtgcctcggagatggccggcacgtcatgttgtgataggatggtttcccagcttcagtcgacatccaagtactacactggatatcccaaggatctagggccatcaagaatcataccgttcacatcagagcgtcagtttgtgcagctattacatgaaggacggcctgtagttgcggcctttaccattaagtgcacttatacacagcatcttgacaaagtactggaggaagctgctgctacattttatcctcatataacgtttgttcgggtggaatgcccaaagtatcctgggttttgcctcacgaggcaaaagactgagtatccatttcttgaagtattttacaacccagaacaggctgctaacccaggtaagatcgtggatccgagcatcacgaaatactccgcaaaagtcctacctttcaactatgaccagagcgtgtatggatttcgagagtattttaagaagtatgggttcaagtattccgaagcaaactaggtttgtcatggtggagccctgcagagtcagccagtccaactccaactggtttgaatttactttcagcctgtactaacagtgatactgcattcttaagaatcagcaccccctgcatactgggctggctctgccttggcaaatggttggaaaaatggccaagctgttagctaggtttccagtatgctcaagattgtagtagaatttctggatgttgcatgttgttctttgtcaaatctctgaactgcattatcagactcgctattaataaaatatattctgcggctcactaaaaaaaaaaaaaaaa

SEQ ID NO: 2812 - protein, 160 aa, Triticum aestivum
  misc_feature: Ceres CLONE ID no. 684810
  misc_feature: Ceres CDNA ID no. 25445507
MAGTSCCDRMVSQLQSTSKYYTGYPKDLGPSRIIPFTSERQFVQLLHEGRPVVAAFTIKCTYTQHLDKVLEEAAATFYPHITFVRVECPKYPGFCLTRQKTEYPFLEVFYNPEQAANPGKIVDPSITKYSAKVLPFNYDQSVYGFREYFKKYGFKYSEAN

SEQ ID NO: 2813 - DNA, 739 bp, Triticum aestivum
  misc_feature: Ceres CLONE ID no. 685256
  misc_feature: Ceres CDNA ID no. 36701372
  CDS (109)..(561): REFERENCED BY SEQ ID NO: 2814
taatcgaaaaaatcgcgccgccgctcgagcccctctcgcccttcgcgccgctgctgctgcaggcaaccgccgccgccgtcgccggagctaaacccctcgcctgacgccatggggcgtatgcacagccgcgggaagggtatctcgtcgtcggcgctgccgtacaagaggactcccccgagctgggtcaagaccgccgtcgctgatgtcgacgagttgatcacgaaggctgcgaagaagggtcagatgccctcgcagatcggtgttctgctccgtgaccagcacggtatccccctcgtcaagagcgttaccggaagcaagatcctccgcatcctcaaggctcatggcctggcgccggaaatcccagaggatctgtactttttgattaagaaggctgtggccattaggaagcatcttgagaggaacaggaaggacgactccaaattcaggctcattcttgttgagagcaggatccaccgtcttgcccgttactacaagcgcaccaagaagctcccgcccacctggaagtacgagtctaccactgccagcactctggtggcttaggagggctcttcatctggtgtgctcttaccggcttcaggatggtcttgttctacatattatcaatttcatgtaacgcttttgagtttggagcgatttagatgaacaagagaccaaattttctatgtttacttggagaatcccataaaccatttttggttttacaaaaaaaaaaaaaaaa

SEQ ID NO: 2814 - protein, 150 aa, Triticum aestivum
  misc_feature: Ceres CLONE ID no. 685256
  misc_feature: Ceres CDNA ID no. 36701372
  misc_feature (1)..(60): Pfam Name: Ribosomal_S13_N PFAM Desc: Ribosomal S13/S15 N
  misc_feature (65)..(150): Pfam Name: Ribosomal_S15 PFAM Desc: Ribosomal protein S15
  misc_feature: Homolog of GI Number: 52548254 NR Desc: cytoplasmatic ribosomal protein S13
  misc_feature: Homolog of GI Number: 288059 NR Desc: cytoplasmatic ribosomal protein S13
  misc_feature: Homolog of GI Number: 50940531 NR Desc: putative 40S RIBOSOMAL PROTEIN S13
  misc_feature: Homolog of GI Number: 50940529 NR Desc: putative 40S RIBOSOMAL PROTEIN S13
  misc_feature: Homolog of GI Number: 19699318 NR Desc: AT3g60770/T4C21_180
  misc_feature: Homolog of GI Number: 30102866 NR Desc: At4g00100
  misc_feature: Homolog of GI Number: 15450535 NR Desc: AT3g60770/T4C21_180
  misc_feature: Homolog of GI Number: 8131699 NR Desc: cytoplasmic ribosomal protein S13
  misc_feature: Homolog of GI Number: 48209913 NR Desc: cytoplasmic ribosomal protein S13
  misc_feature: Homolog of GI Number: 44662862 NR Desc: ribosomal protein S13
MGRMHSRGKGISSSALPYKRTPPSWVKTAVADVDELITKAAKKGQMPSQIGVLLRDQHGIPLVKSVTGSKILRILKAHGLAPEIPEDLYFLIKKAVAIRKHLERNRKDDSKFRLILVESRIHRLARYYKRTKKLPPTWKYESTTASTLVA

SEQ ID NO: 2815 - DNA, 463 bp, Triticum aestivum
  misc_feature: Ceres CLONE ID no. 685290
  misc_feature: Ceres CDNA ID no. 35383256
  CDS (89)..(316): REFERENCED BY SEQ ID NO: 2816
caacataaacacacacggataagttagtaaagagcagagttacctcagagacaaaggaagaagagaggcgaggtagctagcttcagacatggggttctgctgtgggccttcggatgtccaggtgctccccaagaacatgtcctcctcctctccctcctcctcctcgtttgttaaagattccggtgatggcggcaagaagaaacagcagcaagttataaagaaggaacaggggaaggagaagaagatgagcaaccttgaccgggccgccctcacaacaccccgcctccccttccattctcgacccggtctaatgtgacagattagccgagaaccagtgtatttcatagaaatatatgatcttgtgtgttctcctattagcctacgtctgagtctgtaacttaggatgtatagctccattgtcccgttgaagtttcgaggtttgcagtgaaaaaaaaaaaaaaaa

SEQ ID NO: 2816 - protein, 75 aa, Triticum aestivum
  misc_feature: Ceres CLONE ID no. 685290
  misc_feature: Ceres CDNA ID no. 35383256
MGFCCGPSDVQVLPKNMSSSSPSSSSFVKDSGDGGKKKQQQVIKKEQGKEKKMSNLDRAALTTPRLPFHSRPGLM

SEQ ID NO: 2817 - DNA, 894 bp, Triticum aestivum
  misc_feature: Ceres CLONE ID no. 685443
  misc_feature: Ceres CDNA ID no. 36582418
  CDS (183)..(641): REFERENCED BY SEQ ID NO: 2818
caatccttttgcccccctcctctctacatagcctccctccatccccgaccctcccttccatcgcccaggccgacctaaagccgtccattccgtcgtctccatgctctaggacaacgagcacgcggggcctaccgcctacgtctccacccccaccgccggacgcatctcagagaatttcgaggatgtcgactccttcaaggaagaggctgatgagggacttcaagcggctgatgcaggaccctcctgcgggcataagcggggcgccgcaggacaacaacataatgctgtggaatgctgtgatttttggccctgacgatagcccgtgggacggaggtacgtttaagctgactctccagttcaatgaagaatatcctaataagccaccaacagttcggtttatttctcggatgtttcaccctaacatttatgctgatggaagcatatgcttagatattctacagaatcagtggagcccaatatatgatgtagctgctatacttacatctatccagtcgctgctgtgtgatcctaacccgaattcgcctgctaactcagaagctgcccgcatgttcagtgagaacaagcgagagtacaaccgcaaagtgcgggagattgttgagcagagctggacggcagactaataagctgagctcaccatgcgttctcatgcggtttctgtaccaaaatgtttgtaactaaaatggctgaactccatcgttaccacctgaaacagcaacttgctttgttgcatcatttggctggacggctggagattgctctgtcatggcctgtgcctatactgtctgtatcttgaacacaaacattttgtaacgtcttgtgtgggtttgtaatgttctagtatcatatcatattgattcaaaaaaaaaaaaaaaa

SEQ ID NO: 2818 - protein, 152 aa, Triticum aestivum
  misc_feature: Ceres CLONE ID no. 685443
  misc_feature: Ceres CDNA ID no. 36582418
  misc_feature (8)..(145): Pfam Name: UQ_con PFAM Desc: Ubiquitin
  misc_feature: Homolog of GI Number: 83283991 NR Desc: ubiquitin carrier
  misc_feature: Homolog of GI Number: 56236462 NR Desc: ubiquitin carrier protein
  misc_feature: Homolog of GI Number: 8118527 NR Desc: ubiquitin conjugating protein
  misc_feature: Homolog of GI Number: 58578278 NR Desc: ubiquitin
  misc_feature: Homolog of GI Number: 50934403 NR Desc: OsRad6
  misc_feature: Homolog of GI Number: 13516453 NR Desc: ubiquitin
  misc_feature: Homolog of GI Number: 2947065 NR Desc: E2
  misc_feature: Homolog of GI Number: 464980 NR Desc: Ubiquitin
  misc_feature: Homolog of GI Number: 52851176 NR Desc: Ubiquitin
MSTPSRKRLMRDFKRLMQDPPAGISGAPQDNNIMLWNAVIFGPDDSPWDGGTFKLTLQFNEEYPNKPPTVRFISRMFHPNIYADGSICLDILQNQWSPIYDVAAILTSIQSLLCDPNPNSPANSEAARMFSENKREYNRKVREIVEQSWTAD

SEQ ID NO: 2819 - DNA, 576 bp, Triticum aestivum
  misc_feature: Ceres CLONE ID no. 685515
  misc_feature: Ceres CDNA ID no. 40351170
  CDS (89)..(400): REFERENCED BY SEQ ID NO: 2820
acaacacggccgcagcagccaccaccagaccaccagcgcgcacacaaccactagccaaggaaggtcgccggagagagaagcgccggagatgtctggccgcggcaagggagggaaggggctgggcaagggcggcgccaagcggcaccggaaggtgctgcgcgacaacacccagggcatcaccaaggcggcgatccggcggctggcgcggcgtggcggcgtgaagcgcatctcggggctcatctacgaggagacccgcggcgtgctcaagatcttcctggagaacgtcatccgcgacgccgtgacctacaccgagcacgcccgccgcaagaccgtcaccgccatggacgtcgtctacgcgctcaagcgccagggccgcaccctctacggcttcggcggctaggtccagtcgaatccacctcgcgcctccagccagattcgtaccgcggctagctatggttgttcagtgttcaatctcgctgctgttgttcagcgttcagtgtctggatgtacagtactatgatagaaggaaatcacagaattttaccctcgagttcttctacaaaaaaaaaaaaaaaa

SEQ ID NO: 2820 - protein, 103 aa, Triticum aestivum
  misc_feature: Ceres CLONE ID no. 685515
  misc_feature: Ceres CDNA ID no. 40351170
  misc_feature (66)..(92): Pfam Name: TAF PFAM Desc: TATA box binding protein associated factor
MSGRGKGGKGLGKGGAKRHRKVLRDNTQGITKAAIRRLARRGGVKRISGLIYEETRGVLKIFLENVIRDAVTYTEHARRKTVTAMDVVYALKRQGRTLYGFGG

SEQ ID NO: 2821 - DNA, 828 bp, Triticum aestivum
  misc_feature: Ceres CLONE ID no. 685668
  misc_feature: Ceres CDNA ID no. 25892453
  CDS (117)..(638): REFERENCED BY SEQ ID NO: 2822
tgtctgctctgctcccgtggttctcttcttgcgcggttgcgcactagcttttgctttgtagactctgtatcatcgacgagctccgacctcgacttagctccgggcagcaggcgacgatgtcggtgagcctcgtgagggcgtcgctgccggcctggtgcacggcggcggcagcggggagcagcggcctgcgctctcgcctgcgcggcacggcgtgctccggtcggcgcgtgggcgtccggtgcagctccaccacgccgccgggtttccctcccgggccgacgccgccggggttccccgcggtgccgtcgcccgaggaggtgccgggcacggcccgcccgcccgaggagatgccgggcacggcgcggccgccgcaggagatgccgggcatcgacacgccgccggagttcaacgcgcccccgggcgtggacgtgccgatgccaggggcgccggtgccgggcacgcctcccagcccggagcagccggggccgttcgtgccgtcgccgccgaggccggagatcccgaccgtgccgccgaaccccgacgtgatcccgccgccgccgccggaggtggatccgccgcgcgccccgcccgaggtggtacctccgcagccgtccgacgtcccgcctcccttggtgtgagtaagcgcgcgcagtgcccccggccacgacggtgacccgagatccgctgtaaaatagcgtagtagtaatatgtgcaactagcttccagctgcttcaaataaaataaagaggattggccgcggcgccctgttccggtgtaaattttgtcacggatgataacatgaatcttgtcacaaaaaaaaaaaaaaaa

SEQ ID NO: 2822 - protein, 173 aa, Triticum aestivum
  misc_feature: Ceres CLONE ID no. 685668
  misc_feature: Ceres CDNA ID no. 25892453
  misc_feature: Homolog of GI Number: 50400027 NR Desc: putative hydroxyproline
  misc_feature: Homolog of GI Number: 6523547 NR Desc: hydroxyproline
  misc_feature: Homolog of GI Number: 27371271 NR Desc: Sf3a2
  misc_feature: Homolog of GI Number: 12018149 NR Desc: gamete
  misc_feature: Homolog of GI Number: 49250573 NR Desc: MGC69562 protein
  misc_feature: Homolog of GI Number: 41400384 NR Desc: plus agglutinin
  misc_feature: Homolog of GI Number: 76262500 NR Desc: pherophorin
  misc_feature: Homolog of GI Number: 76262498 NR Desc: pherophorin
  misc_feature: Homolog of GI Number: 12018147 NR Desc: vegetative cell wall protein gp1
MSVSLVRASLPAWCTAAAAGSSGLRSRLRGTACSGRRVGVRCSSTTPPGFPPGPTPPGFPAVPSPEEVPGTARPPEEMPGTARPPQEMPGIDTPPEFNAPPGVDVPMPGAPVPGTPPSPEQPGPFVPSPPRPEIPTVPPNPDVIPPPPPEVDPPRAPPEVVPPQPSDVPPPLV

SEQ ID NO: 2823 - DNA, 1049 bp, Triticum aestivum
  misc_feature: Ceres CLONE ID no. 685789
  misc_feature: Ceres CDNA ID no. 24766298
  CDS (344)..(703): REFERENCED BY SEQ ID NO: 2824
atataaaaaaagaaaagaaaaagcgagcctccttccccgagcgcgagatctagggttcatagtagccgccggcccaccgccgcggctcgcccagtcggccgaagcctccgctgcccggccgcaggtacaggatcccaacagcgcttcgctccgtcgggcagccgttcccaccagcagcgcctccctccctggagcaggcgctcccgcccagcaacgccgccgcccggagcaacgccgccgaccagcccattggcagggcatcaagattgtcaattggaggggcttggagctgctccagcatccacagtagagcaaacaagaaggagccaggtgttgattggagatgaatgcccctgaccgctatgagcgcttcgtcgtgcctgagggcacaaagaaggtgtcctttgagaaggatacaaagatcatgaatgctgcatctttcacaattgaacgtgaggaccacaccattggcaacatcctccgcatgcagctgcacagggacccaaatgttctctttgctggctataagctgcctcacccccttcagtacaagatcattgttaggatccatactgcaagccaatcctccccaacgcaggcgtatacccaagcaatcaatgatctagacaaggagctcgagaacctgaagcaagcttttgaggacgagaagacgcgattcgaaaggatgaagcagggctactaggccgctggtgttggatgctaattaacgtgaaatccttgctagtttatatctgatgtctgaactgcggtagaaagaaaagaactcaaggattgtcgatgagtctgaactcgtagagtatctgcatgtgcgaccgggattgcgtatgattgtacacttgatgcgcctgctagctgaattgctcgctcttgtgaggttggatagagggtacggaccgagtttgaagcagtccttggatcattttgtactgtactacatgaattttatgccaatgtaatgtaaccaacttaaacgggtaaaaaaaaaaaaaaaaaaaaaaaaaaaaaaaaaaagaaaaaaaaaaaaaaaa

SEQ ID NO: 2824 - protein, 119 aa, Triticum aestivum
  misc_feature: Ceres CLONE ID no. 685789
  misc_feature: Ceres CDNA ID no. 24766298
  misc_feature (29)..(103): Pfam Name: RNA_pol_L PFAM Desc: RNA polymerase Rpb3/Rpb11 dimerisation domain
  misc_feature: Homolog of GI Number: 50934495 NR Desc: putative DNA
  misc_feature: Homolog of GI Number: 29029080 NR Desc: At3g52090
  misc_feature: Homolog of GI Number: 73957788 NR Desc:  similar to RAS p21 protein activator 4
  misc_feature: Homolog of GI Number: 11595485 NR Desc: RPB11a protein
  misc_feature: Homolog of GI Number: 6755362 NR Desc: polymerase
  misc_feature: Homolog of GI Number: 34873368 NR Desc: similar to DNA
  misc_feature: Homolog of GI Number: 76653872 NR Desc:  similar to DNA
  misc_feature: Homolog of GI Number: 54644890 NR Desc: GA19897
  misc_feature: Homolog of GI Number: 33359678 NR Desc: RNA polymerase II subunit
  misc_feature: Homolog of GI Number: 62088376 NR Desc: MGC13098 protein variant
MNAPDRYERFVVPEGTKKVSFEKDTKIMNAASFTIEREDHTIGNILRMQLHRDPNVLFAGYKLPHPLQYKIIVRIHTASQSSPTQAYTQAINDLDKELENLKQAFEDEKTRFERMKQGY

SEQ ID NO: 2825 - DNA, 613 bp, Triticum aestivum
  misc_feature: Ceres CLONE ID no. 685878
  misc_feature: Ceres CDNA ID no. 40351171
  CDS (174)..(344): REFERENCED BY SEQ ID NO: 2826
atccgcaaggccatcgatcggcaaagtttcgcaagtgtacaagtgagcccagcaagtgaagcctgccaggctatatagaaaacccggcgccctcgcgacccgacctcctcattctagccaggcgagagcaaaaggtagggtttccagttgcaagccgccccgccgccgccgccatgggacactcgaacgtctggaactcgcaccccaagaactacggccccggatccagggtttgccgtctctgcggcaactcgcatggcctgatccgcaagtacgggctgatgtgctgcaggcagtgcttccgcagcaacgccaaggacatcggcttcatcaagtaccgttaagaatggaaacctcaaaggaagcaagggctaggaaattatcaacgaactgtggtgcttcatcaagtctgatctttatcctataagctatgtaatgaactactattaatgtttgaatcctggtgacaaaaccatgaaaccatgttagtgactgctgtttgagcatgtgaaaccgataattctgttcctgtcgtgccattatggttagaaggttgctctgcatccttatatttttattattttgtgaaggccggtcaaaaaaaaaaaaaaaa

SEQ ID NO: 2826 - protein, 56 aa, Triticum aestivum
  misc_feature: Ceres CLONE ID no. 685878
  misc_feature: Ceres CDNA ID no. 40351171
  misc_feature (3)..(56): Pfam Name: Ribosomal_S14 PFAM Desc: Ribosomal protein S14p/S29e
MGHSNVWNSHPKNYGPGSRVCRLCGNSHGLIRKYGLMCCRQCFRSNAKDIGFIKYR

SEQ ID NO: 2827 - DNA, 467 bp, Triticum aestivum
  misc_feature: Ceres CLONE ID no. 685945
  misc_feature: Ceres CDNA ID no. 40351172
  CDS (366)..(467): REFERENCED BY SEQ ID NO: 2828
atccaatctcgtttccaaggaaggaaggaagaaaatccagagaaactccagagggggcaccagaactcgctggagatgatgccgctcttcttcgtcacggtgctgctcggtggcctgcagcacccggtggtcgccgccgcgctgggggtcctctacacagtcgccaggttcttctacttcaagggctacgccaccggcgtcccggacaaccgcctcaagcttggggggctcaacttcttggcgatcatcgggctgatcctctgcacggcgtccttcggcatcaaccttgtcatcagggaggcgatctgaggctccggactgatgtgcctgacttgataggcgtttgtgactcgagtcatttagacatggcggtggtgtcttttatagtgtccaaaaatgtgtgtgcctctgttttactctcacagaataaagctagatggagacggtttgtaaaaaaaaaaaaaaaa

SEQ ID NO: 2828 - protein, 77 aa, Triticum aestivum
  misc_feature: Ceres CLONE ID no. 685945
  misc_feature: Ceres CDNA ID no. 40351172
  misc_feature (1)..(69): Pfam Name: MAPEG PFAM Desc: MAPEG family
MMPLFFVTVLLGGLQHPVVAAALGVLYTVARFFYFKGYATGVPDNRLKLGGLNFLAIIGLILCTASFGINLVIREAI

SEQ ID NO: 2829 - DNA, 821 bp, Triticum aestivum
  misc_feature: Ceres CLONE ID no. 685953
  misc_feature: Ceres CDNA ID no. 40041297
  CDS (80)..(562): REFERENCED BY SEQ ID NO: 2830
accataccatcgacgcggcaagtcggccggcagcaccccatcaaaagcacacaacctcgagccggaacacgagcccacgatggccggcgttcgccgcgccgctgcgctcctcctgctgctcggcctcgcgtgcacccccgccctggccgcgcgtgacgccgcccaggcgaagcccaagcacccctcgggcccggcggccggcaagaagccggccaagccgtacgtgccgccggccaccaagcccccggggtcgggcggcgtcggcggcggaggcgggatgccgaacatcccgggcatcggcaccatcccggggttcaccgtgcccgggatggggggcgggtggggcgggggctacggcgggcccgacggcgggtactcgcgcggcggcgtggtggcctccaccaccgtctgctccgagaagggcccctgctacaagaagaagctgacgtgccccaagaagtgcttctcctcatacagcggctccggcaaggggtacggcggcggcggcggcgggggcggctgcaccgtcgactgcaagaccaagtgcatcgcctactgctgaatgccgatcgatcgtacgtacgtacggggagctcggcggctccttggcttccatggtcatcgatggcgccggtgagcaccgcattatacatagctagcatgcgtgatatgcagaggaggcgtgcatacgactatgtgaacgtatgtttcttccccgatgattttatcagctgtaatatcgtcgcctcctgggtgtcagaatcgctatgaactatgaacaaataagcagagagatatgcatggcaaaaaaaaaaaaaaaa

SEQ ID NO: 2830 - protein, 160 aa, Triticum aestivum
  misc_feature: Ceres CLONE ID no. 685953
  misc_feature: Ceres CDNA ID no. 40041297
  misc_feature (1)..(148): Pfam Name: GRP PFAM Desc: Glycine rich protein family
  misc_feature: Homolog of GI Number: 54291465 NR Desc: putative glycine rich protein
  misc_feature: Homolog of GI Number: 67987177 NR Desc: 4Fe
  misc_feature: Homolog of GI Number: 21322752 NR Desc: cold shock protein
  misc_feature: Homolog of GI Number: 77820010 NR Desc: phenylalanine ammonia lyase
  misc_feature: Homolog of GI Number: 42391853 NR Desc: cold shock domain protein 2
  misc_feature: Homolog of GI Number: 19743 NR Desc: nsGRP
  misc_feature: Homolog of GI Number: 42391858 NR Desc: cold shock domain protein 3
MAGVRRAAALLLLLGLACTPALAARDAAQAKPKHPSGPAAGKKPAKPYVPPATKPPGSGGVGGGGGMPNIPGIGTIPGFTVPGMGGGWGGGYGGPDGGYSRGGVVASTTVCSEKGPCYKKKLTCPKKCFSSYSGSGKGYGGGGGGGGCTVDCKTKCIAYC

SEQ ID NO: 2831 - DNA, 1370 bp, Triticum aestivum
  misc_feature: Ceres CLONE ID no. 686008
  misc_feature: Ceres CDNA ID no. 25446982
  CDS (139)..(1236): REFERENCED BY SEQ ID NO: 2832
acccgcgacgaattccgcaaggagagaacgcgaaatatagatccgccgtgaaggcccaacggcggctcaccgaaacccggggccgccgccggcgctcgcacccgaagcccccactccgcacgggcagtccaggcagagatggtggcgatctcgatgtaccgcggcaacctccaccggggcggggacgacgccgcgcgccgctggccggtgcccccacccacgctctccgcgtcccagttccgccgcctcctccaccgccggtccctcgccgtctcccgcctcgccggggctccccggcccaactcccccaactcccgcccggacgacggcgccgcggggcccgtggccgtgggggaggcgccggaggtggacgggggtcagcagcagcatcaggccgagcggcaggaggaggaggggcatgatgtgcagatgcagcagcagcagcagcagggggaggaagaggggcagggtgtgcaggatcaacagggggagggagatggccaagacgagcagcagcaaggagatgaggaggagcaggaggagggggcggtggaggatgtggaaatggacgatgcgggggaggtggtcgccggagatgctgatgccggcggcaatggtgaccctgaagaagggcaaggcgaaagcgaaggcttcgaccccaactcggaggtgggtcaacctgatggagttgaagaaaggaagagagagttgactgacaagctggataccttaagtaagaaaaagcatgatcttgtgcagatgctgaagcagattttaaatgccgaagaagaaatcagaacacgtagcatgcaggtttcgctgcgtgctgccatgcctcagccgccagaaaacacagctgatggaagtgttcctagacaggtgccgagaatgaccgttgatgtcaatttcagcgagtttgctggggagtcagatgctggttccaaccagggcactcctgggcgccccttgcatcatgtccacagtatttctccttcaacagcctcctttgctaggtctccattcggttctcgcaaccacaaacctcgcaacactccaagaagtccagcacctttctctacagcaagcccgtctcgcttcgcaggtaccgggcatcaaggacaccacccctcggcatcattaccagcaggcaactttgtagcatcgtcgccttcccctgctgcatccggtggctcttcctctgtattcagggactatcgcccgcccagttcaacataattccacaaaacccgaatgaaggccaatgtacatgagtcaccctgaatagtttgaatgctctttgtgctcctccttgcattgttactttattgacaatattatcagattgcgaagagcaaaaaaaaaaaaaaaaa

SEQ ID NO: 2832 - protein, 365 aa, Triticum aestivum
  misc_feature: Ceres CLONE ID no. 686008
  misc_feature: Ceres CDNA ID no. 25446982
  misc_feature: Homolog of GI Number: 55775280 NR Desc: putative glycine
  misc_feature: Homolog of GI Number: 1166450 NR Desc: Tfm5
  misc_feature: Homolog of GI Number: 61658797 NR Desc: RPGR
  misc_feature: Homolog of GI Number: 929566 NR Desc: fibrillarin
  misc_feature: Homolog of GI Number: 1469223 NR Desc: glycine
  misc_feature: Homolog of GI Number: 259443 NR Desc: glycine
  misc_feature: Homolog of GI Number: 29829093 NR Desc: putative translation initiation factor IF
  misc_feature: Homolog of GI Number: 7270576 NR Desc: putative glycine
  misc_feature: Homolog of GI Number: 54026037 NR Desc: putative translation initiation factor IF
  misc_feature: Homolog of GI Number: 24652652 NR Desc: CG13214
MVAISMYRGNLHRGGDDAARRWPVPPPTLSASQFRRLLHRRSLAVSRLAGAPRPNSPNSRPDDGAAGPVAVGEAPEVDGGQQQHQAERQEEEGHDVQMQQQQQQGEEEGQGVQDQQGEGDGQDEQQQGDEEEQEEGAVEDVEMDDAGEVVAGDADAGGNGDPEEGQGESEGFDPNSEVGQPDGVEERKRELTDKLDTLSKKKHDLVQMLKQILNAEEEIRTRSMQVSLRAAMPQPPENTADGSVPRQVPRMTVDVNFSEFAGESDAGSNQGTPGRPLHHVHSISPSTASFARSPFGSRNHKPRNTPRSPAPFSTASPSRFAGTGHQGHHPSASLPAGNFVASSPSPAASGGSSSVFRDYRPPSST

SEQ ID NO: 2833 - DNA, 1579 bp, Triticum aestivum
  misc_feature: Ceres CLONE ID no. 686030
  misc_feature: Ceres CDNA ID no. 24766301
  CDS (3)..(1292): REFERENCED BY SEQ ID NO: 2834
aggacaccgcggacggagagcgtcaggtcctcccccgctccgctcatcttgggaaggaagcaaagcagagccgcgccgccgaggaggatatggccgaggccgacgacgccgccgccgcccgccggcgcacggtcatcacggagtaccgcaacaagctcctgaactgccgcgagctggagacgagggtccgcacaggtagggaaaacctaaagaaggcgaagaaagattacgatataactgaagatgatttgaagtccttgcagagtgtgggccaaatcattggtgaagtacttcgaccattggacagtgaaagatttatcgtcaaagccagtagtggcccacgttatgtggttggctgcagaagcaaagttgacaaagaaaagctgacagctgcaacacgagttgtccttgacatgacaacattaacaataatgcgcactctaccacgtgaggttgatcccgtggtctataacatgctacacgaagaccccggcaatgtcagttactcagctgtaggtggactgtcggatcaaataagggagctgcgggagtccatcgagttacctcttatgaatccagaattgtttcttcgtgttgggattaaaccaccaaagggcgttctgctctatggcccacctggaacgggaaagacattgcttgctagagccattgctagcaacatcgatgctaactttttaaagattgtttcaagtgctatcattgacaaatatattggtgaaagtgcacgtcttataagagaaatgtttaactatgcacgtgagcatcaaccatgtattattttcatggatgagattgatgccattggtggccgaagattcagtgagggcactagtgcagatcgtgaaatacaacggacattgatggagctcctaaatcagttggatggattcgatgagctcggaaaggtgaagatgatcatggcgacgaaccggcctgatgtcttggaccctgcgctccttcgtcctggacgcctagaccggaagatagagattccgctgccgaatgagcaatccaggacggaggtcctgaaaatccatgcagctggtatcgccaagcatggcgaaattgattacgaggctgtggttaagctggccgagggcttcaatggcgctgatcttcgcaatgtctgcactgaggctggcatggccgccattcgagcagagcgtgactacgtcatccacgaagacttcatgaaggcagttcggaagttgaatgacgccaagaagctcgagtccagcgcacactacagcgccgactttggcaaggactaagatgagagtaggagactatcaggcgacgcgctgtctgttttcttgtaccatggcggagtttgtcacaccgaccccgacgatatagaacatcatgtgtttctaccttttatatgttgtgggacgactgcctttgccgcgcaagttgatgtaatgaaaagttgaaacaggtctgaaaccgactggtttcttagatttacaaaattgtttccttcaagttactgtgccttgattgtggaatcaaaaaaatgtggaaacattcgcgatttcttccaaaaaaaaaaaaaaaa

SEQ ID NO: 2834 - protein, 400 aa, Triticum aestivum
  misc_feature: Ceres CLONE ID no. 686030
  misc_feature: Ceres CDNA ID no. 24766301
  misc_feature (177)..(194): Pfam Name: Sigma54_activat PFAM Desc: Sigma
  misc_feature: Homolog of GI Number: 9758590 NR Desc: 26S proteasome AAA
  misc_feature: Homolog of GI Number: 24745880 NR Desc: 26S proteasome AAA
  misc_feature: Homolog of GI Number: 21387177 NR Desc: 26S proteasome AAA
  misc_feature: Homolog of GI Number: 50906039 NR Desc: 26S proteasome regulatory particle triple
  misc_feature: Homolog of GI Number: 17298147 NR Desc: 26S proteasome regulatory particle triple
  misc_feature: Homolog of GI Number: 46228795 NR Desc: 26S proteasome regulatory subunit S10b like AAA+ ATpase
  misc_feature: Homolog of GI Number: 55233942 NR Desc: ENSANGP00000017473
  misc_feature: Homolog of GI Number: 31242591 NR Desc: ENSANGP00000017473
  misc_feature: Homolog of GI Number: 66501020 NR Desc:  similar to ENSANGP00000017473
  misc_feature: Homolog of GI Number: 17945503 NR Desc: RE23388p
  misc_feature: Useful for making plants with increased biomass and foliage
MAEADDAAAARRRTVITEYRNKLLNCRELETRVRTGRENLKKAKKDYDITEDDLKSLQSVGQIIGEVLRPLDSERFIVKASSGPRYVVGCRSKVDKEKLTAATRVVLDMTTLTIMRTLPREVDPVVYNMLHEDPGNVSYSAVGGLSDQIRELRESIELPLMNPELFLRVGIKPPKGVLLYGPPGTGKTLLARAIASNIDANFLKIVSSAIIDKYIGESARLIREMFNYAREHQPCIIFMDEIDAIGGRRFSEGTSADREIQRTLMELLNQLDGFDELGKVKMIMATNRPDVLDPALLRPGRLDRKIEIPLPNEQSRTEVLKIHAAGIAKHGEIDYEAVVKLAEGFNGADLRNVCTEAGMAAIRAERDYVIHEDFMKAVRKLNDAKKLESSAHYSADFGKD

SEQ ID NO: 2835 - DNA, 1217 bp, Triticum aestivum
  misc_feature: Ceres CLONE ID no. 686120
  misc_feature: Ceres CDNA ID no. 24766302
  CDS (206)..(958): REFERENCED BY SEQ ID NO: 2836
agacagacagagaaaaaaaaaacccagagaaagagatcgagaccctctccaccctccttccccatccccgtcgtcgctcttcgattccgccggcgatccgtgccacagtctagccggaggagaggcgagcagcagggggagcgcgtgcggtctagcgggggctagggtttcctcgcgtgtgagggacgggagaggaggagcagggatggcgcaggcggtggaggagtggtaccggcagatgcccatcatcacgcgctcctacctcaccgccgccgtcctcaccaccgtcggatgcaccctcgagatcatctcgccctaccacctgtacctgaaccccaagctggtggtgcagcactacgagatctggcgcctcgtcaccaacttcctctacttccgcaagatggatttggatttcctgttccacatgttttttcttgcgcgctactgcaaacttctcgaggagaactcattcaggggaagaacagctgactttttctacatgctcttgtttggtgctactgtcctaaccagcatcgttctgattggtgggacaataccttacatttctgagacgtttgccaggattctgttcctcagcaattcattgacgtttatgatggtttatgtctggagcaagcacaatcccttcattcacatgagcttcttgggtctgttcaccttcactgctgcctacttaccttgggtccttcttggcttctctattctggtggggagcagcacatgggttgatcttttgggtatgattgctggccatgtgtattacttcctggaagacgtgtaccctcggatgacgggccgtcgccccctgaagaccccttccttcatcaaggcgctgttcgccgacgacaatgtggtcgtggcggcgcggccccccaacgctggtgtcgcggctgcaaggtttggtggtgtgggtgcagcagacccccagttccagtgatggtctacatgcagtttgttggatataattttgtacacccgtgtccgtgatgatatgtgcaaaaatacatagagagtataattctcagttaggggttgggcttgatgccaatgcgctgctaaccaaagtgtatgtagctgggctcgtgaagccgtctggttgttggttaactttgacttaacgtacttgtctcatcttgcgtggcaccttcgttaattaggcgaaaaaacacgctgaagcctcaaaaaaaaaaaaaaaa

SEQ ID NO: 2836 - protein, 250 aa, Triticum aestivum
  misc_feature: Ceres CLONE ID no. 686120
  misc_feature: Ceres CDNA ID no. 24766302
  misc_feature (12)..(212): Pfam Name: DER1 PFAM Desc: Der1
  misc_feature: Homolog of GI Number: 50920135 NR Desc: putative Der1
  misc_feature: Homolog of GI Number: 64500980 NR Desc: derlin2
  misc_feature: Homolog of GI Number: 64501151 NR Desc: derlin2
  misc_feature: Homolog of GI Number: 64501116 NR Desc: derlin2
  misc_feature: Homolog of GI Number: 22328865 NR Desc: Der1
  misc_feature: Homolog of GI Number: 72015515 NR Desc:  similar to carcinoma related gene
  misc_feature: Homolog of GI Number: 72141015 NR Desc:  similar to carcinoma related gene
  misc_feature: Homolog of GI Number: 50758070 NR Desc:  similar to carcinoma related gene
  misc_feature: Homolog of GI Number: 55238002 NR Desc: ENSANGP00000001887
  misc_feature: Homolog of GI Number: 31219425 NR Desc: ENSANGP00000001887
MAQAVEEWYRQMPIITRSYLTAAVLTTVGCTLEIISPYHLYLNPKLVVQHYEIWRLVTNFLYFRKMDLDFLFHMFFLARYCKLLEENSFRGRTADFFYMLLFGATVLTSIVLIGGTIPYISETFARILFLSNSLTFMMVYVWSKHNPFIHMSFLGLFTFTAAYLPWVLLGFSILVGSSTWVDLLGMIAGHVYYFLEDVYPRMTGRRPLKTPSFIKALFADDNVVVAARPPNAGVAAARFGGVGAADPQFQ

SEQ ID NO: 2837 - DNA, 885 bp, Triticum aestivum
  misc_feature: Ceres CLONE ID no. 686190
  misc_feature: Ceres CDNA ID no. 36582374
  CDS (120)..(677): REFERENCED BY SEQ ID NO: 2838
aagatagagacagagcacaaagcgtcgtcttcttctcctcggcggcggcggcgaaaggcgaacgagcgaggaaccctaaccctaactctaaccagttccgatccgcaaggcctgcgtcgatggcggcttccctccgcgcggcggcgacgaggatgctgcgcccggcggtgcttccaggggaggggcgtcgcctgctcgtccacacccagcagctttccaaatcaaccctcgccttggaggaggaacactgtccgcctctaatccagcagagggaccaggtgtacctcgagctttcgaaatccttgaaggagaaacaccgtgcagagctagttgagcagaagaaggaggagctgtacgaactcctcgccaacgcccacgctaattccgcggcctcctcgctggacaagaatctgctcaaggatctctctacacaaatcaagcctagactagaggacccccaatggtgcaagataactagaaacaagaaggtgactgatttggctgcgtcggtggttattcttgctacttctgctctcacttactgtgccttgacagctggtcctgaaatagtaaagtatgatggacatcttgttactgttcagagtctgcccattctacaaggacatgagcctgctgctactgctaagggagttcacaagcaagatgtgcagaagtgaaggagttgaagaagagatgcatcttgttttgacggagaagaaacagatatcagttcttttccagcaccatgttatgtatgtctcttgaaatgactgtatatggtctgccacctatatatgtcttgtctatgatctgccacctatatatgactatgatctgccacctttatatatgatatgacttcgtagtgcaaaaaaaaaaaaaaaa

SEQ ID NO: 2838 - protein, 185 aa, Triticum aestivum
  misc_feature: Ceres CLONE ID no. 686190
  misc_feature: Ceres CDNA ID no. 36582374
MAASLRAAATRMLRPAVLPGEGRRLLVHTQQLSKSTLALEEEHCPPLIQQRDQVYLELSKSLKEKHRAELVEQKKEELYELLANAHANSAASSLDKNLLKDLSTQIKPRLEDPQWCKITRNKKVTDLAASVVILATSALTYCALTAGPEIVKYDGHLVTVQSLPILQGHEPAATAKGVHKQDVQK

SEQ ID NO: 2839 - DNA, 1476 bp, Triticum aestivum
  misc_feature: Ceres CLONE ID no. 686235
  misc_feature: Ceres CDNA ID no. 24766136
  CDS (150)..(1172): REFERENCED BY SEQ ID NO: 2840
aggtatcgtgcacttcactcgcttggcatttcgtcacgtctcttccttcctttctcagttccccgcagccgcttcgctcgcttgccttctctcgccgtctccgcctcctcctccagtcctccgtcccacccctcgacgattcctcggcgatgggcggcgcggcggcggcgacgggcgccgccaggtggatccagcggctgagcgcggccaggatctcgacggaggcgctggagcggggccagagccgcgtcatcgacgcctccctcaccctcatccgcgagcgcgccaagctcaagggcgagctgctgcgtgctatgggcggtgtcaaagcttctgcaacactcttaggagtaccccttgggcacaactcgtctttcttgcaggggcctgcgtttgctcctcctcgcataagggaggccatttggtgtggaagcaccaactctagcacagaagaaggcaaggaattaaatgatccaagggtgctaactgatgtcggtgatgtccccatacaagagattcgtgactgtggtgttgaagatgacagattgatgcatgtaatcagcgagtctgtcaaaacagtaatggacgaagatcctcttcggccgttggtcttaggaggcgatcactcgatatcttatccagttgttagggctgtgtctgaaaagcttggcggacctgttgacattcttcatcttgacgcacatccagatatctatgactgttttgaaggcaacacttactcacacgcttcttcatttgcaagaataatggaaggaggttatgcgaggcgacttttgcaggttggacttagatcaattaccaaagaaggacgtgagcaagggaagagatttggtgtggaacagtatgagatgcgcaccttctccagagatcgggagaagcttgagaatctgaaacttggggaaggtgtgaagggggtgtatgtctccgttgacgtggactgcctcgaccccgcattcgctcctggcgtgtctcatatcgagccgggaggcctctcatttcgcgacgtgctcaacatcctccagaatctgcaaggcgatgtcgtcgccggagatgtggtggagttcaacccgcagcgcgacacggtcgacgggatgacggctatggtcgccgcgaagctggtccgggagctgagcgccaagatctcaaaatgagcagcgacagtcaggacagaggcagcagcagagaggattttcaggcacagtggtcgttgatcttagttcctgccaatcattcagttgtgccacgttttagtctgacaatcttctataaataataaaatcaggctgcaaaacgacttcgaatttggtatgtgctctgtggtatttgttggttctcctttcacatgcacgcatccaagattaagctcgtaggtgcctagtagtcgataagaacatcgtctctcacgcaaaggatatgttgaaaaatctgaaatgaatttgaaaaaaaaaaaaaaaa

SEQ ID NO: 2840 - protein, 340 aa, Triticum aestivum
  misc_feature: Ceres CLONE ID no. 686235
  misc_feature: Ceres CDNA ID no. 24766136
  misc_feature (59)..(339): Pfam Name: Arginase PFAM Desc: Arginase family
  misc_feature: Homolog of GI Number: 54648780 NR Desc: arginase 1
  misc_feature: Homolog of GI Number: 54648782 NR Desc: arginase 2
  misc_feature: Homolog of GI Number: 7267532 NR Desc: arginase
  misc_feature: Homolog of GI Number: 13182957 NR Desc: arginase
  misc_feature: Homolog of GI Number: 12802155 NR Desc: arginase
  misc_feature: Homolog of GI Number: 21592908 NR Desc: putative arginase
  misc_feature: Homolog of GI Number: 7488699 NR Desc: probable arginase
  misc_feature: Homolog of GI Number: 79325029 NR Desc: agmatinase/ catalytic
  misc_feature: Homolog of GI Number: 68537921 NR Desc: Arginase/agmatinase/formiminoglutamase
  misc_feature: Homolog of GI Number: 82403044 NR Desc: Putative agmatinase
MGGAAAATGAARWIQRLSAARISTEALERGQSRVIDASLTLIRERAKLKGELLRAMGGVKASATLLGVPLGHNSSFLQGPAFAPPRIREAIWCGSTNSSTEEGKELNDPRVLTDVGDVPIQEIRDCGVEDDRLMHVISESVKTVMDEDPLRPLVLGGDHSISYPVVRAVSEKLGGPVDILHLDAHPDIYDCFEGNTYSHASSFARIMEGGYARRLLQVGLRSITKEGREQGKRFGVEQYEMRTFSRDREKLENLKLGEGVKGVYVSVDVDCLDPAFAPGVSHIEPGGLSFRDVLNILQNLQGDVVAGDVVEFNPQRDTVDGMTAMVAAKLVRELSAKISK

SEQ ID NO: 2841 - DNA, 714 bp, Triticum aestivum
  misc_feature: Ceres CLONE ID no. 686262
  misc_feature: Ceres CDNA ID no. 25445797
  CDS (101)..(385): REFERENCED BY SEQ ID NO: 2842
atcgatcattggctcgagctcgagcgccagcagttgcatacaccacacacgcatccacacgtccgtttcaggaaccttagcggtcgagcacctgttagcaatggcgtccggtcaggagaaggggaggtcggagctggacagcttggcccgcgaggggcagaccgtcgtccccggcggcaccggcgggaagagctacgaggcgcaggagaaactcgctgaagggcgcagccgtggtgggcagactcggaaggagcagatgggggaggaggggtacagcgagatggggcgcaagggcgggctgagcaccaacgacgagtccggcggcgagcgcgccgccagggagggcatcgacatcgacgagtccaagttcaagaccaagtcctagatgttcagttcagtgcctagcttagcaaagcaactgactgctcgctcttgtttggatgtagtccgttcagcgtgtcccaggtactgaataatgtaggtcgtcaggtactcggatcttgacgtgagcacgcatgtactaggtgatcatgtgtaccgtgatcgtgtgtgctttagtgtcccagctagcttctgctagctagtagtaggtgtcgttgtaagttgtgaccaagctaggctgttgctctctgtaatgtagtgcgtctgtctgtttgttatgaatctgaatctccgtctgtgtgcaatgttcgctcagcaaaaaaaaaaaaaaaa

SEQ ID NO: 2842 - protein, 94 aa, Triticum aestivum
  misc_feature: Ceres CLONE ID no. 686262
  misc_feature: Ceres CDNA ID no. 25445797
  misc_feature (1)..(94): Pfam Name: LEA_5 PFAM Desc: Small hydrophilic plant seed protein
  misc_feature: Homolog of GI Number: 295844 NR Desc: Em
  misc_feature: Homolog of GI Number: 48596911 NR Desc: embryonic abundant protein
  misc_feature: Homolog of GI Number: 4007842 NR Desc: Em protein
  misc_feature: Homolog of GI Number: 55168200 NR Desc: LEA 1
  misc_feature: Homolog of GI Number: 312519 NR Desc: Em protein
  misc_feature: Homolog of GI Number: 7594649 NR Desc: Early
  misc_feature: Homolog of GI Number: 1345529 NR Desc: gB19.1b
  misc_feature: Homolog of GI Number: 19013 NR Desc: LEA B19.1
  misc_feature: Homolog of GI Number: 4007844 NR Desc: Em protein
  misc_feature: Homolog of GI Number: 126076 NR Desc: Late embryogenesis abundant protein D
MASGQEKGRSELDSLAREGQTVVPGGTGGKSYEAQEKLAEGRSRGGQTRKEQMGEEGYSEMGRKGGLSTNDESGGERAAREGIDIDESKFKTKS

SEQ ID NO: 2843 - DNA, 1237 bp, Triticum aestivum
  misc_feature: Ceres CLONE ID no. 686267
  misc_feature: Ceres CDNA ID no. 24766137
  CDS (187)..(936): REFERENCED BY SEQ ID NO: 2844
aaacacaactcgtgcccgtccgtcccggcggctctctcaaacccacactccccaccttcttgcggcacaagccggagccgacgatccccccacccgcgccgccgtcgacgcggcctcctccgcccgccgggatcggagagaactgtataaacgttttagtggttgaagcgacttgagtctttaaccatgagtagcattggaaccgggtatgatctgtccgtcaccactttttccccggacggccgtgtcttccaggtcgagtatgctggcaaggccgtcgacaacagcgggacgattgttgggatcaagtgcaaagatggaattgtcctcggtgtggagaagctgataacgtcgaagatgatacttgctgggtcgaatcggagacttcactctgttcaccggaactctggcttggctgtggctgggttagcagcagacggtaggcaggtggtctcaagagcaaagtcagaagcagccaattatgaaaaggtatacggagaacccatgcctgtgaaggaattagctgatcgtgtagctagctacgttcatctgtgtacactctactggtggctcaggccttttggctgtggagttattcttggaggttatgatagggatgggccacagctctacatgatcgaaccttcagggctctcatataaatattttggtgctgctctgggtaaaggaagacaggctgcaaaaacggagatagagaaattgaagctttctgagctaacctgcagggaaggcattgttgaggttgccaagataatttatggtgtacacgacgaagcgaaagacaaatcttttgagctggaactgagctgggtgtgcgatgaatctaaccgtcagcatgagaaggttccaaatgatcttctggagcaggccaaggcagcagcgcaggcagcgttggaagagatggatgccgactaagaagagaccatgagctctgcttcccatttacttctacgtgcggcataacagatacaggagtggagcggtttgtttccagtgcaaaaaaactaccttcagggcgttgttgcttccagttccatgattccatcccagtcgaggtagcaagcaggttctcgtgttttggggggttgtagtgaatcgtattctccttgctgttggtcacacactgaatcttaatctattgaattccgaacatatttgtcacatatcttaatcacgcgtggcctaagagataaaaaaaacaaaaaaaaaaaaaaaa

SEQ ID NO: 2844 - protein, 249 aa, Triticum aestivum
  misc_feature: Ceres CLONE ID no. 686267
  misc_feature: Ceres CDNA ID no. 24766137
  misc_feature (31)..(216): Pfam Name: Proteasome PFAM Desc: Proteasome A
  misc_feature: Homolog of GI Number: 50931867 NR Desc: putative proteasome subunit alpha type 3
  misc_feature: Homolog of GI Number: 34909168 NR Desc: proteasome subunit alpha type 3
  misc_feature: Homolog of GI Number: 14594925 NR Desc: putative alpha7 proteasome subunit
  misc_feature: Homolog of GI Number: 7435886 NR Desc: 26S proteasome alpha chain
  misc_feature: Homolog of GI Number: 21617882 NR Desc: 20S proteasome subunit C8
  misc_feature: Homolog of GI Number: 2511592 NR Desc: multicatalytic endopeptidase complex
  misc_feature: Homolog of GI Number: 1809142 NR Desc: multicatalytic endopeptidase subunit C8
  misc_feature: Homolog of GI Number: 60475221 NR Desc: proteasome C8
  misc_feature: Homolog of GI Number: 20810439 NR Desc: Proteasome alpha 3 subunit
MSSIGTGYDLSVTTFSPDGRVFQVEYAGKAVDNSGTIVGIKCKDGIVLGVEKLITSKMILAGSNRRLHSVHRNSGLAVAGLAADGRQVVSRAKSEAANYEKVYGEPMPVKELADRVASYVHLCTLYWWLRPFGCGVILGGYDRDGPQLYMIEPSGLSYKYFGAALGKGRQAAKTEIEKLKLSELTCREGIVEVAKIIYGVHDEAKDKSFELELSWVCDESNRQHEKVPNDLLEQAKAAAQAALEEMDAD

SEQ ID NO: 2845 - DNA, 2172 bp, Triticum aestivum
  misc_feature: Ceres CLONE ID no. 686357
  misc_feature: Ceres CDNA ID no. 24766138
  CDS (90)..(1694): REFERENCED BY SEQ ID NO: 2846
ctcccgttcccctttttcgaatcgagcccaaccgcatcgtgcgtgcgcacccccactcctcccccctagggtttcgaggttctccgacgatgtcgctgcggcccaacgagcgggccgaggtgcggcgcagccgctacaaggcgtccgtcgacgccgaggacgggcgccggcggcgggaggatcagatggtggagatccggaagaatcagcgcgacgcgaacctccagaagaagcgccgcgacgggttcccggccggcgccgcgtccgctgccggtggcgcgccgcagatgggccactcctcggctctccagcagaagctggagggcttgcccgcgatggtgcaggcggttctctcggacgacaacgccgtgcagctcgaggccaccacccagttccggaagctgctctccatcgagcgaagccctccaattgaggaagtgatcaacacaggcgtggtgcctcgcttcattgagttcctcacacgggaggactatccccaactccagtttgaggctgcatgggcgctcaccaacatcgcgtcaggcacatcagacaacaccaaagtggtggttgagtatggtgctgtgcccatctttgtcaagctactcagctctcctagtgaggatgtccgcgaacaggctgtttgggctctggggaatgttgctggtgactctccaaagtgccgtgaccttgtgcttggaagtggtggtctgttccctttgttgcagcagctcaatgagcatgccaagctctcgatgctcaggaatgccacatggacactctccaacttctgccgtgggaaaccacagccaaattttgaacaggtcaaaccggctctctcagcactgcagcgccttatccactctcaggatgaggaggtgctaactgatgcctgctgggctctctcgtacctttctgatggaactaatgacaagatccaatccgtgattgagtctggtgtttttcctcggcttgtggagcttctcttgcacccttcggcttctgttctcattccagctctgcgcacggtgggtaacattgtcactggtgatgatttgcagactcagtgtgtcattgatcaccaagcacttccctgtctcttgaacctcttgactaccaaccacaagaaaagcatcaagaaagaagcatgctggacaatctcaaacatcacagctggtaaccgggaccagattcaggctgttatccaggcaaacattattggtccgctggtccatctcctgcaaggtgctgaatttgacattaagaaggagacagcttgggcaatttcaaatgccacttctggtggaacacatgatcagattaagtatcttgttgcccagggttgcatcaagccgctctgtgatctgctcatttgcccggatcccagaattgtaacagtttgcttggaaggtcttgagaacatcctgaaggttggggaggcagaaaagaaccttggagcaggggatgtcaacaactatgcgcagatgattgatgacgctgagggactggaaaagattgagaaccttcagagccatgacaacacagaaatatatgagaaggcagtgaagatgcttgagtcctactggttggaggaggaagatgaggtcatgccctcaggtgataatgcccagaatggcttcaactttggaagtcagcagaactcggttccatcgggtgggttcaactttggctgaagatacccggttggacgtgtaccttagctacttgcttgggactagtcagatttggggaggtctttgtcgttcgagtcattgttgggtcctgtcggtctggtctcaagcagtcgtcaagtcagtctaagcagggtcagtccttgggctgcatcgtcggtggtgcagcttggtcaatggtcagtcttcaaggtcaaccggtcggatcatttgggttctgcctcaccagaggacgtccagagccgcatgtgttgtcgggagagtcgggttttgcctcctaatatagcttgaaccaaaattatattgatatatctgtgtgaggtaaaaagaaccttgaaagatagggttttcacggttgttggttgtgtcggtttttgtcagaagtgtttctgtgctgtattaacttgacgaaagagtatggagcacaccttataaacatcaaaagcaactgggttttgggagtccaaaaaaaaaaaaaaaa

SEQ ID NO: 2846 - protein, 534 aa, Triticum aestivum
  misc_feature: Ceres CLONE ID no. 686357
  misc_feature: Ceres CDNA ID no. 24766138
  misc_feature (110)..(151): Pfam Name: Arm PFAM Desc: Armadillo/beta
  misc_feature (285)..(321): Pfam Name: HEAT PFAM Desc: HEAT repeat
  misc_feature (4)..(101): Pfam Name: IBB PFAM Desc: Importin beta binding domain
  misc_feature: Homolog of GI Number: 15809794 NR Desc: AT3g06720/F3E22_14
  misc_feature: Homolog of GI Number: 13605661 NR Desc: AT3g06720/F3E22_14
  misc_feature: Homolog of GI Number: 13699777 NR Desc: AtKAP alpha
  misc_feature: Homolog of GI Number: 2950210 NR Desc: Importin alpha
  misc_feature: Homolog of GI Number: 2959324 NR Desc: Importin alpha
  misc_feature: Homolog of GI Number: 2949588 NR Desc: Importin alpha
  misc_feature: Homolog of GI Number: 50759834 NR Desc:  similar to Importin alpha
  misc_feature: Homolog of GI Number: 6682927 NR Desc: importin alpha 1b
  misc_feature: Homolog of GI Number: 13752562 NR Desc: importin alpha 2
  misc_feature: Homolog of GI Number: 45126627 NR Desc: importin alpha 5.1 protein
MSLRPNERAEVRRSRYKASVDAEDGRRRREDQMVEIRKNQRDANLQKKRRDGFPAGAASAAGGAPQMGHSSALQQKLEGLPAMVQAVLSDDNAVQLEATTQFRKLLSIERSPPIEEVINTGVVPRFIEFLTREDYPQLQFEAAWALTNIASGTSDNTKVVVEYGAVPIFVKLLSSPSEDVREQAVWALGNVAGDSPKCRDLVLGSGGLFPLLQQLNEHAKLSMLRNATWTLSNFCRGKPQPNFEQVKPALSALQRLIHSQDEEVLTDACWALSYLSDGTNDKIQSVIESGVFPRLVELLLHPSASVLIPALRTVGNIVTGDDLQTQCVIDHQALPCLLNLLTTNHKKSIKKEACWTISNITAGNRDQIQAVIQANIIGPLVHLLQGAEFDIKKETAWAISNATSGGTHDQIKYLVAQGCIKPLCDLLICPDPRIVTVCLEGLENILKVGEAEKNLGAGDVNNYAQMIDDAEGLEKIENLQSHDNTEIYEKAVKMLESYWLEEEDEVMPSGDNAQNGFNFGSQQNSVPSGGFNFG

SEQ ID NO: 2847 - DNA, 1387 bp, Triticum aestivum
  misc_feature: Ceres CLONE ID no. 686486
  misc_feature: Ceres CDNA ID no. 40351173
  CDS (169)..(1194): REFERENCED BY SEQ ID NO: 2848
gacttcatcaccctgtacgtgcgcctctctccactcccatgttcaggaagcgaaaatttcaggggcgttttatctgattggatacctgatgcaaactttactagagtatattcggttcttgctagattgggatatttgggggcacgcggctgatgctagacttggtttatgccggagaaggctgctgtgcttgctgaccgggtgctcacggagctcgttaaggaactgaatattagaccagtacctgttgtgtttgcatccttttcgggaggaccaaaaggttgcacatacaaggttcttcagctgatccagagaaggtgcaaagggcagctgagtttggatgactatcaacttgtacgggactgcgtatgtggacaaatatatgactcgagtcctgtagattttgtgagtgatttaggcacccgctttcttcttcacccaagtgtcctgaagatgcctgaacctccacgtgtcttatcatggatgactagaggcattgcctcgggtctagacactcttttcattggcaagtttgaagcacagcgcaaagaatattgggagacactatactcatcagtgcatgttggcccaatactcatattctgttcagaggatgatgaacttgctccatgttcggccgttcaaaattttggacggcgtctgctggagctgggtggtgatgtgaatttagttaaatggcacagttctccacatgtaggacattacaagcatcacactgaggaataccgagctgcagtgactgagctgctcatgaaggcttcagcgctttacacaagcagaaaacgactcaatgactacagtgtcggcacgagtgaggacagtgacacaccttattcgtctcgcaatctacataagactgctgtaagctccagtgataggctagggagggtttcagttgatccagccaatcatttcttcttaccgagttccatggagtaccatgaaagcaggagtgaagtgctaaaacccgagttgttcaacatgccgagtgttgaaagcgcgaagaaccctgatggcgtgttggggacgatgctctatgatgcatgtgtcccaaagaacgtggaaggctgggacttcaagcttgcatcaatagatggacagcgtatgcattttactgcccgtcagcatggtacttccaatccaacaaaatgtatacgccgctcaagattgtaatgattttgactcaacatctaagtgcattccagcagactgctctatactgccagagtatacttgtttcaggagaatgttattgtgttgaccttttctggaaattttagagtatactgccagagtatactaatgcttttttatggaaattttagttgccgcaaagatggcaaattccttaaaaaaaaaaaaaaaa

SEQ ID NO: 2848 - protein, 341 aa, Triticum aestivum
  misc_feature: Ceres CLONE ID no. 686486
  misc_feature: Ceres CDNA ID no. 40351173
MPEKAAVLADRVLTELVKELNIRPVPVVFASFSGGPKGCTYKVLQLIQRRCKGQLSLDDYQLVRDCVCGQIYDSSPVDFVSDLGTRFLLHPSVLKMPEPPRVLSWMTRGIASGLDTLFIGKFEAQRKEYWETLYSSVHVGPILIFCSEDDELAPCSAVQNFGRRLLELGGDVNLVKWHSSPHVGHYKHHTEEYRAAVTELLMKASALYTSRKRLNDYSVGTSEDSDTPYSSRNLHKTAVSSSDRLGRVSVDPANHFFLPSSMEYHESRSEVLKPELFNMPSVESAKNPDGVLGTMLYDACVPKNVEGWDFKLASIDGQRMHFTARQHGTSNPTKCIRRSRL

SEQ ID NO: 2849 - DNA, 1182 bp, Triticum aestivum
  misc_feature: Ceres CLONE ID no. 686606
  misc_feature: Ceres CDNA ID no. 40351174
  CDS (160)..(864): REFERENCED BY SEQ ID NO: 2850
actctagtacttgtcatcttcttccccgaagcttctcgtcctctcccctccccctcgcaccgccggagggaggcgccggccgcgccgtctcctcgccccgtccgtccggccgccgctcgtcgtgggtggttggttccgagcgagcgacgcccagccagcatggcggcaaatgtgggggagtccacgagcggcagcagcagcgtggccggcgacggcgggggcagcttcgagtgcaacatatgctttgagctgccgcaggagcccatcgtcacgctctgcggccacctcttctgctggccctgcctctacaagtggctgcacatccactcgcactcgcccgagtgccccgtctgcaaggccgtcgtcgaggaggacaagctcgtcccgctctacggccgcggcaaggaccgcgtcgaccccaggtccaagggggtgccggccggggccgagatccccaaccggccgaccgggcagcggcccgccaccgccccgcaggccgaccccaacaaccacttccccaacgcaaaccctaacccctggttcatggggggagggggcgtccctttggccaacgcgcggtggggaaactacaccttctcggccgcgtttggcggcctgttcccgctgctgagcttccaggtgcatggattcccggacgcgaccgcgtacgggcagcctgccgggtttccctatggctacgggcatggccatggccatgggcatgctttccatggcgggcacgcccacgccgctgccccccggcacgcgccgcccgggcagcagcagcagcaggcggacgtgtacctcaaggcgctcctcatcctggttggctttctcgtgatcgcgagcctcatcacattctaggttcgtcaccattgtcatttgtcaccgtcataataagagaaacgattgtcatgatacttctcagatgttgtgtgcattaccttgcccccccgtacgaaagccccggtctaaatctgagtggtgcgttttgagcgaaagtgttcatagaactcatgtatatatgtgctatttagacgcggtctgaatggggggtgcctgtgtaccgtagtagtttcacactgattcgtgaatgatttggaaacctctgtttggagtggatgtaccagaccaattatatcatgtgtaattttgtttcgactgccaaaaaaaaaaaaaaaa

SEQ ID NO: 2850 - protein, 234 aa, Triticum aestivum
  misc_feature: Ceres CLONE ID no. 686606
  misc_feature: Ceres CDNA ID no. 40351174
  misc_feature (25)..(65): Pfam Name: zf PFAM Desc: Zinc finger
MAANVGESTSGSSSVAGDGGGSFECNICFELPQEPIVTLCGHLFCWPCLYKWLHIHSHSPECPVCKAVVEEDKLVPLYGRGKDRVDPRSKGVPAGAEIPNRPTGQRPATAPQADPNNHFPNANPNPWFMGGGGVPLANARWGNYTFSAAFGGLFPLLSFQVHGFPDATAYGQPAGFPYGYGHGHGHGHAFHGGHAHAAAPRHAPPGQQQQQADVYLKALLILVGFLVIASLITF

SEQ ID NO: 2851 - DNA, 1358 bp, Triticum aestivum
  misc_feature: Ceres CLONE ID no. 686635
  misc_feature: Ceres CDNA ID no. 40351175
  CDS (107)..(1105): REFERENCED BY SEQ ID NO: 2852
agtaaaattcattgacctacgacacgagtagtcatttcaatccccccgaaaccctgaaccgccgctgccgccgccgccgccgcccccgcagccaagccgagcagccatggagggatccgccgccgcggcgccgctccgcacgcgcgtgtgcatcatcggcagcggcccggccgcgcacacggcggccatctacgcggcccgcgcggagctcaagcccgtgctcttcgagggctggatggccaacgacatcgccgcggggggccagctcaccaccaccaccgacgtcgagaacttcccgggcttccccaccggcatcatgggcatcgacctcatggacaactgccgcgcccagtccgcccgcttcggcaccaacatcctctccgagaccgtcaccgaggtcgacttctccgcccgccccttccgcgtcacctccgactccaccaccgtcctcgccgacaccgtcgtcgtcgccacgggcgccgtcgcgcgccgcctccacttccccgggtccgaaacctactggaaccgcggcatctccgcctgcgccgtctgcgacggcgccgcgcccatcttccggaacaagcccatcgccgtcatcggcggcggcgactctgccatggaggagggaaacttcctcaccaagtacggatcccaagtgtacatcatccaccggcgcaacaccttccgcgcctccaagattatgcaggccagggcgctctccaatcctaagatccaggttgtctgggactccgaggtcgtcgaggcctacggcggcgcaggcggtggcccattagctggcgtcaaggtcaagaacttggtgactggtgaggtctctgaccttaaggtgtccgggctcttcttcgccatcgggcatgagccggccaccaagtttctcaatgggcagcttgagctccatgccgatgggtatgtggccaccaagccgggctctacacataccagtgtggagggggtctttgctgctggagatgtgcaggataagaagtatcgtcaggccattactgccgctggatcagggtgcatggctgctttggacgcggagcactatctgcaggaggtgggtgcacaggagggcaagtctgattgactatctcttggtgaagcgacgaccatcagctcaccgaaagccgcactctgagcttgatgaagttggttgtccagtttcattatgctgcttagcagcaccgtattattattctccgtcattaggaggccctagatcaactttcattagtgtgctggaaatgattcatatttaccactggtggaactcaaactgattcctatgtatcattggcgaaatcacattattattctgagatataaaaaaaaaaaaaaaa

SEQ ID NO: 2852 - protein, 332 aa, Triticum aestivum
  misc_feature: Ceres CLONE ID no. 686635
  misc_feature: Ceres CDNA ID no. 40351175
  misc_feature (87)..(130): Pfam Name: DAO PFAM Desc: FAD dependent oxidoreductase
MEGSAAAAPLRTRVCIIGSGPAAHTAAIYAARAELKPVLFEGWMANDIAAGGQLTTTTDVENFPGFPTGIMGIDLMDNCRAQSARFGTNILSETVTEVDFSARPFRVTSDSTTVLADTVVVATGAVARRLHFPGSETYWNRGISACAVCDGAAPIFRNKPIAVIGGGDSAMEEGNFLTKYGSQVYIIHRRNTFRASKIMQARALSNPKIQVVWDSEVVEAYGGAGGGPLAGVKVKNLVTGEVSDLKVSGLFFAIGHEPATKFLNGQLELHADGYVATKPGSTHTSVEGVFAAGDVQDKKYRQAITAAGSGCMAALDAEHYLQEVGAQEGKSD

SEQ ID NO: 2853 - DNA, 1507 bp, Triticum aestivum
  misc_feature: Ceres CLONE ID no. 686903
  misc_feature: Ceres CDNA ID no. 24766183
  CDS (164)..(1348): REFERENCED BY SEQ ID NO: 2854
cagtcgcgagcccccgcttccattctaatccgccccctcccgagacgccaaagccccaaacccctcgccctcccaaaccctaactctaaaacctccgccctcccgccgccgccgccgcccgattcccctccccaggccccgcatcccccgtccggcttgaacgatgtcgtccgacgaggaggtcagggaggagaaggagctcgacctctcctccaacgaggtcgtcaccaagtacaagaccgccgccgagatcatcaacaaggctctgaagttggtattgttggagtgcaagccgaaagccaagattgttgacatttgtgagaagggtgacaatttcataacagagcaaactgggaatgtctacaagaacgcgaagaggaagattgaaaggggcattgctttcccgacatgtgtatctgtgaacaacacagtctgtcatttctccccactggcaactgacgattctgtactcgaagaaaatgacatggtgaagatcgatatggcttgccatattgatggttttattgctgtggtggctcatacacatgtcatcaaaggtgggccggttactggaagagcagctaatgttcttgctgctgcaaacacagcagcagaagttgcaatgaggcttgttagacctggcaagaagaataaggatgtcactgaagcaattcagaaagttgctgctgcttatgattgtaaaattgttgaaggagttcttagccatcagctgaaacaattcgtcatcgatggtaacaaagtggtacttagtgtttcaaatgctgatacaaaggtggatgatgctgaatttgaagaaaatgaagtgtatgcaattgatattgtcaccagcactggcgagggaaagccgaagctattggatgagaagcagaccactatttacaagagagctgtagacaagaactatcacttgaagatgaaggcatcaaggttcatcttcagtgagattagccagaagttcccaatcatgccattcactgctagggcgctggaggagaagcgtgcacgcttaggtttggtagaatgcatgaatcatgagctgttgcagccataccctgttctacatgagaagcaaggtgacctggttgcccacatcaagttcaccgtgttgttgatgccaaatgggtctgacaagataacttcacatccactacagcaattggagccctcaaaatccatcgagggcgatgctgagatcaaggcttggctggctttgggcacaaagtcaaagaagaagggtggtggcaagaaaaagaaaggcaagaaaggagatgcagcagaagtagcagagcccatggaggtttctaaggacgcaccaagccaggaataattctcattttttttgaattgcttccgttacgtttgtacctgctcctttgctgcatctgattgttttatattacattcagctgtggggatttgagtacctttttttgaagtgtctaatgaaaatggttgatcctggcgcacaccaaaaaaaaaaaaaaaa

SEQ ID NO: 2854 - protein, 394 aa, Triticum aestivum
  misc_feature: Ceres CLONE ID no. 686903
  misc_feature: Ceres CDNA ID no. 24766183
  misc_feature (22)..(277): Pfam Name: Peptidase_M24 PFAM Desc: metallopeptidase family M24
  misc_feature: Homolog of GI Number: 2511541 NR Desc: DNA
  misc_feature: Homolog of GI Number: 30693537 NR Desc: metallopeptidase M24 family protein
  misc_feature: Homolog of GI Number: 9652218 NR Desc: putative DNA binding protein
  misc_feature: Homolog of GI Number: 55168203 NR Desc: putative DNA
  misc_feature: Homolog of GI Number: 14532886 NR Desc: putative nuclear DNA
  misc_feature: Homolog of GI Number: 23297076 NR Desc: putative nuclear DNA
  misc_feature: Homolog of GI Number: 47086757 NR Desc: proliferation
  misc_feature: Homolog of GI Number: 50925681 NR Desc: Proliferation
  misc_feature: Homolog of GI Number: 50344794 NR Desc: proliferation
  misc_feature: Homolog of GI Number: 68399974 NR Desc:  similar to Proliferation
MSSDEEVREEKELDLSSNEVVTKYKTAAEIINKALKLVLLECKPKAKIVDICEKGDNFITEQTGNVYKNAKRKIERGIAFPTCVSVNNTVCHFSPLATDDSVLEENDMVKIDMACHIDGFIAVVAHTHVIKGGPVTGRAANVLAAANTAAEVAMRLVRPGKKNKDVTEAIQKVAAAYDCKIVEGVLSHQLKQFVIDGNKVVLSVSNADTKVDDAEFEENEVYAIDIVTSTGEGKPKLLDEKQTTIYKRAVDKNYHLKMKASRFIFSEISQKFPIMPFTARALEEKRARLGLVECMNHELLQPYPVLHEKQGDLVAHIKFTVLLMPNGSDKITSHPLQQLEPSKSIEGDAEIKAWLALGTKSKKKGGGKKKKGKKGDAAEVAEPMEVSKDAPSQE

SEQ ID NO: 2855 - DNA, 1141 bp, Triticum aestivum
  misc_feature: Ceres CLONE ID no. 686988
  misc_feature: Ceres CDNA ID no. 24766184
  CDS (45)..(785): REFERENCED BY SEQ ID NO: 2856
ctcaacccaaacccaaatccaaatcccccaacccaccggcggcgatggcgcgcggcggccgctccgagaagggcggcggcgggtgcgggcggtgctgcctggggttcctgctcaagctcctcgccttcctgcaggccttcgccgccctctccgccgtcctctacgccgcctccatcctctcccggtgggcgcgccaccatgagctccacatccaccacctcctcccagacctctggttcgcgtgcgccgtcatggccgccggcctcctctactgcgccatcctcctcgcgggctacgtcgccgccgagatcagcagcggctgctgcctctgcttctacaccggcttggcaatggtgatgatgctgctcgaggccgccgtggccggacgcatcctcctcaacgagcactggatccaggatctgccgtatgaccgcaccggagagctccagaacctcgtctccttcgtccatgacaacctcgacctctgcaaatgggctgctctcgctaccgttgccacccaggcactctcgcttttgttggcgatggttctacgagccatggtttcacccacgagtagcgactacgacagcgatgaagattttgtggtcataaggaggccgctgcttattgcccaaggtgctccatcctatctccctaccacggctgaccccagaggtgtccatccgaacctatggagctcatcaatgaggcagaagtatggactgaactcctcaggggactacacctacaacacactgggtcaaaatgcagcgccaccgcagtgagaagcttctgtgtgacaggtgatgaggaaggaagggcatgcatggccttgttggaagcacctgtgcagcatatttgtagtatattgtgatattccatggtgtaatgcacactacatacatttgtgcacccattcaccctgtcaatctcgactcattgtacatagttccatcattagtgaagattatatatgtgtggccctggttggctagttggaaaggacttgttgtcaacatttcgttggatgtttgttaagctagctagatagcagtttatcaagtgaaaaaagatcttgtaaagttaaaaaaaaaaaaaaaaaaaaaaaaaaaaaaaaaaaaaaataaaaaaaaaaaaaaaa

SEQ ID NO: 2856 - protein, 246 aa, Triticum aestivum
  misc_feature: Ceres CLONE ID no. 686988
  misc_feature: Ceres CDNA ID no. 24766184
  misc_feature: Homolog of GI Number: 54291569 NR Desc: senescence
  misc_feature: Homolog of GI Number: 50943465 NR Desc: senescence
  misc_feature: Homolog of GI Number: 11359723 NR Desc: proteophosphoglycan
  misc_feature: Homolog of GI Number: 5420387 NR Desc: proteophosphoglycan
  misc_feature: Homolog of GI Number: 13592175 NR Desc: ppg3
  misc_feature: Homolog of GI Number: 72547041 NR Desc: proteophosphoglycan ppg1
  misc_feature: Homolog of GI Number: 34809533 NR Desc: Epa5p
  misc_feature: Homolog of GI Number: 28828093 NR Desc: similar to Dictyostelium discoideum
  misc_feature: Homolog of GI Number: 52843040 NR Desc: hypothetical histidine
  misc_feature: Homolog of GI Number: 34809534 NR Desc: Epa4p
MARGGRSEKGGGGCGRCCLGFLLKLLAFLQAFAALSAVLYAASILSRWARHHELHIHHLLPDLWFACAVMAAGLLYCAILLAGYVAAEISSGCCLCFYTGLAMVMMLLEAAVAGRILLNEHWIQDLPYDRTGELQNLVSFVHDNLDLCKWAALATVATQALSLLLAMVLRAMVSPTSSDYDSDEDFVVIRRPLLIAQGAPSYLPTTADPRGVHPNLWSSSMRQKYGLNSSGDYTYNTLGQNAAPPQ

SEQ ID NO: 2857 - DNA, 1178 bp, Triticum aestivum
  misc_feature: Ceres CLONE ID no. 687052
  misc_feature: Ceres CDNA ID no. 29191546
  CDS (74)..(742): REFERENCED BY SEQ ID NO: 2858
actcatcacccacacagcgtgcacaacacaaacacaaacacagatcgatcgagatccagagcaaccaggagcaatggcgggcgagaagggcctggtgctgctggacttctgggtgagcccgttcgggcagcgcgtccgcatcgcgctggcggagaagggcctgccctacgagtacgcggaggaggacctgatggccggcaagagcgaccgcctcctccgcgccaacccggtgcacaagaagatcccggtgctcctccacgacggccgccccgtcaacgagtccctcatcatcctccagtacctggaggacgccttcccggacgccccggcactgctcccctccgacccctacgcgcgcgcgcaggcccgcttctgggccgactacgtcgacaagaaggtctacgactgcggctcccgcctctggaagctcaagggcgagccgcaggcgcaggcgcgcgccgagatgctggacatcctcaagaccctcgacggcgcgctcggggacaagcccttcttcggcggcgacaagttcgggttcgtcgacgccgccttcgcgcccttcaccgcgtggttccacagctacgagaggtacggcgagttcagcctgccggaggtggcgcccaagatcgcggcgtgggccaagcgctgcggcgagcgggagagcgtcgccaagagcctctactcgccggacaaggtgtacgacttcatcggcctgctcaagaagaagtacggcatcgagtagccgcgcggacggacgggcggccatgcatgcgccatcccgccggccggccaataaatcagggagcgtttgggtggcctacagtgcgtacgtttcggatattgatttcttcgtggagtctagtgttcgtgcgtgtgtggttggtggtagttgtttggttttgttagtgtgagtgcgtcgtgggtgccgtgtactcctgtgtgtgtgtcaagtgttgccacctgcgattccattttcattccgtgcgatgaataaattaagaaggggtcttctggacgcgtctagcgggcgcacggccgcctaggatgcttagcgagcggcccgacacttcagataatttcttgtctctccttttaactagaatagtcatctagtagtccctttttctgctatgtattaaatgtcaacatatgtatctcctacaaaaaaaaaaaaaaaa

SEQ ID NO: 2858 - protein, 222 aa, Triticum aestivum
  misc_feature: Ceres CLONE ID no. 687052
  misc_feature: Ceres CDNA ID no. 29191546
  misc_feature (7)..(79): Pfam Name: GST_N PFAM Desc: Glutathione S
  misc_feature (88)..(196): Pfam Name: GST_C PFAM Desc: Glutathione S
  misc_feature: Homolog of GI Number: 20067419 NR Desc: glutathione transferase
  misc_feature: Homolog of GI Number: 20067415 NR Desc: glutathione transferase
  misc_feature: Homolog of GI Number: 20067417 NR Desc: glutathione transferase
  misc_feature: Homolog of GI Number: 6683765 NR Desc: glutathione
  misc_feature: Homolog of GI Number: 75674128 NR Desc: glutathione
  misc_feature: Homolog of GI Number: 2288969 NR Desc: glutathione transferase
  misc_feature: Homolog of GI Number: 57012736 NR Desc: Probable glutathione S
  misc_feature: Homolog of GI Number: 11385489 NR Desc: glutathione S
  misc_feature: Homolog of GI Number: 2944088 NR Desc: glutathione s
  misc_feature: Homolog of GI Number: 50509467 NR Desc: putative glutathione
  misc_feature: Useful for increasing chlorophyll and photosynthetic capacity
  misc_feature: Useful for making ornamental plants with modified flowers
  misc_feature: Useful for making shorter plants
MAGEKGLVLLDFWVSPFGQRVRIALAEKGLPYEYAEEDLMAGKSDRLLRANPVHKKIPVLLHDGRPVNESLIILQYLEDAFPDAPALLPSDPYARAQARFWADYVDKKVYDCGSRLWKLKGEPQAQARAEMLDILKTLDGALGDKPFFGGDKFGFVDAAFAPFTAWFHSYERYGEFSLPEVAPKIAAWAKRCGERESVAKSLYSPDKVYDFIGLLKKKYGIE

SEQ ID NO: 2859 - DNA, 779 bp, Zea mays
  misc_feature: Ceres CLONE ID no. 687289
  misc_feature: Ceres CDNA ID no. 40351176
  CDS (178)..(606): REFERENCED BY SEQ ID NO: 2860
agccgcagcactcatcgtgacgcagatcaagcaaaccctaactgccaacgctactataaaatgtttttctcgcctctcctcgctcccgtagccgccgccggcctccaactctaaccccgtcgcttccggctcccgcagcgtcgccgaccttcacagccggttccttcatccgccaccatggggaagacacgtggtatgggagctgggcgcaagctcaagacccaccgcaggaaccagaggtgggctgacaaagcatacaagaagagccacttgggcaatgagtggaaaaaaccttttgctggatcatctcacgccaagggcatcgttctggagaagattggtattgaggccaagcagccaaattcggccatccgtaagtgtgcccgtgttcagctggtgaagaatggaaagaagattgctgcctttgtgccgaatgatggttgcctaaactacatcgaggagaatgatgaggtgttgattgctggatttggtcgtaagggtcatgctgtgggagacattcctggtgtcaggttcaaggttgttaaggtgtctggtgtgtcgctgcttgcactcttcaaggagaagaaggagaagccaaggtcttagatcactttcggtagtcaagaatggtgtaaactgcccaaggctctattgttaaagttctgctagcaacagagctgttaattctgagctgtacctttttgttaacattgttacagtcttacagagttctgtttccattttgaagatattaatattgtaaaaaaaaaaaaaaaaaa

SEQ ID NO: 2860 - protein, 142 aa, Zea mays
  misc_feature: Ceres CLONE ID no. 687289
  misc_feature: Ceres CDNA ID no. 40351176
  misc_feature (9)..(141): Pfam Name: Ribosomal_S12 PFAM Desc: Ribosomal protein S12
MGKTRGMGAGRKLKTHRRNQRWADKAYKKSHLGNEWKKPFAGSSHAKGIVLEKIGIEAKQPNSAIRKCARVQLVKNGKKIAAFVPNDGCLNYIEENDEVLIAGFGRKGHAVGDIPGVRFKVVKVSGVSLLALFKEKKEKPRS

SEQ ID NO: 2861 - DNA, 501 bp, Zea mays
  misc_feature: Ceres CLONE ID no. 687350
  misc_feature: Ceres CDNA ID no. 36593083
  CDS (2)..(346): REFERENCED BY SEQ ID NO: 2862
atctgaacagatgcaatctctgcattcagacaacaagggtgatgagatgaaagatgagaacgaaaccatttatatgcagaacagcaaaggtcggactcagactctatccaatgctgatgcatcagtactttccactaccgaggctgagaacacatccatcaagacttcccctgaaattgagctcaatggggatgatgtctgtattacaagcagcatagggaagaccaggaagtatagagcaaaattcactttgtttctgagcgtgatcgtgatctttttagcaatcatcaccatgctcatcaggatagagaatgatgatgattcagcgtaccttgtccccacttaatattttgtatgcttcattgctgtctgtttaaattcctatttttattttatcactatagagtggtttgtgttttgaacaattttgcagtcatctatccatgaatgacagcaaataattaaattagaattttcatgctcaaaaaaaaaaaaaaaaaa

SEQ ID NO: 2862 - protein, 111 aa, Zea mays
  misc_feature: Ceres CLONE ID no. 687350
  misc_feature: Ceres CDNA ID no. 36593083
MQSLHSDNKGDEMKDENETIYMQNSKGRTQTLSNADASVLSTTEAENTSIKTSPEIELNGDDVCITSSIGKTRKYRAKFTLFLSVIVIFLAIITMLIRIENDDDSAYLVPT

SEQ ID NO: 2863 - DNA, 845 bp, Zea mays
  misc_feature: Ceres CLONE ID no. 687409
  misc_feature: Ceres CDNA ID no. 40351177
  CDS (220)..(426): REFERENCED BY SEQ ID NO: 2864
tttcactatcgagcagcggagaaggacaacgataaatgacagctcgctgagggggatggcttggtggatctaatgttcgtttgcttgtattgctactaggcctgctgttgatcgaaaggagcaagcgagcaacaccagtggactacccttgaaaattgtgacctggcaagtccagttagtgatgcttgcatcataatacattcacttgagactacatgaatgccccctaatattttagggatgagacgacagggaatagccctttcactgtcttcatctacttttgttctccagaaagccaccaagctgaggatcgcaagctttgtccacggttcaaacggcctgaggatcgcaagcttcgtccacggttcagacggccactgtggatcgaggtgcggcaggtcggggcgtcgccgcggattgtaggctcggccgagactacttcgtcaccaacgtcctcgttctcatatatgggtggaagataaagatttgtccagggttgatggtgaggtatttcgaattgatggccaaaacgcccatgttcgcacaaccaaggggaaggcgggatggcgtattgtggcggctacgagggaccgatgttcctgtgtggcggtgacaacgacaccgtggagccaaggcaatgtcagcaagctgatttttcagattggaatctatggttctttttaaagattgaatatgttctagcatcttaaaaagatttgtcagaatgtaaacatttgttctgaggtcatttaggcctcaaacagaatttcttggacttattttgttggagggaatgggacatctcgagatctaaatgtgtatacaaaaaaaaaaaaaaaaaa

SEQ ID NO: 2864 - protein, 68 aa, Zea mays
  misc_feature: Ceres CLONE ID no. 687409
  misc_feature: Ceres CDNA ID no. 40351177
MPPNILGMRRQGIALSLSSSTFVLQKATKLRIASFVHGSNGLRIASFVHGSDGHCGSRCGRSGRRRGL

SEQ ID NO: 2865 - DNA, 748 bp, Zea mays
  misc_feature: Ceres CLONE ID no. 687498
  misc_feature: Ceres CDNA ID no. 35383257
  CDS (74)..(502): REFERENCED BY SEQ ID NO: 2866
gctgtctgttataaaggcacagctcttctgtctccacgagattgttgaattcctctctgccctagcaccagccatggcgaagccgcagcttcttctctgtttcctactcgccgcctccgcgccgctaatcgtcgccacggccaagaaatccggggacgtgtcggagctccagatcggcgtcaagtacaagccggaatcatgcagcattcaagctcacaaaggtgacaagggaaaacttactgatggaacggtttttgattcaagctatgaaagaggtgacccgattgaatttgaattgggcactggacaagtgatcaaaggatgggatcagggtctcctgggaatgtgcgttggtgaaaagcggaagttgaagatcccatcaaagcttggctatgggcctcaaggctcgccacctactattcctggtggagcaaccctcatatttgacacggagcttgtcgctgtcaatggagaaccaaccaaccaatctgacgagctttagattcatcaaacaaatgaatccattcacctttttactcggaactcagcagatgtaatactttccaagaaatgagccttcattccctgccactttcatagtttctttcgctgttccacactgacatctatgatttttggagcaaactctgatctgttttgactagtttacacgtttgtgtgtggaatctgaagagctgttctgaaatgttactttccttttttaaaaaagaaaaaaaaaaaaaaaaaa

SEQ ID NO: 2866 - protein, 142 aa, Zea mays
  misc_feature: Ceres CLONE ID no. 687498
  misc_feature: Ceres CDNA ID no. 35383257
  misc_feature (41)..(129): Pfam Name: FKBP_C PFAM Desc: FKBP
  misc_feature: Homolog of GI Number: 38174807 NR Desc: putative immunophilin
  misc_feature: Homolog of GI Number: 22136164 NR Desc: immunophilin
  misc_feature: Homolog of GI Number: 2129622 NR Desc: probable peptidylprolyl isomerase
  misc_feature: Homolog of GI Number: 21593622 NR Desc: immunophilin
  misc_feature: Homolog of GI Number: 56784942 NR Desc: putative immunophilin
  misc_feature: Homolog of GI Number: 34906954 NR Desc: rapamycin
  misc_feature: Homolog of GI Number: 1272408 NR Desc: immunophilin
  misc_feature: Homolog of GI Number: 16323516 NR Desc: putative peptidyl
  misc_feature: Homolog of GI Number: 23396588 NR Desc: FK506
  misc_feature: Homolog of GI Number: 49119195 NR Desc: MGC80429 protein
MAKPQLLLCFLLAASAPLIVATAKKSGDVSELQIGVKYKPESCSIQAHKGDKGKLTDGTVFDSSYERGDPIEFELGTGQVIKGWDQGLLGMCVGEKRKLKIPSKLGYGPQGSPPTIPGGATLIFDTELVAVNGEPTNQSDEL

SEQ ID NO: 2867 - DNA, 679 bp, Zea mays
  misc_feature: Ceres CLONE ID no. 687834
  misc_feature: Ceres CDNA ID no. 29191818
  CDS (238)..(546): REFERENCED BY SEQ ID NO: 2868
gcggtcggtctctgctttcagattcgtttctaaccagggttcctccagcccagccgccgccgccaccgttgcggagctcacatcgcctcgacacaacacggtctccggtttcaacattcatttctaaccagggttcctccagcccagccgccgccactgttgcggagctcacatcgcctcgacacaacacggtctctggtttcaacgtataataactgggctgcgagcactatatggatgatggcttcacgaggcaccagtgccgtgctttcaagggctgctcggatgaggcaaaaactgcagtctgccttggaggccagtgccctagatattgaagacgtttcttaccaacatgccgggcatgcagccgtcaaggacaatgcgaacgagacgcacttcaacatcaaggttgtttcaccaaaatttgaggggcagaaccttgtgaagcgtcacaggatggtgtatgatcttctgagggatgagcttagctcaggcctccatgctgtctccattgttgcgaaaaccccgaaagagttagggtcttgattgtataacaatgttgaataagcactgtcctatgtttcgaagtaagtctgtcgtagcagtgtcatgtaaccatgaactgattgccaaaacaatgtcaccggcatgctcttcttatcaaaaaaaaaaaaaaaaa

SEQ ID NO: 2868 - protein, 101 aa, Zea mays
  misc_feature: Ceres CLONE ID no. 687834
  misc_feature: Ceres CDNA ID no. 29191818
  misc_feature (19)..(99): Pfam Name: BolA PFAM Desc: BolA
  misc_feature: Homolog of GI Number: 51969256 NR Desc: BolA like protein
  misc_feature: Homolog of GI Number: 51969538 NR Desc: BolA like protein
  misc_feature: Homolog of GI Number: 62318906 NR Desc: BolA like protein
  misc_feature: Homolog of GI Number: 51968914 NR Desc: BolA like protein
  misc_feature: Homolog of GI Number: 50899228 NR Desc: BolA
  misc_feature: Homolog of GI Number: 8778492 NR Desc: F20N2.18
  misc_feature: Homolog of GI Number: 12621476 NR Desc: Similar to pombe uvi31
  misc_feature: Homolog of GI Number: 61840823 NR Desc:  similar to CGI
  misc_feature: Homolog of GI Number: 22994270 NR Desc: COG0271: Stress
MASRGTSAVLSRAARMRQKLQSALEASALDIEDVSYQHAGHAAVKDNANETHFNIKVVSPKFEGQNLVKRHRMVYDLLRDELSSGLHAVSIVAKTPKELGS

SEQ ID NO: 2869 - DNA, 775 bp, Zea mays
  misc_feature: Ceres CLONE ID no. 688053
  misc_feature: Ceres CDNA ID no. 29191819
  CDS (185)..(526): REFERENCED BY SEQ ID NO: 2870
ggcagtccctgctccctacaccctactccctactaccagactccagacccaccggtcacccgcgtcgccgccgcccttctccgcccccaccttattattataaatacggcaggaacggaaagcgccagagatgggaatcacctcctcaacctccagcccaacctccagcccgggatagagagcaatggcgctcgccaaggccaaggagatcgttgcctccgctcccctcgtcgtcttcagcaaaacttcctgccctttctgcgtccgtgtgaagcagttgttcgagaagctcggagcaagctacaaggccattgagttggataaggaaagtgatggagctgagctccagaatgccctgaaggagtggactggacagaggactgtcccaaatgtcttcatcaatgggaagcatattggcggctgtgatgatactatggcactgaacaatgatgggaagctggtgcctctgctgactgaggctggagccatcgccggttctgcctcgaagacaaccatcactgcttgacatgtgtgttaccattcccgtgcttaaaaataatgatgctttgcaagtgctgaacttgcagatgctatgtgggagtgactgttcgttccctgtgtaaaactccctagacatcagtcgagtcgtgttgctgtggtggttgtgaaatctacaataatcattgctacaataatgtcgtgttccctaggcatcagatgagaaagatgagaagaaataacattataatcttattcgaaaaaaaaaaaaaaaaaa

SEQ ID NO: 2870 - protein, 113 aa, Zea mays
  misc_feature: Ceres CLONE ID no. 688053
  misc_feature: Ceres CDNA ID no. 29191819
  misc_feature (14)..(96): Pfam Name: Glutaredoxin PFAM Desc: Glutaredoxin
  misc_feature: Homolog of GI Number: 50926342 NR Desc: OSJNBa0043L24.17
  misc_feature: Homolog of GI Number: 485953 NR Desc: glutaredoxin
  misc_feature: Homolog of GI Number: 32401362 NR Desc: glutaredoxin
  misc_feature: Homolog of GI Number: 20141083 NR Desc: glutaredoxin
  misc_feature: Homolog of GI Number: 15637350 NR Desc: glutaredoxin
  misc_feature: Homolog of GI Number: 50910559 NR Desc: putative glutaredoxin
  misc_feature: Homolog of GI Number: 21592438 NR Desc: glutaredoxin
  misc_feature: Homolog of GI Number: 3850778 NR Desc: gluaredoxin
  misc_feature: Homolog of GI Number: 2724056 NR Desc: glutaredoxin type I
  misc_feature: Homolog of GI Number: 3249567 NR Desc: glutaredoxin
  misc_feature: Useful for sterility
MALAKAKEIVASAPLVVFSKTSCPFCVRVKQLFEKLGASYKAIELDKESDGAELQNALKEWTGQRTVPNVFINGKHIGGCDDTMALNNDGKLVPLLTEAGAIAGSASKTTITA

SEQ ID NO: 2871 - DNA, 757 bp, Zea mays
  misc_feature: Ceres CLONE ID no. 688157
  misc_feature: Ceres CDNA ID no. 25446858
  CDS (159)..(500): REFERENCED BY SEQ ID NO: 2872
atttgttatgattatagtcatggccacaacctgaacctcgaatttgcttgcagctaatagagaggtttaatgggcgcttgcctggttacataggagatgggtatgatagagaatcgttctgccatgttgttgatgttgttaacgggcacatagcagctatggagaagggcagagtgggccaacggtatctcctcactggtgaaaacacgtcgttcgtgcagatttttaacatggttgctaatatcacaaacacaagggctcccatgttccacgtacctctctggttgattgaagcttatgggtggatttcagtttttgtttctcgcatcactggaaaactcccacttatcagttaccctactgtgcgtgttctgagacatcagtgggcatactcgtgtgacaaagcaaagatggagctgggctataccccaagaaacttgaccgaaggtttgtcggagatgctcctgtggctcaaggaagaaaaactaatcaagttttagcgttctctgctacacaccacatcacatatttaatgtacaccgagacattggggatgtgctggggattttgaagtgtatatgcttcggcattgcatcacgtcgtattatgctagaggaaatctaagatgttgacgtgtaatactgatgttggcaacaaagagagaaattatgcatttttatttacatcaatgtatttagttcaatgctttgtaggctgtaaaaaaaaaaaaaaaaaaaagaaaaaaaaaaaaaaaaaa

SEQ ID NO: 2872 - protein, 113 aa, Zea mays
  misc_feature: Ceres CLONE ID no. 688157
  misc_feature: Ceres CDNA ID no. 25446858
  misc_feature: Homolog of GI Number: 50920423 NR Desc: Putative dihydroflavonal
  misc_feature: Homolog of GI Number: 48767352 NR Desc: COG0451: Nucleoside
  misc_feature: Homolog of GI Number: 68558698 NR Desc: dihydroflavonol
  misc_feature: Homolog of GI Number: 46131540 NR Desc: COG0451: Nucleoside
  misc_feature: Homolog of GI Number: 46323130 NR Desc: COG0451: Nucleoside
  misc_feature: Homolog of GI Number: 48782692 NR Desc: COG0451: Nucleoside
  misc_feature: Homolog of GI Number: 23015354 NR Desc: COG0451: Nucleoside
  misc_feature: Homolog of GI Number: 46317778 NR Desc: COG0451: Nucleoside
  misc_feature: Homolog of GI Number: 2598072 NR Desc: HpnA protein
  misc_feature: Homolog of GI Number: 56551763 NR Desc: nucleoside
MEKGRVGQRYLLTGENTSFVQIFNMVANITNTRAPMFHVPLWLIEAYGWISVFVSRITGKLPLISYPTVRVLRHQWAYSCDKAKMELGYTPRNLTEGLSEMLLWLKEEKLIKF

SEQ ID NO: 2873 - DNA, 1265 bp, Zea mays
  misc_feature: Ceres CLONE ID no. 688227
  misc_feature: Ceres CDNA ID no. 36705522
  CDS (3)..(875): REFERENCED BY SEQ ID NO: 2874
ggctctgccctcccgccgctgccgccgcctacccaggaatcaggatgcgggtgaagaagcggtcgaagcaccgcaaagcggtcaagttctacgccacatgcttcggcttccgcgagccctataaagtcctcatcgacggcaccttcgtccaccacctcctcacccagcgcctcctcccggccgacgaggctctccgagacctcctctcggcctccaggacgccagccctcttcacctccaagtgcatcctcgcagagctcagacgtctcggcaagtcacatgccgaatcatttgacgccgcgcagcttctcaccacaaccaagtgtgagcatgacaaggtggtcggtgcagttaactgtgtccagtcactgataggtgataaaaatcctgaacatttcttcgttgccacccaggatcctggtctccgagaaaacttacgagagattcctggggttcctgtgatatatggtctgaagaactctttatgcatagaacggccctctatgcagcaacgcaagtttgctcaattggatgaggagaagcgtctcaatatggatatctctgaatacaagaagttactgaaggctgcatcagaaggaaagacaattgccagtgaaaatggaagtggcgaagaacaacatgagatgcctattagttctcttgtaaaaaatgcacttcatgttactgataaaaccaagtttaagaggaacaaagcaaagggtccaaacccactctcctgtaagaagaagaaaccaaagctccccacggctattcaaaagcaggcaggtacggctgatggcgaggcaaagaggaagagggttcggaagcggaagagaggccaaaaagataacaagcaattggaggctgcgaactagaaggatgggcttgcgtaggaagtttcagtgctcttgctagacatccatcctgactccggagcaagtcaactatggaggagttcctttctcccacacaggattcagtatgccatgccataccatgctcattatatgttgaagatgcttcttgcaacgtaacacttgattggttatggtgatcgtgaatccttctctagaggatgttattggatgtttcttttgtcgcaagatgcaactttaaatgttttttgaagcaaaagtttgatgccagtagctctaccaggttcttgcttgccctgctacatgtgtgatcccattcttcaattgtaagatgtgtttgttgagaatatgtataatagataatacttctatcaaaaaaaaaaaaaaaaa

SEQ ID NO: 2874 - protein, 276 aa, Zea mays
  misc_feature: Ceres CLONE ID no. 688227
  misc_feature: Ceres CDNA ID no. 36705522
  misc_feature: Homolog of GI Number: 72108973 NR Desc:  similar to CG17652
  misc_feature: Homolog of GI Number: 73974539 NR Desc:  similar to CG17652
  misc_feature: Homolog of GI Number: 50731881 NR Desc:  similar to RIKEN cDNA D530033C11
  misc_feature: Homolog of GI Number: 72547018 NR Desc: proteophosphoglycan ppg3
MRVKKRSKHRKAVKFYATCFGFREPYKVLIDGTFVHHLLTQRLLPADEALRDLLSASRTPALFTSKCILAELRRLGKSHAESFDAAQLLTTTKCEHDKVVGAVNCVQSLIGDKNPEHFFVATQDPGLRENLREIPGVPVIYGLKNSLCIERPSMQQRKFAQLDEEKRLNMDISEYKKLLKAASEGKTIASENGSGEEQHEMPISSLVKNALHVTDKTKFKRNKAKGPNPLSCKKKKPKLPTAIQKQAGTADGEAKRKRVRKRKRGQKDNKQLEAAN

SEQ ID NO: 2875 - DNA, 590 bp, Zea mays
  misc_feature: Ceres CLONE ID no. 688457
  misc_feature: Ceres CDNA ID no. 40351178
  CDS (1)..(171): REFERENCED BY SEQ ID NO: 2876
agtcaaggtctattcaacttcagttgcaatgcttctgacagcagttgtatctgtcttcttgttcaacttccatttatccctcgcattcttccttggatccacagttgtttccgtctcagtgtacctgcactcaattggaaaacttcaaccacagaaataaggtttgtttagtcactgattgctgactgctcctcgtctgttagtaatcactggataacacaggattggtgaagatggaatatgggattcattatcggtgtttggtgctttgaggctataagaaaagcttcagtggagatgagatttgattgcatagttgtgaaagttagtaggtggtcaaagtaagaaccagaaatgtatttttggaggggttctagctattatccggtctagtttttgttctattctatcaagtcgagttcgttgatcgctaaccgcatccgtgcctagtttttgatatatcaaacgcacatttattgtaatgctagtattttgaaatactaggtagtacccaattgttgtatggagctagttgtcttttcattctaatgtatagaattaccattcttttcaaaaaaaaaaaaaaaaaa

SEQ ID NO: 2876 - protein, 43 aa, Zea mays
  misc_feature: Ceres CLONE ID no. 688457
  misc_feature: Ceres CDNA ID no. 40351178
  misc_feature (3)..(27): Pfam Name: Nuc_sug_transp PFAM Desc: Nucleotide
MLLTAVVSVFLFNFHLSLAFFLGSTVVSVSVYLHSIGKLQPQK

SEQ ID NO: 2877 - DNA, 476 bp, Zea mays
  misc_feature: Ceres CLONE ID no. 689332
  misc_feature: Ceres CDNA ID no. 25446001
  CDS (3)..(236): REFERENCED BY SEQ ID NO: 2878
ggtgtgagtgcatgcagcgaggaagcatgcttgccatgccgtccgcccggagcttcggcgccgcgggctggtggcgtgtgagcagggatgcttcggcggtgcacaagaaagaaggcaagtcttatcggcaagggaaggctaagcctttcttccaggtctccctctctccatctaaatcattctatgtgttcggaggagggggcaatcgatcgttacttactggtctcctgacctagcggtcatgtctctgtgtgtgtgtgcgcgctccatccgtgttgatttccagctagaataatgaccagttcagagtgaatgtgtgagcgtgtgtgttcaagtgtcagattgtcagtgagtgaaccttgcgttgtattttgaccgtgtgagtccgtgtattttcagttgtctggtgtgttgtgtgggagtatctctgaataagaatgtaatgctatatgtaaaagaaaaaaaaaaaaaaaaaa

SEQ ID NO: 2878 - protein, 74 aa, Zea mays
  misc_feature: Ceres CLONE ID no. 689332
  misc_feature: Ceres CDNA ID no. 25446001
MQRGSMLAMPSARSFGAAGWWRVSRDASAVHKKEGKSYRQGKAKPFFQVSLSPSKSFYVFGGGGNRSLLTGLLT

SEQ ID NO: 2879 - DNA, 1037 bp, Zea mays
  misc_feature: Ceres CLONE ID no. 689414
  misc_feature: Ceres CDNA ID no. 29191901
  CDS (152)..(799): REFERENCED BY SEQ ID NO: 2880
aacctggtgctccgcccctcgccgttaccgcgacgcttcggcctctggctccaccgcctgcctccgtggctccgtgacgagacacgacgccgagaggtcacccccacaccgcgccgaggccaccccgcttgggattgtgaggtaaagcgtgatggcagcgccaccggcgagggcccgagccgactacgactacctcatcaaactgctcctcatcggtgacagcggagttggaaaaagttgtctcctgttacggttctcagatggatcattcaccactagctttattaccactattggcattgacttcaagataaggactgtcgagttggatggcaaacggattaagttgcagatctgggacactgcaggccaagaacgtttccgcacgattactactgcttactacaggggagcaatgggcatcttgcttgtgtacgatgtcacagacgagtcatctttcaataacataagaaattggatcagaaacattgagcaacatgcttcggataacgtgaacaaaattctggtggggaataaagctgatatggatgaaagcaaacgggctgtgcccacttcgaaggggcaagctctcgctgacgaatacgggataaagttttttgaaacgagtgcaaagacaaacctgaatgtcgagcaggttttcttttccatagcaagggacatcaaacagagactttcggagaccgattccaagcctgaggatcgaactatcaagatcaaggctgaaggggaagctgaggcagcggcggcggcgcagaattcagcttgctgtggctcctgagcacttgtcaccgcaagatagtggcgttctcgcgcatgtaattttcatcgtttcattctttgccagcgactctctccttgtgcttcttgagctatcgcagttgctgtggcctggacaaatgggtgttaactgttaagtcagagcggttacttgctgtattgtgggaactctacccatggtaaggcgtgcataatggctgtgcaaagtacctttttacacgaaaaaaaaaaaaaaaaaa

SEQ ID NO: 2880 - protein, 215 aa, Zea mays
  misc_feature: Ceres CLONE ID no. 689414
  misc_feature: Ceres CDNA ID no. 29191901
  misc_feature: null
  misc_feature: Useful for making plants with altered Lignin content
  misc_feature (1)..(177): Pfam Name: Arf PFAM Desc: ADP
  misc_feature: Homolog of GI Number: 50919469 NR Desc: ethylene
  misc_feature: Homolog of GI Number: 46326983 NR Desc: ethylene
  misc_feature: Homolog of GI Number: 50935375 NR Desc: putative ethylene
  misc_feature: Homolog of GI Number: 50931689 NR Desc: putative GTP
  misc_feature: Homolog of GI Number: 18447917 NR Desc: ras
  misc_feature: Homolog of GI Number: 18447919 NR Desc: ras
  misc_feature: Homolog of GI Number: 18447921 NR Desc: ras
  misc_feature: Homolog of GI Number: 2808638 NR Desc: small GTP
  misc_feature: Homolog of GI Number: 871510 NR Desc: small GTP
  misc_feature: Homolog of GI Number: 1370194 NR Desc: RAB8C
MAAPPARARADYDYLIKLLLIGDSGVGKSCLLLRFSDGSFTTSFITTIGIDFKIRTVELDGKRIKLQIWDTAGQERFRTITTAYYRGAMGILLVYDVTDESSFNNIRNWIRNIEQHASDNVNKILVGNKADMDESKRAVPTSKGQALADEYGIKFFETSAKTNLNVEQVFFSIARDIKQRLSETDSKPEDRTIKIKAEGEAEAAAAAQNSACCGS

SEQ ID NO: 2881 - DNA, 1299 bp, Zea mays
  misc_feature: Ceres CLONE ID no. 689435
  misc_feature: Ceres CDNA ID no. 36587947
  CDS (38)..(1132): REFERENCED BY SEQ ID NO: 2882
atcccaaagagagaaagtagcagtatcagcgtatcatatggagctcagccccaacaacagcacggaccagagcttgctcgatgcgcagctcgagctctggcacaccaccttcgcgttcatgaagtccatggcgctcaagtccgcaatacacctccgaattgccgatgccatccacctccatggcggtgccgccagcctatcccagatactaagcaaggtccatctccacccgtccagagtttccagcctccgtcgcctgatgcgcgtgctaacaaccaccaatgtcttcggcacccagcagccggctggtggcagtgacgacgacagtgagcccgtctacactctcactccagtgtctcgcctcctcatcgcctcacagtcgtcgcagctggcccagactccgttggcggccatggtgctcgatccaaccatcgtctcccccttcttcgagctcgccgcgtggttccagcacgagctcccagacccgtgcatcttcaagcacacgcacggccgaggcatctgggagttgaccaaagatgacgcgaccttcgacgccctagtcaacgacgggttggcttccgacagccagctcatcgtcgacgttgccatcaagcagagcgcagaggtcttccaggggataagctcgctcgtcgacgtcggtgggggcatcggtgcggcggcccaagccatctcaaaggcgttcccgcacgtcaagtgtagcgtgctggaccttgcccacgtcgttgcgaaggctccaactcacacggacgtgcaatttatcgctggcgacatgtttgagagcattccaccagcagacgccgtactgttgaagtcggtcttgcatgattgggaccatgacgactgcgtgaagatactgaagaattgcaaaaaggctattcctccaagagaagccggtggaaaggtgataataataaacatggtagttggagctgggccatctgacatgaagcacaaagagatgcaggccatattcgatgtctatatcatgttcatcaatggcatggaacgagatgagcaggagtggagcaagattttctccgaagctggatatagcgattacagaataataccggtcttaggtgttcggtctataatcgaggtctatccataaccatttgtgtaagatggttcatatatagtggcatggatcggagcttgtgtggtgtggacatgtaatctaaataagtgggtaccccgctgtgatgctgatctatatcgtgctctctgtcgagatatctattcagtaaacgtatattctataaaaaaaaaaaaaaaaaa

SEQ ID NO: 2882 - protein, 364 aa, Zea mays
  misc_feature: Ceres CLONE ID no. 689435
  misc_feature: Ceres CDNA ID no. 36587947
  misc_feature (31)..(84): Pfam Name: Dimerisation PFAM Desc: Dimerisation domain
  misc_feature (89)..(341): Pfam Name: Methyltransf_2 PFAM Desc: O
  misc_feature: Homolog of GI Number: 1353193 NR Desc: O
  misc_feature: Homolog of GI Number: 51451358 NR Desc: putative o
  misc_feature: Homolog of GI Number: 51451359 NR Desc: putative o
  misc_feature: Homolog of GI Number: 77555544 NR Desc: o
  misc_feature: Homolog of GI Number: 77554920 NR Desc: o
  misc_feature: Homolog of GI Number: 77554955 NR Desc: o
  misc_feature: Homolog of GI Number: 31429903 NR Desc: putative o
  misc_feature: Homolog of GI Number: 50253195 NR Desc: flavonoid 7
  misc_feature: Homolog of GI Number: 31429900 NR Desc: putative o
  misc_feature: Homolog of GI Number: 55297348 NR Desc: putative o
MELSPNNSTDQSLLDAQLELWHTTFAFMKSMALKSAIHLRIADAIHLHGGAASLSQILSKVHLHPSRVSSLRRLMRVLTTTNVFGTQQPAGGSDDDSEPVYTLTPVSRLLIASQSSQLAQTPLAAMVLDPTIVSPFFELAAWFQHELPDPCIFKHTHGRGIWELTKDDATFDALVNDGLASDSQLIVDVAIKQSAEVFQGISSLVDVGGGIGAAAQAISKAFPHVKCSVLDLAHVVAKAPTHTDVQFIAGDMFESIPPADAVLLKSVLHDWDHDDCVKILKNCKKAIPPREAGGKVIIINMVVGAGPSDMKHKEMQAIFDVYIMFINGMERDEQEWSKIFSEAGYSDYRIIPVLGVRSIIEVYP

SEQ ID NO: 2883 - DNA, 771 bp, Zea mays
  misc_feature: Ceres CLONE ID no. 689591
  misc_feature: Ceres CDNA ID no. 25087649
  CDS (117)..(638): REFERENCED BY SEQ ID NO: 2884
aaaccagcacccgccgcccacaggaacatcgccgcccagatcggctgcatacctgttcttcttctgggcgccggagttcgcatcgtcggctcgtcgttcggtaacttgggggagcaatgggaggagggaaagacaagcatgacgagagcgacaaggggctcttctcaaacttgatgcacggcgttgccggtggccatgggtaccccccgcagggataccctccgcagggctacccaccgcaaccaggagcatacccacctcccccaggggcgtatcctcctccacccggcgcatacccaccacaatatgggtaccctcagccgggtggctacccacctcaaggtggatatcctcctgcaggctaccccggctcatctcaccagggttatgggagcagccactccgggggccacatggggacgggggcaatgctagctggaggtgccgccgccgccgctgctgcttacggagcacacaagctttctcatggccatagcggacacggtggacatgggccctttggaggccatggtcgtggtcgtggtggttatggccgtggtcgtggccaccacggcaagttcaagcatggcaagcatggacacggcatgttcggcggcaagttcaagaagtggaagtgatgtgttgatcgtagctagcggtggtaatggatcacgatttaaatgtttcttcacaatatgttagagaccgtaaataattttaatttaaaaatgaatagaaatatagctcgatcctaaaaaaaaaaaaaaaaaa

SEQ ID NO: 2884 - protein, 173 aa, Zea mays
  misc_feature: Ceres CLONE ID no. 689591
  misc_feature: Ceres CDNA ID no. 25087649
  misc_feature (45)..(49): Pfam Name: XYPPX PFAM Desc: XYPPX repeat
  misc_feature (52)..(56): Pfam Name: XYPPX PFAM Desc: XYPPX repeat
  misc_feature: Homolog of GI Number: 33668156 NR Desc: GPRP
  misc_feature: Homolog of GI Number: 6478148 NR Desc: putative glycine and proline
  misc_feature: Homolog of GI Number: 9755790 NR Desc: glycine/proline
  misc_feature: Homolog of GI Number: 297887 NR Desc: glycine rich protein
  misc_feature: Homolog of GI Number: 3288572 NR Desc: annexin max4
  misc_feature: Homolog of GI Number: 32401408 NR Desc: annexin A11b
  misc_feature: Homolog of GI Number: 32401406 NR Desc: annexin 11a isoform 1
  misc_feature: Homolog of GI Number: 34536830 NR Desc: annexin 11a isoform 2
  misc_feature: Homolog of GI Number: 45511081 NR Desc: rhodopsin
MGGGKDKHDESDKGLFSNLMHGVAGGHGYPPQGYPPQGYPPQPGAYPPPPGAYPPPPGAYPPQYGYPQPGGYPPQGGYPPAGYPGSSHQGYGSSHSGGHMGTGAMLAGGAAAAAAAYGAHKLSHGHSGHGGHGPFGGHGRGRGGYGRGRGHHGKFKHGKHGHGMFGGKFKKWK

SEQ ID NO: 2885 - DNA, 761 bp, Zea mays
  misc_feature: Ceres CLONE ID no. 689891
  misc_feature: Ceres CDNA ID no. 40351179
  CDS (119)..(523): REFERENCED BY SEQ ID NO: 2886
accatcacatcacaggcgcttattagcagtcgggttattaatataaggccgcccagccagcctaatcactccgcataattcgtgcttgtgatcgagcagctgtcgctgtgtgtgtataatggcactggcaggcaaggcatcggtcgcgctgttcctcgccgtgaacctggcggtgttcatcgccatggccagcgcctgcggtggcaactgccccacgccgaccccgtccaccccgtcgacgccgaccccgacgccggcctcgttcggcaagtgcccccgcgacgcgctcaagctgggcgtgtgcgccaacgtgctgggactgatcaaggccaaggtgggcgtgccgcccacggagccatgctgccggctgctggaggggctcgtcgacctcgaggccgccgtgtgcctctgcaccgccatcaagggcgaggtcctcggaatcaagctcaacctgcccgtcgacctcagcctcatcctcaaccactgcggcaagaccgtgcccaccggattcaaatgcctctaagtctaagcacgcattcagccgcgcgctcgtcgctgaagagtgtagctggatcgtttggattcagatttatttggtttgtatcgtttgtactggtctgtacacgtagctcttgtctgatcagatttggtttcccttgcttgcattgattttcgatctgtttgttttaatcgttttgtattattcgatctctgtatgaataaatacttttatctgttcagtaaaaaaaaaaaaaaaaaaa

SEQ ID NO: 2886 - protein, 134 aa, Zea mays
  misc_feature: Ceres CLONE ID no. 689891
  misc_feature: Ceres CDNA ID no. 40351179
  misc_feature (52)..(133): Pfam Name: Tryp_alpha_amyl PFAM Desc: Protease inhibitor/seed storage/LTP family
MALAGKASVALFLAVNLAVFIAMASACGGNCPTPTPSTPSTPTPTPASFGKCPRDALKLGVCANVLGLIKAKVGVPPTEPCCRLLEGLVDLEAAVCLCTAIKGEVLGIKLNLPVDLSLILNHCGKTVPTGFKCL

SEQ ID NO: 2887 - DNA, 568 bp, Zea mays
  misc_feature: Ceres CLONE ID no. 689914
  misc_feature: Ceres CDNA ID no. 25446445
  CDS (146)..(391): REFERENCED BY SEQ ID NO: 2888
atacctccatgcacggcccttcccacttcccctcggccggtgcccggtggttccaagttttgatttggttaggtcactgcgtattcctcttctgtggattgtctcgcctcttcgaattccccgtgtttaggagtgttaggacaagatggtggccaatggtgatgcacctgctagagggagcgcggcggcagctgcaagcctgcgtaggcgtaggaccacaagtggtgctgctgctggtggaggcggtgccagctcaatgctccaattctacactgacgagactgctggccgcaaaatgtcaccaaacactgttctgatcatgagtattgggttcgtagccgtcgttgctgtgctccatgtattcgggaagctgtaccgcacctccaactaggttggcattgccatatccaagacagctgagttcaccaagagaggattcctgtagaacaatttaaatggatagcaagtgactatcagactcttgtagaagtttatttatacaacttgcaatgctgcgaggctattcataaatgcctgcgagtttttgtttaaaaaaaaaaaaaaaaaa

SEQ ID NO: 2888 - protein, 81 aa, Zea mays
  misc_feature: Ceres CLONE ID no. 689914
  misc_feature: Ceres CDNA ID no. 25446445
  misc_feature (32)..(77): Pfam Name: Sec61_beta PFAM Desc: Sec61beta family
  misc_feature: Homolog of GI Number: 34914212 NR Desc: P0697C12.13
  misc_feature: Homolog of GI Number: 77553785 NR Desc: Sec61beta family
  misc_feature: Homolog of GI Number: 24030258 NR Desc: putative transport protein SEC61 beta
  misc_feature: Homolog of GI Number: 7288002 NR Desc: transport protein subunit
  misc_feature: Homolog of GI Number: 26450635 NR Desc: putative transport protein subunit
  misc_feature: Homolog of GI Number: 77548256 NR Desc: protein transport protein subunit
  misc_feature: Homolog of GI Number: 77552788 NR Desc: protein transport protein subunit
  misc_feature: Homolog of GI Number: 54635780 NR Desc: GA10096
  misc_feature: Homolog of GI Number: 66847870 NR Desc: translocon subunit
  misc_feature: Homolog of GI Number: 38048293 NR Desc: similar to Drosophila melanogaster Sec61beta
MVANGDAPARGSAAAAASLRRRRTTSGAAAGGGGASSMLQFYTDETAGRKMSPNTVLIMSIGFVAVVAVLHVFGKLYRTSN

SEQ ID NO: 2889 - DNA, 621 bp, Glycine max
  misc_feature: Ceres CLONE ID no. 690232
  misc_feature: Ceres CDNA ID no. 40351180
  CDS (70)..(438): REFERENCED BY SEQ ID NO: 2890
gttggagttgttcgcaagaaaccggagcgttgattttcttctatttctcgatcgtcttcacgaggaagaatggcaaagagttacttcaaacaagagcatgatcttgagaagagaagagctgaggctgctaggattagagagaaatacccagaccgtatcccggtgattgtggagaaggcagaaagaagtgatatcccaagtattgacaagaagaagtaccttgtccctgctgatctgacagttggacagtttgtctatgttatccgcaaaaggattaaattaagtgcagaaaaggcaatctttatctttgtggacaacgtccttccacctacaggagcaattatgtcttccatatatgatgagaagaaggatgaagatgggtttctttatgttacttacagtggagagaacacttttggggatctgacttcccattagcattattttaaagattggcactataatataattgctttctcattggccagtctcataaatttgtatcggtactcgatatcaaagaacattgctctcaatacaatgtacagtttgtatataaactctaagaagaacctgtttaatgttaaaaatgtttcctcctttccaaaaaaaaaaaaaaaa

SEQ ID NO: 2890 - protein, 122 aa, Glycine max
  misc_feature: Ceres CLONE ID no. 690232
  misc_feature: Ceres CDNA ID no. 40351180
  misc_feature (14)..(117): Pfam Name: MAP1_LC3 PFAM Desc: Microtubule associated protein 1A/1B
MAKSYFKQEHDLEKRRAEAARIREKYPDRIPVIVEKAERSDIPSIDKKKYLVPADLTVGQFVYVIRKRIKLSAEKAIFIFVDNVLPPTGAIMSSIYDEKKDEDGFLYVTYSGENTFGDLTSH

SEQ ID NO: 2891 - DNA, 654 bp, Glycine max
  misc_feature: Ceres CLONE ID no. 690240
  misc_feature: Ceres CDNA ID no. 40351181
  CDS (138)..(374): REFERENCED BY SEQ ID NO: 2892
aaaacaaaacaattgcgtgtatgtgagaatcacttgttcatatatattctttccttcctccattcaacactcataactcaaatcctcggagagaaaaaaagttagggttttgcattttggatcagtcagactcagacatgggaggaggcaatgcccagaagtcaaagatggctcgcgagaagaatctcgagaagcagaaagcagcggctaaggggagccagttggattcaaacaagaaagctatgtctattcagtgtaaggtgtgcatgcaaacatttatatgcaccacatcagaagtgaagtgtaaggagcatgctgaagccaaacaccccaaatctgatctctatgtttgttttcctcatcttaaaaagtgaaagagttcatgttgagacatgatatcaatatatggcctgttctacagtctctatccacatagatcttcaatttcttttaatataaaatatgtctgtgtgtttgtgtcttcaggggtagtgagagacgagaggggataattagtaagtttttccattgttcaagtgtgagaaactatgttaattttctctttttttgtcaaattgtaacttatgaatgatcattagtgtcaatattaagcttcttacagaatcatagattacaagaaaaaaaaaaaaaaaa

SEQ ID NO: 2892 - protein, 78 aa, Glycine max
  misc_feature: Ceres CLONE ID no. 690240
  misc_feature: Ceres CDNA ID no. 40351181
MGGGNAQKSKMAREKNLEKQKAAAKGSQLDSNKKAMSIQCKVCMQTFICTTSEVKCKEHAEAKHPKSDLYVCFPHLKK

SEQ ID NO: 2893 - DNA, 1619 bp, Glycine max
  misc_feature: Ceres CLONE ID no. 690460
  misc_feature: Ceres CDNA ID no. 35383258
  CDS (97)..(1434): REFERENCED BY SEQ ID NO: 2894
attactagtttagtcactacacttttttcactttctcgggaaaatcacagcgacgctcaggaaaaactctaaactgtgaaaaaaccactgcgatcaatggcaacgatcaaggccgtgaaagctcgccagatcttcgacagccgtggaaatccaaccgtcgaagttgacgttattctcagcgatggaagcttccacagagccgccgtgcctagcggtgcttcaacaggtgtttatgaggctttggaattaagggatggaggctcagactacctcgggaaaggtgttctcaaggctgtggagaatgttaattcaattatagcacctgctctgcttggcaaggacccaacgaagcagactgaaattgacaattttatggtacagcagcttgatggaactgttaatgaatgggggtggtgcaagcagaagcttggagccaatgctattttggcagtgtcacttgctgtctgcaaggctggtgctgcagtgaagaaaattcctctgtacaagcacattgccaatctggctggaaacaagactttggtactgcctgtaccttcattcaatgttatcaatggaggctcacatgctggaaataagctagcaatgcaggaatttatgattctccctgttggggcatcttccttcaaagaagcaatgaaaatgggcgtagaagtataccatcatctaaaggctgttattaaaaagaaatacggtcaggatgctactaacgttggtgatgaaggtggctttgctcctaatatccaggaaaaccaagaaggtcttgagcttctgaagactgccattgccaaagctggttacactggaaaggttgtaattgggatggatgttgctgcttcagaattttatgataacaaggacaaaacctatgacttgaattttaaggaagagaataatgatggatcacagaaaatctcaggagacagcttaaagaatgtgtacaaatcatatgtgacagattatccaattgtgtccattgaggatccatttgatcaggatgactgggagcactatgcaaaattaacagctgaagttggccagcaagtgcagattgttggtgatgatctccttgtcaccaacccgaagcgggtggagaaagcaatcaaggagaaggcttgcaatgcccttctgttgaaggtgaatcaaattggtagtgtaactgaaagtattgaagctgtgagaatgtctaaacaagctggttggggtgtcatggctagccacaggagtggtgaaactgaggataccttcatcgctgacctctcagttggattagcaactggtcagatcaagactggagctccctgccgatctgaaaggcttgccaagtacaaccagctcctgaggattgaggaggaacttggttctgctgctgtgtatgctggtgccaaattcagagcccccgtggagccctactgattgtttagcccaagattaccaagcatcatttaaataagattctattgatgactgcataggacatgtattttttgcgaaaaataaacttgtctactacttcagagaatataggttttccgggcgtggaattttaaaaaaaaaaaaaaaaaaaaaaaaaaaaaaaaaaaataaaaaaaaaaaaaaaa

SEQ ID NO: 2894 - protein, 445 aa, Glycine max
  misc_feature: Ceres CLONE ID no. 690460
  misc_feature: Ceres CDNA ID no. 35383258
  misc_feature (147)..(442): Pfam Name: Enolase_C PFAM Desc: Enolase
  misc_feature (3)..(139): Pfam Name: Enolase_N PFAM Desc: Enolase
  misc_feature: Homolog of GI Number: 24580920 NR Desc: CG17654
  misc_feature: Homolog of GI Number: 21392248 NR Desc: SD23356p
  misc_feature: Homolog of GI Number: 780372 NR Desc: enolase
  misc_feature: Homolog of GI Number: 29650775 NR Desc: enolase
  misc_feature: Homolog of GI Number: 42521309 NR Desc: enolase
  misc_feature: Homolog of GI Number: 33113259 NR Desc: enolase
  misc_feature: Homolog of GI Number: 433609 NR Desc: enolase
  misc_feature: Homolog of GI Number: 8919731 NR Desc: enolase
  misc_feature: Homolog of GI Number: 22273 NR Desc: enolase
  misc_feature: Homolog of GI Number: 9581744 NR Desc: enolase
MATIKAVKARQIFDSRGNPTVEVDVILSDGSFHRAAVPSGASTGVYEALELRDGGSDYLGKGVLKAVENVNSIIAPALLGKDPTKQTEIDNFMVQQLDGTVNEWGWCKQKLGANAILAVSLAVCKAGAAVKKIPLYKHIANLAGNKTLVLPVPSFNVINGGSHAGNKLAMQEFMILPVGASSFKEAMKMGVEVYHHLKAVIKKKYGQDATNVGDEGGFAPNIQENQEGLELLKTAIAKAGYTGKVVIGMDVAASEFYDNKDKTYDLNFKEENNDGSQKISGDSLKNVYKSYVTDYPIVSIEDPFDQDDWEHYAKLTAEVGQQVQIVGDDLLVTNPKRVEKAIKEKACNALLLKVNQIGSVTESIEAVRMSKQAGWGVMASHRSGETEDTFIADLSVGLATGQIKTGAPCRSERLAKYNQLLRIEEELGSAAVYAGAKFRAPVEPY

SEQ ID NO: 2895 - DNA, 764 bp, Glycine max
  misc_feature: Ceres CLONE ID no. 690514
  misc_feature: Ceres CDNA ID no. 40351182
  CDS (186)..(497): REFERENCED BY SEQ ID NO: 2896
gtaccgcgaaacgcacatttcactattcattctcgtttccctttcggtaatttccaattactagttactaatttctccatgctttcttcatcttacgcttaatccttatggtttcgtttaattgttgttctaattgctgcttgttgcagactgtgattgtttgttaactgaacttttcgagcaaaatgtctggacgtggaaaggggggcaagggtttgggaaagggaggagcgaaacgacaccgtaaggtgttgcgcgataacattcagggaatcaccaagcctgcgattcggcgtttggctcgcaggggtggtgtgaagcgtatcagtggtctcatctacgaggagacacgtggcgtgctcaagatctttctggagaacgtgattcgtgacgccgttacctacactgagcacgctaggagaaagaccgttacggcaatggatgtggtttatgctctcaagagacaaggaagaaccctctacggatttggaggctagtttgtttttttttttttttttttaatttttattgttaggtttcgtttgttttggaggtttatgtgggatgtaagagacccttgctattagggagatagggaaaaaaattgcaaggatttggtgtagtaagttgctggtggtgttttaggtataagggtttctataacatgtaatgtattgagctatattgctgccaagcttgtaattgtatcacaatatgttgctaatgtcagattcttgtttttctgtttaaaaaaaaaaaaaaaa

SEQ ID NO: 2896 - protein, 103 aa, Glycine max; identical to SEQ ID NO: 8
  misc_feature: Ceres CLONE ID no. 690514
  misc_feature: Ceres CDNA ID no. 40351182
  misc_feature (66)..(92): Pfam Name: TAF PFAM Desc: TATA box binding protein associated factor

SEQ ID NO: 2897 - DNA, 650 bp, Glycine max
  misc_feature: Ceres CLONE ID no. 691483
  misc_feature: Ceres CDNA ID no. 40041298
  CDS (43)..(411): REFERENCED BY SEQ ID NO: 2898
gaaagtttgcattcttaattttgtttgtaaaggagacgagacatggcttatgctgcaatgaaacccactaagcccggcttggaggagtcacaggagcaaatccataagattagaatcaccctttcctctaagaacgtcaagaatctcgagaaggtttgtgctgacctggttcgtggtgccaaggacaagcatctcagggtgaagggacctgttaggatgccaactaaagttcttaacatcaccaccagaaaatccccctgtggtgaaggcaccaacacatgggacagatttgagctgcgtgtacacaaaagagtcattgacctctacagttcccctgatgtggttaagcagataacctcgatcacaattgaacctggtgtcgaggttgaggtgaccattgcagatgcttgattttggcatgctagttgattttgtaatttagccccttggctaggaatatgttgagtcaaatacaccagggttaatgcatttccttttgccttttcaatttttgaagttgattattgtggaaggggtattgatttgatcgattatcttttgttttgtgtttgtcgactttgaagaataccatgacaaatgccatgaatctttcgtgtcaaatatttttagcttcaaaaaaaaaaaaaaaa

SEQ ID NO: 2898 - protein, 122 aa, Glycine max
  misc_feature: Ceres CLONE ID no. 691483
  misc_feature: Ceres CDNA ID no. 40041298
  misc_feature: The plant flowers significantly late compared to wild-type.
  misc_feature: The plant is abnormally large.
  misc_feature: null
  misc_feature: Useful for making plants with modulated biomass
  misc_feature: Useful for making plants with modulated flowering time
  misc_feature: Useful for making plants with modulated phosphate use efficiency
  misc_feature (22)..(117): Pfam Name: Ribosomal_S10 PFAM Desc: Ribosomal protein S10p/S20e
  misc_feature: Homolog of GI Number: 79314572 NR Desc: structural constituent of ribosome
  misc_feature: Homolog of GI Number: 21281054 NR Desc: putative 40S ribsomomal protein
  misc_feature: Homolog of GI Number: 23198348 NR Desc: 40S ribosomal protein S20
  misc_feature: Homolog of GI Number: 31430421 NR Desc: putative ribosomal protein S10p/S20e
  misc_feature: Homolog of GI Number: 55775376 NR Desc: 40S subunit ribosomal protein
  misc_feature: Homolog of GI Number: 54208698 NR Desc: ribosomal protein S10p/S20e
  misc_feature: Homolog of GI Number: 50933555 NR Desc: 40S ribosomal protein S20
  misc_feature: Homolog of GI Number: 14716982 NR Desc: putative 40S ribosomal protein 20S protein
  misc_feature: Homolog of GI Number: 50801483 NR Desc:  similar to putative 40S ribosomal protein 20S protein
  misc_feature: Homolog of GI Number: 20805825 NR Desc: ribosomal protein S20
  misc_feature: Useful for making shorter plants
  misc_feature: Useful for sterility
  misc_feature: Useful for sterility
MAYAAMKPTKPGLEESQEQIHKIRITLSSKNVKNLEKVCADLVRGAKDKHLRVKGPVRMPTKVLNITTRKSPCGEGTNTWDRFELRVHKRVIDLYSSPDVVKQITSITIEPGVEVEVTIADA

SEQ ID NO: 2899 - DNA, 461 bp, Glycine max
  misc_feature: Ceres CLONE ID no. 693569
  misc_feature: Ceres CDNA ID no. 40351183
  CDS (83)..(355): REFERENCED BY SEQ ID NO: 2900
actcgcagttgtattgttgaacaagggtttctctgtctgcttcttcactttctctcgtttcaatcgaaaccaaaacaaaatcatgggcagaaaattcttcgttggtggcaactggaaatgcaatgggaccactgaggaggtaaagaagattgttactactttgaatgaggctaaagtccctggagaagatgtcgtagaagttgttgtgagccctccttttgtgttccttcctgttgtaaaaagtttgctgcgccctgatttccatgtttcggcacaaaactgttgggttcgcaaaggtggtgcttataccggtgaggttagtgctgaaatgcttgttaatttaattagaaaatagtagaaaataggagcctagaggttgacatgattatgtatatacatttgattatattttggaaaatagaataaaagcaatatcttctttcacaaaaaaaaaaaaaaaa

SEQ ID NO: 2900 - protein, 90 aa, Glycine max
  misc_feature: Ceres CLONE ID no. 693569
  misc_feature: Ceres CDNA ID no. 40351183
  misc_feature (5)..(87): Pfam Name: TIM PFAM Desc: Triosephosphate isomerase
MGRKFFVGGNWKCNGTTEEVKKIVTTLNEAKVPGEDVVEVVVSPPFVFLPVVKSLLRPDFHVSAQNCWVRKGGAYTGEVSAEMLVNLIRK

SEQ ID NO: 2901 - DNA, 1164 bp, Glycine max
  misc_feature: Ceres CLONE ID no. 693716
  misc_feature: Ceres CDNA ID no. 40351184
  CDS (124)..(1068): REFERENCED BY SEQ ID NO: 2902
acacaaacatctctctctctctctctctctctcatctctctctctctctctctctaagacacacaaacactacacatcacaatctcacattgttctcaagtttcaacactttctagttctaccatggcggtaggactctccgccgccataaccatgaagtccctcctccgtttccaccaacctcacctgaacctccccaaatcaatcccaacaacactccctttctcccccatgagaattttccaccacacagcatcaccaagaacccaaaaagtttcaactttcaccgtttgtgtcctcatgcaggacccaaaacaaggcacccacatggaaattgagccacaagaacaacctcctcctcctcctcctcctcccgctcaacaagttctgtcaccaaagttggctgagaaattggccagaaaagagtctgagaggttcacttaccttgttgctgctgtcatgtctagcttcggcatcacatccatggcagtgttcgctgtttattgcagattctcgtggcaaatggagggtggagaagtgccttggtctgaaatgtttggcacatttgctctatcagtgggagctgctgtgggtatggaattttgggctagatgggctcatagggctctctggcatgcttcgctgtggcacatgcatgagtcccaccatcgaccaagagaaggacccttcgagcttaacgatgtatttgcaataatcaacgctgtccctgccatcgctctcctttcctatggtttctttaacaagggactggtccctggcctttgctttggtgcgggtcttggaattacggtctttgggatggcctacatgtttgtacacgatggattggttcataagagattcccggtgggccccattgcaaacgtgccctatctcagaagggtggcctctgctcaccaacttcaccattcggaaaaattcaatggagtgccatatgggctgtttttgggacccaaggaaattgaagaggtgggagggctagaagagctggagaaagagataagtaggagagcaagatcatacaaaatagctaatgagaacaactaatacaaatcaagaatgtttcgaagaattatcagtgtaaatcagaaatatgaaataaaatgatccaaaaattttgcttgcacaaaaaaaaaaaaaaaa

SEQ ID NO: 2902 - protein, 314 aa, Glycine max
  misc_feature: Ceres CLONE ID no. 693716
  misc_feature: Ceres CDNA ID no. 40351184
  misc_feature (145)..(304): Pfam Name: Carotene_hydrox PFAM Desc: Carotene hydroxylase
MAVGLSAAITMKSLLRFHQPHLNLPKSIPTTLPFSPMRIFHHTASPRTQKVSTFTVCVLMQDPKQGTHMEIEPQEQPPPPPPPPAQQVLSPKLAEKLARKESERFTYLVAAVMSSFGITSMAVFAVYCRFSWQMEGGEVPWSEMFGTFALSVGAAVGMEFWARWAHRALWHASLWHMHESHHRPREGPFELNDVFAIINAVPAIALLSYGFFNKGLVPGLCFGAGLGITVFGMAYMFVHDGLVHKRFPVGPIANVPYLRRVASAHQLHHSEKFNGVPYGLFLGPKEIEEVGGLEELEKEISRRARSYKIANENN

SEQ ID NO: 2903 - DNA, 1004 bp, Glycine max
  misc_feature: Ceres CLONE ID no. 694191
  misc_feature: Ceres CDNA ID no. 40351185
  CDS (231)..(431): REFERENCED BY SEQ ID NO: 2904
aatcaatcgatcacggatcgttgatttttagaacaagatcatcatcatagtataaaagctcaaaagctgtttgtgtgtatgttacggttgggccatcttgtccatctatccaaatttccccatcccgcaactaatttatttattatttttcctttatttatcttctttctctggctcgagcatccaaaagggttgttttttttttttataagaagaagaggagagggaagatgatgatgatgacaatggaggggatgatggacaagggggtgttggatgatgtgataagaaggcttctggaagggaaaggagggaaacaggtgcaactctctgagtcggagatccgtcaactctgcgtcaacgccagacaaatcttcctctctcagccaattcttctcgacctccgtgctcccatccgcatctgcggttagccacctctttcccctttataatcacactattttccatatacatatctcatttaccctttatctcctctctcttttttattagcttgcttcttttgtttacgtgattgttgccatatatgtgaccaccgcgatttagatgatcatttggtgagcaagttttttctttttttttttttagataccataagtatcttcgcgggagtcaaatctttctcttgaacgtgacaaaaggatgatttgccttgcttgaaaaggatgatattattttaattatatgtattaaaatcagcgggagatgtctgtttgtttttgtttagaaggtgaaggaaaattgcttacaagctctggagaaagaaaaaaaaaatggaactttggcttttggaatttagaacattggtcaatcaaggaagacaatgataccatgatatgtgccctgtttatttaatgaattattaaatggaaacagacgggaggaaagagatatttgttcacaattgtttgctgaaactgtaatttgatttcatgtgccttttttaaaaaatttgatgtttttctccaaaaaaaaaaaaaaaa

SEQ ID NO: 2904 - protein, 64 aa, Glycine max
  misc_feature: Ceres CLONE ID no. 694191
  misc_feature: Ceres CDNA ID no. 40351185
MMTMEGMMDKGVLDDVIRRLLEGKGGKQVQLSESEIRQLCVNARQIFLSQPILLDLRAPIRICG

SEQ ID NO: 2905 - DNA, 1556 bp, Glycine max
  misc_feature: Ceres CLONE ID no. 695333
  misc_feature: Ceres CDNA ID no. 24766454
  CDS (80)..(1126): REFERENCED BY SEQ ID NO: 2906
cattttgattttctgttttcacactctaattttctttccacgtttgaattttctcaggaaattttcaattgtcgagaaaatggttggaccaaacttcatggacgagatagactgcggcagcttctttgaccacatcgacgaccttctcgattttcccgtcgaggacgttgacggcggcgccgccaccttaccgtcggtagccgctgccggcaactgcaactcgctggcgagcatctggcccgctgagtccgactcgtttcctacctccgactcggtgttttccggcaacaccgcttcggacctctcggcggagctctcggttccgtatgaagacattgtccaattggaatggttgtccaattttgtggaggattccttttgtggggggagcctaacaatgaacaaagtggaagagccatcatgtaccaccaaggaggactcagtaaacacccaatttcacacatcaagcccagtttctgtccttgaaagtagcagttcttgctctggtggcaagacttttccactaagcagtccagagatttacatccctgtgccatgtggacgtacacgcagcaagcgtccacgtccagcaaccttcaatcctaggcctgccatgaacctcatttcccctgcctcttcttttgttggggagaacatgcagcctaatgtcatatcatccaagtcatcttcagattctgagaattttgctgagtctcaacttgttcccaagatgccaaaacaagcttctgaggagcctaagaagaaaaagaaagtgaagctgccacttccattagttccagctgataacaatcaaaatgcctcacaacctgttaggaaatgcatgcattgtgagataaccaagacaccacagtggagggcagggccaatgggaccaaaaacactatgcaatgcttgtggtgttcgttacaagtccggccggctcttccccgagtaccggcctgctgcaagtccaactttttgcccatctgtgcactccaattctcataagaaggtcctggaaatgagatgcaggggcattgacaaatccggttttgcaatcaattcagctgcctcacccgaactcattccaaacactaacagcagcctgcccctggagtacatgtgatgtgaaggagtgatcctttgttggaaatttctctttcattgctgccctctagagtcatgtcttatgttatttcttattgatatttcatttctttggttcattggtttttgtacagggtttgactgggggaataggagcaatagatgatgatgatcatattttagcagttaggggaagattgtaatgagaagtgagttaaaaaagggtagacatatgcaggtcaaaaagggtagggtcttaggtctagtaattgtaggtcccttaaggtcagtaggagtcggtgtctctgttgttttttatttttcttggaattcttttcatttttttcctttttatatatatccctatttgtgggaattctttttgcagttcttttgtagcaaaattttcgagttgagtaagaaagttttttgcaaaaaaaaaaaaaaaa

SEQ ID NO: 2906 - protein, 348 aa, Glycine max
  misc_feature: Ceres CLONE ID no. 695333
  misc_feature: Ceres CDNA ID no. 24766454
  misc_feature (254)..(289): Pfam Name: GATA PFAM Desc: GATA zinc finger
  misc_feature: Homolog of GI Number: 37572443 NR Desc: AG
  misc_feature: Homolog of GI Number: 37572451 NR Desc: AG
  misc_feature: Homolog of GI Number: 15451574 NR Desc: Putative GATA
  misc_feature: Homolog of GI Number: 12711287 NR Desc: GATA
  misc_feature: Homolog of GI Number: 34909448 NR Desc: OSJNBa0014K08.18
  misc_feature: Homolog of GI Number: 24030302 NR Desc: putative GATA
  misc_feature: Homolog of GI Number: 21436205 NR Desc: putative transcription factor
  misc_feature: Homolog of GI Number: 37536778 NR Desc: putative transcription factor
  misc_feature: Homolog of GI Number: 50911202 NR Desc: putative AG
  misc_feature: Homolog of GI Number: 37572449 NR Desc: AG
  misc_feature: Useful for delaying flowering time
  misc_feature: Useful for making bigger plants
  misc_feature: Useful for making shorter plants
MVGPNFMDEIDCGSFFDHIDDLLDFPVEDVDGGAATLPSVAAAGNCNSLASIWPAESDSFPTSDSVFSGNTASDLSAELSVPYEDIVQLEWLSNFVEDSFCGGSLTMNKVEEPSCTTKEDSVNTQFHTSSPVSVLESSSSCSGGKTFPLSSPEIYIPVPCGRTRSKRPRPATFNPRPAMNLISPASSFVGENMQPNVISSKSSSDSENFAESQLVPKMPKQASEEPKKKKKVKLPLPLVPADNNQNASQPVRKCMHCEITKTPQWRAGPMGPKTLCNACGVRYKSGRLFPEYRPAASPTFCPSVHSNSHKKVLEMRCRGIDKSGFAINSAASPELIPNTNSSLPLEYM

SEQ ID NO: 2907 - DNA, 663 bp, Zea mays
  misc_feature: Ceres CLONE ID no. 695423
  misc_feature: Ceres CDNA ID no. 36591298
  CDS (2)..(472): REFERENCED BY SEQ ID NO: 2908
ggtgactcacactcacaccgaaagcgcctcaactctgaaggcgctacagcaacgtcgccacttcactcacgattggagtttcacctcggcagcccagccagccagtggttcctcggctcggaggaacaggcgaacagcaagagcttctgaagatgaaggcgatccccgtggctctcctgctcctcgtcctggttgctgccgcctcctcgttcaagcatctcgccgaggcagcagacggcggcgcggtgccggacggcgtgtgcgacggcaagtgccgcagccggtgctcgctgaagaaggccgggcggtgcatgggcctgtgcatgatgtgctgcggcaagtgccagggctgcgtgccgtcggggccgtacgccagcaaggacgagtgcccctgctacagggacatgaagtcccccaagaaccagcgccccaagtgcccctaggccctaccgctctaagggagggaggatgacccaggatttcgctcgcgatcctgcacagcttctagtcttgtactgctagtttagcgcgccgagcgtcggaatgtcgcgacggttccttccgtgcttgtgtgctgtgtttctcctcggacgtgctataacctagaataataaccaatgcactgtatctgtgtgcttgtcttttaaaaaaaaaaaaaaaaaa

SEQ ID NO: 2908 - protein, 96 aa, Zea mays
  misc_feature: Ceres CLONE ID no. 695423
  misc_feature: Ceres CDNA ID no. 36591298
  misc_feature (1)..(96): Pfam Name: GASA PFAM Desc: Gibberellin regulated protein
  misc_feature: Homolog of GI Number: 66731525 NR Desc: GIR1
  misc_feature: Homolog of GI Number: 3355483 NR Desc: similar to gibberellin
  misc_feature: Homolog of GI Number: 14627134 NR Desc: snakin
  misc_feature: Homolog of GI Number: 50901380 NR Desc: putative  gibberellin regulated protein
  misc_feature: Homolog of GI Number: 2129596 NR Desc: gibberellin
  misc_feature: Homolog of GI Number: 28394019 NR Desc: putative gibberellin
  misc_feature: Homolog of GI Number: 16516821 NR Desc: gibberellin induced protein 3
  misc_feature: Homolog of GI Number: 44889867 NR Desc: GASA
  misc_feature: Homolog of GI Number: 25313155 NR Desc: protein F10A5.6
MKAIPVALLLLVLVAAASSFKHLAEAADGGAVPDGVCDGKCRSRCSLKKAGRCMGLCMMCCGKCQGCVPSGPYASKDECPCYRDMKSPKNQRPKCP

SEQ ID NO: 2909 - DNA, 665 bp, Triticum aestivum
  misc_feature: Ceres CLONE ID no. 695993
  misc_feature: Ceres CDNA ID no. 36526839
  CDS (90)..(446): REFERENCED BY SEQ ID NO: 2910
agatctctctcaccccaaagacaacagaaaaccttcttcacgcgcgcacgcaccaaaatcaccttcgatctcatcaccggggaagggggatggccgccgaggagggagccgtgatagcgtgccacaccaagcaagagttcgacacccacatggctaatggcaaggagaccggcaagctggtgatcattgacttcactgcttcctggtgcggtccttgtcgtgtcatagccccagtctttgctgagtacgccaagaagttccctggcgccattttcctgaaggtggacgttgacgagctgaaggacgtcgctgaagcatacaacgttgaggcaatgccgaccttcctgtttatcaaggatggtgcgaaggtggacactgttgtcggtggcaggaaggatgatatccataccaagatagtggccctcatgggttctgcatctgcctaagaagggaagagtgatgcccctcttgtgtcaataagagccagcacctggtgtaagtagttatcgctgcagtatgctttggcttagtcgtgactgaactttgtgatgattcggtttagagttcagaacttcagacatttgcaccggttgttctgaattacagtacctaatgttttgctacagttgcttcgttgtgaagtttgggtaaaaaaaaaaaaaaaa

SEQ ID NO: 2910 - protein, 118 aa, Triticum aestivum
  misc_feature: Ceres CLONE ID no. 695993
  misc_feature: Ceres CDNA ID no. 36526839
  misc_feature (8)..(114): Pfam Name: Thioredoxin PFAM Desc: Thioredoxin
  misc_feature: Homolog of GI Number: 27461140 NR Desc: thioredoxin H
  misc_feature: Homolog of GI Number: 32186040 NR Desc: thioredoxin h isoform 1
  misc_feature: Homolog of GI Number: 82407383 NR Desc: Chain A
  misc_feature: Homolog of GI Number: 50934769 NR Desc: Thioredoxin H
  misc_feature: Homolog of GI Number: 66841004 NR Desc: thioredoxin h2 protein
  misc_feature: Homolog of GI Number: 40287476 NR Desc: thioredoxin
  misc_feature: Homolog of GI Number: 58176806 NR Desc: Chain A
  misc_feature: Homolog of GI Number: 19851972 NR Desc: thioredoxin H
  misc_feature: Homolog of GI Number: 16588843 NR Desc: thioredoxin H
  misc_feature: Homolog of GI Number: 2982247 NR Desc: probable thioredoxin H
MAAEEGAVIACHTKQEFDTHMANGKETGKLVIIDFTASWCGPCRVIAPVFAEYAKKFPGAIFLKVDVDELKDVAEAYNVEAMPTFLFIKDGAKVDTVVGGRKDDIHTKIVALMGSASA

SEQ ID NO: 2911 - DNA, 731 bp, Triticum aestivum
  misc_feature: Ceres CLONE ID no. 695998
  misc_feature: Ceres CDNA ID no. 40351186
  CDS (93)..(590): REFERENCED BY SEQ ID NO: 2912
actcacagcctcacagcaaccagaacaatccagcaaactcatcgcacgaggatcaacagcagcagagagaagcaaaccggccggccggcgagatggcgcaggagagcctgaggctggtgtgcccgccggtgtcggcgcacgaggggcggctgccgcggcagtacacgctggaggggcagggcgcgaagaaggacatctcgccgccgctggagtggtacggggtgcccgacggcacgcggtcgctggcggtggtggtgcaggacgtcgacgcggacgagcgggtgccgtggacgcactgggtggtcgtcaacatctcgcccgaggagaaggggctgcccgagggcttctccggcgccgggggcaacgccaacgccggcggcggcgacggcggcgtccaggagggggtcaacgactggaagcagcccgggtggcgcggccccgtcccggactcccacggccaccgcatccagttccggctctacgcgctcgacgacgtgctcagcctcggcaacaaggtgactgtggacaaggtcatggaggccatcgaggggcacgtgctgggggaggccgagatcacggccgtgttctaaggagttcttgtggattttgacactcggctctgtgtgtgtgtgtgacctgcttgttacttcttgcgaattgtgtgtggtctgttctgtagcgtgcctgtatacgcatggccacgagcagcctttgcaaaaaaaaaaaaaaaa

SEQ ID NO: 2912 - protein, 165 aa, Triticum aestivum
  misc_feature: Ceres CLONE ID no. 695998
  misc_feature: Ceres CDNA ID no. 40351186
  misc_feature (12)..(164): Pfam Name: PBP PFAM Desc: Phosphatidylethanolamine
MAQESLRLVCPPVSAHEGRLPRQYTLEGQGAKKDISPPLEWYGVPDGTRSLAVVVQDVDADERVPWTHWVVVNISPEEKGLPEGFSGAGGNANAGGGDGGVQEGVNDWKQPGWRGPVPDSHGHRIQFRLYALDDVLSLGNKVTVDKVMEAIEGHVLGEAEITAVF

SEQ ID NO: 2913 - DNA, 1324 bp, Triticum aestivum
  misc_feature: Ceres CLONE ID no. 696162
  misc_feature: Ceres CDNA ID no. 24766188
  CDS (93)..(947): REFERENCED BY SEQ ID NO: 2914
cccaaatcccccgaatttgacccgtttctccgccgattcgcgtcaccccccctttctgctcgggtcggtgagtggtctcaacccccggagggatggggtacctgagcaccgtcatcggccaccccacggacggatcgccggtcagcggcggcggcctcagccagaatggtaagtttagctatggttatgcgagctccctgggtaaaagggcttccatggaagacttctatgagacaagaattgaaagtgtcgatgggcagcttattggtttattcggagtttttgatggtcatggtggtgctaaagtagctgagtatgtcaaacacaacctcttcagccatcttcttaggcatccaaagttcatgagcgacacaaaagtggctatagatgattcttataaaagtaccgacagtgagttcttggaatctgacagtactcaaaaccagtgtgggtcaacagcatcaactgctgtacttgttggtaatcgtctctttgtcgcaaatgttggagactccagggctatcatatgcagggcaggaaatgctgtacctgtttcgaaagatcacaagcctgatcagacagatgagcggcaacgtattgaagaagctggaggttttgttatgtgggcaggaacatggcgtgttggtggtgtacttgctgtttctcgcgcttttggtgacaagctcttaaagcagtatgtagttgtggatccagagatccgggaggaaatcgttgacgagtccctggagtttctcatccttgcaagcgatgggctgtgggatgtggtctctaacgaggaggctgtcgatatgacccggtcaatacaagacccagaggaagctgctaagaggctcttgcaggaggcctacaagcgggagagcagtgacaacataacctgcgtcgtcgtgcgcttctttcacgggcaagggagtagtgggcctgcttaaagcaggtgcgaagagttactctcaacttctcaagtcgacgttgtactgtgatgacacgcgtacatgccttgattgattcttaaggtttaaacgaagagaaactggaagtaggaaaagtgtactctgatatgagaacaaaagtttaggaacgaagtgtgccctaggccttagatttaacaataaatttgctggtgatgaactgatgaccgttcatcgtggtttagttgtggatggtgttgggtctgatgagtgtgttgtatcttgttgtggattgccaaaccatgtgtgagtgtgatgtaagcgattattgttgtactgaaattgagcaatgacaagtataattgagttgttggatggatctaaaaaaaaaaaaaaaa

SEQ ID NO: 2914 - protein, 284 aa, Triticum aestivum
  misc_feature: Ceres CLONE ID no. 696162
  misc_feature: Ceres CDNA ID no. 24766188
  misc_feature (18)..(267): Pfam Name: PP2C PFAM Desc: Protein phosphatase 2C
  misc_feature: Homolog of GI Number: 20146110 NR Desc: protein phosphatase 2C
  misc_feature: Homolog of GI Number: 15238651 NR Desc: protein phosphatase 2C
  misc_feature: Homolog of GI Number: 48094258 NR Desc: protein phosphatase 2C
  misc_feature: Homolog of GI Number: 8979708 NR Desc: protein phosphatase 2C
  misc_feature: Homolog of GI Number: 50932911 NR Desc: protein phosphatase 2C
  misc_feature: Homolog of GI Number: 22137282 NR Desc: AT5g53140/MFH8_8
  misc_feature: Homolog of GI Number: 9757995 NR Desc: protein phosphatase 2C
  misc_feature: Homolog of GI Number: 8778653 NR Desc: F9C16.6
  misc_feature: Homolog of GI Number: 31220270 NR Desc: ENSANGP00000011103
  misc_feature: Homolog of GI Number: 30013681 NR Desc: Avr9/Cf
  misc_feature: Useful for increasing seed/fruit yield or modifying fruit content
  misc_feature: Useful for making taller plants and plants with longer inflorescences
  misc_feature: Useful for sterility
MGYLSTVIGHPTDGSPVSGGGLSQNGKFSYGYASSLGKRASMEDFYETRIESVDGQLIGLFGVFDGHGGAKVAEYVKHNLFSHLLRHPKFMSDTKVAIDDSYKSTDSEFLESDSTQNQCGSTASTAVLVGNRLFVANVGDSRAIICRAGNAVPVSKDHKPDQTDERQRIEEAGGFVMWAGTWRVGGVLAVSRAFGDKLLKQYVVVDPEIREEIVDESLEFLILASDGLWDVVSNEEAVDMTRSIQDPEEAAKRLLQEAYKRESSDNITCVVVRFFHGQGSSGPA

SEQ ID NO: 2915 - DNA, 889 bp, Triticum aestivum
  misc_feature: Ceres CLONE ID no. 696286
  misc_feature: Ceres CDNA ID no. 40351187
  CDS (251)..(736): REFERENCED BY SEQ ID NO: 2916
tcaacataactgttgttcccttctttgcactgcaaattccctgtgcatgtattagtttttgattgatttttttttctctgaggggggcacattaattgtgctcaatactcatacattgcggttcctttattattttgtaattcattacattgatattgattaacatgtcatttgtcaaaaagagtctaatttagttggttgatcagagtgtgtgatagtcttcgattccacggattaaagaaaaattaacatgtcatcaaagcttcaagttcagcagcttaatcagttaagggagattttcggtcgatttgacatggactcagatggaagcctaacaatgctagagctagcagcacttcttaggtctctggggctgaagccctcgggtgaccaagtccaagcactgttagccaacatggactcaaacgccaatggcaaagtggagtttgatgaattgataagagccatattacctgacataaatgcacaggttttgctgaaccaagaacagctcctaggggtgttcaagtgcttcgatcgcgacggcaacggttacatatcggccgcagagttggccggggcaatggccaaaatgggccagccactcacgtaccgagagctcacggagatgatcaaagaggctgacacggatggggatggtgttattagcttcactgagtttgccactatcatggctcgctctgcttctgattttctaggcctctcgttctgctgaccgtataacatatattcatttcatctaagttgtacaatattcttgattttttttccttttgaatgaatgaatcaatcaaataatgatatttggtttgtactgggtattactaatactaattacccacaattcctgccaaaaaaaaaaaaaaaa

SEQ ID NO: 2916 - protein, 161 aa, Triticum aestivum
  misc_feature: Ceres CLONE ID no. 696286
  misc_feature: Ceres CDNA ID no. 40351187
  misc_feature: null
  misc_feature: Useful for making plants with modulated salt sensitivity
  misc_feature (12)..(40): Pfam Name: efhand PFAM Desc: EF hand
MSSKLQVQQLNQLREIFGRFDMDSDGSLTMLELAALLRSLGLKPSGDQVQALLANMDSNANGKVEFDELIRAILPDINAQVLLNQEQLLGVFKCFDRDGNGYISAAELAGAMAKMGQPLTYRELTEMIKEADTDGDGVISFTEFATIMARSASDFLGLSFC

SEQ ID NO: 2917 - DNA, 495 bp, Triticum aestivum
  misc_feature: Ceres CLONE ID no. 696485
  misc_feature: Ceres CDNA ID no. 35383259
  CDS (74)..(289): REFERENCED BY SEQ ID NO: 2918
accatcagcttccatacttcctcttgagcagctatccactctccatccatctttcctctgcgagatcagcgacatgtcgacgactgacaccagctcacccaaggacgcacccctgccggagaacagcgccccggcggtggcggcaggcagcgagccgacggtgacaaagacggtgcagacggtggaggtgaggcagtcggcggggcaggaggagggggaggggacgatcaagccgatcgaggtggtgcacgagatcccggccaaggagcctgctactaagcaagagtagcagagcacaacgaatcgagaaaagcagtgtgattggtaaaatggtggtgtccgcttgctgtttcccggttgagtaaatcgccggttgaaacccctgtttttactttggagaactgaagtgattggaatatctttgttttcggtaaataataatgagcatttttagcgccactaaaaaaaaaaaaaaaaagaaaaaaaaaaaaaaaa

SEQ ID NO: 2918 - protein, 71 aa, Triticum aestivum
  misc_feature: Ceres CLONE ID no. 696485
  misc_feature: Ceres CDNA ID no. 35383259
MSTTDTSSPKDAPLPENSAPAVAAGSEPTVTKTVQTVEVRQSAGQEEGEGTIKPIEVVHEIPAKEPATKQE

SEQ ID NO: 2919 - DNA, 685 bp, Triticum aestivum
  misc_feature: Ceres CLONE ID no. 696627
  misc_feature: Ceres CDNA ID no. 24766191
  CDS (95)..(505): REFERENCED BY SEQ ID NO: 2920
gtccaccattcctcccaccttcaagcgcatccacacacacacacaccacagaccacctctccccgcccaagcatccccatccgcatcctcatccatggcccccaaggcagccgagaagaagccggtggagaagaccccggcggggaagaagcccaaggcggagaagaaggtgccggcgtccaaggagggcggcggggacaagaagggcaagaagaaggccaagaagagcgtggagacgtacaagatctacatcttcaaggtgctgaagcaggtgcacccggacatcggcatctcctccaaggccatgtccatcatgaactccttcatcaacgacatcttcgagaagctggccggcgagtcggccaagctggcgcgctacaacaagaagcccaccatcacgtcccgcgagatccagacctccgtccgcctcgtcctccccggcgagctcgccaagcacgccgtctccgagggcaccaaggccgtcaccaagttcacctccgcctgattcggtcctgtccctgtgtgtgtcttcctggtggatggatcgatgtcgccctgtagtttcctgctcggactttgtcctcttgtaacttgtgctggctgtgtcttgtgtgggatcatatttcatgatctggagaaatagtagcggtgcttatttcagttcttgccaaaaaaaaaaaaaaaa

SEQ ID NO: 2920 - protein, 136 aa, Triticum aestivum
  misc_feature: Ceres CLONE ID no. 696627
  misc_feature: Ceres CDNA ID no. 24766191
  misc_feature: No seed is being produced by the plant
  misc_feature: The plant flowers significantly late compared to wild-type.
  misc_feature: Useful for biocontainment applications
  misc_feature: Useful for making plants with modulated flowering time
  misc_feature (43)..(115): Pfam Name: Histone PFAM Desc: Core histone H2A/H2B/H3/H4
  misc_feature: Homolog of GI Number: 531054 NR Desc: protein H2B153
  misc_feature: Homolog of GI Number: 531058 NR Desc: protein H2B
  misc_feature: Homolog of GI Number: 34908130 NR Desc: putative histone H2B
  misc_feature: Homolog of GI Number: 21801 NR Desc: histone H2B
  misc_feature: Homolog of GI Number: 22323 NR Desc: H2B histone
  misc_feature: Homolog of GI Number: 1708107 NR Desc: Histone H2B
  misc_feature: Homolog of GI Number: 577825 NR Desc: H2B histone
  misc_feature: Homolog of GI Number: 577819 NR Desc: H2B histone
  misc_feature: Homolog of GI Number: 22325 NR Desc: H2B histone
  misc_feature: Homolog of GI Number: 34895838 NR Desc: putative histone H2B
  misc_feature: Useful for delaying flowering time
  misc_feature: Useful for increasing chlorophyll and photosynthetic capacity
  misc_feature: Useful for making plants with altered leaf shape eg curled leaves
  misc_feature: Useful for making plants with altered leaf shape eg curled leaves
  misc_feature: Useful for making plants with increased biomass and foliage
  misc_feature: Useful for making plants with increased biomass and foliage
  misc_feature: Useful for sterility
  misc_feature: Useful for sterility
MAPKAAEKKPVEKTPAGKKPKAEKKVPASKEGGGDKKGKKKAKKSVETYKIYIFKVLKQVHPDIGISSKAMSIMNSFINDIFEKLAGESAKLARYNKKPTITSREIQTSVRLVLPGELAKHAVSEGTKAVTKFTSA

SEQ ID NO: 2921 - DNA, 974 bp, Triticum aestivum
  misc_feature: Ceres CLONE ID no. 696804
  misc_feature: Ceres CDNA ID no. 40351188
  CDS (94)..(708): REFERENCED BY SEQ ID NO: 2922
ccccaatcctctctcgtccccatccccaatccccgatctcccgaccccgacccccgacgaaaccctagccagcaaaccgcggcggcggcggcaatgggcaacccggagaagctgatggcgcagatcttcgacctcaagttcacgtccaagtcgctgcagcggcaggcgcgcaagtgcgagaaggaggagaaggagcagaagctcaaggtgaagaaggccatcgagaagggcaacgtggacggcgcgcggatctacgccgagaacgccatccgcaagcgcaccgagcacatgaactacctccgcctcgcctcccgcctcgacgccgtcgtcgcgcgcctcgacacgcaggccaagatgcaggccatcggcaagtccatgggcagcatcgtcaagtcgcttgactcctccctcgccacgggcaacctccagaagatgtccgagaccatggacagcttcgagcgccagttcgtcaacatggaggtccaggccgagttcatggagggcgccatggccggctccacctccctctccacgcccgagaccgaggtcaactccctcatgcagcaggtcgccgacgactacggcctcgaggtctccgtcggcctcccccaggccgccgcccacgccatcccggccgccaaggacaaggagaaggtcgacgaggacgacctcacccgccgcctcgcagagctcaaggcccgcggctaaactgaacggccttcgcttcacttcaggtacggctcatgcaatgttcactcgcctcgccgtatgtcagttgtcaagggctgctcatatctgacagccccgtaaatattgttaacgcccatgtgggtgctctctttgtctgggatctctatgtggaactgatttaaacgctgctgtgtgatatgacgtgttattccgaatcggagtgtgatattgatattatgagtcagtaataatacatgtgcttgagaacaaaaaaaaaaaaaaaa

SEQ ID NO: 2922 - protein, 204 aa, Triticum aestivum
  misc_feature: Ceres CLONE ID no. 696804
  misc_feature: Ceres CDNA ID no. 40351188
  misc_feature (9)..(179): Pfam Name: SNF7 PFAM Desc: SNF7
MGNPEKLMAQIFDLKFTSKSLQRQARKCEKEEKEQKLKVKKAIEKGNVDGARIYAENAIRKRTEHMNYLRLASRLDAVVARLDTQAKMQAIGKSMGSIVKSLDSSLATGNLQKMSETMDSFERQFVNMEVQAEFMEGAMAGSTSLSTPETEVNSLMQQVADDYGLEVSVGLPQAAAHAIPAAKDKEKVDEDDLTRRLAELKARG

SEQ ID NO: 2923 - DNA, 748 bp, Triticum aestivum
  misc_feature: Ceres CLONE ID no. 696826
  misc_feature: Ceres CDNA ID no. 35383260
  CDS (39)..(581): REFERENCED BY SEQ ID NO: 2924
ggaaaagtggacagcacttccgccgagcgccgggcaagatggggttcatcggcgaccaggtggaggcgatccgctcgatgcaggtccgccaggtgctcgcgcagatcatcagcctcggtatgattgttacgtcggcattgatcatatggaaggggttgatggttgcgactgggagtgagtccccggtggtcgtagttctttctggtagcatggagcctggcttcaaaaggggtgatatcctgtttttgcgcatgagtaaagaacccatccgtactggagaaatagttgtttttaatgttgatggccgtgaaattccaattgttcaccgtgtgattaaggttcatgaacgccaggaaagtgctgaagttgacatcctcacaaaaggtgacaacaattttggggatgaccgactgctgtacgcgcacggtcagctgtggcttcagcagcaccacatcatggggcgggctgtaggctatcttccatacgttgggtgggttaccattgtgatgactgagaagccgatcatcaagtaccttctgattggcgcactgggcctgctggtgataacgtcgaaagactgaagattccaccttgtcacagggtcgtagtctggtcttgtagtagcgcagaagtaaccgacagctgaagatgttgcatcgtgtattgaatggaagttttatgtgtctgttttgacttctcgtgtattgaatggaagtaaccgacaccacttcgaaaaaaaaaaaaaaaa

SEQ ID NO: 2924 - protein, 180 aa, Triticum aestivum
  misc_feature: Ceres CLONE ID no. 696826
  misc_feature: Ceres CDNA ID no. 35383260
  misc_feature (52)..(115): Pfam Name: Peptidase_S24 PFAM Desc: Peptidase S24
  misc_feature: Homolog of GI Number: 55296017 NR Desc: putative signal peptidase 18K chain
  misc_feature: Homolog of GI Number: 20465737 NR Desc: putative signal peptidase subunit
  misc_feature: Homolog of GI Number: 51972110 NR Desc: At3g15710
  misc_feature: Homolog of GI Number: 55247312 NR Desc: ENSANGP00000013674
  misc_feature: Homolog of GI Number: 48146371 NR Desc: SPC18
  misc_feature: Homolog of GI Number: 50752707 NR Desc:  similar to SPC18 protein
  misc_feature: Homolog of GI Number: 34784421 NR Desc: Spc18 protein
  misc_feature: Homolog of GI Number: 62898009 NR Desc: signal peptidase complex
  misc_feature: Homolog of GI Number: 61889101 NR Desc: signal peptidase complex 18kD
  misc_feature: Homolog of GI Number: 55642557 NR Desc:  similar to SPC18 protein
  misc_feature: Useful for making ornamental plants with modified flowers
  misc_feature: Useful for making ornamental plants with modified flowers
  misc_feature: Useful for making ornamental plants with modified flowers
  misc_feature: Useful for making plants with increased biomass and foliage
  misc_feature: Useful for making plants with increased biomass and foliage
  misc_feature: Useful for making smaller plants
MGFIGDQVEAIRSMQVRQVLAQIISLGMIVTSALIIWKGLMVATGSESPVVVVLSGSMEPGFKRGDILFLRMSKEPIRTGEIVVFNVDGREIPIVHRVIKVHERQESAEVDILTKGDNNFGDDRLLYAHGQLWLQQHHIMGRAVGYLPYVGWVTIVMTEKPIIKYLLIGALGLLVITSKD

SEQ ID NO: 2925 - DNA, 911 bp, Triticum aestivum
  misc_feature: Ceres CLONE ID no. 697079
  misc_feature: Ceres CDNA ID no. 36526877
  CDS (120)..(608): REFERENCED BY SEQ ID NO: 2926
acatctttggtcagtgacattgagagaaccatctttggtcaggagccttcttggttggtacttgaaagcttcttcttcctcttgttcttgctgctgctgagaggttgtgagggattgcgatgggagtggggggcaccttggagtacctgtccgggctgctggggggcggcggaggccatggccatggccacggccacggcaacaggaggaggaggaagcagatgcagacggtggagctcaaggtcagcatggactgcgaggggtgcgagcgcaaggtcaagaacgcgctctcctccatgaaaggggtccgatcagtgaacatcaacaggaagcagcagaaggtgacggtggcggggtacgcggatgccagcaaggtgctgaggaaggcgcagtccacggggaagaaggccgagatatggccctacgtgccctacagccaggtcagccagccctacgtcgccggcacctacgacaagcgggcccccgccggctacgtcaggagccaggagcccggctacggcaacgtgtccggccaggtcagcaggcaggacgaccagctcaccgacatgttcaacgacgacaacgccaactcctgcgccgtcatgtgatgtgatgagaggaaaaaaataataacctgtgctgatgttctgcatgcggctggtgatccctggaaggaagtgttggacaatgtttgtgagttcatctcaagtagtagtagcgaaactactatgcagtagtagtgctgaagtatgaatgttactactagtagtagtttggagtgctgattaggatcagtgttgacgatccaaccctcggactgtcacgggtatgagtcgagaaacccatggatcgtttgggtaacttggtcgtgcagaaagacatctcaatgtttcacaaaaaaaaaaaaaaaa

SEQ ID NO: 2926 - protein, 162 aa, Triticum aestivum
  misc_feature: Ceres CLONE ID no. 697079
  misc_feature: Ceres CDNA ID no. 36526877
  misc_feature (38)..(99): Pfam Name: HMA PFAM Desc: Heavy
  misc_feature: Homolog of GI Number: 32442810 NR Desc: putative farnesylated protein
  misc_feature: Homolog of GI Number: 21593460 NR Desc: putative isoprenylated protein
  misc_feature: Homolog of GI Number: 50945521 NR Desc: putative farnesylated protein
  misc_feature: Homolog of GI Number: 20465505 NR Desc: putative metal
  misc_feature: Homolog of GI Number: 23304411 NR Desc: farnesylated protein 1
  misc_feature: Homolog of GI Number: 50921835 NR Desc: OSJNBa0091C12.3
  misc_feature: Homolog of GI Number: 21536547 NR Desc: farnesylated protein
  misc_feature: Homolog of GI Number: 12642882 NR Desc: putative farnesylated protein ATFP6
  misc_feature: Homolog of GI Number: 15221451 NR Desc: copper
  misc_feature: Homolog of GI Number: 57900370 NR Desc: copper
MGVGGTLEYLSGLLGGGGGHGHGHGHGNRRRRKQMQTVELKVSMDCEGCERKVKNALSSMKGVRSVNINRKQQKVTVAGYADASKVLRKAQSTGKKAEIWPYVPYSQVSQPYVAGTYDKRAPAGYVRSQEPGYGNVSGQVSRQDDQLTDMFNDDNANSCAVM

SEQ ID NO: 2927 - DNA, 776 bp, Triticum aestivum
  misc_feature: Ceres CLONE ID no. 697092
  misc_feature: Ceres CDNA ID no. 35383261
  CDS (3)..(500): REFERENCED BY SEQ ID NO: 2928
agaacgcctttctctcccccattcgcgtcgcgtctccaccccacccggcctcccctctcctcctccacctcccccgtgtcgcgagaaaccctcgtcccatcctctcctccctcgtccctcctcccatggcggagtcgcccgagaacgccgccgcggcgcccgcgccacccgccgctcccgccccggccccggcgccggcaaccaagccgtccccgcccaccaggtccgggatcccgccgcggtacgacctcgacgccaagtgggacgcctgcctcgacctctccatccgccgcgtcgcctactcctccctcgccggcgccttcggcggcctcatcctcttccgtagcccaacaacccgctgggcatcagttgcccttggagctggcgtggggataggggctgcgttcactgaatgctcatacatattcaatggttctcctccaaagtggtcggccaaagcttcgactgttcctgctcattctgaagggggagacaattaaaacactgtcgggcgggatgagtagcccaatcttggcggagttttggagtgcttgctgattgaacctagctgtttcgtgtctgatgatatcgccactcgtcatagtatgtcctgaaagttagcatgtgccccctctcgtgaattttcttcacacattacgcggaaaccattactgactgaggtctgatgatatgaccctatggctccgtaagttcggtctgtcctgaggttttatgtctggcaataaatttttggtcatgtaaaaaaaaaaaaaaaa

SEQ ID NO: 2928 - protein, 124 aa, Triticum aestivum
  misc_feature: Ceres CLONE ID no. 697092
  misc_feature: Ceres CDNA ID no. 35383261
  misc_feature: Homolog of GI Number: 12018147 NR Desc: vegetative cell wall protein gp1
  misc_feature: Homolog of GI Number: 60678627 NR Desc: plus agglutinin
  misc_feature: Homolog of GI Number: 41400384 NR Desc: plus agglutinin
  misc_feature: Homolog of GI Number: 84174 NR Desc: merozoite surface antigen
  misc_feature: Homolog of GI Number: 488731 NR Desc: chitinase
  misc_feature: Homolog of GI Number: 6523547 NR Desc: hydroxyproline
  misc_feature: Homolog of GI Number: 28574875 NR Desc: CG13731
MAESPENAAAAPAPPAAPAPAPAPATKPSPPTRSGIPPRYDLDAKWDACLDLSIRRVAYSSLAGAFGGLILFRSPTTRWASVALGAGVGIGAAFTECSYIFNGSPPKWSAKASTVPAHSEGGDN

SEQ ID NO: 2929 - DNA, 860 bp, Triticum aestivum
  misc_feature: Ceres CLONE ID no. 697146
  misc_feature: Ceres CDNA ID no. 40351189
  CDS (115)..(570): REFERENCED BY SEQ ID NO: 2930
tcaccacccccggcagcatctcgcgatcccaaagtccaaccagcctccgccgcctctcctcgcctgcgaggtcagcgccgccttctcccccgtctgtttcgtcggagaagaaaaatgtcaactgccactgctccaggagtgtcctttgctaaatccggggctggttcccgggccgttgctccggcgatcaggagcgcttccttcatcggttacgccaagcaaccaccaaacttgtcttgcctaaggatgtcaaacaagttcagggtgtctgctgcggccgtgcacaaggtgaagctcataagcccggacggtgaagagcatgagtttgaggcccctgaagacacctacattcttgaggcagctgaaaatgccggagtggagctgccattctcctgccgcgccggatcgtgctccacatgcgcgggcaagatgactaccggggaggtcgatcagtcggagggctccttccttgatgagaaccagatgggcgagggataccttctgacctgcatctcataccccaaggcagattgcgtcattcaaacccaccaagaggaggaactctactaattgttgaagtttcgtggtggattcattgttcggttgccttctgttatctagagatatggctaggtgggcgtatcttcctagaaatcacttcagtcttttgatgggatcgtgatatatgagttgtgacaataattgatgtaaaatggtttgtcagttcaaactgcatttgtccagattgcagcaattcgaactaccatacactgttggaagtcttgaaaacatgttgtacttgtgggtcacttcctttaggaattatttggccactctgtttgctaaaaaaaaaaaaaaaa

SEQ ID NO: 2930 - protein, 151 aa, Triticum aestivum
  misc_feature: Ceres CLONE ID no. 697146
  misc_feature: Ceres CDNA ID no. 40351189
  misc_feature (62)..(138): Pfam Name: Fer2 PFAM Desc: 2Fe
MSTATAPGVSFAKSGAGSRAVAPAIRSASFIGYAKQPPNLSCLRMSNKFRVSAAAVHKVKLISPDGEEHEFEAPEDTYILEAAENAGVELPFSCRAGSCSTCAGKMTTGEVDQSEGSFLDENQMGEGYLLTCISYPKADCVIQTHQEEELY

SEQ ID NO: 2931 - DNA, 505 bp, Triticum aestivum
  misc_feature: Ceres CLONE ID no. 697271
  misc_feature: Ceres CDNA ID no. 29191373
  CDS (1)..(195): REFERENCED BY SEQ ID NO: 2932
acggcacaagctgcttcttcttcttcttcattcccgtcccctgcgctcgcggcggcggcggcggctttccacgcattttcagtttccttttgctgcggaagttcatacccactagatggggaaggcaaagcgtgcatcgatatttatcaggctcgtttcagcagctggaactggttttttctacgtgaagcgtaagaatcctcggcggattacagagaagcttgagttcaggaagtacgatcctcgtgtaaacaagcatgttctatttacggaagccaagatgaagtgagacagtgcagcctttttttttttcttgacataagacctctactgttcattttcgttgaagacactgctacctttattagcctgttccagattcgagagtttcatgtgggcaccaaatcagcatggatcttgctctgcctgcctgtttatttgtattgtaagtttatcactgaaatgagctgcaagcctggaaaagtaaataaaaaaaaaaaaaaaa

SEQ ID NO: 2932 - protein, 57 aa, Triticum aestivum; identical to SEQ ID NO: 1548
  misc_feature: Ceres CLONE ID no. 697271
  misc_feature: Ceres CDNA ID no. 29191373
  misc_feature (9)..(55): Pfam Name: Ribosomal_L33 PFAM Desc: Ribosomal protein L33
  misc_feature: Homolog of GI Number: 38566500 NR Desc: At5g18790
  misc_feature: Homolog of GI Number: 23016261 NR Desc: COG0267: Ribosomal protein L33
  misc_feature: Homolog of GI Number: 53801500 NR Desc: 50S ribosomal protein L33
  misc_feature: Homolog of GI Number: 61099925 NR Desc: ribosomal protein L33
  misc_feature: Homolog of GI Number: 48850579 NR Desc: COG0267: Ribosomal protein L33
  misc_feature: Homolog of GI Number: 79039501 NR Desc: 50S ribosomal protein L33
  misc_feature: Homolog of GI Number: 57238952 NR Desc: 50S ribosomal protein L33
  misc_feature: Homolog of GI Number: 58417511 NR Desc: 50S ribosomal protein L33
  misc_feature: Homolog of GI Number: 48766246 NR Desc: COG0267: Ribosomal protein L33
  misc_feature: Homolog of GI Number: 56551145 NR Desc: ribosomal protein L33

SEQ ID NO: 2933 - DNA, 827 bp, Triticum aestivum
  misc_feature: Ceres CLONE ID no. 697295
  misc_feature: Ceres CDNA ID no. 35383262
  CDS (67)..(603): REFERENCED BY SEQ ID NO: 2934
acatcgagtcctcgcgccgtcccccgtcccatattccctttacccgttctcgcctcgtcgccggcaatggcgggtcccggcgtcggagcggccgcgcctcgcctgtcgctgctgctgctgctcgtcgtcgtcttcgcgggcccctctcgcgacagccgcaccgaggcggccgtgcggacgtgcacgtacacggtgaaggtgaagacgagctgcgcgtcgccggcgcggacgtcggacgcggtcagcgtggcgttcggggacgcgtaccggaacgaggcgtacggggcgcgcctcccgagcgcgccgggcgggagggccttcgagcggtgcggcaccgacaccttccgcgtctccggggtgtgcggctacggcgtctgctacctctacctccgccgcgccggccgcgacggctgggcgcccgagtgggtccaggtcaccgagccgggccccggcgccggagagaagcccgccaccttctacttcggggcgccgctgccggacggcgtctggtacggccacaaccgctgccccaaggccaaggccaaggcagcggcggcggctcggacaaacaccacctctgctgctgcttcgcctctgggctagcgcgacctgattcggctctacccaccgggcgcagcccctctccgtatgtaattcggcattcgccgagaataagcagactgtgcttacagattcagaataagtaattagagaatcataatccgaaatatgatgaggccatgagggcaccttcttcacaccccggaggatttgtttcctgtttacatttaccacacatctctattagagcaaaaaaaaaaaaaaaa

SEQ ID NO: 2934 - protein, 178 aa, Triticum aestivum
  misc_feature: Ceres CLONE ID no. 697295
  misc_feature: Ceres CDNA ID no. 35383262
  misc_feature (33)..(154): Pfam Name: ATS3 PFAM Desc: Embryo
  misc_feature: Homolog of GI Number: 30017261 NR Desc: At5g62210
  misc_feature: Homolog of GI Number: 3335171 NR Desc: embryo
  misc_feature: Homolog of GI Number: 7546697 NR Desc: embryo
  misc_feature: Homolog of GI Number: 17978805 NR Desc: embryo
  misc_feature: Homolog of GI Number: 67986659 NR Desc: Glyoxalase/bleomycin resistance protein/dioxygenase
  misc_feature: Homolog of GI Number: 67986538 NR Desc: Glycoside hydrolase
  misc_feature: Homolog of GI Number: 67988281 NR Desc: N
  misc_feature: Homolog of GI Number: 51262158 NR Desc: MGC79485 protein
  misc_feature: Homolog of GI Number: 2078483 NR Desc: antifreeze glycopeptide AFGP polyprotein precursor
  misc_feature: Homolog of GI Number: 66776813 NR Desc: Phosphoribosylaminoimidazole
MAGPGVGAAAPRLSLLLLLVVVFAGPSRDSRTEAAVRTCTYTVKVKTSCASPARTSDAVSVAFGDAYRNEAYGARLPSAPGGRAFERCGTDTFRVSGVCGYGVCYLYLRRAGRDGWAPEWVQVTEPGPGAGEKPATFYFGAPLPDGVWYGHNRCPKAKAKAAAAARTNTTSAAASPLG

SEQ ID NO: 2935 - DNA, 853 bp, Triticum aestivum
  misc_feature: Ceres CLONE ID no. 697355
  misc_feature: Ceres CDNA ID no. 40351190
  CDS (120)..(497): REFERENCED BY SEQ ID NO: 2936
caaggtaagcccccttccccccatccgcccgatcccggatcctctcccgcgatctcacccggccgcattcccgcgactccccctctcccaggagccgtcgcgtcgcagcagatccgtccatggcggcgctggggtccaagctggcgcagctgcaggccaaggcctgcgaggcgacgcggttcgtgaccaggaacgggtgcgcctaccacaagaccctcatcgagaagaacaagcagttcgtcgtgcagccccccaccgtcgagaagtgccaggagctctccaagcagctcttctacacccgcatcgccagcctccccgtccgctacgaggcattctggaaggaggcggaccaagtgaagcagctgtggagaaacaggaaagatctgaacgtggagcacgcgggcatcatcgctctgttcggcctcgagctctacgggtggttctgcatcggcgagatcgccggccggggtttcaccttcacgggctacagcgtctgagcgccttccttccatgagtacctccacgcgatcggcgtcgattaagagctgaagactctgttagccaatcagtttctcgtgatgcgcggtgcgaagttttggttttctgaaatactattcttgatgctggtgaaaaaagtacacccggctcggtgaattcgactcgtcgatgaggtctaataatttgtcgcacgcttagttgagtgattgaagcctggacagatgagatatctgtgactgtgatgtttgccttgcttgcttgctgaaatcagggcaaattacgctcttccagacgaaatgatgaaatgaatttgacttggtgatgaggtagtataataacaaaaaaaaaaaaaaaa

SEQ ID NO: 2936 - protein, 125 aa, Triticum aestivum
  misc_feature: Ceres CLONE ID no. 697355
  misc_feature: Ceres CDNA ID no. 40351190
  misc_feature (11)..(125): Pfam Name: ATP PFAM Desc: Mitochondrial ATP synthase g subunit
MAALGSKLAQLQAKACEATRFVTRNGCAYHKTLIEKNKQFVVQPPTVEKCQELSKQLFYTRIASLPVRYEAFWKEADQVKQLWRNRKDLNVEHAGIIALFGLELYGWFCIGEIAGRGFTFTGYSV

SEQ ID NO: 2937 - DNA, 493 bp, Triticum aestivum
  misc_feature: Ceres CLONE ID no. 697412
  misc_feature: Ceres CDNA ID no. 40351191
  CDS (301)..(492): REFERENCED BY SEQ ID NO: 2938
cacggacctagggttttgctctccgccgcgacgatgccgtcccacaagaccttccgcatcaagcagaagctggccaagaagcagcgccagaaccgccccatcccctactggatccgcatgcggaccgacaacaccatcaggtacaacgtgaagcgcaggcactggcgccgcaccaagctcgggttctagatccggcccgcccggccgcggcgtggtggagccatggctcaagagttatctgcattttgttttatggacgtttcagtgtttgttatgcaagctaggaagtgattccaggatatgtctctgttatcaatttcgtcgtgttatgaggatattgcttgtactctggtgtactcatgttaccatgctgtgccaagtaaagaacctttgctatatgccacccttgttaaaaaaaaaaaaaaaaaaaaaaaaaaaaaaaaaaaaaaaaaaaaaaaaaaaaaaaaaaaaaaaaaaaaaaaaaaaaaaaaaa

SEQ ID NO: 2938 - protein, 51 aa, Triticum aestivum
  misc_feature: Ceres CLONE ID no. 697412
  misc_feature: Ceres CDNA ID no. 40351191
  misc_feature (9)..(51): Pfam Name: Ribosomal_L39 PFAM Desc: Ribosomal L39 protein
MPSHKTFRIKQKLAKKQRQNRPIPYWIRMRTDNTIRYNVKRRHWRRTKLGF

SEQ ID NO: 2939 - DNA, 851 bp, Triticum aestivum
  misc_feature: Ceres CLONE ID no. 697546
  misc_feature: Ceres CDNA ID no. 24766171
  CDS (86)..(712): REFERENCED BY SEQ ID NO: 2940
ccgttcgctctgtcgctcgcgtcatctcaccttccccgtcctgtggaagtcatctcctgtatcccggtaagaagaaggggtcgaaatggtgaagcacaacaatgttatccctaacggccacttcaagaagcattggcagaactatgtcaagacctggttcaaccagcctgcccgcaagcagaggcgccgcattgctcgtcaaaagaaggctgtgaagatcttccctcgccctacatctggtcctcttcgtcccattgtgcaatgccagactcggaagtacaacatgaaggcaagggctgggagaggctttacccttgaggagctgaagtcagcgggcatcccgaagaagctagctcctactattggcatttctgtggaccaccgacgtaaaaaccggtcacttgagggtatgcagtcaaacattcagcgactcaagacttacaaggccaagctggttatcttcccaaggtgtgctcacaaggttaaggctggtgattctacccctgaggaacttgccacagccacccaggtccagggtgactacttgcctattactcgtggtgagaagcgctcggttgagatcatgaaggtcactgaggagatgaaggcgttcaaggcctacggcaagctccgtgtcgagaggatgaaccagcaccagctcggtgcccgcacgaagaaggctgccgaggcagagaaggaagaaaagaagtgataagatattttgtttcattctgcagctagtgaatgttatcattgggaacttgttctaaattttgttttggggctggaaatagagaccaccggatggctttgatacctgctacttgtttgcatgaaaaaaaaaaaaaaaa

SEQ ID NO: 2940 - protein, 208 aa, Triticum aestivum
  misc_feature: Ceres CLONE ID no. 697546
  misc_feature: Ceres CDNA ID no. 24766171
  misc_feature: null
  misc_feature: Useful for making plants with modulated nitrogen use efficiency
  misc_feature: Useful for making plants with modulated phosphate use efficiency
  misc_feature (6)..(185): Pfam Name: Ribosomal_L13e PFAM Desc: Ribosomal protein L13e
  misc_feature: Homolog of GI Number: 34897952 NR Desc: ESTs AU077873
  misc_feature: Homolog of GI Number: 38093740 NR Desc: putative 60S ribosomal protein
  misc_feature: Homolog of GI Number: 12580867 NR Desc: 60S ribosomal protein L13E
  misc_feature: Homolog of GI Number: 19310763 NR Desc: putative 60S ribosomal protein L13
  misc_feature: Homolog of GI Number: 21537149 NR Desc: 60S ribosomal protein L13
  misc_feature: Homolog of GI Number: 398918 NR Desc: cold induced protein
  misc_feature: Homolog of GI Number: 7441102 NR Desc: ribosomal protein L13.A
  misc_feature: Homolog of GI Number: 398922 NR Desc: cold induced protein
  misc_feature: Homolog of GI Number: 7441103 NR Desc: ribosomal protein L13.B
  misc_feature: Useful for increasing chlorophyll and photosynthetic capacity
  misc_feature: Useful for making bigger plants
  misc_feature: Useful for making plants with increased biomass and foliage
  misc_feature: Utility: No N Useful for making plants tolerant to low nitrogen/low phosphate
MVKHNNVIPNGHFKKHWQNYVKTWFNQPARKQRRRIARQKKAVKIFPRPTSGPLRPIVQCQTRKYNMKARAGRGFTLEELKSAGIPKKLAPTIGISVDHRRKNRSLEGMQSNIQRLKTYKAKLVIFPRCAHKVKAGDSTPEELATATQVQGDYLPITRGEKRSVEIMKVTEEMKAFKAYGKLRVERMNQHQLGARTKKAAEAEKEEKK

SEQ ID NO: 2941 - DNA, 911 bp, Zea mays
  misc_feature: Ceres CLONE ID no. 698045
  misc_feature: Ceres CDNA ID no. 40351192
  CDS (351)..(713): REFERENCED BY SEQ ID NO: 2942
gtcctactagttctgaatgcaattactgaaaactgtatacttgatcagatgattaaacccatttgacttggcattctgctaatacgttgttgcctgcaaattttgattagcagtcgaactgtagcagtagccctagagccttacactcctactcagtgtttgactcttgagattcttgcacctgaaagcgtttttttacccaagaacaagaatgcgtgaaagcacatgccatccatgttacatggctcttttgtgaggcacagagttgttataaccttgttttgctgctgcagattgccatcaccgggaaaggtttcttcaaagcttcagtgctcgcaactggattaataatgaagaacattctgcgcatcggaaaagtcaacgtcattggagatgtcatcctcttcctgggaaaactctgtgtgagcctattctgtgcgcttttcgcctttctgatgttagacacccacaagtacaagtccgcacacaacaagatatcctctccagttatccctgtcctggtaacatgggccctcggctacgtagtcgcgaagcttttctttgcggtggttgagatgtcgatcgacaccataatcctctcgttctgccaggacgccgaggagcaccaggggaacgcgcagtatgcacccccagctctgatggaaactctggacgaacagggcgaactgcagagactaactcaagggccttgactgtcttttcctcttggtagtagcatggaaacttagcggcagcctaatgttttgttaccccgttccgttctcttggcttgtgaagaggtttgccatttttgcttgctaccctaattccatgtacaagtctgaatctgacatgttctcctggcccaattggcatgtgtaggcagcttatccaaaaaaaaaaaaaaaaaa

SEQ ID NO: 2942 - protein, 120 aa, Zea mays
  misc_feature: Ceres CLONE ID no. 698045
  misc_feature: Ceres CDNA ID no. 40351192
MKNILRIGKVNVIGDVILFLGKLCVSLFCALFAFLMLDTHKYKSAHNKISSPVIPVLVTWALGYVVAKLFFAVVEMSIDTIILSFCQDAEEHQGNAQYAPPALMETLDEQGELQRLTQGP

SEQ ID NO: 2943 - DNA, 1298 bp, Triticum aestivum
  misc_feature: Ceres CLONE ID no. 698295
  misc_feature: Ceres CDNA ID no. 24766172
  CDS (139)..(1065): REFERENCED BY SEQ ID NO: 2944
aactggtggggggcggtggcaagtgcaaccgtgcgtgcgctcctgtatccatctgtctgccgggactcatcgtctcctccttccccaatcgccattgtcggtggtgcaagcaagcgcgccgaggcgtgtgggagggacatggcggggcgctacgatggcggcaaccctttcgaggaggaggaggacgtgaaccctttctcggaacaaacgcgaggcaaagctggcgggcagtccaactatggcggcggcggcgcgttctacatgccgaatcccagaaacgttgccccctcctcgaattcgcggctttcgccccttcccccggaacctgcagatttcagtgccacagtggatatccctcttgagtcgtcaaaggacctgaagaaaagagaaaaggagctgcaagcgagggaagcagagttgaacaagagggagaaggaattgaaaagaagggaggaagctgcagcacgagctggtattgtcatcgaggagaaaaactggcctccttttctgccactcatccaccatgacattgccaatgagataccgactcatcttcaaagaatgcaatacttcgcatttgcgtcatttcttggtttggttttctgtctcttctggaatgtcgtagcagttacttcagcctggatcaagggggaaggtgtgaaaatctggttgctagcaataatctacttcatctctggggttcctggtgcgtatgtgttatggtatcgccctctttataatgctatgaggactgacagtgcgttgaagtttggattgtttttcttgctctacttgtttcacatcattttcgtcgtatttgctgccgtggctcctcctgctgtctttgagggcaagtctttggcaggaattttaccggcgattgatcttatcagcgtgaatgctctagttgggatcttctacttcattggatttggattatttgccctggagtcattgctgagcatctgggttatccagcaagtgtacatgtacttccgaggaagtggaaaggccgcagagatgaagcgtgatgcgacgaggggcgctatgagagcggcattttgattgccacatatctcagatgatgataggtctcaagattaattccatggattagatggcacggtaaagaaaaatatatgtagcaatgtaaacatatatttttctttatcgccggtaagaaaagtggacaagtcctacaatgtcacttcatcatagcagtatgataacacggcgatcataacaaaaacttacaggttcatcggaaagtttgacaaaaggcaaaaaaaaaaaaaaaa

SEQ ID NO: 2944 - protein, 308 aa, Triticum aestivum
  misc_feature: Ceres CLONE ID no. 698295
  misc_feature: Ceres CDNA ID no. 24766172
  misc_feature: The plant produces a reduced number of seeds.
  misc_feature: Useful for biocontainment applications
  misc_feature (116)..(290): Pfam Name: SCAMP PFAM Desc: SCAMP family
  misc_feature: Homolog of GI Number: 50901240 NR Desc: putative secretory carrier membrane protein
  misc_feature: Homolog of GI Number: 50902072 NR Desc: secretory carrier membrane protein
  misc_feature: Homolog of GI Number: 53749380 NR Desc: putative secretory carrier membrane protein
  misc_feature: Homolog of GI Number: 15220305 NR Desc: secretory carrier membrane protein
  misc_feature: Homolog of GI Number: 3941289 NR Desc: similarity to SCAMP37
  misc_feature: Homolog of GI Number: 21592580 NR Desc: putative secretory carrier
  misc_feature: Homolog of GI Number: 54643514 NR Desc: GA21604
  misc_feature: Homolog of GI Number: 73960970 NR Desc:  similar to secretory carrier membrane protein 3 isoform 2 isoform 6
  misc_feature: Homolog of GI Number: 50415628 NR Desc: Scamp3
  misc_feature: Homolog of GI Number: 34857962 NR Desc: secretory carrier membrane protein 3
  misc_feature: Useful for sterility
MAGRYDGGNPFEEEEDVNPFSEQTRGKAGGQSNYGGGGAFYMPNPRNVAPSSNSRLSPLPPEPADFSATVDIPLESSKDLKKREKELQAREAELNKREKELKRREEAAARAGIVIEEKNWPPFLPLIHHDIANEIPTHLQRMQYFAFASFLGLVFCLFWNVVAVTSAWIKGEGVKIWLLAIIYFISGVPGAYVLWYRPLYNAMRTDSALKFGLFFLLYLFHIIFVVFAAVAPPAVFEGKSLAGILPAIDLISVNALVGIFYFIGFGLFALESLLSIWVIQQVYMYFRGSGKAAEMKRDATRGAMRAAF

SEQ ID NO: 2945 - DNA, 580 bp, Triticum aestivum
  misc_feature: Ceres CLONE ID no. 698440
  misc_feature: Ceres CDNA ID no. 40351193
  CDS (77)..(415): REFERENCED BY SEQ ID NO: 2946
atgaatcttgtgtcagatcactcgtaaccttgcgtgcgtccgttgcaggttagcaggagcgagtgggagtccggccatggcgccgtcgcagcccaagtcagggctcttcgtgggcatcaacaagggccacgtcgtcaccaagcgcgagctgccgcctcgcccgtccgaccgcaaggggaaaggtacaaagagggtgcattttgtcaggaacttgatcagggaggttgctggatttgctccctatgagaagcgtatcactgagcttcttaaggttggaaaggacaagcgtgcactcaaggtcgccaagagaaagcttggtactcacaagagagcaaagaagaagagagaggagatgtcaagtgtccttaggaagatgaggtctgctggtggtggtgctggtgacaagaagaaatagaacttggctagctggtgaattttatccggaagcaaagtcctgtattaccagtccgtacctatagagctatggccattgtgttgacactatcgttagcccgtggtttctattttgagaagaccaatctctttaagatttttacatgagccaaaaaaaaaaaaaaaa

SEQ ID NO: 2946 - protein, 112 aa, Triticum aestivum; identical to SEQ ID NO: 2322
  misc_feature: Ceres CLONE ID no. 698440
  misc_feature: Ceres CDNA ID no. 40351193
  misc_feature (5)..(103): Pfam Name: Ribosomal_L36e PFAM Desc: Ribosomal protein L36e

SEQ ID NO: 2947 - DNA, 767 bp, Triticum aestivum
  misc_feature: Ceres CLONE ID no. 698535
  misc_feature: Ceres CDNA ID no. 36530652
  CDS (210)..(548): REFERENCED BY SEQ ID NO: 2948
ccacctcgccagctcaacgccacggcccgttgggttcattcccggcccatcaaggcccggtccagcccaatccgtcgcggcagtctcgtccgcgcggccgcacctatatagcccctgccgctaaaccctagcgagccctccatttgcgccgccgcctcccccgaagccatccgcatccccacgctcgctcgccgcggccgcccgacgcgatggctcccaccaagaaggcgaagaagagcggggagaacatcaacaacaagctgcagctggtgatgaagagcggcaagtatacgctcggctacaagaccgtcctcaagacgctgcgcagctccaaggggaagctgataatcctcgcaaacaactgcccgcccctgaggaagtcagagattgagtactacgctatgttggcgaaaattagcgtgcaccatttccatggaaacaatgttgatcttggaacagcctgcggcaagtactaccgggtgtgctgcctcagcatccttgaccctggtgactcggacatcatcagcaccaccaccaccacccagtgaagagaagagaagagagctctccacctattttatttagtcgagttgtagggtcctgttgtgctctcgaaaccactcttgtaatcttcggtttatgtacctttttgcgacgctgagttggagctgtcatacagataatacttcatatggttgttccgctggacattcatgtggttttgttttcatgatatcgttgtttccatcttaaaaaaaaaaaaaaaa

SEQ ID NO: 2948 - protein, 112 aa, Triticum aestivum
  misc_feature: Ceres CLONE ID no. 698535
  misc_feature: Ceres CDNA ID no. 36530652
  misc_feature (12)..(106): Pfam Name: Ribosomal_L7Ae PFAM Desc: Ribosomal protein L7Ae/L30e/S12e/Gadd45 family
  misc_feature: Homolog of GI Number: 57471710 NR Desc: ribosomal protein L30
  misc_feature: Homolog of GI Number: 50511371 NR Desc: putative 60S ribosomal protein L30
  misc_feature: Homolog of GI Number: 71042078 NR Desc: Chain C
  misc_feature: Homolog of GI Number: 2668750 NR Desc: ribosomal protein L30
  misc_feature: Homolog of GI Number: 55297497 NR Desc: putative ribosomal protein L30
  misc_feature: Homolog of GI Number: 2879811 NR Desc: ribosomal protein L30
  misc_feature: Homolog of GI Number: 34909198 NR Desc: putative 60S ribosomal protein L30
  misc_feature: Homolog of GI Number: 6984132 NR Desc: 60S ribosomal protein L30
  misc_feature: Homolog of GI Number: 21593857 NR Desc: 60S ribosomal protein
  misc_feature: Homolog of GI Number: 49903584 NR Desc: MGC89963 protein
MAPTKKAKKSGENINNKLQLVMKSGKYTLGYKTVLKTLRSSKGKLIILANNCPPLRKSEIEYYAMLAKISVHHFHGNNVDLGTACGKYYRVCCLSILDPGDSDIISTTTTTQ

SEQ ID NO: 2949 - DNA, 545 bp, Triticum aestivum
  misc_feature: Ceres CLONE ID no. 698668
  misc_feature: Ceres CDNA ID no. 25446233
  CDS (62)..(340): REFERENCED BY SEQ ID NO: 2950
atcgaatcgatcgctcttatcgcctcgaacgtatcgaagccgaggagagccgccgatcgacatgggtctcaaggaggagtttgaggagcacgcggagaaggccaagacgctgcccgacaccaccaccaacgagagcaagctctgcctctacggcctctacaagcaggccaccgtcggccccgtcaacaccgcccgccccggcggcctctttgatatggctggcaaggccaagtgggatgcttggaaggccgtcgaagccaaatccaaggaggaggccatggctgactacatcaccaaggtgaagcagctgctggaggaggctgccgccgcatctgcttgatcccaggccacaaaaccgcaatcgctattgttatcctggtggtgcagccatatgtgccagcaaacacaaataagtttcaagtactagttgttgtcaagcttatcgccgtcgtgggtgtaattacgttgaacaagccctgtgatacatgaaagtgcaatctcagtttacaccatgattgattaaaaaaataaaaaaaaaaaaaaaa

SEQ ID NO: 2950 - protein, 92 aa, Triticum aestivum
  misc_feature: Ceres CLONE ID no. 698668
  misc_feature: Ceres CDNA ID no. 25446233
  misc_feature (3)..(88): Pfam Name: ACBP PFAM Desc: Acyl CoA binding protein
  misc_feature: Homolog of GI Number: 19352190 NR Desc: Acyl
  misc_feature: Homolog of GI Number: 32454286 NR Desc: acyl
  misc_feature: Homolog of GI Number: 1938236 NR Desc: acyl
  misc_feature: Homolog of GI Number: 6002102 NR Desc: Acyl
  misc_feature: Homolog of GI Number: 34905304 NR Desc: putative Acyl
  misc_feature: Homolog of GI Number: 55775158 NR Desc: putative Acyl
  misc_feature: Homolog of GI Number: 6002104 NR Desc: Acyl
  misc_feature: Homolog of GI Number: 38093741 NR Desc: putative Acyl
  misc_feature: Homolog of GI Number: 5902717 NR Desc: Acyl
  misc_feature: Homolog of GI Number: 1006831 NR Desc: acyl
MGLKEEFEEHAEKAKTLPDTTTNESKLCLYGLYKQATVGPVNTARPGGLFDMAGKAKWDAWKAVEAKSKEEAMADYITKVKQLLEEAAAASA

SEQ ID NO: 2951 - DNA, 747 bp, Triticum aestivum
  misc_feature: Ceres CLONE ID no. 698694
  misc_feature: Ceres CDNA ID no. 35383263
  CDS (70)..(471): REFERENCED BY SEQ ID NO: 2952
attttcctccgcctcgatcccatcgccgtctcccccccacacctcgatcccgccgccgccccacccaccatggcgcgggcgaagccgtcgtcggcggcggcgaagaagagccaggcggcgcagcagggcggcggggccgggcacgcggcgccgtccgggctcgcgcggtacctcgacccggaggcgccgtgggacaaggaccggctgctggacgccgtgcactggatccgccaggcggtgggcctcgcctgcggccttctctggggcgccgtcccgctcgtcggcgccgcctggatcgtcctgttcgtggccatttcttctggcataatttactggtactatgcgcacctattgaaggtcgacgaggaagaatttggaggccatggcgcgctgcttcaggaggggatgtttgcatctttcacccttttcctgctttcatggattcttgtgtacagtttggctcacttttgatgagaagctcctttgttgaacataccttgatttgggatcggattggcggaaaaaaattcaccagaactctgtagattattgaagagccctagaacagcattgtatgaaatcggttcaggcagtcatgttgtctctgaatcccagtgtaattttgatagaacatcttagcataccagttgttggcagaacatgttcagtatgcttgacatgtaactattggatatcattctcttgcgtcgattcaataaaatgttttaacgaaaaaaaaaaaaaaaa

SEQ ID NO: 2952 - protein, 133 aa, Triticum aestivum
  misc_feature: Ceres CLONE ID no. 698694
  misc_feature: Ceres CDNA ID no. 35383263
  misc_feature (21)..(133): Pfam Name: Rab5ip PFAM Desc: Rab5
  misc_feature: Homolog of GI Number: 66531509 NR Desc:  similar to MGC80227 protein
  misc_feature: Homolog of GI Number: 61819221 NR Desc:  similar to RAB5
  misc_feature: Homolog of GI Number: 73992354 NR Desc:  similar to RAB5
  misc_feature: Homolog of GI Number: 50758543 NR Desc:  similar to gamma
MARAKPSSAAAKKSQAAQQGGGAGHAAPSGLARYLDPEAPWDKDRLLDAVHWIRQAVGLACGLLWGAVPLVGAAWIVLFVAISSGIIYWYYAHLLKVDEEEFGGHGALLQEGMFASFTLFLLSWILVYSLAHF

SEQ ID NO: 2953 - DNA, 811 bp, Triticum aestivum
  misc_feature: Ceres CLONE ID no. 698743
  misc_feature: Ceres CDNA ID no. 25891750
  CDS (121)..(501): REFERENCED BY SEQ ID NO: 2954
ctttttttcgtcgcttttctccactcctctctcgcccccctctactgcccgaaacccagcagcgaccgccggcgcatctcaccccgggccgaggccggcgaactccgaagggaatcggagatgcagcagggcgatggcacggaggcgcaggtgacgtgggatgaccagcagaacatcaaccggttcggccgcctcaacaaccgcctccacgagctcgccgacgagatcaggctcgccaaggaagcaaatgaaaacctcgaggatgctgggaatgaactcatcttgtctgatgaagatgtggtgcgattccaaatcggggaagtgtttgcccacatgccagtggacgatgtggaagctaggctagagcagatgaaagaggacgcagctaagaagctggagaagctggaggaagagaaggaatccatccttgcccagatggccgaactgaagaagatcctgaaagcgaaatttggagatgccatcaacctggaggaagattgatgtcgaggaccggaactgcctttttaagtgtcgagtcgcatgacacctgttcttgttcaggtgttttgttcgcctcattatattgtttcgtgtgatgctggctaatgtaaaatgtgagttttaagttctagaggattgttccccgttatgcatttgcatggttgatcttgggttcaggctgattgtccagcagaagccaccgggagtttccgcaaatggtcactccagataccaatgaggggacctttgcaatgttttaagctagtgagaatggtttgaacctgcatgattgttaaaaaaaaaaaaaaaa

SEQ ID NO: 2954 - protein, 126 aa, Triticum aestivum
  misc_feature: Ceres CLONE ID no. 698743
  misc_feature: Ceres CDNA ID no. 25891750
  misc_feature (16)..(120): Pfam Name: KE2 PFAM Desc: KE2 family protein
  misc_feature: Homolog of GI Number: 6996146 NR Desc: VIP3 protein
  misc_feature: Homolog of GI Number: 13446646 NR Desc: VIP3 protein
  misc_feature: Homolog of GI Number: 13446644 NR Desc: VIP3 protein
  misc_feature: Homolog of GI Number: 21554096 NR Desc: probable prefoldin subunit 4
  misc_feature: Homolog of GI Number: 28466891 NR Desc: At1g08780
  misc_feature: Homolog of GI Number: 9802572 NR Desc: F22O13.27
  misc_feature: Homolog of GI Number: 72082922 NR Desc:  similar to prefoldin 4
  misc_feature: Homolog of GI Number: 1620561 NR Desc: C
  misc_feature: Homolog of GI Number: 45198557 NR Desc: AFR039Cp
  misc_feature: Homolog of GI Number: 54640737 NR Desc: GA10456
MQQGDGTEAQVTWDDQQNINRFGRLNNRLHELADEIRLAKEANENLEDAGNELILSDEDVVRFQIGEVFAHMPVDDVEARLEQMKEDAAKKLEKLEEEKESILAQMAELKKILKAKFGDAINLEED

SEQ ID NO: 2955 - DNA, 572 bp, Triticum aestivum
  misc_feature: Ceres CLONE ID no. 698868
  misc_feature: Ceres CDNA ID no. 25891681
  CDS (26)..(448): REFERENCED BY SEQ ID NO: 2956
acagaaccaaagtgttcgacggagcatggcctccagctcgagagacgaccgtgcgggagctgcagcgccgcgcccgcgcatcgtcctcctcccgagcgccggcatgggccacctggcgcccttcagccgtctcgccgccgccctttcctctggccacgcctgcgacgtctccctcgtgacggtcctccccaccgtctcgtccgccgagtccggccagctcgacgcgctcttcgccgcgttcccggccgtccgcaggctcgacttccacctcccgccgctcgacgcgcccgagctctccggtgccgacccgttctacgtgcactacgaggccacgcgccgttccgcgcgtctcctcgccccgctcctcgccgccgccgacggccgtggctggtggcgggacgagctaccggagcttggcggagcttgtggcacgctgctgtcatggtagtgccttacagtaacgcgacatcagaggaaggaatcttggacaaaaacgtacggcgtaattggtttgctatcaatattccaacatttggcaaaatcagaaattgttaataaaaaaaaaaaaaaaa

SEQ ID NO: 2956 - protein, 140 aa, Triticum aestivum
  misc_feature: Ceres CLONE ID no. 698868
  misc_feature: Ceres CDNA ID no. 25891681
  misc_feature: Homolog of GI Number: 55297477 NR Desc: putative UTP
  misc_feature: Homolog of GI Number: 55297465 NR Desc: putative UDP
  misc_feature: Homolog of GI Number: 55296661 NR Desc: putative UDP
  misc_feature: Homolog of GI Number: 53793516 NR Desc: putative beta
  misc_feature: Homolog of GI Number: 50926032 NR Desc: OSJNBa0067K08.24
  misc_feature: Homolog of GI Number: 84174 NR Desc: merozoite surface antigen
  misc_feature: Homolog of GI Number: 67987177 NR Desc: 4Fe
  misc_feature: Homolog of GI Number: 2429362 NR Desc: proline rich protein
  misc_feature: Homolog of GI Number: 55740439 NR Desc: hydroxyproline
  misc_feature: Homolog of GI Number: 50933659 NR Desc: putative high
MASSSRDDRAGAAAPRPRIVLLPSAGMGHLAPFSRLAAALSSGHACDVSLVTVLPTVSSAESGQLDALFAAFPAVRRLDFHLPPLDAPELSGADPFYVHYEATRRSARLLAPLLAAADGRGWWRDELPELGGACGTLLSW

SEQ ID NO: 2957 - DNA, 676 bp, Triticum aestivum
  misc_feature: Ceres CLONE ID no. 699125
  misc_feature: Ceres CDNA ID no. 36582380
  CDS (2)..(406): REFERENCED BY SEQ ID NO: 2958
ctactcctccagaatgttcccttctaccacggccacggcctcccgcctcctcgtccccgccgcctctcgccgcgccatggccactgccgcctccgccaacccgccgcccccgcagcaatcgccctccaaggcggtgcgggtcgtggtgaagggccgcgtgcagggcgtcttcttccgcgactggacggtggagacggcccgcgcgctcgggctcgccggctgggtccgcaaccgccgcgacggcaccgtggaggccctcctctccggcgaacccgccagggtcgacgagatggtctcccggcgccttcccgtcgggcctcccgccgccgccgtcaccgcggtgctgccttcccccgccgatccgctcgacccctccgagggcttccaccgcaagcccaccgcctgatgaccactggttcttgtcagtgacatggtaataaaacctctgtatatttcgcattcaatgatttttagcatgttatcgagcgagatgtcagcttattgaatcgaactattggaatcggaattcctagtgacaggatcacgagtgtggtgtttattgaatcaatgcccccccctccccaacggtaggactgcgagttgtcgagtttgtttccattcagttagattcaatacacactttgtttgtgtgtaagcccgaaaaaaaaaaaaaaaa

SEQ ID NO: 2958 - protein, 109 aa, Triticum aestivum
  misc_feature: Ceres CLONE ID no. 699125
  misc_feature: Ceres CDNA ID no. 36582380
  misc_feature (16)..(101): Pfam Name: Acylphosphatase PFAM Desc: Acylphosphatase
  misc_feature: Homolog of GI Number: 29028786 NR Desc: At5g03370
  misc_feature: Homolog of GI Number: 46200875 NR Desc: COG1254: Acylphosphatases
  misc_feature: Homolog of GI Number: 48765710 NR Desc: COG1254: Acylphosphatases
  misc_feature: Homolog of GI Number: 69930730 NR Desc: Acylphosphatase
  misc_feature: Homolog of GI Number: 77691789 NR Desc: Acylphosphatase
  misc_feature: Homolog of GI Number: 68561608 NR Desc: Acylphosphatase
  misc_feature: Homolog of GI Number: 6523547 NR Desc: hydroxyproline
MATAASANPPPPQQSPSKAVRVVVKGRVQGVFFRDWTVETARALGLAGWVRNRRDGTVEALLSGEPARVDEMVSRRLPVGPPAAAVTAVLPSPADPLDPSEGFHRKPTA

SEQ ID NO: 2959 - DNA, 870 bp, Triticum aestivum
  misc_feature: Ceres CLONE ID no. 699324
  misc_feature: Ceres CDNA ID no. 29191371
  CDS (67)..(687): REFERENCED BY SEQ ID NO: 2960
attccgcctccacccccgaactccaaaccctagcagtagcgccgccgccgccaggtaagaggcgagatggtgtccggctccggcgtgtgcgccaagcgcgtggtggtggacgcccgccaccacatgctcggccgcctggcctcgatcgtcgccaaggagctgctcaacgggcagcgcgtggtggtggtccgctgcgaggagatctgcatgtccggcggcctcgtccgccagaagatgaagtacctccgcttcctccgcaagcggatgaacaccaagccctcccacggccccatccacttccgcgccccggccaagatcctctggcgcaccatccgcggtatgattccgcacaagaccgcgaggggcgaggccgcgctcgccaggctcaaggcgtacgagggcgtcccgccgccgtacgacaggaccaagcgcatggtcatccccgacgcgctcaaggttctgaggctgcagcctgggcacaggtactgcctcctcggccagctctccaaggaggtcggatggaactacgccgacaccatcagggagctggaggaaaagagaaaggagaaggccaaggtctcctacgacaggagaaagcaactggcgaagctccgcgtcaaggccgagaaggcggccgaggagaagttgggaactcagctggagatcctagccccgatcaaatactaagagagattagagcttccgtgcgccatcagttttgggaaacctctgtcctcttgtctttgagtagtttggtaactctgtgatagtacaacctggttggtaaacctttgttatgcatgcagttctgctaccctcatttgaaattttctacttggtgaactgtttcgtttaaaaaaaaaaaaaaaa

SEQ ID NO: 2960 - protein, 206 aa, Triticum aestivum
  misc_feature: Ceres CLONE ID no. 699324
  misc_feature: Ceres CDNA ID no. 29191371
  misc_feature (11)..(127): Pfam Name: Ribosomal_L13 PFAM Desc: Ribosomal protein L13
  misc_feature: Homolog of GI Number: 57471706 NR Desc: ribosomal protein L13a
  misc_feature: Homolog of GI Number: 37718812 NR Desc: putative ribosomal protein L13a
  misc_feature: Homolog of GI Number: 21326116 NR Desc: putative 60S ribosomal protein
  misc_feature: Homolog of GI Number: 50933743 NR Desc: putative 60S ribosomal protein
  misc_feature: Homolog of GI Number: 76573371 NR Desc: 60S ribosomal protein L13a
  misc_feature: Homolog of GI Number: 21593767 NR Desc: 60S ribosomal protein L13a
  misc_feature: Homolog of GI Number: 6642654 NR Desc: putative 60S ribosomal protein L13A
  misc_feature: Homolog of GI Number: 4753651 NR Desc: ribosomal protein L13a like protein
  misc_feature: Homolog of GI Number: 2982259 NR Desc: probable 60s ribosomal protein L13a
  misc_feature: Homolog of GI Number: 23297306 NR Desc: putative 60S ribosomal protein
MVSGSGVCAKRVVVDARHHMLGRLASIVAKELLNGQRVVVVRCEEICMSGGLVRQKMKYLRFLRKRMNTKPSHGPIHFRAPAKILWRTIRGMIPHKTARGEAALARLKAYEGVPPPYDRTKRMVIPDALKVLRLQPGHRYCLLGQLSKEVGWNYADTIRELEEKRKEKAKVSYDRRKQLAKLRVKAEKAAEEKLGTQLEILAPIKY

SEQ ID NO: 2961 - DNA, 712 bp, Triticum aestivum
  misc_feature: Ceres CLONE ID no. 699433
  misc_feature: Ceres CDNA ID no. 35383264
  CDS (97)..(513): REFERENCED BY SEQ ID NO: 2962
atcacacacacgcccaacaatcgcagacacgaaccacacacccgcgcaagacagggaaaagagggaaggccgggagcatccacgtagccgtgcgcaatgtaccaagccatcccctacagcagcacccggccctgggcccgcccgtcgccggcggcggaggcggccgtcgccgtcaagacggagaccgcggaggcgtcggcgtcccgggaggacgcggcgggggttgagagggcggtgtcggagagcccggtcgtggtggtggggaggcgtgcctgctgcctcacccacgtggtgaagcggctgctgcaggggctcggggtcaaccccgccgtgcacgaggtcgccgacgaggccgcgctcgccggggtcgtgccggacggcggggaggcagcggcgctcccggcggtgttcgtcggggggaagctcctcggcggcctcgatcgcctcatggccgtccacatctccggcgagctcgtgcccatcctcaagaaggccggcgccctctggctctgatcggacccttccttcctttccttagtttcctttcgtcagaagacggtgccgcggtgtaatcctggccgttggatcgaatttactctaggattttgggtttctttaatggtgtgctaaattttttctcaacaaatatatttatgagaaaaaaagaaacagacagctagcgttactgattttggcaaaaaaaaaaaaaaaa

SEQ ID NO: 2962 - protein, 138 aa, Triticum aestivum
  misc_feature: Ceres CLONE ID no. 699433
  misc_feature: Ceres CDNA ID no. 35383264
  misc_feature (64)..(130): Pfam Name: Glutaredoxin PFAM Desc: Glutaredoxin
  misc_feature: Homolog of GI Number: 56202242 NR Desc: glutaredoxin
  misc_feature: Homolog of GI Number: 34910944 NR Desc: OSJNBb0063G05.17
  misc_feature: Homolog of GI Number: 6560751 NR Desc: F3M18.8
  misc_feature: Homolog of GI Number: 50923897 NR Desc: OSJNBa0072K14.2
  misc_feature: Homolog of GI Number: 50908919 NR Desc: glutaredoxin
  misc_feature: Homolog of GI Number: 50934249 NR Desc: glutaredoxin
  misc_feature: Homolog of GI Number: 60460556 NR Desc: glutaredoxin
  misc_feature: Homolog of GI Number: 9757788 NR Desc: glutaredoxin
  misc_feature: Homolog of GI Number: 67984658 NR Desc: type II secretion system protein E
  misc_feature: Homolog of GI Number: 66780099 NR Desc: PE
MYQAIPYSSTRPWARPSPAAEAAVAVKTETAEASASREDAAGVERAVSESPVVVVGRRACCLTHVVKRLLQGLGVNPAVHEVADEAALAGVVPDGGEAAALPAVFVGGKLLGGLDRLMAVHISGELVPILKKAGALWL

SEQ ID NO: 2963 - DNA, 1128 bp, Triticum aestivum
  misc_feature: Ceres CLONE ID no. 699487
  misc_feature: Ceres CDNA ID no. 35383265
  CDS (142)..(843): REFERENCED BY SEQ ID NO: 2964
gtcctgtactagtagagtacatctctgtcccaatcgccgtgatccagctagcttactacacaggcaagggcgattcgatcgaggccgccgccgccgccgccggagacgaccccgccgccttcagttagttaagatacaaaaatggcctcattggacaccgtcacaggagatcttggcctggttgttttgtacctaagcaaggctgaggcaagagataagatctgcagagctatacaatatggatccaagttcctgagcaacggacaaccaggacctgcacagaatgtcgacaaatcaactagtcttgctcggaaagttttccggctgtttaagtttgttaatgatctccaagctctgattagcccccctgccaaaggaactccacttccgctgatcttacttggaaagtcgaagaacgcgatgctgtcaactttcctctttctggaccaaattgtttgggctgggagaacaggagtatacaagaacaaggagcgagcagaattccttggcaggattgccttttattgctttcttggatctaatacatgtactaccatcatcgagctagcggagcttcagcggctttccaaatcgatgaagaagttagagaaggacctcaagcaccaagagctgtacaagaacgagcagtatcggatgaagctgaagaagtccaatgagaggctgcttgctctcatcaaatcgagccttgacatagttgttgcagtggggctgctgcaactggccccgaaaaaggtcactcctcgcgtcactggggcctttgggttcgctagctcgctcatcgcctgttaccagttgcttccagccccagccaaatccaagtgatctgcctgcccacctcgggccaggcagctggtgcatcgattggtgaaacggcggttgctgtcgctgatacttgataagaaataaatctggaccaaattgtccgtcctgtaggatataaccgaggattattgttgtggaagtcggcattgcccagggccatctcatagcctggttgatctgccttgccttatgacttgattatgtagcacgcttgtatttgtatggtctggtgtgccactatcatactataactgttgcaaaataaaaacaaaaaaaaaaaaaaaa

SEQ ID NO: 2964 - protein, 233 aa, Triticum aestivum
  misc_feature: Ceres CLONE ID no. 699487
  misc_feature: Ceres CDNA ID no. 35383265
  misc_feature (11)..(226): Pfam Name: PEX11 PFAM Desc: Peroxisomal biogenesis factor 11
  misc_feature: Homolog of GI Number: 55775296 NR Desc: peroxisomal biogenesis factor 11 protein
  misc_feature: Homolog of GI Number: 56368447 NR Desc: putative peroxisomal membrane protein PEX11
  misc_feature: Homolog of GI Number: 56368449 NR Desc: peroxisomal membrane protein PEX11
  misc_feature: Useful for increasing chlorophyll and photosynthetic capacity
  misc_feature: Useful for making ornamental plants with modified leaves
  misc_feature: Useful for sterility
MASLDTVTGDLGLVVLYLSKAEARDKICRAIQYGSKFLSNGQPGPAQNVDKSTSLARKVFRLFKFVNDLQALISPPAKGTPLPLILLGKSKNAMLSTFLFLDQIVWAGRTGVYKNKERAEFLGRIAFYCFLGSNTCTTIIELAELQRLSKSMKKLEKDLKHQELYKNEQYRMKLKKSNERLLALIKSSLDIVVAVGLLQLAPKKVTPRVTGAFGFASSLIACYQLLPAPAKSK

SEQ ID NO: 2965 - DNA, 982 bp, Triticum aestivum
  misc_feature: Ceres CLONE ID no. 699497
  misc_feature: Ceres CDNA ID no. 25892197
  CDS (139)..(648): REFERENCED BY SEQ ID NO: 2966
cccttcccggattcccaccctccacctccaaacgcgcacgcacgcgtccacgaataaaggccgagggcggcgaagccaggcccaatcgccaaaaaccctagcgccgatccgatccgatcgagctctgcttcccctcccatggcggccccctcgagccaggcgagcctcctgctccagaagcagctccgagatctagcgaagaaccccgtggacgggttctcggcggggctggtggacgacggcaacgtgtttgagtggcaggtcaccatcatcggcccgcccgagacattatatgatggaggctacttcaatgcagtaatgacctttcctcaggattatcccaacagtcctccatcagtaaggtttacttctgagatgtggcatccaaacgtctatcctgatgggcgtgtgtgcatttctattcttcatccacctggtgatgatcccaatggttacgagcttgcaagtgaacggtggacaccagtgcacacagttgagagtatagttttgagcattatttcgatgctctctagtccaaacgatgagtctccagcaaatattgaagcggctaaggactggagagaaaagagggccgagttcaagaaaaaggtgaggagccttgttcgcaaatctcaggaaatgctctgaaaaaggaggatcatatgggggagtccacaagcgctgcaattctcttgctttcaccaaatggggcacctgatgccagcacttgcacttctcccctgtttattttccgttcagcgtcggtcgaatggtggtgttggtcttgtctctccgagacacttggggtgctgcctattatgaacttctgattgtattgtggcatggagttggtcaatgtcaagaagtattttcgtgtgatgccacttaatcgtagtcatcgccgtgaacatcatatcaaagaaattggctgtttgttgaatgaatccttccccaagaatgtgcccgcaaaaaaaaaaaaaaa

SEQ ID NO: 2966 - protein, 169 aa, Triticum aestivum
  misc_feature: Ceres CLONE ID no. 699497
  misc_feature: Ceres CDNA ID no. 25892197
  misc_feature (11)..(162): Pfam Name: UQ_con PFAM Desc: Ubiquitin
  misc_feature: Homolog of GI Number: 2641619 NR Desc: ubiquitin
  misc_feature: Homolog of GI Number: 50931677 NR Desc: putative ubiquitin
  misc_feature: Homolog of GI Number: 34908132 NR Desc: putative Ubiquitin carrier protein UBC7
  misc_feature: Homolog of GI Number: 2624417 NR Desc: Ubiquitin carrier protein
  misc_feature: Homolog of GI Number: 19347846 NR Desc: putative E2
  misc_feature: Homolog of GI Number: 28973769 NR Desc: putative E2
  misc_feature: Homolog of GI Number: 9759251 NR Desc: ubiquitin
  misc_feature: Homolog of GI Number: 66354436 NR Desc: ubiquitinating enzyme
  misc_feature: Homolog of GI Number: 81076243 NR Desc: ubiquitin
  misc_feature: Homolog of GI Number: 66354438 NR Desc: ubiquitinating enzyme
MAAPSSQASLLLQKQLRDLAKNPVDGFSAGLVDDGNVFEWQVTIIGPPETLYDGGYFNAVMTFPQDYPNSPPSVRFTSEMWHPNVYPDGRVCISILHPPGDDPNGYELASERWTPVHTVESIVLSIISMLSSPNDESPANIEAAKDWREKRAEFKKKVRSLVRKSQEML

SEQ ID NO: 2967 - DNA, 933 bp, Triticum aestivum
  misc_feature: Ceres CLONE ID no. 699706
  misc_feature: Ceres CDNA ID no. 36582815
  CDS (87)..(623): REFERENCED BY SEQ ID NO: 2968
gaaactcgggtccattccaacagagagcaacacaatccaatcttctgccgtcccgtgctcgtagttggtggagtagggttttagccatggcgtggagcgccgccgccgccgtctccaggttcgccgcctccccggccgccgagatccgcctgcccttctcagcagctgccgccgcctccgtctccttcgccggccgccgccgcttcggccccgtcgccgcgtccctcgccacctccgccaccgttcaaaaggaggctgttcagacggagaaggcaccagcagcactaggcccctactcccaggcgataaaagcaaacaatcttgtgtttgtctcgggcgttcttggcctaaatcctgagacagggaagtttgtctctgaaagcgtggaggagcaaactgagcaggttatgaagaacatgggtgaaatattgaaagcaagtggtgctagctactcatcagttgtcaagacaacaatcatgttagccgacctacaggatttcaagaacgtgaacgagatttatgctaaatattttccagcccctgcaccggcgcgctcgacctaccaagtcgcagctctgccactgaacgccaggattgagatcgagtgcattgctgccctctagttacctcgcggctgaccatcaaaaacctcaataagcgttccatgcccgttgcagctggccactactattctgtagtgcactacatgacactgtaatccaattaaggtcttgaactgcgtgtgatcggtgtactgtctctcatcgtttggtcgcggggtatttctccctgtccaatcttatgcctcgtcgtataaggaaacgtgaaattaaaatggtcaaattgagcgtatgaattagcccaaaaaaaaaaaaaaaaaaaaaaaaaaaaaaaaaaaaaaaaaaaaaaaaaaaaataaaaaaaaaaaaaaaa

SEQ ID NO: 2968 - protein, 178 aa, Triticum aestivum
  misc_feature: Ceres CLONE ID no. 699706
  misc_feature: Ceres CDNA ID no. 36582815
  misc_feature (60)..(178): Pfam Name: Ribonuc_L PFAM Desc: Endoribonuclease L
  misc_feature: Homolog of GI Number: 50937773 NR Desc: putative translational inhibitor protein
  misc_feature: Homolog of GI Number: 21554167 NR Desc: translational inhibitor protein
  misc_feature: Homolog of GI Number: 37991674 NR Desc: perchloric acid soluble translation inhibitor protein homolog
  misc_feature: Homolog of GI Number: 31616058 NR Desc: Chain I
  misc_feature: Homolog of GI Number: 62901860 NR Desc: translational inhibitor protein p14.5
  misc_feature: Homolog of GI Number: 5032215 NR Desc: heat
  misc_feature: Homolog of GI Number: 60653651 NR Desc: heat
  misc_feature: Homolog of GI Number: 1255116 NR Desc: heat
  misc_feature: Homolog of GI Number: 23127695 NR Desc: COG1357: Uncharacterized low
  misc_feature: Homolog of GI Number: 67910981 NR Desc: YjgF
MAWSAAAAVSRFAASPAAEIRLPFSAAAAASVSFAGRRRFGPVAASLATSATVQKEAVQTEKAPAALGPYSQAIKANNLVFVSGVLGLNPETGKFVSESVEEQTEQVMKNMGEILKASGASYSSVVKTTIMLADLQDFKNVNEIYAKYFPAPAPARSTYQVAALPLNARIEIECIAAL

SEQ ID NO: 2969 - DNA, 794 bp, Triticum aestivum
  misc_feature: Ceres CLONE ID no. 699728
  misc_feature: Ceres CDNA ID no. 40351194
  CDS (103)..(492): REFERENCED BY SEQ ID NO: 2970
cccccaaacgaaaccctactccttgccctcaactttcctctctcgcggcggcggcagcgggatctagggcggcggcgcggcagctaaaatatcaacccaggaatggcaatgtcttggacacgagcattgaagcatggagttactccaagggatgcagctcaactggtcgggataagaggctttgcagctcaggccaagggaaagaagggtgggaaaggtggtgcggctgatgctaaacctgtgctcagcaaagaaatgaagagtacaactgtgtttggggcaaatatcctgaaggagggttctgacccgaagatccaaccagattcggagtaccctgactggctgtggcacctggttgacaagcgtcctgtgctgagcgagctgcggaggaaagatgccaagacactgccttatgaagacctgaagcgtttcgtcaagttggacaaccgggctaggatcaaggaaaacaatgctctcactgctaagaactgatcaggagaatcacatctcatgtagtggtcaaagtaagcatattgtcctgtcttttgttacaaggtttattagttacttttggtaataatggagtgacttatttgcttggctcagtacaatgtaggctatgtgaccaacatgctgtttgtcatgttcttgtttagatgtaacttctgtatcttgcagcaaatcctgtaggaagtttcccatgctcttgcttggcttggtacactgttttgcagcaggagttttaagcctatcaatagaaagacagagatatttgaataaaaaaaaaaaaaaaa

SEQ ID NO: 2970 - protein, 129 aa, Triticum aestivum
  misc_feature: Ceres CLONE ID no. 699728
  misc_feature: Ceres CDNA ID no. 40351194
MAMSWTRALKHGVTPRDAAQLVGIRGFAAQAKGKKGGKGGAADAKPVLSKEMKSTTVFGANILKEGSDPKIQPDSEYPDWLWHLVDKRPVLSELRRKDAKTLPYEDLKRFVKLDNRARIKENNALTAKN

SEQ ID NO: 2971 - DNA, 1322 bp, Triticum aestivum
  misc_feature: Ceres CLONE ID no. 699770
  misc_feature: Ceres CDNA ID no. 36569810
  CDS (100)..(1176): REFERENCED BY SEQ ID NO: 2972
cgaaaacattatcgttgtgcagtcgacgctcactgtaccgtccttgcgagggtgagcaacagtaccagctaagctagctagctacagcgtacggtggccatggcgagcagcagcagcagcagcctggccggtctggcggtgctgctcaccgccgtgctgtgcctgcagctgccgatccacagccgcgcgcagctgcgcgtggggttctacaacaccacctgccccaacgccgaggccatcgtccggcaggccgtcacggccgccttcgctaccaactccggcgtcgccgccggcctcatccgcctccacttccacgactgcttcgtcgagggctgtcattcctcggtgctcctgtccgtcaaccccggcggaggcacgccggagcgtgacgcggcaccgaacaacccgagcctgcgtggcttcgcggtcgtcgacgccgccagggccgcattggagcagagctgcccgcgcacggtgtcatgcgccgacatcctggccttcgccgcccgggacagcgtgaacatcaccggcagcaacgccttctaccaggtcccttccggccgccgcgacgggaacctctcgacccaggccggcgcgttcaccctcccggggccgaacctgacggcggacggcctcgtcagcgggttccaggacagggggctcaccgccgaagacatggtggtcctgtccggctcccacaccctgggccgctcccactgcaactccttcatcgtgaggaaccgggagcggctggcgagcggcaccatcggcccggcgtaccaggcgctgctggaggcgctgtgcccggcgaacacgagccagttcaccaacgtgacgacggagatcgacctgagcacgccggtggtgctggacaacaactactacaagctggtgcagctcaacctgggcctgcacttctccgacgaccagctcatccgcaacgccaccctcaagggcttcgtcgacaccttcgccgccaacgagacgctgtggaaggagaagttcatcgccgccatgatcaagatgggcaacatcgcccccaagaccggcacgcaaggggagatccgcctcaactgcagcatcgtcaacccgtcctccacctcttcgtccggttacgatggggcgatccagatgctccgccgcccgggctccgacgataaggtcgcctcgggctgatgtacagtatgtgcgcagagtaacgtgtgtggtgttggcacgtccttgctgcgtatgcgtatgcacgggcgtgctggccggtcggtgtccgttcgcacctacacttgtgatgaatgatgaagaataaacgaaaaaaaaaaaaaaaa

SEQ ID NO: 2972 - protein, 358 aa, Triticum aestivum
  misc_feature: Ceres CLONE ID no. 699770
  misc_feature: Ceres CDNA ID no. 36569810
  misc_feature (48)..(294): Pfam Name: peroxidase PFAM Desc: Peroxidase
  misc_feature: Homolog of GI Number: 57635161 NR Desc: peroxidase 8
  misc_feature: Homolog of GI Number: 34894760 NR Desc: putative peroxidase
  misc_feature: Homolog of GI Number: 53791491 NR Desc: putative peroxidase
  misc_feature: Homolog of GI Number: 34894758 NR Desc: putative peroxidase
  misc_feature: Homolog of GI Number: 12056448 NR Desc: peroxidase
  misc_feature: Homolog of GI Number: 34894752 NR Desc: putative peroxidase
  misc_feature: Homolog of GI Number: 52077569 NR Desc: putative peroxidase
  misc_feature: Homolog of GI Number: 34894748 NR Desc: putative peroxidase
  misc_feature: Homolog of GI Number: 34894766 NR Desc: putative peroxidase
  misc_feature: Homolog of GI Number: 51038121 NR Desc: peroxidase
MASSSSSSLAGLAVLLTAVLCLQLPIHSRAQLRVGFYNTTCPNAEAIVRQAVTAAFATNSGVAAGLIRLHFHDCFVEGCHSSVLLSVNPGGGTPERDAAPNNPSLRGFAVVDAARAALEQSCPRTVSCADILAFAARDSVNITGSNAFYQVPSGRRDGNLSTQAGAFTLPGPNLTADGLVSGFQDRGLTAEDMVVLSGSHTLGRSHCNSFIVRNRERLASGTIGPAYQALLEALCPANTSQFTNVTTEIDLSTPVVLDNNYYKLVQLNLGLHFSDDQLIRNATLKGFVDTFAANETLWKEKFIAAMIKMGNIAPKTGTQGEIRLNCSIVNPSSTSSSGYDGAIQMLRRPGSDDKVASG

SEQ ID NO: 2973 - DNA, 754 bp, Triticum aestivum
  misc_feature: Ceres CLONE ID no. 699782
  misc_feature: Ceres CDNA ID no. 25892831
  CDS (175)..(411): REFERENCED BY SEQ ID NO: 2974
aaccgacacgcgaagcagagccagcagccccgccagactctccctccggcgaccccggcgatctacttccccggcgacggccgccgcgtctccagccgccgcgctctcttcccaccgtgcctttattggctatcaactataaagtttgtagtggtttctggtgttcttcgcaaaatggtgaagctgacaatgatagcgcgtgtcactgatggccttccgctggcagaagggctggatgacgggcgtgatcagaaggattctgatttctacaagcagcaagctaaacttcttttcaagaacttgtcaaaggggcaacatgaagcctcacggatgtcaattgagaccggatcatactttttccagtatcctttgttaattgcggtctatttgctgttcggggaagatgcttgatcctaggtattatatttagacatgcaatgacattgtactccctccgttcctaaatacaagtctttttagacatttcaaatggactacaacataaggatgtatgtagacatattttaaagtgtagattcactcattttgctccgtatgtagtcacttgttggaatctctaaaaagacttatatttaggaacggagggagtattatatattcagattcgtagatactctgcatgctttcgctagccagtatctgtatcgttttgttgacagagaagtcaacatttgttgactaatcatggactacatttaaacaagcagcgacacctagaaaaaaaaaaaaaaaa

SEQ ID NO: 2974 - protein, 78 aa, Triticum aestivum
  misc_feature: Ceres CLONE ID no. 699782
  misc_feature: Ceres CDNA ID no. 25892831
  misc_feature: Homolog of GI Number: 51964578 NR Desc: PREDICTED OSJNBb0060J21.31 gene product
  misc_feature: Homolog of GI Number: 34015272 NR Desc: putative vesicle trafficking protein
  misc_feature: Homolog of GI Number: 56783947 NR Desc: putative ERS
  misc_feature: Homolog of GI Number: 50943891 NR Desc: putative vesicle trafficking protein
  misc_feature: Homolog of GI Number: 50508219 NR Desc: vesicle transport protein
  misc_feature: Homolog of GI Number: 19310827 NR Desc: putative vesicle transport protein
  misc_feature: Homolog of GI Number: 72110057 NR Desc:  similar to Vesicle trafficking protein SEC22b
MVKLTMIARVTDGLPLAEGLDDGRDQKDSDFYKQQAKLLFKNLSKGQHEASRMSIETGSYFFQYPLLIAVYLLFGEDA

SEQ ID NO: 2975 - DNA, 744 bp, Triticum aestivum
  misc_feature: Ceres CLONE ID no. 699901
  misc_feature: Ceres CDNA ID no. 25891751
  CDS (89)..(544): REFERENCED BY SEQ ID NO: 2976
acaacccatcccccaattccccaccagttctcccaccgtccaccgaaacccccacctcacctccgaagcggcggcggcagcagcgtccatggcgcccaaggcggagaagaagccggcggcgaagaagcccgcggaggaggagcccgcggcggagaaggcccccgcggcgaagaagcccaagggcgagaagcggctgccggcggggaagacttccgccggcaaggagggcggcgagaagaagggcgggaagaagaaggccaagaagagcgtggagacgtacaagatctacatcttcaaggtgctgaagcaggtgcaccccgacatcggcatctcctccaaggccatgtccatcatgaactccttcatcaacgacatcttcgagaagctcgccggcgaggcggccaagctcgcccgctacaacaagaagcccaccatcacgtcccgggagatccagacctccgtccgcctcgtcctccccggcgagctcgccaagcacgccgtctccgagggcaccaaggccgtcaccaagttcacctcctcttaggctctttgtcaaatctcttctggcgtgtgatggatcgatgttgacctgtagttagatcatgttccggctgtcatcttgtaagaaaacgtgctctcggtactgttattcagacccgaagtaacaacactgttcaaccctgctgttccctcggaaatatctgaagaaatgctaagcttgccgcttcaaaaaaaaaaaaaaaa

SEQ ID NO: 2976 - protein, 151 aa, Triticum aestivum
  misc_feature: Ceres CLONE ID no. 699901
  misc_feature: Ceres CDNA ID no. 25891751
  misc_feature: No seed is being produced by the plant
  misc_feature: The plant flowers significantly late compared to wild-type.
  misc_feature: Useful for biocontainment applications
  misc_feature: Useful for making plants with modulated flowering time
  misc_feature (58)..(130): Pfam Name: Histone PFAM Desc: Core histone H2A/H2B/H3/H4
  misc_feature: Homolog of GI Number: 22325 NR Desc: H2B histone
  misc_feature: Homolog of GI Number: 21801 NR Desc: histone H2B
  misc_feature: Homolog of GI Number: 577825 NR Desc: H2B histone
  misc_feature: Homolog of GI Number: 1708107 NR Desc: Histone H2B
  misc_feature: Homolog of GI Number: 50932769 NR Desc: putative histone H2B
  misc_feature: Homolog of GI Number: 22323 NR Desc: H2B histone
  misc_feature: Homolog of GI Number: 34895838 NR Desc: putative histone H2B
  misc_feature: Homolog of GI Number: 34895896 NR Desc: putative histone H2B
  misc_feature: Homolog of GI Number: 34895832 NR Desc: putative histone H2B
  misc_feature: Homolog of GI Number: 34895908 NR Desc: putative histone H2B
MAPKAEKKPAAKKPAEEEPAAEKAPAAKKPKGEKRLPAGKTSAGKEGGEKKGGKKKAKKSVETYKIYIFKVLKQVHPDIGISSKAMSIMNSFINDIFEKLAGEAAKLARYNKKPTITSREIQTSVRLVLPGELAKHAVSEGTKAVTKFTSS

SEQ ID NO: 2977 - DNA, 835 bp, Triticum aestivum
  misc_feature: Ceres CLONE ID no. 699939
  misc_feature: Ceres CDNA ID no. 25891682
  CDS (62)..(688): REFERENCED BY SEQ ID NO: 2978
agtagagttctcaaaaaaagaaaagctctgcagttaggcgcgcgcacacacaacacacatcatggtgggtaccgttgccaaggacgtgacgaccgagccggagctgctgctggagcgcagccgggcgatcaccgtgcgtggcagcgacaaggagggccgcgccgtcgtcaggatcgtcggcgagtacttccccgcgcgcgcgctgggcgggcgggcggaggaggcgctcaaggcgcacctgcggaagcgggtgctcccggaggtcggggaacgggagttcgtggtcgtgtacatgcactccctcgtcgaccgcggcgacaacttccccggcctgggcgccatccgcgcagcgtacgagtgcctgccggccgcggccaaggagaggctgcgcgccgtctacttcgtgcaccccggcatccaggcccggctcttcttcgcaaccttcggccggttcctcttcagctccgggttgtacgagaagctgaggtacatgagcaggctcgaatacctgtgggcgcacataaacaagggggagctggaggtcccggagtgtgcgcgccggcacgacgacgagctggagcgccgcccgctcatggactacggaatcgaggcggccgaccgctgttccgtgttcgacgccgcgtccatggacacaccggcgtccctgcgctcgctgcgttgctcctagcgggcaccgtgtgatcggccgtccggttgtagtttagcaggcctcttgatgtttgtttgtaatctgtagtacaaattagtagtactagtgtaaataataagaaatatatataataaagtgaccgataattcaaaaaaaaaaaaaaaa

SEQ ID NO: 2978 - protein, 208 aa, Triticum aestivum
  misc_feature: Ceres CLONE ID no. 699939
  misc_feature: Ceres CDNA ID no. 25891682
  misc_feature: Homolog of GI Number: 50252139 NR Desc: Rho
  misc_feature: Homolog of GI Number: 50927925 NR Desc: OSJNBa0084K11.12
  misc_feature: Homolog of GI Number: 50252140 NR Desc: Rho
  misc_feature: Homolog of GI Number: 57900318 NR Desc: Rho
  misc_feature: Homolog of GI Number: 50904455 NR Desc: P0466H10.24
  misc_feature: Homolog of GI Number: 24586357 NR Desc: CG18812
  misc_feature: Homolog of GI Number: 24586355 NR Desc: CG18812
  misc_feature: Homolog of GI Number: 24586353 NR Desc: CG18812
MVGTVAKDVTTEPELLLERSRAITVRGSDKEGRAVVRIVGEYFPARALGGRAEEALKAHLRKRVLPEVGEREFVVVYMHSLVDRGDNFPGLGAIRAAYECLPAAAKERLRAVYFVHPGIQARLFFATFGRFLFSSGLYEKLRYMSRLEYLWAHINKGELEVPECARRHDDELERRPLMDYGIEAADRCSVFDAASMDTPASLRSLRCS

SEQ ID NO: 2979 - DNA, 1033 bp, Triticum aestivum; identical to SEQ ID NO: 1355
  misc_feature: Ceres CLONE ID no. 700120
  misc_feature: Ceres CDNA ID no. 24766175
  CDS (76)..(879): REFERENCED BY SEQ ID NO: 2980

SEQ ID NO: 2980 - protein, 267 aa, Triticum aestivum; identical to SEQ ID NO: 1356
  misc_feature: Ceres CLONE ID no. 700120
  misc_feature: Ceres CDNA ID no. 24766175
  misc_feature: null
  misc_feature: Useful for making plants with altered Lignin content
  misc_feature: Useful for making plants with altered cell wall composition
  misc_feature: Useful for making plants with altered cell wall content and/or composition
  misc_feature (54)..(266): Pfam Name: Methyltransf_3 PFAM Desc: O
  misc_feature: Homolog of GI Number: 49618875 NR Desc: caffeoyl
  misc_feature: Homolog of GI Number: 37221605 NR Desc: caffeoyl
  misc_feature: Homolog of GI Number: 5101868 NR Desc: Caffeoyl CoA O
  misc_feature: Homolog of GI Number: 32347451 NR Desc: caffeoyl CoA 3
  misc_feature: Homolog of GI Number: 32347473 NR Desc: caffeoyl CoA 3
  misc_feature: Homolog of GI Number: 32347447 NR Desc: caffeoyl CoA 3
  misc_feature: Homolog of GI Number: 32347487 NR Desc: caffeoyl CoA 3
  misc_feature: Homolog of GI Number: 32347437 NR Desc: caffeoyl CoA 3
  misc_feature: Homolog of GI Number: 32347489 NR Desc: caffeoyl CoA 3
  misc_feature: Homolog of GI Number: 32347461 NR Desc: caffeoyl CoA 3

SEQ ID NO: 2981 - DNA, 1041 bp, Triticum aestivum
  misc_feature: Ceres CLONE ID no. 700137
  misc_feature: Ceres CDNA ID no. 25088408
  CDS (126)..(689): REFERENCED BY SEQ ID NO: 2982
acccatcccaccacattcaagtcgaagaagctcctcgatctccatcactgcaaccagccacttgagctctgaatctttgaagctcagccagttcgccgcgaccaccgagagcctcaagtttcgccatgtcgagcgccggccagaagcagcagcagcagcagcaggcgaagaagccggcggcggcggaggacgtcgagatcaagaaggtcttctcccgcttcgacacggacggcgacggccggatctcgccgtccgagctggcggccgtgtcgcgcgccatcgcgccgccggccaccgagtccgcgcagggccgcgaggtggcgtccatgatggacgagctcgacaccgaccgcgacggctacgtggacctcggcgagttcgccgccttccacggccgcggccgcgaggagcgcgagctcgacgccgagctgcgcgacgccttcgacgtctacgacatcaacggcgacggccgcatctccgtcgccgagctcagcaaggtcctgagccgcatcggcgagggatgcagcaccgaggagtgcgagaagatgatcgcctccgtcgacgtcgacggcgacggctgcgtcggattcgaggagttcaagaagatgatgaccgccggtgacgccggcgcaccacctcaacccgaagcgatcgccgtgcctgacagcaacaaacccaagaaggagtgatacatgtgcttttgcttgtaaaaaaattgtaatccgagggagcgaattagttgtcagtccctgttggccatagtcttctggtctgaaaaaaaatgggaataaggatcaatgtgcaattgccattgtcgtgctgtacctctacgataacggttgtgtgtgcacggtagcagtactagtactagatattttctccgagtatggtcatcttgctacttcattttcacatgaaaatgaagtgccatgttgatgttgaagggtgataagcatccattatcaatgttacttgtaatcgcattcggcaataaatgtattgtcatcttatgatgtttgctattcaaaaaaaaaaaaaaaa

SEQ ID NO: 2982 - protein, 187 aa, Triticum aestivum
  misc_feature: Ceres CLONE ID no. 700137
  misc_feature: Ceres CDNA ID no. 25088408
  misc_feature (64)..(92): Pfam Name: efhand PFAM Desc: EF hand
  misc_feature: Homolog of GI Number: 34895640 NR Desc: OSJNBa0083M16.33
  misc_feature: Homolog of GI Number: 53792182 NR Desc: putative calcium binding protein
  misc_feature: Homolog of GI Number: 21554396 NR Desc: touch
  misc_feature: Homolog of GI Number: 14589311 NR Desc: calcium binding protein
  misc_feature: Homolog of GI Number: 19310789 NR Desc: putative calcium
  misc_feature: Homolog of GI Number: 21618074 NR Desc: calmodulin
  misc_feature: Homolog of GI Number: 21436399 NR Desc: putative calmodulin
  misc_feature: Homolog of GI Number: 50904487 NR Desc: B1147A04.10
  misc_feature: Homolog of GI Number: 50748592 NR Desc:  similar to calmodulin 1
  misc_feature: Homolog of GI Number: 29150153 NR Desc: calcium
MSSAGQKQQQQQQAKKPAAAEDVEIKKVFSRFDTDGDGRISPSELAAVSRAIAPPATESAQGREVASMMDELDTDRDGYVDLGEFAAFHGRGREERELDAELRDAFDVYDINGDGRISVAELSKVLSRIGEGCSTEECEKMIASVDVDGDGCVGFEEFKKMMTAGDAGAPPQPEAIAVPDSNKPKKE

SEQ ID NO: 2983 - DNA, 1471 bp, Triticum aestivum
  misc_feature: Ceres CLONE ID no. 700236
  misc_feature: Ceres CDNA ID no. 24766176
  CDS (115)..(1158): REFERENCED BY SEQ ID NO: 2984
accgaggacgggggcagaaccgcagcgcagccgagccgagaccagaccagacgaaccgcgccgagccctaccctcctccaccaccgggtctccctgcgagggcggaggagcgacatggagccggccgagaagaagccgccggcggtgtccgacctcggcgcctgggggatgaacgtcgtcagctccgtcggcctcatcatggccaacaagcagctcatgtcctccgccggctacgccttctccttcgccaccacgttgaccgggttccacttcaccgtcacggcgctcgtcggatggatttccaaggccaccggctactccgcctccaagcacgtccccctctgggagctcgtctggttctcgctcgtcgccaacgcctccatcaccgggatgaacctcagcctcatgctcaactctgtcgggttctatcagatctccaaattgagcatgattccggtggtttgcttgatggaatgggtactcaacagcaagcactacacaaccaaggttatatcagcagtggttgtcgtcgcagcgggcgtcgggatttgcaccgtcaccgatgtggaggtcaatgctaagggcttcatttgtgcttgcgtggctgtgttctgcacgtcgctgcaacagattacaattggctcctttcagaagaagtacaacattgggtcatttgagctgctgagcaaaactgcaccaatacaggcagtgtcacttattatactgggtccctttgtggattactacctaaatgggcgttggctattgaactacagtttttcaacaggggcaactttcttcatactgctttcatgctccttggctgtcttctgcaacatgagccagtatctctgcatcgggcggttctctgcaacctctttccaggtcctgggccacatgaaaacggtgtgcgtgctgatcctcggctgggttctgttcgactcggctctcaccatcaagaacatactcgggatgctgctcgccatcatgggcatggtggtctatagctgggccatggagtctgagaagaaggccacctcggcgatcccgcggaacaagagcgacatgctggacggggaggacgtgcccctcaagtcgagaacgagcggcattccgctgtcctctgatgacctcgaggaaggcccgatgaagagctagcctgtcgctgttattcattcattcttcttggttcttttgtatgtgtttgatccacaatgtccgccagtccagtcctcgaagctatcgacagtcttgttaattttgcctcttgcttgctgggtggagttccatcataggtgatgacgaccccggccggccggcctcggcgtagatgaccaccacttaggaaatttgtcaaggccgatatgggccgagccatggtgattcgtgatggctgttgttatagacgacagcaaattatacttatataatggaatacaggtgttcccccgttgtaaaaaaaaaaaaaaaa

SEQ ID NO: 2984 - protein, 347 aa, Triticum aestivum
  misc_feature: Ceres CLONE ID no. 700236
  misc_feature: Ceres CDNA ID no. 24766176
  misc_feature: Homolog of GI Number: 51979016 NR Desc: PREDICTED P0453G03.28 gene product
  misc_feature: Homolog of GI Number: 50938707 NR Desc: transporter
  misc_feature: Homolog of GI Number: 50910467 NR Desc: transmembrane protein
  misc_feature: Homolog of GI Number: 30313364 NR Desc: putative transmembrane protein
  misc_feature: Homolog of GI Number: 30984584 NR Desc: At2g30460
  misc_feature: Homolog of GI Number: 50912291 NR Desc: glucose
  misc_feature: Homolog of GI Number: 50728312 NR Desc:  similar to SLC35E3 protein
  misc_feature: Homolog of GI Number: 7441828 NR Desc: extensin
  misc_feature: Useful for making bigger plants
MEPAEKKPPAVSDLGAWGMNVVSSVGLIMANKQLMSSAGYAFSFATTLTGFHFTVTALVGWISKATGYSASKHVPLWELVWFSLVANASITGMNLSLMLNSVGFYQISKLSMIPVVCLMEWVLNSKHYTTKVISAVVVVAAGVGICTVTDVEVNAKGFICACVAVFCTSLQQITIGSFQKKYNIGSFELLSKTAPIQAVSLIILGPFVDYYLNGRWLLNYSFSTGATFFILLSCSLAVFCNMSQYLCIGRFSATSFQVLGHMKTVCVLILGWVLFDSALTIKNILGMLLAIMGMVVYSWAMESEKKATSAIPRNKSDMLDGEDVPLKSRTSGIPLSSDDLEEGPMKS

SEQ ID NO: 2985 - DNA, 924 bp, Triticum aestivum
  misc_feature: Ceres CLONE ID no. 700365
  misc_feature: Ceres CDNA ID no. 25892832
  CDS (142)..(537): REFERENCED BY SEQ ID NO: 2986
ccacgggggaaaaagcagaggaggattccatctcccccactcggccactccccaccccaccccaccccaccgccgcgggatccactgcgctgcggcgaggacgacggcgaggcgaccccggccctgcgcaccaggggcgcgatggctgaccatgacccagagttggaggccatcaggcagaggcgagtgcaagagctaatgggacagcgtggtggtgcggcaagcccacaaaatgcagggcaacaaaaggctcaggaagatgcaaagcaggaagctgaggaacgccgacagatgatgctttctcagatactatcttctgaagctagagaaagactctcccgcatagctttggtcaagcctgataaagcaagaggagtggaggatgttctgctgagagctgcacaaactggtggaatatctgaaaaggtgtctgaagaaaggcttatctcacttctggagcaaatcaacagccacacaagcaaacaaaccaaagtgacgattcagaggcgtcgcaacgtccttgacgacgatgactagttggtaagcttgatgtacgagcgaatgggtgcagcggcatttggtgcttgattcaacaaccgtcagaacctgacaaactatttgattggtcttgggttgtatatgatctggatattatttggtggggtttttcattgataacagttggatgttcgcttctacccctgaaactctctgcgacacctttgagttgttgtggtcaatttatcaagtcctatcagataatgttaatctgcacgggttcctcctgtgcaatgtgatgtctgtctcaggttgctcctaagttcttcatgtgcaatgtgatgtctgtctcagcttgctcctaagttcttcatgtgcaatgtgatgtctgcaactcagtgattaaaaagaaaaaaaaaaaaaaaa

SEQ ID NO: 2986 - protein, 131 aa, Triticum aestivum
  misc_feature: Ceres CLONE ID no. 700365
  misc_feature: Ceres CDNA ID no. 25892832
  misc_feature (11)..(122): Pfam Name: dsDNA_bind PFAM Desc: Double
  misc_feature: Homolog of GI Number: 57863854 NR Desc: cell death
  misc_feature: Homolog of GI Number: 32966259 NR Desc: apoptosis
  misc_feature: Homolog of GI Number: 30690937 NR Desc: double
  misc_feature: Homolog of GI Number: 50932605 NR Desc: putative apoptosis
  misc_feature: Homolog of GI Number: 62859829 NR Desc: Pdcd5_predicted
  misc_feature: Homolog of GI Number: 61871184 NR Desc:  similar to TF
  misc_feature: Homolog of GI Number: 62645702 NR Desc:  similar to TF
  misc_feature: Homolog of GI Number: 23613612 NR Desc: apoptosis
  misc_feature: Homolog of GI Number: 57036690 NR Desc:  similar to programmed cell death 5
MADHDPELEAIRQRRVQELMGQRGGAASPQNAGQQKAQEDAKQEAEERRQMMLSQILSSEARERLSRIALVKPDKARGVEDVLLRAAQTGGISEKVSEERLISLLEQINSHTSKQTKVTIQRRRNVLDDDD

SEQ ID NO: 2987 - DNA, 750 bp, Triticum aestivum
  misc_feature: Ceres CLONE ID no. 700381
  misc_feature: Ceres CDNA ID no. 25891174
  CDS (67)..(561): REFERENCED BY SEQ ID NO: 2988
ctagcccccccacaccaaccacccttctcccgccgccgcaccgcgaagcaaagcaggagcagcaggatgccggcgggccacggtctgcggtcgcggacgcgcgacctgttcgcgcgcccgttccggaagaagggttacatcccgctcaccacctacctgcgcacctacaaggtcggcgagtacgtcgacgtcaaggtgaacggcgccgtgcacaagggtatgccgcacaagttctaccacggccgcactggacgcgtgtggaacgtcaccaagcgcgccatcggcgttgagatcaacaagcaggttggaaaccgcattatcaggaaaaggatccatgtccgtgttgagcatgtgcagccatccaggtgtgctgaggagttccgcctgaggaaagtgaagaacgaccagctcaaggcggaagccaaggcgcgcggtgaggtcatcagcaccaagaggcagccgctcggccctaaacctgggttcatggtcgagggtaccacaattgagactgtcactcccattccctacgatgtggtcaatgatctcaagggtggttactagggtgtttgggttatctgcctgcacaaccagttcaaatctatggtgctcttatgagtaggatttgctctctgaactgtagtctgggttgggtctttattcatgtcaagaagatattcggtgtaggttgctatcatgagttttgcagaaatgctatactgtgctatttccttcacaaaaaaaaaaaaaaaa

SEQ ID NO: 2988 - protein, 164 aa, Triticum aestivum
  misc_feature: Ceres CLONE ID no. 700381
  misc_feature: Ceres CDNA ID no. 25891174
  misc_feature: null
  misc_feature: Useful for making plants with modulated flowering time
  misc_feature (2)..(100): Pfam Name: Ribosomal_L21e PFAM Desc: Ribosomal protein L21e
  misc_feature: Homolog of GI Number: 31432571 NR Desc: 60S ribosomal protein L21
  misc_feature: Homolog of GI Number: 3885884 NR Desc: 60S ribosomal protein L21
  misc_feature: Homolog of GI Number: 32400808 NR Desc: 60s ribosomal protein L21
  misc_feature: Homolog of GI Number: 12321346 NR Desc: 60S ribosomal protein L21
  misc_feature: Homolog of GI Number: 3482935 NR Desc: Putative ribosomal protein L21
  misc_feature: Homolog of GI Number: 76161012 NR Desc: 60S ribosomal protein L21
  misc_feature: Homolog of GI Number: 54292803 NR Desc: ribosomal protein L21
  misc_feature: Homolog of GI Number: 45190353 NR Desc: AEL254Wp
  misc_feature: Homolog of GI Number: 15213768 NR Desc: ribosomal protein L21
MPAGHGLRSRTRDLFARPFRKKGYIPLTTYLRTYKVGEYVDVKVNGAVHKGMPHKFYHGRTGRVWNVTKRAIGVEINKQVGNRIIRKRIHVRVEHVQPSRCAEEFRLRKVKNDQLKAEAKARGEVISTKRQPLGPKPGFMVEGTTIETVTPIPYDVVNDLKGGY

SEQ ID NO: 2989 - DNA, 626 bp, Triticum aestivum
  misc_feature: Ceres CLONE ID no. 700485
  misc_feature: Ceres CDNA ID no. 40351195
  CDS (77)..(472): REFERENCED BY SEQ ID NO: 2990
ccaaacgaaccccgccgtctccgggcttctactccccgcgcctcgacctcgacctcgccggcggcggcggagccagatggcgtcgacgacgttcaggcgcttcagcgtggcggcggccgccgccgcgttcatcgccctcgcggccttcggatccgcctcggcgtccaagacggccttcgtcaagtccaccgtcaaagcccacgacgtcgtcatcttctccaagtcctactgcccggcgaaggctgtgtttaaggaacttgaactgaagaaggacccatatgtcgtcgagcttgatcagcgagaggatggtggggaaatccaggacgccttatccgacatggttggcaggcgtactgttcctcaggttttcatccgaggaaagcacttgggaggctctgatgatactgttgacgcatatgaaaatggcgagctggctaaacttctgaacatcagtgtgaaggacgatctttgaatatcattttagcgcaaatctcgtacttactgttgaggttaccaaggccttgcaatgcaaccctagattgtcattttcgcagaacctgtcactggtattcgtgttgaagtataaactgttttaaccgtactttgtggcaaaaaaaaaaaaaaaa

SEQ ID NO: 2990 - protein, 131 aa, Triticum aestivum
  misc_feature: Ceres CLONE ID no. 700485
  misc_feature: Ceres CDNA ID no. 40351195
  misc_feature (43)..(123): Pfam Name: Glutaredoxin PFAM Desc: Glutaredoxin
MASTTFRRFSVAAAAAAFIALAAFGSASASKTAFVKSTVKAHDVVIFSKSYCPAKAVFKELELKKDPYVVELDQREDGGEIQDALSDMVGRRTVPQVFIRGKHLGGSDDTVDAYENGELAKLLNISVKDDL

SEQ ID NO: 2991 - DNA, 1003 bp, Triticum aestivum
  misc_feature: Ceres CLONE ID no. 700486
  misc_feature: Ceres CDNA ID no. 36582751
  CDS (105)..(761): REFERENCED BY SEQ ID NO: 2992
aatcgaaaactctcggtctcgctagggttttgggattttagcctccagcgccgccgccgccgccccccagcgaattcgacaagcccccgagctcgccggatccgatggccgtcacgttctccgacctccacaccgccgacgggctcaaggccctcgaggcgcacctcgccggcaagacctacatctccggcgatgggatcaccaaggacgacgtcaaggtgttcgcggcggtgcccgtgaagcccagcgccgagttcccgaacgctgcccgctggtatgacaccgtcgccgcggctgttgcttcaaggttccctggccagtcctctggggtgagtgcatcatcggctcctgctgcagctgctcctgccgcttccaaggatgaagacgacgatgatgacatggatctgtttggcgatgagaccgaggaggacaagaaagctgcagctgagcgtgaggctgccaagcctgcaaagaagaaagaaagtggcaaatcctctgtcctcatggatatcaagccatgggacgatgagactgacatgaagaagttggaggaggctgtccgcagtgttcaaatggagggtctcacctggggtgcatctaagcttatgcccgtgggttatggcatcaagaagctccagatcatgctgacgatcattgacgacctcgtgtctgtcgacactcttattgaggaagtgctctgcgagacgcccatcaacgagtatgtccagtcgtgtgacatcgttgccttcaacaagatctagaatctttgttcacccacttgttgctgctggattcttggtactgggatctgtcgatctggaaaacattattgtcgtcccatttagttacccctcttacagaaatgctactggttttgtttttgagtgatgccctggtcttgaatgtctgctacctttaaatagttgaactgctgagcggtttgtaatggcgaaacatctatcatgtggagtaaaatcagtctttgataaaaaaaaaaaaaaaa

SEQ ID NO: 2992 - protein, 218 aa, Triticum aestivum
  misc_feature: Ceres CLONE ID no. 700486
  misc_feature: Ceres CDNA ID no. 36582751
  misc_feature (129)..(218): Pfam Name: EF1_GNE PFAM Desc: EF
  misc_feature: Homolog of GI Number: 218341 NR Desc: elongation factor 1 beta'
  misc_feature: Homolog of GI Number: 50882147 NR Desc: putative translation elongation factor eEF
  misc_feature: Homolog of GI Number: 218161 NR Desc: elongation factor 1 beta'
  misc_feature: Homolog of GI Number: 48209911 NR Desc: putative elongation factor
  misc_feature: Homolog of GI Number: 77416959 NR Desc: putative elongation factor 1B alpha
  misc_feature: Homolog of GI Number: 76161000 NR Desc: elongation factor
  misc_feature: Homolog of GI Number: 15810631 NR Desc: putative elongation factor 1B alpha
  misc_feature: Homolog of GI Number: 9759378 NR Desc: elongation factor 1B alpha
  misc_feature: Homolog of GI Number: 3288113 NR Desc: elongation factor 1
  misc_feature: Homolog of GI Number: 27754711 NR Desc: putative elongation factor 1B alpha
MAVTFSDLHTADGLKALEAHLAGKTYISGDGITKDDVKVFAAVPVKPSAEFPNAARWYDTVAAAVASRFPGQSSGVSASSAPAAAAPAASKDEDDDDDMDLFGDETEEDKKAAAEREAAKPAKKKESGKSSVLMDIKPWDDETDMKKLEEAVRSVQMEGLTWGASKLMPVGYGIKKLQIMLTIIDDLVSVDTLIEEVLCETPINEYVQSCDIVAFNKI

SEQ ID NO: 2993 - DNA, 1008 bp, Triticum aestivum
  misc_feature: Ceres CLONE ID no. 700583
  misc_feature: Ceres CDNA ID no. 25447104
  CDS (76)..(645): REFERENCED BY SEQ ID NO: 2994
ggaatacgtgcgtgagatttttcgtcaaacacccccttccctcgccgccgccgccaccgccacgacccgcgagccatggcgccgtccgccagctcctcctcctcctcctcctccggcacggactcctccggttcctcctcctcctcggggagcgaccgccgcgtccgccgccgccacagccgccgcaaggacgccgcgccgtccacgtcctcctcctccgcgctgaaggtgcgcaaggaccgcaagtcccgccacaagcgccgccgccgggagaggcggaagtcccgttcggacgacgacagctacagtagcgcaagctcctatgatagtgaccgcgaggcatctggcagatcacgtaagcataagaagagcagtagatcaaggaagtctagggaaagagagcgaagcaaggataggcatcataaacgggacaagagtaaacatagagagaagaaagagagtgaacgttctagcggtccggtccaactttccaagttccttggtcgcgaggaggaggaaagcggcaaaaggagtgttatctctggtaaaaagataatgatgaagcttgagaaatccaaggaagataaggcggctgagagcaagcgcaatgaactgttgaagtttctgaatgccagttatgattgacaacttgtcgaaagtggtgatgcttggctggatggcttggatttgtcttgatgccactgcttagtcatgtgtgcgtttggtgataccaagaagttttttgtccggttttttaaagttaatgactgtgaccatcagtgctttatatcggtatatttggctagtggttggacaaaggtcacatgtatcactaggtctcacaatttttaagcttggggtgtttgtgctcttaaaaatttgatcgttaccagtttgtactttgtagcctcctttttgtaagcccgtttaacctggagatacaccaattttatagaattttcctggcaagggtacttgatctaaagcgtgtcgaaaaaaaaaaaaaaa

SEQ ID NO: 2994 - protein, 189 aa, Triticum aestivum
  misc_feature: Ceres CLONE ID no. 700583
  misc_feature: Ceres CDNA ID no. 25447104
  misc_feature: Homolog of GI Number: 77556740 NR Desc: SR rich protein
  misc_feature: Homolog of GI Number: 55251169 NR Desc: novel protein
  misc_feature: Homolog of GI Number: 51536548 NR Desc: At5g27860
  misc_feature: Homolog of GI Number: 72011794 NR Desc:  similar to CG3918
  misc_feature: Homolog of GI Number: 73950076 NR Desc:  similar to Splicing factor
  misc_feature: Homolog of GI Number: 786117 NR Desc: nuclear protein
  misc_feature: Homolog of GI Number: 50759714 NR Desc:  similar to Sfrs4 protein
  misc_feature: Homolog of GI Number: 48526360 NR Desc: sperm nuclear basic protein PL
  misc_feature: Homolog of GI Number: 48526358 NR Desc: sperm nuclear basic protein PL
MAPSASSSSSSSSGTDSSGSSSSSGSDRRVRRRHSRRKDAAPSTSSSSALKVRKDRKSRHKRRRRERRKSRSDDDSYSSASSYDSDREASGRSRKHKKSSRSRKSRERERSKDRHHKRDKSKHREKKESERSSGPVQLSKFLGREEEESGKRSVISGKKIMMKLEKSKEDKAAESKRNELLKFLNASYD

SEQ ID NO: 2995 - DNA, 723 bp, Triticum aestivum
  misc_feature: Ceres CLONE ID no. 700984
  misc_feature: Ceres CDNA ID no. 40351196
  CDS (93)..(524): REFERENCED BY SEQ ID NO: 2996
gataggaacaggcggaaccgtagacgaagcctcggacggaacgatacagagaagcctcggaaggggagcgatcggaaggggagggcggagagatggggatccggttcgtgctgctggtgaacaagcaggggcagacgcggctggcgcagtactacgagcacctctccctcgacgagcgccgcgccctcgagggcgagatcgtccgcaagtgcctcgcccgcaccgaccagcagtgctctttcgtggagcaccggaactacaaggtcgtctaccggcgctacgcctccctcttcttcctcgtcggcgtcgacaacgatgagaatgagttagccatccttgaattcatacatcttctcgtggaaaccatggaccgtcactttggcaacgtgtgtgagcttgacatcatgttccatctggagaaagtccacttcatgcttgaagagatggtgatgaatggttgcatcgtggagacgagcaaacagaacatattggcgcccatccagcttatggagaaaacctcgtaaatagtgtgtgaactcaagagcgcctaggtgatgcttagcctcttcctcccgccttcaccatagattcccccgttgtgtgaggagaaatgccgaacaactgctgtatgcatgggtggctgtgttcacccgactggaaaatgtgaaatgttctgtaatgttgaaaatgaagaccccatcattactaaaaaaaaaaaaaaaa

SEQ ID NO: 2996 - protein, 143 aa, Triticum aestivum
  misc_feature: Ceres CLONE ID no. 700984
  misc_feature: Ceres CDNA ID no. 40351196
  misc_feature: null
  misc_feature: Useful for making plants with modulated oxidative stress sensitivity
  misc_feature (2)..(143): Pfam Name: Clat_adaptor_s PFAM Desc: Clathrin adaptor complex small chain
MGIRFVLLVNKQGQTRLAQYYEHLSLDERRALEGEIVRKCLARTDQQCSFVEHRNYKVVYRRYASLFFLVGVDNDENELAILEFIHLLVETMDRHFGNVCELDIMFHLEKVHFMLEEMVMNGCIVETSKQNILAPIQLMEKTS

SEQ ID NO: 2997 - DNA, 1208 bp, Triticum aestivum
  misc_feature: Ceres CLONE ID no. 701248
  misc_feature: Ceres CDNA ID no. 40351197
  CDS (171)..(803): REFERENCED BY SEQ ID NO: 2998
ccgctgtcattgacttgtcgacgtcgtgggggtgagaccgaatccagcaaagtaggaaacgggaggggagaagcttcttttacttccgcgcggcgatctcccgtccaaacccacccatccaacccaccgcccaaggtcgccgcggatctagcagcctcgtcggagcggagatgaagatcacggcgctcgtcgtgctgaagccgtcggccgggggcgtcgggggctcctcctccagcggcgggcagggctccgaggcgctcgtgctggccaacgccacggacgtcagccacttcggcttcttccagcgcggcgccgcccgggagttcatcgtcttcgtcgcccgcaccgtcgcccagcgcacccagcccggccagcgccagtccgtccagcacgaagagtacaaggtccactcacacaacagaaatggcctctgcgtggtggcatttatggatgaccactatcctgtacgaagtgcattttctcttctgaataaggtacttgatgaataccagaaggcttttggggatgcttggaaagccgccacagcagattccactcaagagtggcctttcctgatggaagctttgacaaaatttcaggatcctgcagaggctgacaagttaacaaaaattcagagggacttggatgaaacaaaaattatcctacataaaactatagagaatgtccttcaaagaggagagcgattggatagcttggttgaaaaaagctcagacctgagtgctgcttcacagatgttctacaagcaggcgaagaaaacaaacagttgttgtactatactttgaagcttgaactgtgatcctccaatctttcttggaaggctccagaaagaaaatcaacccaatatcgttgtgttgtaccgtaagtccgattgctcatgaaaacgtgctgggatcaatactgtaaatctgttattctttggtggtgcctttgaatagcaactaacatcacttgtcggactagatggtttctccctgcgctatactccttagcaatggccaacatcaattgtcttctgcaatagattgttgatatctcagttctcaagtagtatgttggagcaccgttgctactcttaatttaagtatgttggaacactggttgctacttgtaatttatgttcgattgaagattgtttgtactatgcttccttgattttattacaagtttatttaaaaaaaaaaaaaaaa

SEQ ID NO: 2998 - protein, 210 aa, Triticum aestivum
  misc_feature: Ceres CLONE ID no. 701248
  misc_feature: Ceres CDNA ID no. 40351197
  misc_feature (114)..(200): Pfam Name: Synaptobrevin PFAM Desc: Synaptobrevin
MKITALVVLKPSAGGVGGSSSSGGQGSEALVLANATDVSHFGFFQRGAAREFIVFVARTVAQRTQPGQRQSVQHEEYKVHSHNRNGLCVVAFMDDHYPVRSAFSLLNKVLDEYQKAFGDAWKAATADSTQEWPFLMEALTKFQDPAEADKLTKIQRDLDETKIILHKTIENVLQRGERLDSLVEKSSDLSAASQMFYKQAKKTNSCCTIL

SEQ ID NO: 2999 - DNA, 705 bp, Zea mays
  misc_feature: Ceres CLONE ID no. 701722
  misc_feature: Ceres CDNA ID no. 25446446
  CDS (227)..(373): REFERENCED BY SEQ ID NO: 3000
attgtgctgcatccttaactgtaagtttcttgtgtgcgactcatcgtaatcgcaggtgtttcctgtttccaatttgcaggtgcaaaatgtgttttccaccctggataggggtcgtggatttctaagtcttgaggaggtgtaccaggcattaatcaaacttggtttctcgttggattcaccagccttctatactgtttgtgagagctttgacaagagcaagaagggcatgattcaattggatgagtttatatcactctgcatttttgttcagtcagctcgtaacctgttcaattcgttcgatacaagcaagcaaggaagagtgactttagattttaaccaattcgtgtactgcacggcaaattgcaggatataatgtggttgtacatggacgcccaaacaaaaaggttagcagtgtgaagtgggaaccgttcgccaatcaaacttcgttactgaaccggcagctgggtattacaattcactgttcgccatctaaggcttgttgtatcatcattttgcctgaatatattcttggtcacctattggtcaatccgtctccagttttcttacatcctgggctgtatatacagagtaagacatggcaatttgtggctgtatatacagaataagacttggcaatttgtggctgtatttatataaaatatttcaagtaatccagacattcactccaaaaaaaaaaaaaaaaaa

SEQ ID NO: 3000 - protein, 48 aa, Zea mays
  misc_feature: Ceres CLONE ID no. 701722
  misc_feature: Ceres CDNA ID no. 25446446
  misc_feature: Homolog of GI Number: 41055656 NR Desc: similar to programmed cell death 6
  misc_feature: Homolog of GI Number: 68439371 NR Desc:  similar to programmed cell death 6
  misc_feature: Homolog of GI Number: 72060795 NR Desc:  similar to programmed cell death 6
  misc_feature: Homolog of GI Number: 28277280 NR Desc: Pdcd6
  misc_feature: Homolog of GI Number: 50736185 NR Desc:  similar to Programmed cell death protein 6
  misc_feature: Homolog of GI Number: 51703353 NR Desc: Pdcd6
  misc_feature: Homolog of GI Number: 55770946 NR Desc: apoptosis
  misc_feature: Homolog of GI Number: 90342 NR Desc: calcium
  misc_feature: Homolog of GI Number: 54697006 NR Desc: programmed cell death 6
MIQLDEFISLCIFVQSARNLFNSFDTSKQGRVTLDFNQFVYCTANCRI

SEQ ID NO: 3001 - DNA, 784 bp, Zea mays
  misc_feature: Ceres CLONE ID no. 701859
  misc_feature: Ceres CDNA ID no. 40351198
  CDS (59)..(697): REFERENCED BY SEQ ID NO: 3002
atactccctagcatgctcggctcgctccccggattgatcgagctcgctcgttgcagagatggacccggtgcctgccccctcctcttctcgccgggccgccgctgctcccggcccctgctgccgctttgacgcgctgcggcgggcgtgcgccgggaacgccgccgccgccgcgcgggccgccgggtgggcgatcggcgcgctgctcacctgcatcttcgccgtcgtgggctcactcgtcggaatcttcattggtgccttcatggggatgtctacggaaagcggcatgttccgcggggctggtgttggagcagtttctggagcagtcttctccatagaggctgttgagtcctgcatcgagatttggaggtccagccattcaggaaaatacagcattctctttgtgctggacatcatcttgagcctcttcagcggaagaattgtgtgggagaaagtcagtccagcgctacagcgtgcagtgcaaagccagatgagtctaatgagcacaccgttcatcgacaacagtgaccttttcgaaaccggcagtacaggaggcatgtcaagggatttgattgataggatcccaaagacgaggttcagtgctgcgagcaactgtgatcaggaaactgatagcagctgctgcccagtctgcctccaggtcggtgtgattcggacatgctgtactctatctagctcttgatacacaagagcatctacctccttgtcttgtactgatgacatggtaaattgatgttaacaggatttcggaacaaaaaaaaaaaaaaaa

SEQ ID NO: 3002 - protein, 212 aa, Zea mays
  misc_feature: Ceres CLONE ID no. 701859
  misc_feature: Ceres CDNA ID no. 40351198
MDPVPAPSSSRRAAAAPGPCCRFDALRRACAGNAAAAARAAGWAIGALLTCIFAVVGSLVGIFIGAFMGMSTESGMFRGAGVGAVSGAVFSIEAVESCIEIWRSSHSGKYSILFVLDIILSLFSGRIVWEKVSPALQRAVQSQMSLMSTPFIDNSDLFETGSTGGMSRDLIDRIPKTRFSAASNCDQETDSSCCPVCLQVGVIRTCCTLSSS

SEQ ID NO: 3003 - DNA, 527 bp, Zea mays
  misc_feature: Ceres CLONE ID no. 701867
  misc_feature: Ceres CDNA ID no. 36589463
  CDS (100)..(291): REFERENCED BY SEQ ID NO: 3004
ctcacgcctttccccaccttccgtccttcccccgtcgtcgcggctccagctagggtttctcgcccccgccctcccgcctcaccgccggccccgtccgccatgtcgaagcaaggagggaaggccaagccgctcaagcaggccaaggtcgccgagaaggactacgacgagaatgacctggcatacctccagaagaagaaagatgagcaaaaggccctgaaggagctgaaggccaaggcaggccagaagggtgcgctgggaggatccggtctcaagaagagtgggaagaaatgagtctgcccacccattcgtaatacccagaaaatgataatctatctatctacctatctgtgtcgcgcttcactctctgtggttgtaacagactaccttcagttgtgttgagcattgtgcatcgtcgcagtacgtcgctgaaacctatggcatgtcagcagcctcttctgcttatctgtgatacagatggttcgtagctaataatgacatgacttgttttgtgaaaaaaaaaaaaaaaa

SEQ ID NO: 3004 - protein, 63 aa, Zea mays
  misc_feature: Ceres CLONE ID no. 701867
  misc_feature: Ceres CDNA ID no. 36589463
  misc_feature: Homolog of GI Number: 62858517 NR Desc: LOC549128
  misc_feature: Homolog of GI Number: 55622606 NR Desc:  similar to Keratin
  misc_feature: Homolog of GI Number: 55661245 NR Desc:  similar to GRB2
MSKQGGKAKPLKQAKVAEKDYDENDLAYLQKKKDEQKALKELKAKAGQKGALGGSGLKKSGKK

SEQ ID NO: 3005 - DNA, 898 bp, Zea mays
  misc_feature: Ceres CLONE ID no. 702317
  misc_feature: Ceres CDNA ID no. 36704209
  CDS (66)..(704): REFERENCED BY SEQ ID NO: 3006
atccatcaatcctcatcgccacccaacccgccgagtccccaagcaagttgagcatccatccatccatggcgggaggcaagtccaccggcaatgccgcgcgcagcaggaagcgcgtcgaggcaaccgtcctcaagcgctccagggacgggagcgccttcaccagatgcgaggcctgcaacaaggacgtccccgtcgtcctcatcgacatgcacagctgcagcctcgacgagaagatcaggatgacgctcgaggcgcaggtcgtcgagaagaccgtcgaggtcgccagtgcggaccgcaagaagtcctccgccaagggaggtggtaacaaggacgccaagcgcaagcgctcgcccaccgccttcttcctcttcatggacgacttcaggaaggagttcaaggccacccatcctgacaacaagagtgtcgctaccgttgcaaaggaaggaggggagaggtggaagtccatgacagacgaggagaagaagccttacattgaaaaggccgcggagctcaaggctgaggccgagaatggcgagggcagtggtgagaacaatgttgccactaagaaagccaagacagatgaccaggaggtggatcagccagcaaagaagctcagaaagtgcaaggctcttcacgaggacgaggatgacgatggtgaccaggaagacgaggatgagaagaacgagttggatgacgacatgtagatggcagaggccactctcccatctctgtaaatggatggcagatgtgagcgtcttgttagaaatgtcacttgtttcaagctagagggaagagggagagtagtcagtagtgaatatcccccgttatcgttgctacatgaatgaactattctatgatgcagttctgtctgctttcatctaaaaaaaaaaaaaaaaaa

SEQ ID NO: 3006 - protein, 154 aa, Zea mays
  misc_feature: Ceres CLONE ID no. 702317
  misc_feature: Ceres CDNA ID no. 36704209
  misc_feature: null
  misc_feature: Useful for making plants with altered Lignin content
  misc_feature: Useful for making plants with altered alkaloid content
  misc_feature (35)..(94): Pfam Name: HMG_box PFAM Desc: HMG
  misc_feature: Homolog of GI Number: 22135475 NR Desc: nucleasome/chromatin assembly factor D protein NFD106
  misc_feature: Homolog of GI Number: 50940237 NR Desc: putative HMG type nucleosome/chromatin assembly factor D
  misc_feature: Homolog of GI Number: 30267833 NR Desc: HMGB1
  misc_feature: Homolog of GI Number: 397396 NR Desc: DNA
  misc_feature: Homolog of GI Number: 22347617 NR Desc: nucleosome/chromatin assembly factor group D protein
  misc_feature: Homolog of GI Number: 21803 NR Desc: high mobility group protein
  misc_feature: Homolog of GI Number: 50252158 NR Desc: putative high mobility group protein
  misc_feature: Homolog of GI Number: 1845197 NR Desc: HMGc2
  misc_feature: Homolog of GI Number: 25402921 NR Desc: protein F2D10.18
  misc_feature: Homolog of GI Number: 41149025 NR Desc:  similar to High mobility group protein 4
MTLEAQVVEKTVEVASADRKKSSAKGGGNKDAKRKRSPTAFFLFMDDFRKEFKATHPDNKSVATVAKEGGERWKSMTDEEKKPYIEKAAELKAEAENGEGSGENNVATKKAKTDDQEVDQPAKKLRKCKALHEDEDDDGDQEDEDEKNELDDDM

SEQ ID NO: 3007 - DNA, 1742 bp, Triticum aestivum
  misc_feature: Ceres CLONE ID no. 702422
  misc_feature: Ceres CDNA ID no. 36582788
  CDS (182)..(1363): REFERENCED BY SEQ ID NO: 3008
acggcagccccatcccatcccatcccgacttcccgagcccagaaactgaaggggggagagagagaaggggagctgccacaccacctaaacaaacaagaggcggaaagcgaccaaatctcgcgagccaaatccaccgcacgggctttcccctcccctccccacgcgcgcgatccgggcggagatggacgccggcggggcgcagccgccggactcggagatggcggaggccggtgcgggcgctgcggcggcggcggggacggcgccgggcggcgcgattgataacatccaggccacgctcacccacggcgggaggttcatccagtacaacatcttcggcaacgtcttcgaggtcaccgccaagtacaagccccccatcctccccatcggcaagggcgcctacggcatcgtctgctccgcgctcaactccgagacgggggagcaggtggccatcaagaagatcgccaacgccttcgacaacaagatcgacgccaagcgcacgctgcgggagatcaagctgctccgccacatggaccacgagaatattgttgcaataagggatattatacctcctgcacaaaggactgcattcaatgatgtctatattgcatatgaattgatggacaccgatctgcatcaaattattcgctcaaatcaagctttatcggaggagcactgccagtatttcctttatcagatccttcgtggcttgaagtacatacattcagcaaatgttctccaccgagacttgaagcctagcaatcttcttttgaatgcaaactgtgacctaaaaatttgcgattttgggcttgctcgtaccacctcagaaactgattttatgaccgagtatgttgtgacaagatggtacagggcaccagagcttttgttgaactcctccgaatacactgcagcaattgatgtgtggtctgtgggctgtatatttatggaactgatggaccggaaaccgttgtttccaggaagagaccatgtccatcagctacgtctactaatggagctcattggaacaccaaatgaggccgatttggattttgtaaatgaaaatgcaagaagatatatccgccaacttccccgtcatgcaaggcaatcattatctgagaagtttccacatgttcacccttcagcaattgacttggttgaaaagatgctgactttcgatcctagacagagaataacagttgaaggcgcacttgcgcatccttacctggcatcgctgcatgatataagtgatgagccagtctgcacgatgcccttcagctttgacttcgagcagcatgcgttgtcggaagaacaaatgaaggatctaatccaccaggagggcatcacgttcaaccctgattaccagtagctggagttcctttgatcggcttcattcatatggaaagttttcggtcctcctgccgccataaaatgtcgctagctgtaaataattgcctcacccggagaatcaaaaggagatggcgtgttaagggtagatgacaagagctgtggtggtcaaatttccgcgtagcctatggattcttgtgcttgtgtatgttgttttatgtggaatttttttccttctgcttaaagatgtttcagcattttctgtaagatgcgatagtccgtgaacgatggctgcctaatttctgtggccgtcatgagatttttacattgtggtcgattatggattatgtaatgttgtcctggttaatgaactctgactgactgtaaaaaaaaaaaaaaaa

SEQ ID NO: 3008 - protein, 393 aa, Triticum aestivum
  misc_feature: Ceres CLONE ID no. 702422
  misc_feature: Ceres CDNA ID no. 36582788
  misc_feature (68)..(257): Pfam Name: Pkinase_Tyr PFAM Desc: Protein tyrosine kinase
  misc_feature: Homolog of GI Number: 8925323 NR Desc: MAP kinase 2
  misc_feature: Homolog of GI Number: 4239889 NR Desc: MAP kinase 5
  misc_feature: Homolog of GI Number: 55297440 NR Desc: MAP kinase 6
  misc_feature: Homolog of GI Number: 33340593 NR Desc: mitogen
  misc_feature: Homolog of GI Number: 30171843 NR Desc: mitogen
  misc_feature: Homolog of GI Number: 68342446 NR Desc: mitogen
  misc_feature: Homolog of GI Number: 21165525 NR Desc: mitogen
  misc_feature: Homolog of GI Number: 27542952 NR Desc: mitogen
  misc_feature: Homolog of GI Number: 634070 NR Desc: p45Ntf4 serine/threonine protein kinase
  misc_feature: Homolog of GI Number: 51587350 NR Desc: putative MAP kinase
MDAGGAQPPDSEMAEAGAGAAAAAGTAPGGAIDNIQATLTHGGRFIQYNIFGNVFEVTAKYKPPILPIGKGAYGIVCSALNSETGEQVAIKKIANAFDNKIDAKRTLREIKLLRHMDHENIVAIRDIIPPAQRTAFNDVYIAYELMDTDLHQIIRSNQALSEEHCQYFLYQILRGLKYIHSANVLHRDLKPSNLLLNANCDLKICDFGLARTTSETDFMTEYVVTRWYRAPELLLNSSEYTAAIDVWSVGCIFMELMDRKPLFPGRDHVHQLRLLMELIGTPNEADLDFVNENARRYIRQLPRHARQSLSEKFPHVHPSAIDLVEKMLTFDPRQRITVEGALAHPYLASLHDISDEPVCTMPFSFDFEQHALSEEQMKDLIHQEGITFNPDYQ

SEQ ID NO: 3009 - DNA, 1294 bp, Triticum aestivum
  misc_feature: Ceres CLONE ID no. 702504
  misc_feature: Ceres CDNA ID no. 36582487
  CDS (215)..(985): REFERENCED BY SEQ ID NO: 3010
gaaggagaaccgaggagaaagatccggacgatacgagctcagctcccgtcgcatcgcaccgcatcgcccggcgacacccgcccgctgccctccctcgtccccagctcttccgaatcgcgtcgccggcggccgagaggccattggattcgtggcgttggcgagcgtggtcgccaggagaggaggggtgccggcggcggcggcgactgttcgcgggatgagcttcggcggcgccagctccgttgcggccggtgggaagcggccgttcgagtacgggaggacgcatgtggtgaggcccaagggcgcgcacaaggccaccatcgtctggctccacggcctcggcgacaatggagccagctggtctcaactgttggaaactcttccccttcctaatataaaatggatctgcccaactgcacctacgaggcctgtggcaatttttggtggattcccatctactgcatggtttgatgttgctgatctttcagaagattctcctgatgatgttgaggggctggattcctcagctgcacatgtagcaaatttattgtctaccgaacctgcagacatcaagcttggcgttggtggctttagtatgggtgctgctactgcgctttactccggtacttgctttgctcatggaaaatatggaaatggcaatccataccctgtgaacctaagtgtggctgttggtctcagtggctggctcccgtgtgccaggtcattgaagaacaaaattgagagctcacaggaggctgcacagaaggcttcatcattacctcttatgctttgtcatggaaaagctgatgatgtggtcctctacaaacatggagagagatctgctgatgcacttaagtcaaccgggtttgcaaatgtggaattcaagtcctacagcagactcgggcactataccgttccagaggagatggacgaagttgtcaagtggcttacagcaagcttggaactcggcagttcatcgtcaacttgattgaatgaagagatgccttgagaaaggctcagtgtagcggcgtctaaataataagtacctgtggttgtgccgaattgagtgataaaatggcttggttgccaacttgggctttgggtatacggttatgtcttagcttggcgtttcatatgcggacatgcctcgctgaatcttggtactattgaaatttcatatatttggtatgtgtttccatccaaagtcagagacattgtgatcagtttggttttggttacgaatgatatttttgtttcaacgtgttctatccttttttttccaaaaaaaaaaaaaaaa

SEQ ID NO: 3010 - protein, 256 aa, Triticum aestivum
  misc_feature: Ceres CLONE ID no. 702504
  misc_feature: Ceres CDNA ID no. 36582487
  misc_feature (19)..(248): Pfam Name: Abhydrolase_2 PFAM Desc: Phospholipase/Carboxylesterase
  misc_feature: Homolog of GI Number: 29409364 NR Desc: biostress
  misc_feature: Homolog of GI Number: 34910274 NR Desc: putative lysophospholipase 2
  misc_feature: Homolog of GI Number: 55770623 NR Desc: putative lysophospholipase 2
  misc_feature: Homolog of GI Number: 34146820 NR Desc: At3g15650
  misc_feature: Homolog of GI Number: 54290844 NR Desc: lysophospholipase 2
  misc_feature: Homolog of GI Number: 42562707 NR Desc: phospholipase/carboxylesterase family protein
  misc_feature: Homolog of GI Number: 5903036 NR Desc: F6D8.5
  misc_feature: Homolog of GI Number: 34912598 NR Desc: P0046B10.16
  misc_feature: Homolog of GI Number: 73950621 NR Desc:  similar to Acyl
  misc_feature: Homolog of GI Number: 78692018 NR Desc: Carboxylesterase
MSFGGASSVAAGGKRPFEYGRTHVVRPKGAHKATIVWLHGLGDNGASWSQLLETLPLPNIKWICPTAPTRPVAIFGGFPSTAWFDVADLSEDSPDDVEGLDSSAAHVANLLSTEPADIKLGVGGFSMGAATALYSGTCFAHGKYGNGNPYPVNLSVAVGLSGWLPCARSLKNKIESSQEAAQKASSLPLMLCHGKADDVVLYKHGERSADALKSTGFANVEFKSYSRLGHYTVPEEMDEVVKWLTASLELGSSSST

SEQ ID NO: 3011 - DNA, 1286 bp, Triticum aestivum
  misc_feature: Ceres CLONE ID no. 702573
  misc_feature: Ceres CDNA ID no. 24766233
  CDS (154)..(969): REFERENCED BY SEQ ID NO: 3012
gaaattggcgccacctccctcccgtgctcgcccctcgcctgggctctcgacccatccctgctcgaaccctaacctcagatggcgcttcccgcgtgagagaacgctgccgcggcagcagcgttgaggggggcttcgtcgtagtcagcgcgacagatgtataagcagggggcggccggaggtgcggggccggaccggaagcgcatcagcgacgcgctcgataagcacctggagaaggcggccgcgtcgccctccacgtcgagaggctcggcgggtgcccgaggcaaccacaaccgcgtcgtagtgccgtcctccatccccaagggccgctgctccgaaggggagtctgaatctgacagtgaagcatcagatgttagtggctctgatggagaagacacctcatggatttcatggtattgcaacctaagagggaatgagttcttctgtgaagtcgatgatgattacattcaagatgacttcaatctttgtgggcttagcagtcaagttccatattatgattatgctcttgatctcattttagatatcgagtcttctcatggtgatattttcacagaagaacaaaatgagctagtggaatcagctgctgagatgttgtatgggctaattcatgcgcgatacattctgaccagtaaagggttggctgctatgctggagaaatacaagaactatgactttggacgatgtccacgggtttattgctgtggccaaccatgtctaccagttggacaatcggatattcaccgatctagtacagtgaagatatactgtcctaagtgcgaagacatctactatccacggtctaaataccaaggcaatattgatggagcctactttgggacaacatttcctcacctgtttctgatgacgtacgatcacctcaagccccagaagccctcgcagcgctatgttcctcgcgtatttggcttcaagctccacaaccacaagccatgatgcggaggtgaaggaaaagataagaggccccggaagactactgtaagagtgcaatcgccagatcatgctgcccacccatattgtgtgccctgtctggtctatttaacattgaaatattggtataaaagaagacatgagacgatgttgtaacctaattccagctctactggctagtaaatctggacctctgtttccaaaaccagcagctatcgagaaatcaaagttatggtcgaaaaaaaaaaaaaaaaaaaaaaaaaaaaaaaaaaaaaaaaaaaaaaaaaaaaaaaaaaaaaaaaaacccaaaaaaaaaaaaaaaa

SEQ ID NO: 3012 - protein, 271 aa, Triticum aestivum
  misc_feature: Ceres CLONE ID no. 702573
  misc_feature: Ceres CDNA ID no. 24766233
  misc_feature: null
  misc_feature: Useful for making plants with modulated flowering time
  misc_feature (83)..(257): Pfam Name: CK_II_beta PFAM Desc: Casein kinase II regulatory subunit
  misc_feature: Homolog of GI Number: 11527004 NR Desc: protein kinase CK2 regulatory subunit CK2B3
  misc_feature: Homolog of GI Number: 29367573 NR Desc: possible protein kinase CK2 regulatory subunit
  misc_feature: Homolog of GI Number: 21261784 NR Desc: protein kinase Ck2 regulatory subunit 2
  misc_feature: Homolog of GI Number: 78709019 NR Desc: casein kinase II beta subunit
  misc_feature: Homolog of GI Number: 37536920 NR Desc: putative casein kinase II beta subunit
  misc_feature: Homolog of GI Number: 45238341 NR Desc: protein kinase 2 beta chain
  misc_feature: Homolog of GI Number: 11527002 NR Desc: protein kinase CK2 regulatory subunit CK2B2
  misc_feature: Homolog of GI Number: 21593654 NR Desc: putative casein kinase II beta subunit
  misc_feature: Homolog of GI Number: 20259992 NR Desc: putative casein kinase II beta subunit
  misc_feature: Homolog of GI Number: 21554030 NR Desc: casein kinase II beta chain CKB2
MYKQGAAGGAGPDRKRISDALDKHLEKAAASPSTSRGSAGARGNHNRVVVPSSIPKGRCSEGESESDSEASDVSGSDGEDTSWISWYCNLRGNEFFCEVDDDYIQDDFNLCGLSSQVPYYDYALDLILDIESSHGDIFTEEQNELVESAAEMLYGLIHARYILTSKGLAAMLEKYKNYDFGRCPRVYCCGQPCLPVGQSDIHRSSTVKIYCPKCEDIYYPRSKYQGNIDGAYFGTTFPHLFLMTYDHLKPQKPSQRYVPRVFGFKLHNHKP

SEQ ID NO: 3013 - DNA, 1890 bp, Triticum aestivum
  misc_feature: Ceres CLONE ID no. 702673
  misc_feature: Ceres CDNA ID no. 24766234
  CDS (86)..(1630): REFERENCED BY SEQ ID NO: 3014
aaaatccaaatctcatcgtcatccccccgcacccccaacccaacccctcccaccccacctccggcgaccggatcggcagggcgcgatggcgaacatcgacatggcggcggtgctggcggacatggaccgggacgcggcggcggacgcgcggacgccgcggaccaagctcgtgtgcacgctcggcccggcctcccgctccgtgcccatgctcgagaagctgctccgcgccgggatgaacgtcgcgcgcttcaacttctcccacggcacccacgagtaccacaaggagaccctcgacgccctccgccaggccatgcacaacaccggcatcctctgcgccgtcatgctcgacaccaagggacctgagattcgtactggatttttgaaggatggtaaaccaatcaaactgacaaagggtcaagaaatcactgtttccactgactacgatatcaagggcgacacgaacaccatctccatgagctacaagaaacttcctcaggatgtgaagcctgggcatgtcatactatgtgctgatggtaccatctccttgtctgttctgtcttgcgacccagcagctggaactgtcagatgtaggtgtgagaacactgcaatgcttggagagaggaagaattgtaatctgccaggaattgtcgtggaccttcctacgctgacggagaaggataaggaggacattttgggatggggtgtgcctaatgacattgacatgattgctttgtcatttgtccgcaaaggatcagatttggtgaccgtcaggcagcttcttggacagcatgcaaagcgcatcaagttaatgtcaaaggttgaaaaccaagagggcattgtaaactttgatgacattctgagggaaaccgatgcctttatggttgccagaggtgatcttggaatggagattccagttgagaagatattccttgcacagaaaatgatgatctacaagtgcaaccttgctggcaagcctgtggtcacagcgacccagatgcttgagtcaatgatcaagtccccgaggccaacccgtgccgaggctactgacgtcgcaaatgcggtgcttgatggaactgactgtgtcatgctcagtggtgaaagcgctgccggagcataccctgaggtggctgtgaagatcatggcgcgcatctgcgtggaggcggagtcttccctggacaacgacgccgtcttcaaggagatgatcaaggccgcgcccctcccgatgagcccgctggagtccctcgcgtcctcggccgtgcgaaccgccaacaaggccagggccactctgatcgtcgtcctgacccgtggcggcaccacggcgaagctggtggccaagtaccggcccagggtgccgatcctgtcggtggtcgtcccggtgctgacgaccgactcgttcgactggaccgtcagctccgagggccccgccaggcacagcctgatctacaggggcctgatcccgctcctcgccgagggctccgccaaggccaccgactcggagtcgacggaggagatcctccaggcggcgctcaagtcggccgtgaagaagcagctctgcaaggctggtgacgccgtcgtcgtcctgcaccgcatcggcgtcgcctccgtcatcaagatctgcaccgtcaagtgagcgccatcgccgggcgctcggcggcccttgctgccgtggcgaactctctgttcttgtggagacgaattgataatcgccgtaccgtccgttgcagtttgttgcatagatccgatccgagctggtaaattaggagggagaggactccgttaatatagagctcttttattattattaccgttggttgatatgatatgccccctgtagtatggtgtttggcaggtgtcatgcctgcacaaatttttctcaaaaaaaaaaaaaaa

SEQ ID NO: 3014 - protein, 514 aa, Triticum aestivum
  misc_feature: Ceres CLONE ID no. 702673
  misc_feature: Ceres CDNA ID no. 24766234
  misc_feature (23)..(369): Pfam Name: PK PFAM Desc: Pyruvate kinase
  misc_feature (383)..(514): Pfam Name: PK_C PFAM Desc: Pyruvate kinase
  misc_feature: Homolog of GI Number: 2497538 NR Desc: Pyruvate kinase
  misc_feature: Homolog of GI Number: 7271955 NR Desc: cytosolic pyruvate kinase
  misc_feature: Homolog of GI Number: 30793821 NR Desc: putative pyruvate kinase
  misc_feature: Homolog of GI Number: 322787 NR Desc: pyruvate kinase
  misc_feature: Homolog of GI Number: 21592702 NR Desc: pyruvate kinase
  misc_feature: Homolog of GI Number: 10177049 NR Desc: pyruvate kinase
  misc_feature: Homolog of GI Number: 68138979 NR Desc: pyruvate kinase
  misc_feature: Homolog of GI Number: 22296818 NR Desc: pyruvate kinase
  misc_feature: Homolog of GI Number: 22296820 NR Desc: pyruvate kinase
  misc_feature: Homolog of GI Number: 22576 NR Desc: pyruvate kinase
MANIDMAAVLADMDRDAAADARTPRTKLVCTLGPASRSVPMLEKLLRAGMNVARFNFSHGTHEYHKETLDALRQAMHNTGILCAVMLDTKGPEIRTGFLKDGKPIKLTKGQEITVSTDYDIKGDTNTISMSYKKLPQDVKPGHVILCADGTISLSVLSCDPAAGTVRCRCENTAMLGERKNCNLPGIVVDLPTLTEKDKEDILGWGVPNDIDMIALSFVRKGSDLVTVRQLLGQHAKRIKLMSKVENQEGIVNFDDILRETDAFMVARGDLGMEIPVEKIFLAQKMMIYKCNLAGKPVVTATQMLESMIKSPRPTRAEATDVANAVLDGTDCVMLSGESAAGAYPEVAVKIMARICVEAESSLDNDAVFKEMIKAAPLPMSPLESLASSAVRTANKARATLIVVLTRGGTTAKLVAKYRPRVPILSVVVPVLTTDSFDWTVSSEGPARHSLIYRGLIPLLAEGSAKATDSESTEEILQAALKSAVKKQLCKAGDAVVVLHRIGVASVIKICTVK

SEQ ID NO: 3015 - DNA, 1872 bp, Triticum aestivum
  misc_feature: Ceres CLONE ID no. 702722
  misc_feature: Ceres CDNA ID no. 24766131
  CDS (144)..(1556): REFERENCED BY SEQ ID NO: 3016
aggaaaatagacattccaacgcagttcccccacccccacctcgcctgagcaggtcgccggcgaccgacaggccttcagctcgcccccaacctccccacccctcccgcgacgacccggggggaggcgccgagcgagcaggggggatggagttcacggaggcgtacaagcagacgggcccgtgctgcttctctcccgacgcccgcttcctcgccgtcgcctgcgactaccgcctcgtggtccgcgacgtcgtcaccctcaaggtggtgcagttgttttcatgtgtagacaagataaactttttggagtgggcaccagattcagaatacattctatgtggactttacaagcggccaatggtgcaggcttggtcgctgagccagcctgactggacctgtaagattgatgaaggatctgcagggattgcttatgctcgctggagtcctgacagtcgtcatatactcactacatcagagttccaactccgtttgactgtatggtctcttgtaaatactgcctgcgttcatgtacagtggccaaagcatgcagcccgaggtgtttctttcactaaggatgggaagtttgctgcgatctgcaccaggcgggactgcaaagattacataaatttgctctcatgtcattcctgggagataatgggtgtattcgctgttgacacactagacttggcaggtgttgagtggtcgcctgatgacagtgctattgtggcctgggattcacttcttgaatacaaggttctaatatattcaccggatgggcgatgcctgttcaagtattcagcatatgaaagtgggttaggtgtcaaaactgttggttggtcaccttgtggacaatttttagcagtgggcagctatgatcaatcagtgcgaatattgaaccatttgacatggaaaacctttgccgagttcactcatgcagcctcgattcgaagtccctataatgctgcagtatttaaggaagtggatgacccatttcagcttgatatgtcagagttatgtctaagcgaaggcttgtctcgtaacatgcgagacaatggcactgaaaatggctcagaaggaggttctagagtaaaatatgctgtgatggatgttccaatcaccgtgccagcacagaaaccagctagtgacaagcccaaccccaaacaaggaatcggtatgctgtcgtggagcagcgacagccactatttcttcacccggaacgacaacatgcctactgttctttggatatgggacatctgccgcctcgagcttgcggccgttcttgtgcagaaagatccgatccgcgctgctgcctgggaccctacatgtccacgcctcgtattgtgcacggagagcccgcacctgtacatgtggacaccatccggcgcttgctgtgtcaacattcccttgccagatttccggatagtcgatttgaaatggaactcggcaggaagctgcctcctcctgaaggaccgcgattccttctgctgtgccgcaatcgtatccgctctgccagaggaagaaccagatgagcaaaccgacgagacctccgaagacgaatgacgtcctgtgtcttgcttgctgtcagtttgaattgtagccattatcaatgaagttattatgttgtaacatagcagtagatcgatttgggtgcggcgactgttctgatctggaaggatgaggaacacggaagatgatttttcttccgttatacaactgttgttggattccttgaagttggataggttttgtagagagcacaaaattaaatggaggattctggtctgtccgtgtgcaattcttttttctccctgtgctgaaatggtaagcagtttgtgagccagataagcttaaaaaaaaaaaaaaaaaaaaaaaaaaa

SEQ ID NO: 3016 - protein, 470 aa, Triticum aestivum
  misc_feature: Ceres CLONE ID no. 702722
  misc_feature: Ceres CDNA ID no. 24766131
  misc_feature (224)..(250): Pfam Name: WD40 PFAM Desc: WD domain
  misc_feature: Homolog of GI Number: 38260632 NR Desc: WD
  misc_feature: Homolog of GI Number: 38260686 NR Desc: WD
  misc_feature: Homolog of GI Number: 38196020 NR Desc: WD
  misc_feature: Homolog of GI Number: 38260650 NR Desc: WD
  misc_feature: Homolog of GI Number: 38260619 NR Desc: WD
  misc_feature: Homolog of GI Number: 37536890 NR Desc: putative WD
  misc_feature: Homolog of GI Number: 9759580 NR Desc: WD
  misc_feature: Homolog of GI Number: 34013881 NR Desc: WD repeat
  misc_feature: Homolog of GI Number: 34013891 NR Desc: WD repeat
  misc_feature: Homolog of GI Number: 73956671 NR Desc:  similar to WD
MEFTEAYKQTGPCCFSPDARFLAVACDYRLVVRDVVTLKVVQLFSCVDKINFLEWAPDSEYILCGLYKRPMVQAWSLSQPDWTCKIDEGSAGIAYARWSPDSRHILTTSEFQLRLTVWSLVNTACVHVQWPKHAARGVSFTKDGKFAAICTRRDCKDYINLLSCHSWEIMGVFAVDTLDLAGVEWSPDDSAIVAWDSLLEYKVLIYSPDGRCLFKYSAYESGLGVKTVGWSPCGQFLAVGSYDQSVRILNHLTWKTFAEFTHAASIRSPYNAAVFKEVDDPFQLDMSELCLSEGLSRNMRDNGTENGSEGGSRVKYAVMDVPITVPAQKPASDKPNPKQGIGMLSWSSDSHYFFTRNDNMPTVLWIWDICRLELAAVLVQKDPIRAAAWDPTCPRLVLCTESPHLYMWTPSGACCVNIPLPDFRIVDLKWNSAGSCLLLKDRDSFCCAAIVSALPEEEPDEQTDETSEDE

SEQ ID NO: 3017 - DNA, 2189 bp, Triticum aestivum
  misc_feature: Ceres CLONE ID no. 702792
  misc_feature: Ceres CDNA ID no. 36526875
  CDS (177)..(1802): REFERENCED BY SEQ ID NO: 3018
gatcgcttgctccatgtggagtcacttattacgcccagcccagcccagccagcaccttaactcggcgatccaccccttggatccactctacccagctcgctagccagcggggtacatacacgcacgcacgtacgcgcgtacgtacactcgcagagcttgcttcagggaggccggcaatggaggtggggacgtgggcggtggtggtgtcggcggtggccgcgtacatggcgtggttctggcggatgtcccgcgggctgcgcgggccgcgggtttggcccgtgctcggcagcctgccgggcctggtgcagcacgccgaggacatgcacgagtggatcgccggcaacctgcgccgcgcgggcggcacgtaccagacctgcatcttcgccgtgcccggggtggcgcgccgcggcggcctggtcaccgtcacctgcgacccgcgcaacctggagcacgtcctgaaggcgcgcttcgacaactaccccaagggccccttctggcacggcgtcttccgggacctgctcggcgacggcatcttcaattccgacggcgacacctggctcgcgcagcgcaagacggccgcgctcgagttcaccacccgcacgctccggacggccatgtcccgctgggtctcgcgctccatccacggccgcctcctgcccatcctggccgacgcggccaagggcaaggcgcaggtggatctccaggacctcctcctccgcctcaccttcgacaacatctgcggcctggccttcggcaaggacccggagacgctcgcccagggcctgccggagaacgagttcgcctccgcgttcgaccgcgccaccgaggccacgctcaaccgcttcatcttcccggagttcctgtggcgctgcaaaaagtggctgggcctcggcatggagaccacgctgaccagcagcatggcccacgtcgaccagtacctcgccgccgtcatcaagaagcgcaagctcgagctcgccgccggcaacggcaaatgcgacacggcggcgacgcacgacgacctgctctcccggttcatgcggaagggttcctactcggacgagtcgctccagcacgtggcgctcaacttcatcctcgccggccgcgacacctcctccgtggcgctctcctggttcttctggctcgtgtccacccaccctgcggtggagcgcaagatcgtgcgcgagctctgctccgttctcgccgcgtcacggggcgcccatgacccggcattgtggctggcggagcccttcaccttcgaggagctcgaccgcctggtctacctcaaggcggcgctgtcggagaccctccgcctctacccctccgtccccgaggactccaagcacgtcgtcgcggacgactacctccccgacggcaccttcgtgccggccgggtcgtcggtcacctactccatatactcggcggggcgcatgaagggggtgtggggggaggactgcctcgagttccggccggagcgatggctgtcggccgacggcaccaagttcgagcagcacgactcgtacaagttcgtggcgttcaacgccgggccgagggtgtgcctgggcaaggacctagcctacctgcagatgaagaacatcgccgggagcgtgctgctccggcaccgcctgaccgtggcgccgggccaccgcgtggagcagaagatgtcgctcacgctcttcatgaagggcgggctacggatggaggtacgtccgcgcgacctcgcccccgtcctcgacgagccctgcggcctggacgccggcgccgccaccgccgccgcagcaagtgccacagcgccgtgcgcgtagaagacctggcaccggcacgcgccatgcatgattcgtgcgtgctagctgttgaagggacgccggacattgaatgtgtagatagggcagcagtgcaagaccgtaagtaaaattgatgatgggtttggtgacaacattgaagccactcctttccagaatttacgacccggataggagaaacagggaaactttgcagatcacaacacaagatctagccagccggggatctgatctgatttgcgtctgctcggagcacgggtgcatgggagaccaaggaggaaaacaaaaaataacagaaacagagtgagcaatatttgtgattgtagccacgggaaagagagaggagtaattagtaattcagatttgtttgcagtaaaaaaaaaaaaaaaa

SEQ ID NO: 3018 - protein, 541 aa, Triticum aestivum
  misc_feature: Ceres CLONE ID no. 702792
  misc_feature: Ceres CDNA ID no. 36526875
  misc_feature (27)..(509): Pfam Name: p450 PFAM Desc: Cytochrome P450
  misc_feature: Homolog of GI Number: 22137048 NR Desc: At4g00360/A_IG005I10_21
  misc_feature: Homolog of GI Number: 50927909 NR Desc: OSJNBa0084K11.4
  misc_feature: Homolog of GI Number: 10442763 NR Desc: cytochrome P450
  misc_feature: Homolog of GI Number: 7267123 NR Desc: probable cytochrome P450
  misc_feature: Homolog of GI Number: 21593258 NR Desc: putative cytochrome P450
  misc_feature: Homolog of GI Number: 20197208 NR Desc: putative cytochrome P450
  misc_feature: Homolog of GI Number: 56784419 NR Desc: putative cytochrome P450
  misc_feature: Homolog of GI Number: 50251848 NR Desc: putative cytochrome P450
  misc_feature: Homolog of GI Number: 12324945 NR Desc: putative cytochrome P450
  misc_feature: Homolog of GI Number: 8346562 NR Desc: cytochrome P450
MEVGTWAVVVSAVAAYMAWFWRMSRGLRGPRVWPVLGSLPGLVQHAEDMHEWIAGNLRRAGGTYQTCIFAVPGVARRGGLVTVTCDPRNLEHVLKARFDNYPKGPFWHGVFRDLLGDGIFNSDGDTWLAQRKTAALEFTTRTLRTAMSRWVSRSIHGRLLPILADAAKGKAQVDLQDLLLRLTFDNICGLAFGKDPETLAQGLPENEFASAFDRATEATLNRFIFPEFLWRCKKWLGLGMETTLTSSMAHVDQYLAAVIKKRKLELAAGNGKCDTAATHDDLLSRFMRKGSYSDESLQHVALNFILAGRDTSSVALSWFFWLVSTHPAVERKIVRELCSVLAASRGAHDPALWLAEPFTFEELDRLVYLKAALSETLRLYPSVPEDSKHVVADDYLPDGTFVPAGSSVTYSIYSAGRMKGVWGEDCLEFRPERWLSADGTKFEQHDSYKFVAFNAGPRVCLGKDLAYLQMKNIAGSVLLRHRLTVAPGHRVEQKMSLTLFMKGGLRMEVRPRDLAPVLDEPCGLDAGAATAAAASATAPCA

SEQ ID NO: 3019 - DNA, 1132 bp, Triticum aestivum
  misc_feature: Ceres CLONE ID no. 702805
  misc_feature: Ceres CDNA ID no. 40351199
  CDS (207)..(929): REFERENCED BY SEQ ID NO: 3020
aatgttaactatgttcttctttttttgttctcatctccacaccatgtcctaatctttctgcaccatcgttctccatttttggctttacaaaaccactgtgtctgattaagggttctttaatatttccaatatttcttgtagtgaaaaagttgttagctaaaagaagaccaagtttttggtgttgtagaaggaagagaagaattaacatgaaaattcagtgtgacgtgtgtgagagagctccagcaacagtgatttgttgcgcggatgaggctgctttgtgtgccaaatgtgacgttgaagttcatgctgcaaacaagcttgcaagcaagcaccaaagacttcttcttcaatgtctatcaagcaagcttcccacatgtgacatttgccaagacaagccagcattcatattttgtgttgaagacagagcactcttctgtcaggattgtgatgaaccaattcattcagccggaagcctttccgcgaaccaccagcgcttccttgctactggtatccgagtggcctcgagttctaattgtaccaaagacaatgaaaaaagtcactcggagcctcctaataggagtgcacaacaagtttctgcgaaaattcctcctcagcaagtgcctagcttcacatcctcttgggctgttgatgacttattggaactaacaggctttgaatcacctgagaaaaaggaatctctgcagtttggagagctggaatggcttacagatgtgggtattttcggcgaacaatttgctcaggaagccttggctgcagctgaagtacctcagcttcccgaaactcataacagtagcagtgttgcttcatacaaaacctccaaatcctacatgtcccacaaaaagcctaggattgaagtcctaaatgatgatgatgatgatgagtattttactgtgcccgatctcggctaagtacgtggcttgccatatgggatggtgcatgcatgattggaaaagattaattatgggaaaataattgttttttttaagctctattagtaaattgtcaaaaaagaatattattttcccaaaaaaactattccattcagacatgttgatatgttgtatattcaattattatgagaacgataattttcacaaaaaaaaaaaaaaaa

SEQ ID NO: 3020 - protein, 240 aa, Triticum aestivum
  misc_feature: Ceres CLONE ID no. 702805
  misc_feature: Ceres CDNA ID no. 40351199
  misc_feature (2)..(47): Pfam Name: zf PFAM Desc: B
MKIQCDVCERAPATVICCADEAALCAKCDVEVHAANKLASKHQRLLLQCLSSKLPTCDICQDKPAFIFCVEDRALFCQDCDEPIHSAGSLSANHQRFLATGIRVASSSNCTKDNEKSHSEPPNRSAQQVSAKIPPQQVPSFTSSWAVDDLLELTGFESPEKKESLQFGELEWLTDVGIFGEQFAQEALAAAEVPQLPETHNSSSVASYKTSKSYMSHKKPRIEVLNDDDDDEYFTVPDLG

SEQ ID NO: 3021 - DNA, 1969 bp, Triticum aestivum
  misc_feature: Ceres CLONE ID no. 702809
  misc_feature: Ceres CDNA ID no. 24766132
  CDS (152)..(1693): REFERENCED BY SEQ ID NO: 3022
aatccgccgactgctccgtttatttaaccgagccgtcccattcttggagagcaagaagcacgccaccacctcgcgtccccaaagaatccccatcccttcccctcccctcccctccccggccgcacacagatccggcgaccgacaacaagccatggtgtccaacggggagctgtcgcagccgcaggcgggggagtacggcctcgccgtcatgcgccgccggcccaagaccaagatcgtctgcacgctcggcccggcctcccgctccgtcgacatgatcgagaagctgctgcgcgccggcatgtgcgtcgcccgcttcaacttctcccacggctcccacgactaccaccaggagacgctcgacaacctgcacgccgccatggaccgcaccgggatcctctgcgccgtcatgctcgacaccaagggtccagagatccgtactggatttttgaaagatgggaagcctatccagttgaggaagggccaagaaattgtgatctccacagattatagcataaagggggacgacaagatgatatcgatgagctataagaagctagcagttgatctgaagccaggcagtgtcatattatgcgctgatggtaccatcactcttacagtgcttcattgtgacaaagagcaaggtctcgttcgctgctgttgtgagaacactgctatgcttggtgagaggaagaatgtcaatcttccaggggtcgttgttgatctgccaacactcactgaaaaggacagggaggatatccttcaatggggcgtcccgaacaagattgacatgattgctttgtcgtttgtccgcaaaggttcagatcttgtggaggtcaggaaggtacttggggagcatgccaagtcaataatgctgatgtcaaaggttgagaaccaggaaggagtagctaactttgacgatatcctggcacagtctgatgcttttatggtggcaagaggtgatttggggatggaaattcctgtagagaagatcttttatgcacagaaggtgatgattttcaagtgcaacattcagggcaagccagttgtgactgcaacccagatgttggagtctatgatcaagtctcctcggcctactcgagcggaagcaactgatgtggccaacgcagttcttgatggcactgactgtgtgatgctcagtggtgagacagcggctggggcttatccagaactggcagtgcaaactatggccaagatctgcttgcaggccgagtcatgcgtggactattctgctgtttttaaatcaatcatgtcatcagccccgattcccatgagcccattggagagccttgcctcatcagctgtccgcacagccaactcagccaaggcgacgcttatcttggtactgaccaggggaggaacaactgcaaggcttgtagccaagtacaggccatccatgccgatactgtctgtggtggttcctgagctcaagacggtcgagtttgactggatctgcagcgacgaggggcctgccaggcaaagcctcatcgtgaggggcgtgatccctatgctcagtgctggcactgccaaggcgtttgacagcgaagccacggaagaggcactgaggtttgccatgaagaacgccaaggagatgggcctttgcaacgctggtgactccattgtggcccttcaccgcatcgggaatgcatctgtcatcaagctcttgaccgtgtaagctagtggcagcgaagcgacaatgcaacaccattttgcccggggattttcccttctttctttttgcgaggctacgcatacccacagttttttgctgccaagattgcggcagtgcaacctggttaaaactttgtgttatcaagttgtggctgtttactctttatgagagggtttagccaccaaaactattatcgcagcagcttgttttgctactactactataacttatatgcaacgattgaactacctgatagttgctccaaaaaaaaaaaaaaaa

SEQ ID NO: 3022 - protein, 513 aa, Triticum aestivum
  misc_feature: Ceres CLONE ID no. 702809
  misc_feature: Ceres CDNA ID no. 24766132
  misc_feature (23)..(369): Pfam Name: PK PFAM Desc: Pyruvate kinase
  misc_feature (383)..(512): Pfam Name: PK_C PFAM Desc: Pyruvate kinase
  misc_feature: Homolog of GI Number: 2497538 NR Desc: Pyruvate kinase
  misc_feature: Homolog of GI Number: 30793821 NR Desc: putative pyruvate kinase
  misc_feature: Homolog of GI Number: 48256714 NR Desc: putative pyruvate kinase
  misc_feature: Homolog of GI Number: 21592702 NR Desc: pyruvate kinase
  misc_feature: Homolog of GI Number: 10177049 NR Desc: pyruvate kinase
  misc_feature: Homolog of GI Number: 22296818 NR Desc: pyruvate kinase
  misc_feature: Homolog of GI Number: 22296820 NR Desc: pyruvate kinase
  misc_feature: Homolog of GI Number: 444023 NR Desc: pyruvate kinase
  misc_feature: Homolog of GI Number: 7269491 NR Desc: pyruvate kinase like protein
  misc_feature: Homolog of GI Number: 13928580 NR Desc: pyruvate kinase
MVSNGELSQPQAGEYGLAVMRRRPKTKIVCTLGPASRSVDMIEKLLRAGMCVARFNFSHGSHDYHQETLDNLHAAMDRTGILCAVMLDTKGPEIRTGFLKDGKPIQLRKGQEIVISTDYSIKGDDKMISMSYKKLAVDLKPGSVILCADGTITLTVLHCDKEQGLVRCCCENTAMLGERKNVNLPGVVVDLPTLTEKDREDILQWGVPNKIDMIALSFVRKGSDLVEVRKVLGEHAKSIMLMSKVENQEGVANFDDILAQSDAFMVARGDLGMEIPVEKIFYAQKVMIFKCNIQGKPVVTATQMLESMIKSPRPTRAEATDVANAVLDGTDCVMLSGETAAGAYPELAVQTMAKICLQAESCVDYSAVFKSIMSSAPIPMSPLESLASSAVRTANSAKATLILVLTRGGTTARLVAKYRPSMPILSVVVPELKTVEFDWICSDEGPARQSLIVRGVIPMLSAGTAKAFDSEATEEALRFAMKNAKEMGLCNAGDSIVALHRIGNASVIKLLTV

SEQ ID NO: 3023 - DNA, 2095 bp, Triticum aestivum
  misc_feature: Ceres CLONE ID no. 702928
  misc_feature: Ceres CDNA ID no. 25445577
  CDS (147)..(1850): REFERENCED BY SEQ ID NO: 3024
ctctctccgcttctattctcttcctgccaggctccgtccgtccgccaccgatccgtcatcccctctgcgcccccttctccggcagccgccgcccgcccgccgtcgacatcccccaggggtccgcccggccctccgccgcatcggccatggcgtcgccggcgctcatctccgacaccgaccagtggaaggccctccaggcgcacgtcggcgcgatccacaagacgcacctgcgcgacctcatgacggacgccgatcgatgcaaggcaatgacagccgaattcgagggcgtcttcctggactactcgaggcagcaggccaccacggagaccgtcgacaagctcttcaagctggcagaggctgcaaagctcaaggagaagattgacaagatgtttaaaggcgaaaagataaataccacggagaacagatcagtgctccatgtggctttgagagctccaagagatgcagtcataaacagtgacggtgtgaacgtggtccccgaagtttgggctgttaaggataaaatcaagcagttttcagagactttcaggagtggctcatgggttggggcaaccgggaaaccgttgacaaatgttgtctcagttggaattggtggcagcttccttggacctctgtttgtgcatacggctctccagactgacccagaagcagcagaatctgccaaaggccgacaactgagatttcttgcaaatgttgatccggttgatgttgcacggagcatcaaagatttagaccctgcaaccactcttgttgtggttgtctcaaagaccttcacgacagctgaaacaatgttaaatgctcgaactatcaaggagtggattgtctcttctcttggacctcaggctgtttccaaacacatgattgctgtcagtactaatcttaagcttgtcaaggagttcggaattgaccctaacaacgcctttgcattctgggactgggttggcggccgctatagtgtttgcagtgctgtcggtgttctgcccttatctcttcagtatggatttccaattgttcagaaatttctggagggtgcttccagcattgacaaccacttccacacatcttcatttgagaaaaatatacctgtactccttggtttgttgagtgtgtggaatgtttcatttcttggatatccggctagggcaatattgccatactctcaagcacttgagaaactagcaccacatattcagcagcttagcatggagagtaatggaaagggtgtctccattgatggtgttcgacttccatatgaggctggtgaaattgattttggtgaacctggaacaaacgggcaacacagcttctatcaattaatccatcagggaagagttattccttgtgattttattggtgtcataaaaagccagcagcctgtttacttgaaaggggaaacggttagcaatcatgatgagttgatgtccaatttctttgctcagcctgacgcacttgcttatggaaagactcctgaacaattacgcagcgagaaagttcccgaaaatcttatctctcacaagacttttcagggcaaccggccatcactgagtttcttgctgtcttcattatctgcctatgagattggacagcttttatccatctatgagcaccggatcgcagttcagggtttcatatggggaatcaactcgtttgaccagtggggagtggagctgggcaagtcactggcttctacagtgaggaaacagttgcatgcatcacgcatggaaggaaagcccgtcgagggcttcaaccccagcagcgcaagtttgctcacacggtttcttgcggttaaaccatcaaccccatatgacacaacagtgcttccaaaagtgtaagccgagggaggtttagtagtcctaaaaaaagaagtgtaacctgaggttgagactgataatcgacaagctatgttgagcttgtggcataacaagttttcttccttctttcttgcgacttgttacaaccagtctggttgtactgtaattttgaagttcctcttgcttcagcttggagaaagacaagtaaactatgacgaaataatgaaataaatatatcgactcgtgacacaaaaaaaaaaaaaaaa

SEQ ID NO: 3024 - protein, 567 aa, Triticum aestivum
  misc_feature: Ceres CLONE ID no. 702928
  misc_feature: Ceres CDNA ID no. 25445577
  misc_feature: null
  misc_feature: Useful for making plants with altered cell wall content and/or composition
  misc_feature (51)..(547): Pfam Name: PGI PFAM Desc: Phosphoglucose isomerase
  misc_feature: Homolog of GI Number: 2588820 NR Desc: cytosolic phosphoglucose isomerase
  misc_feature: Homolog of GI Number: 596023 NR Desc: glucose
  misc_feature: Homolog of GI Number: 1370060 NR Desc: glucose
  misc_feature: Homolog of GI Number: 51340060 NR Desc: glucose
  misc_feature: Homolog of GI Number: 52077263 NR Desc: glucose
  misc_feature: Homolog of GI Number: 82754716 NR Desc: phosphoglucoisomerase
  misc_feature: Homolog of GI Number: 34915218 NR Desc: phosphoglucose isomerase
  misc_feature: Homolog of GI Number: 639684 NR Desc: phosphoglucose isomerase
  misc_feature: Homolog of GI Number: 639686 NR Desc: phosphoglucose isomerase
  misc_feature: Homolog of GI Number: 2588806 NR Desc: phosphoglucose isomerase
MASPALISDTDQWKALQAHVGAIHKTHLRDLMTDADRCKAMTAEFEGVFLDYSRQQATTETVDKLFKLAEAAKLKEKIDKMFKGEKINTTENRSVLHVALRAPRDAVINSDGVNVVPEVWAVKDKIKQFSETFRSGSWVGATGKPLTNVVSVGIGGSFLGPLFVHTALQTDPEAAESAKGRQLRFLANVDPVDVARSIKDLDPATTLVVVVSKTFTTAETMLNARTIKEWIVSSLGPQAVSKHMIAVSTNLKLVKEFGIDPNNAFAFWDWVGGRYSVCSAVGVLPLSLQYGFPIVQKFLEGASSIDNHFHTSSFEKNIPVLLGLLSVWNVSFLGYPARAILPYSQALEKLAPHIQQLSMESNGKGVSIDGVRLPYEAGEIDFGEPGTNGQHSFYQLIHQGRVIPCDFIGVIKSQQPVYLKGETVSNHDELMSNFFAQPDALAYGKTPEQLRSEKVPENLISHKTFQGNRPSLSFLLSSLSAYEIGQLLSIYEHRIAVQGFIWGINSFDQWGVELGKSLASTVRKQLHASRMEGKPVEGFNPSSASLLTRFLAVKPSTPYDTTVLPKV

SEQ ID NO: 3025 - DNA, 1088 bp, Triticum aestivum
  misc_feature: Ceres CLONE ID no. 702974
  misc_feature: Ceres CDNA ID no. 40351200
  CDS (49)..(885): REFERENCED BY SEQ ID NO: 3026
acccattcgcgtgcgatagaattttctagagcgagagatttcggcgtaatgggtccaaacgcggcggcggcgaaacaagcggagaaactccgaattgacggcaacacttacttcaaaaaagaccgtttcggtgccgccatcgacgcttacaccgaggcgattacgctgtgccctaatgttccggtttattggacgaatcgcgcgctgtgccatctcaagcgcaatgattgggagagagtagaggaagattctcggaaggcaattcagttggacagcaattcagttaaggcccactatatgttggggcttgcattgctacagagacaagaatctgccaagggaatcaaagaattggagaaggctttggatcttggaagaggtgccaatcccaagggctatatggtagaagaaatatggcaagagcttgcaaaggcaaaataccttgagtgggagcgatcatcgtccaaacgatcatgggaattgcagagcttgaaagaagcttgtgagtcggctttgaaggaaaaacattttcttgattactcccaaatggaaggatttgtggatgacgctactacttcccattcagaacaattagaggctttagaaagagtcttcaatacagctgcagaagctgacatacctactgaggtgccagattatttgtgctgtagaatcacactcgacatttttcatgatcctgttatcactccaagtggacttacatatgagagagctgtgattcttgaacatcttcagaaggttggtaaattcgacccaatcacacgagaaccccttgatccatcacagttagtgccaaacttggccattaaggaagcggtggaggcattcttggacaaacatggatgggcctacaagatagattaacgaaagatcaccttgcaaattaacaatgtcttggtaggtttgtctgttgagcaatgcagcaggatgttgtgttctgcaagtgtggccaaagttgtttgctttaattgttaattatgtatgcagtttccttgggggcctgacttttgaacatcttattatgaagtatatatatgcatggttgactgccaaaaaaaaaaaaaaaa

SEQ ID NO: 3026 - protein, 278 aa, Triticum aestivum
  misc_feature: Ceres CLONE ID no. 702974
  misc_feature: Ceres CDNA ID no. 40351200
  misc_feature (200)..(274): Pfam Name: U PFAM Desc: U
  misc_feature (45)..(78): Pfam Name: TPR_1 PFAM Desc: Tetratricopeptide repeat
  misc_feature (79)..(112): Pfam Name: TPR_2 PFAM Desc: Tetratricopeptide repeat
MGPNAAAAKQAEKLRIDGNTYFKKDRFGAAIDAYTEAITLCPNVPVYWTNRALCHLKRNDWERVEEDSRKAIQLDSNSVKAHYMLGLALLQRQESAKGIKELEKALDLGRGANPKGYMVEEIWQELAKAKYLEWERSSSKRSWELQSLKEACESALKEKHFLDYSQMEGFVDDATTSHSEQLEALERVFNTAAEADIPTEVPDYLCCRITLDIFHDPVITPSGLTYERAVILEHLQKVGKFDPITREPLDPSQLVPNLAIKEAVEAFLDKHGWAYKID

SEQ ID NO: 3027 - DNA, 549 bp, Triticum aestivum
  misc_feature: Ceres CLONE ID no. 702994
  misc_feature: Ceres CDNA ID no. 25445948
  CDS (63)..(320): REFERENCED BY SEQ ID NO: 3028
atttttcattaggcaaagcaaagcaatcgcataatctagggtttgttcgttggttcgcaacaatggcgatgaggagattctacaacgagatcaaggggaagagggtgagcgaggttccggagcacgtgaagccgatgctgtcgctgaactacatcaagaaggcgattcagagaggcttcgataattaccatgccaagtacattgaaaccagctcccctgatcccatcttccatgtctgctacggcggcatgatcttctcctacctcgttgctctcccccacgagcgccgccacctccagcacgcccagcagcaccactgatccatccccttcagctggatcctggttgaattggaggtggttggcttgcttgatctttgttttaaaatctgaaaaatcaaggcagaaagatactgacagcttctttgtatttcatcatttgggtgataaaataagttgtatttgatacgattctcaattttcttgcacttaaatattaattgaatctgtgaaaagtaaacatactttttgatcaaaaaaaaaaaaaaaa

SEQ ID NO: 3028 - protein, 85 aa, Triticum aestivum
  misc_feature: Ceres CLONE ID no. 702994
  misc_feature: Ceres CDNA ID no. 25445948
  misc_feature: Homolog of GI Number: 30841448 NR Desc: fiber protein Fb15
  misc_feature: Homolog of GI Number: 42565482 NR Desc: fiber protein
  misc_feature: Homolog of GI Number: 50251207 NR Desc: putative fiber protein Fb15
MAMRRFYNEIKGKRVSEVPEHVKPMLSLNYIKKAIQRGFDNYHAKYIETSSPDPIFHVCYGGMIFSYLVALPHERRHLQHAQQHH

SEQ ID NO: 3029 - DNA, 1590 bp, Triticum aestivum
  misc_feature: Ceres CLONE ID no. 703133
  misc_feature: Ceres CDNA ID no. 24766133
  CDS (221)..(1249): REFERENCED BY SEQ ID NO: 3030
ccctactccctactctctcctactccttccccttcctactccactgacggacgggactcggccttcttcttgccttcctctcccccctcccccctcccgccgccgccttcctccgccggggctggttcagctactaactgcggccgggggaaggagaaaggccgcgtctttcccggccacctttcggctcgcccccagcccacgcgggagccggattgggatggagtcggcggccggcggcgggctgggcagcatgcgcgcggtgctcgccatcctccagtggtggggcttcaacgtcaccgtcatcatcatcaacaaatggatcttccagaagctggatttcaagttccccctgacggtgtcctgcgtccacttcatatgctcttccatcggggcatacgtcgcgatccacgtgctcaaggcgaagccgctgattcaggtcgagcccgaggaccgctggaagaggatcttccccatgtccttcgtgttctgcatgaacatcgtgctcgggaacgtcagcctgcgctacatcccggtctccttcatgcagactatcaaatcgttcacccctgcaaccacagttattctgcagtggttggtttggagcaagcacttcgagtggcgcatatgggcttcgctggtcccgatagtcggggggatcctcctaacctcaatgacagagctcagcttcaacatttttggtttctgtgctgccatgattggctgcctcgccacgtctaccaagaccatcttggcagagtccctgctccatggatacaaatttgacagcattaacacagtgtactacatggcaccctttgccaccatgatactggctctaccagcaatgttgcttgaaggaggtggcgtaatcgactggttctacacgcacgactctgtcttttcttcgctgattatcatcctaggctcaggggtgcttgcgttttgcctcaacttctccatcttctacgtgatccattcaaccaccgctgtgaccttcaatgttgctggcaaccttaaagttgctgtcgccgtgttggtctcgtggttgatcttccggaacccaatctcccccatgaatgcaattggatgcgcaatcacgctcgtcggctgtactttctatgggtatgtgaggcatctcatctcccaacagcaggctgctgcgcccctagggagccaaggaacgaactcgccgagaagtcgggtggagatgctcccccttgtaggcgacaaggaagataaggtctagcaaggcaatactcccatattcaagagccgttcatttcagcggttgacggtacattacagtttggcacacagatgctgagttgagggaggccagtaaattggtaggggggcaacacttttttgtgaagctacattatgttgtactcgggcaaactgcgagggtttgttcagttactagttctcatagggttactagttatctacttaatcaaatccccccggacaattcgtgcgattaggatggtgcttctgttttcttgttttgctgccatatgtttagaccttaaactgctggtatgaaaattaatggcattatgatacgagccaaaaaaaaaaaaaaaa

SEQ ID NO: 3030 - protein, 342 aa, Triticum aestivum
  misc_feature: Ceres CLONE ID no. 703133
  misc_feature: Ceres CDNA ID no. 24766133
  misc_feature (170)..(303): Pfam Name: DUF6 PFAM Desc: Integral membrane protein DUF6
  misc_feature: Homolog of GI Number: 51964598 NR Desc: PREDICTED OJ1300_E01.7 gene product
  misc_feature: Homolog of GI Number: 53828521 NR Desc: At3g11320
  misc_feature: Homolog of GI Number: 52421287 NR Desc: At5g05820
  misc_feature: Homolog of GI Number: 9759107 NR Desc: phosphate/phosphoenolpyruvate translocator protein
  misc_feature: Homolog of GI Number: 50920603 NR Desc: Putative phosphate/phosphoenolpyruvate translocator protein
  misc_feature: Homolog of GI Number: 21536504 NR Desc: phosphate/phosphoenolpyruvate translocator
  misc_feature: Homolog of GI Number: 20259810 NR Desc: phosphate/phosphoenolpyruvate translocator
  misc_feature: Homolog of GI Number: 50728312 NR Desc:  similar to SLC35E3 protein
  misc_feature: Homolog of GI Number: 33469147 NR Desc: solute carrier family 35
  misc_feature: Homolog of GI Number: 34873145 NR Desc: similar to RIKEN cDNA A530082C11 gene
MESAAGGGLGSMRAVLAILQWWGFNVTVIIINKWIFQKLDFKFPLTVSCVHFICSSIGAYVAIHVLKAKPLIQVEPEDRWKRIFPMSFVFCMNIVLGNVSLRYIPVSFMQTIKSFTPATTVILQWLVWSKHFEWRIWASLVPIVGGILLTSMTELSFNIFGFCAAMIGCLATSTKTILAESLLHGYKFDSINTVYYMAPFATMILALPAMLLEGGGVIDWFYTHDSVFSSLIIILGSGVLAFCLNFSIFYVIHSTTAVTFNVAGNLKVAVAVLVSWLIFRNPISPMNAIGCAITLVGCTFYGYVRHLISQQQAAAPLGSQGTNSPRSRVEMLPLVGDKEDKV

SEQ ID NO: 3031 - DNA, 715 bp, Triticum aestivum
  misc_feature: Ceres CLONE ID no. 703503
  misc_feature: Ceres CDNA ID no. 40351201
  CDS (161)..(646): REFERENCED BY SEQ ID NO: 3032
ctccgtttctattgcaatttctcaattactacatcgtattctgcaaattcaaactgggtcttggttttctgaaagatgggaggtggcaaggacaagcaccatgatgaatctgacaaaggaattttttcacagcttgctcatggggtagctggtgcagcacatggtggacatgggtacccacctggggcttacccaccaccacctggggcataccctccgcaccaagggtaccctccacaacatgggtatcctccacatcaaggttaccctcctgctggttacccaccagctggttatcctggttcatctcatgcaccaggttctcatgggcacggcggcatgggagcaatgctcaccgggggtgctgccgcggctgctgctgcttatggtgctcaccatgtctctcatggctcccatggctcctatggccaatatgctgcacatggtgctcacatgccccatggaaaattcaagcagcatggaaagcacggcaagttcaagcatggaaagcatggcaagtttggcaagcatggaaagcatggcaaattcggcaagcatggtggtgggttcaagaagtggaagtgaagaatgtgtatctaactatgattctaaaatgcagctctgtgtagagcttaaatctttataataaaccatactttggatgatgaaatcaatcgatctatgagattatgatacttgaaaaaaaaaaaaaaaa

SEQ ID NO: 3032 - protein, 169 aa, Triticum aestivum
  misc_feature: Ceres CLONE ID no. 703503
  misc_feature: Ceres CDNA ID no. 40351201
MGGGKDKHHDESDKGIFSQLAHGVAGAAHGGHGYPPGAYPPPPGAYPPHQGYPPQHGYPPHQGYPPAGYPPAGYPGSSHAPGSHGHGGMGAMLTGGAAAAAAAYGAHHVSHGSHGSYGQYAAHGAHMPHGKFKQHGKHGKFKHGKHGKFGKHGKHGKFGKHGGGFKKWK

SEQ ID NO: 3033 - DNA, 1525 bp, Triticum aestivum
  misc_feature: Ceres CLONE ID no. 703517
  misc_feature: Ceres CDNA ID no. 35383266
  CDS (69)..(1316): REFERENCED BY SEQ ID NO: 3034
atactccccacagattcacatcgcaaaacagaaagaaagaaaaaaaaagagacagagagaaagcagcaatggagtcgctgactctgcgcgcctcgccgtcgtcgaccgcctcgccgctgctccgcctgcccggccggcggcgcgcggcgtccgtccgcgtctccgcctccggcgccggcgagccggacctgtccgtgaccgtgaacgggctgaagatgcccaacccgttcgtgatcggctccggcccccccggcaccaactacaccgtcatgaagcgcgccttcgacgagggctggggcggcgtcatcgccaagaccgtgtccttggatgctggaaaagttatcaatgtaactcctcgctatgctcggctcagggcagatcctaatggatctaccaagagtcctatcattggatggcagaacattgaacttatcagtgatcgacctctcgagacaatgcttaacgagttcaagcaactgaagaaggaataccctgataggatactcattggctcaataatggaggaatacaacaaagcagcatggcatgagcttattgaacgtgttgaggaatctggagtggatgctcttgagataaatttctcatgcccacatggcatgcctgagcgaaaaatgggtgccgctgttggacaggactgtgccttgttagaggaggtttctggttggataaatgagaaggccaccgtgcctgtttggtctaagatgactcctaacattacagatattacacagccttcaaggattgctcttaagtcaggttctgaaggaattgccgctatcaacacaattatgagtgtgatgggaattgatctcaaaactttgcgcccagaaccttgtgtggaggggtactccacacctggaggatattctgcgagagctgtgcatcctatagcacttgcgaaagtcatgcagatagcaagactgatcaaagaggaatttcctgaaggtcgatccctctccgccattggcggtgttgaaaccggcaatgatgctgctgagtttattctacttggtgcagatactgtacaggtatgcacaggtgtaatgatgcatggttatggccttgtgaagaagctgtgtacagagttgcaggattttatgagaatgcacgactttacatcaattgaagatttccgaggggcgtctctcccctacttcacgacgcacacggacctggtgcagcggcagaaggaggcgatcaagcagcagaaggccatcaggatgggcctgcagtcggacaaggactggaccggcgacgggttcgtcaaggagaccgagagcatggtctccaactgatgccgcaaccccgcctgatctctcggtctccaactgatgatgcaactcagtctgatctgatcccctcacgacgaccttcctttccaccatacttccttccacttgtgattaaacccggacctataaacgaaacgaaaagaacagtgggaacttttgctgcacctcatcattcaataaagcattgtagtgtacgaaaaaaaaaaaaaaaa

SEQ ID NO: 3034 - protein, 415 aa, Triticum aestivum
  misc_feature: Ceres CLONE ID no. 703517
  misc_feature: Ceres CDNA ID no. 35383266
  misc_feature (40)..(59): Pfam Name: DHO_dh PFAM Desc: Dihydroorotate dehydrogenase
  misc_feature: Homolog of GI Number: 16323430 NR Desc: putative dehydrogenase
  misc_feature: Homolog of GI Number: 24850453 NR Desc: putative dehydrogenase
  misc_feature: Homolog of GI Number: 50912529 NR Desc: putative dihydropyrimidine dehydrogenase
  misc_feature: Homolog of GI Number: 6177796 NR Desc: senescencs
  misc_feature: Homolog of GI Number: 19908880 NR Desc: putative dihydroorotate dehydrogenase
  misc_feature: Homolog of GI Number: 69297557 NR Desc: Dihydroorotate dehydrogenase 1
  misc_feature: Homolog of GI Number: 67933554 NR Desc: Dihydroorotate dehydrogenase 1
  misc_feature: Homolog of GI Number: 67659618 NR Desc: Dihydroorotate dehydrogenase 1
  misc_feature: Homolog of GI Number: 67667891 NR Desc: Dihydroorotate dehydrogenase 1
  misc_feature: Homolog of GI Number: 62289276 NR Desc: dihydroorotate dehydrogenase family protein
MESLTLRASPSSTASPLLRLPGRRRAASVRVSASGAGEPDLSVTVNGLKMPNPFVIGSGPPGTNYTVMKRAFDEGWGGVIAKTVSLDAGKVINVTPRYARLRADPNGSTKSPIIGWQNIELISDRPLETMLNEFKQLKKEYPDRILIGSIMEEYNKAAWHELIERVEESGVDALEINFSCPHGMPERKMGAAVGQDCALLEEVSGWINEKATVPVWSKMTPNITDITQPSRIALKSGSEGIAAINTIMSVMGIDLKTLRPEPCVEGYSTPGGYSARAVHPIALAKVMQIARLIKEEFPEGRSLSAIGGVETGNDAAEFILLGADTVQVCTGVMMHGYGLVKKLCTELQDFMRMHDFTSIEDFRGASLPYFTTHTDLVQRQKEAIKQQKAIRMGLQSDKDWTGDGFVKETESMVSN

SEQ ID NO: 3035 - DNA, 1974 bp, Triticum aestivum
  misc_feature: Ceres CLONE ID no. 703564
  misc_feature: Ceres CDNA ID no. 35383267
  CDS (135)..(1718): REFERENCED BY SEQ ID NO: 3036
atcccgcatcgcatcgcactaggtctcggacattcctctttctctcccttgcttggggaagaagaagaagaagaagagagggctcccgacgccgtcgcccctcgccgccgatctgatctcaggagccagcgaagatgcattccaccaatctgctcctcgaggagcccatccggatggtctccatcctcgagccatccaagccgaacttcttcccggcgatgacgaagatcgtggggacgctgggtcccaagtcccggtccgttgaggccatctccgcctgtctaaaggccggcatgtctgtggcccgtttcgatttctcgtggggggatgccgcgtaccaccaggagacactcgagaacctcaagctcgccatcaaggccaccaagaagctatgtgctgttatgctcgacactgttggccctgagttgcaagtggtgaacaagagtgaagtcacaatctcgcttgaagagaacgagtctgttgttctcacccctcacaagggccaggaggcctcttccaagttgctccctatcaacttcgctggactcgccaaggctgtgaagcccggagccacaatattcgttgggcaatatttgttcacgggcagtgagactacatcagtttggctggaggtttctgaagttcaaggggatgacgtggtttgcgtgatcaagaactcagctaccctggctgggtcactcttcacattgcactgctcccagatccatatcgacatgcccacgctgtctgatgaggataaagatgttatgaaaaaatggggtgctccaaacaagattgacttcctctctctttcttatacaaggcacgcagaagatgtgcggcaagcacgggagttcctctctaagttaggtgatcttagccaaactctgatttttgccaaaattgagaatgtggagggcttgaaccattttgatgagatcctggaggaagcggatggtatcattctgtcaagagggaaccttggaattgatcttccacctgaaaaggtgttcttatttcagaagtctgctctgcacaagtgcaacatggctggaaagcctgctgttgttactcgtgttgtggacagtatgacggacaacctaaggcctactcgtgcggaggcaactgatgtggcaaatgcggtgctggatggtagtgatgccattctccttggtgccgagactctccgtgggttgtatccagttgagactatttcaacagtgggcagaatttgtgctgaggctgagaaggttttcaaccaagatttgtacttcaagcgaactgtgaaatatgtgggagaacccatgacccacttggagtctattgcttcctctgcagtgcgggctgctattaaagttaaggcttcggtcatcatttgcttcacctcatctggacgggctgcaaggctaattgccaagtacaggcccaccatgcctgtcctctctgttgtcattcctcgtctgaaaacaaatcaattgaagtggagcttcacaggtgcatttgaggcaagacaatcactcatagttagaggcctctttcccatgcttgccgatccacgtcatccggctgaatctactagcactacaaatgaatcagtgttgaaggttgctcttgaccacggcaaagcatccggtgtgatcaagtcgcatgaccgcgttgtcgtgtgccagaaagtgggagattcctctgtcgtgaagatcattgagctggacgactaggcaaaattagtctttgctcagggcttgccagatttttgactaggccaaaacgttgcttggtggctatgtataattctatctatagttttgcaaaacgagcagtttttcctatggtgtcatcataggatccgcggttaccattcgaaaacctacgctagttattatggatatgtcctcagattttactgcagtgtagcgagtaaatgatctgatggaataatgatatcaaaactttgtgacaaaaaaaaaaaaaaaa

SEQ ID NO: 3036 - protein, 527 aa, Triticum aestivum
  misc_feature: Ceres CLONE ID no. 703564
  misc_feature: Ceres CDNA ID no. 35383267
  misc_feature (30)..(380): Pfam Name: PK PFAM Desc: Pyruvate kinase
  misc_feature (394)..(524): Pfam Name: PK_C PFAM Desc: Pyruvate kinase
  misc_feature: Homolog of GI Number: 23308151 NR Desc: At2g36580/F1O11.21
  misc_feature: Homolog of GI Number: 24111299 NR Desc: At3g52990/F8J2_160
  misc_feature: Homolog of GI Number: 77553678 NR Desc: Pyruvate kinase
  misc_feature: Homolog of GI Number: 77553679 NR Desc: Pyruvate kinase
  misc_feature: Homolog of GI Number: 25287747 NR Desc: probable pyruvate kinase
  misc_feature: Homolog of GI Number: 21537122 NR Desc: putative pyruvate kinase
  misc_feature: Homolog of GI Number: 20197921 NR Desc: putative pyruvate kinase
  misc_feature: Homolog of GI Number: 77548686 NR Desc: pyruvate kinase
  misc_feature: Homolog of GI Number: 20562907 NR Desc: pyruvate kinase
  misc_feature: Homolog of GI Number: 7529723 NR Desc: pyruvate kinase
MHSTNLLLEEPIRMVSILEPSKPNFFPAMTKIVGTLGPKSRSVEAISACLKAGMSVARFDFSWGDAAYHQETLENLKLAIKATKKLCAVMLDTVGPELQVVNKSEVTISLEENESVVLTPHKGQEASSKLLPINFAGLAKAVKPGATIFVGQYLFTGSETTSVWLEVSEVQGDDVVCVIKNSATLAGSLFTLHCSQIHIDMPTLSDEDKDVMKKWGAPNKIDFLSLSYTRHAEDVRQAREFLSKLGDLSQTLIFAKIENVEGLNHFDEILEEADGIILSRGNLGIDLPPEKVFLFQKSALHKCNMAGKPAVVTRVVDSMTDNLRPTRAEATDVANAVLDGSDAILLGAETLRGLYPVETISTVGRICAEAEKVFNQDLYFKRTVKYVGEPMTHLESIASSAVRAAIKVKASVIICFTSSGRAARLIAKYRPTMPVLSVVIPRLKTNQLKWSFTGAFEARQSLIVRGLFPMLADPRHPAESTSTTNESVLKVALDHGKASGVIKSHDRVVVCQKVGDSSVVKIIELDD

SEQ ID NO: 3037 - DNA, 1142 bp, Triticum aestivum
  misc_feature: Ceres CLONE ID no. 703765
  misc_feature: Ceres CDNA ID no. 36582567
  CDS (220)..(936): REFERENCED BY SEQ ID NO: 3038
gagacagtaggaggacaagagagcgagggcgaccaataaattcctaatttttcccacttttccaccccgggattccccgcctcttgttccaatcgattggtgggcgtcctcgttcttggcttcccgattgaatccgtgggaagccagagataattctctctccgctgcgaatttttttttggtggtttgagttcttgatttgtttgcgaggaagccatcatgagcgccggaagcgccagtttcctcgagatccagccctcggagctggcatttccctttgaattgatgaagcagagctcgtgctccatgcaactcgcaaataagaccgaccgttatgtagcattcaaggtcaaaactaccaacccaaagcagtactgtgtgcgccctaatatcggcgttgtacttcctgggtcgacttgtgatgttacagttacaatgcaagcgcagagggaagcacctgctgatctgcagtgtaaggacaagttcctagttcaaagtgttgcagctgagaatggcgcagcaactcaagatattagtgcagcaatgttcaacaaagagccagggaaggttgttgatgaatgcaagctgcgtgtaatttatgtgccaacatcttcacctagcccgttctctgaagattcagaacaagggagttctgctcgttcattggaaaacgggacccctaattctacattgccacaatctgtatttagatcatctggtgaagcatcaaaggataagtcctcggaggcgacgtccatgatttccaagctaactgaggagaaaatgtctgctgttcagcaaaaccagaagttgagacaagagctggatgtcctacgcaaagagagcagcaaaagcaacggcggtttctcaatcaccttcttgattgtggtgggtattctgggcatcatcgctggtttcatcctcaagaagacataggagaagagtagtccccaacaaagttacattcccaggaaaggacggataccagcaacatcccttgtgtttttactcctaaaaggagcgcctgttctattctaacttgtaacggcttagaagctttggtttgtgtacattacatggtggttttcatgattttaatcacatcgagtagacttgttttaattataaaaaaaaaaaaaaaa

SEQ ID NO: 3038 - protein, 238 aa, Triticum aestivum
  misc_feature: Ceres CLONE ID no. 703765
  misc_feature: Ceres CDNA ID no. 36582567
  misc_feature (8)..(115): Pfam Name: Motile_Sperm PFAM Desc: MSP
  misc_feature: Homolog of GI Number: 50941265 NR Desc: putative 27k vesicle
  misc_feature: Homolog of GI Number: 6688926 NR Desc: VAP27
  misc_feature: Homolog of GI Number: 25054852 NR Desc: putative proline
  misc_feature: Homolog of GI Number: 21592874 NR Desc: putative proline
  misc_feature: Homolog of GI Number: 50941297 NR Desc: putative vesicle
  misc_feature: Homolog of GI Number: 30023716 NR Desc: At2g45140
  misc_feature: Homolog of GI Number: 21554053 NR Desc: putative VAMP
  misc_feature: Homolog of GI Number: 50911140 NR Desc: putative vesicle
  misc_feature: Homolog of GI Number: 50911355 NR Desc: putative vesicle
  misc_feature: Homolog of GI Number: 9802569 NR Desc: F22O13.31
MSAGSASFLEIQPSELAFPFELMKQSSCSMQLANKTDRYVAFKVKTTNPKQYCVRPNIGVVLPGSTCDVTVTMQAQREAPADLQCKDKFLVQSVAAENGAATQDISAAMFNKEPGKVVDECKLRVIYVPTSSPSPFSEDSEQGSSARSLENGTPNSTLPQSVFRSSGEASKDKSSEATSMISKLTEEKMSAVQQNQKLRQELDVLRKESSKSNGGFSITFLIVVGILGIIAGFILKKT

SEQ ID NO: 3039 - DNA, 1690 bp, Triticum aestivum
  misc_feature: Ceres CLONE ID no. 703821
  misc_feature: Ceres CDNA ID no. 35383268
  CDS (118)..(1593): REFERENCED BY SEQ ID NO: 3040
acaaagaccacacgaggcgctaggccgctagcaaagctctcggccaaacaggcatcacgcgtgctgtagcaccaccggttggttcgttcgccggcgacggcaccgcggtgatcagcgatgggggagttggcgtgggcggcgctggcggggcttctggtgccgctggccgcggtggcgctggacgccgcggtgcgggcggcgcacgcgtggtactggacggcgtcgctgggcgccgggcggcgcggcaggctgccgccgggagacatggggtggccgctcgtcggcggcatgtgggccttcctctgcgccttcaagtccggcaggccggactccttcatcgactccttcgcccgacggttcgggcgggcggggctgtacagggcgttcatgttcagcagcccgacgatcatggtgacgacgccggacgcgtgcaagcaggtgctcatggacgacgacacgttcgtcaccggctggcccaaggccacggtggcgctcatcgggcccaagtccttcatcaacatgggctacgacgagcaccgccggctgcgcaagctcacggcggcgcccatcaacggcttcgacgcgctcacctcctacctgggcttcatcgaccacaccgtggtgaccacgctccggggctggtcggaccggggctccgacttcgagttcctcacggagctgcgccggatgacgttccggatcatcgtgcagatcttcatgggcggcgccgacgagcgcacggcggccgagctggagagcacctacacggagctcaactacggcatgcgcgccatggccatcgacctaccagggttcgcctaccacaaggccatccgcgcgcgccgcaggctcgtggcggcgctgcagcgcgtgctcgacgagcgccgggccaggggagccaagacggccggggtggacatgatggaccggctgatcgccgcggaggacgagggcgggcggcggctgcaggacgacgagatcatcgacgtgcttgtcatgtacctgaacgccggccacgagtcctccggccacatcaccatgtgggccaccgtcttcctgcaggagaaccccgacatcctcgccaaggccaaggcggagcaggaggcgatcatgaggagcatcccgccggggcagaaggggctcaccctccgggacttcaggaagatggagtacctctcacaggtggtcgacgagacgctgcggttcgtcaacatctccttcgtgtcgttccgccaggcgacccgcgacgtcttcgtcaacggttatctgatacccaaggggtggaaggtgcagctgtggtacaggagcgtgcacatggaccctcaggtgtaccctgaccccaagaagttcgacccttcaagatgggagggcccgccgccgagggccggaacgttccttcctttcgggctcggcacgaggctgtgcccgggcaacgatctcgccaagcttgagatctctgtcttcctccaccatttcctccttggatacaagctgacaaggaaaaatccaaattgccgggtgaggtacctgccgcacccccggccggtggacaattgcctggccaagatcaccagagtctcctcctcccattgacgatgatgaaaacagagaatccaaaaccctagacggcgtcgcccagaagcgccaaatttaggaaaactcatgtgtccagacaaaaaaaaaaaaaaaa

SEQ ID NO: 3040 - protein, 491 aa, Triticum aestivum
  misc_feature: Ceres CLONE ID no. 703821
  misc_feature: Ceres CDNA ID no. 35383268
  misc_feature (53)..(146): Pfam Name: p450 PFAM Desc: Cytochrome P450
  misc_feature: Homolog of GI Number: 5915847 NR Desc: Cytochrome P450 88A1
  misc_feature: Homolog of GI Number: 17980331 NR Desc: DWARF3
  misc_feature: Homolog of GI Number: 17980367 NR Desc: DWARF3
  misc_feature: Homolog of GI Number: 17980390 NR Desc: DWARF3
  misc_feature: Homolog of GI Number: 17980396 NR Desc: DWARF3
  misc_feature: Homolog of GI Number: 17980415 NR Desc: DWARF3
  misc_feature: Homolog of GI Number: 17980411 NR Desc: DWARF3
  misc_feature: Homolog of GI Number: 17980400 NR Desc: DWARF3
  misc_feature: Homolog of GI Number: 13022042 NR Desc: ent
  misc_feature: Homolog of GI Number: 55775106 NR Desc: putative cytochrome P450 DWARF3
  misc_feature: Useful for delaying flowering time
  misc_feature: Useful for making plants with altered leaf shape eg curled leaves
  misc_feature: Useful for making plants with increased biomass and foliage
  misc_feature: Useful for making plants with increased biomass and foliage
  misc_feature: Useful for making smaller plants
MGELAWAALAGLLVPLAAVALDAAVRAAHAWYWTASLGAGRRGRLPPGDMGWPLVGGMWAFLCAFKSGRPDSFIDSFARRFGRAGLYRAFMFSSPTIMVTTPDACKQVLMDDDTFVTGWPKATVALIGPKSFINMGYDEHRRLRKLTAAPINGFDALTSYLGFIDHTVVTTLRGWSDRGSDFEFLTELRRMTFRIIVQIFMGGADERTAAELESTYTELNYGMRAMAIDLPGFAYHKAIRARRRLVAALQRVLDERRARGAKTAGVDMMDRLIAAEDEGGRRLQDDEIIDVLVMYLNAGHESSGHITMWATVFLQENPDILAKAKAEQEAIMRSIPPGQKGLTLRDFRKMEYLSQVVDETLRFVNISFVSFRQATRDVFVNGYLIPKGWKVQLWYRSVHMDPQVYPDPKKFDPSRWEGPPPRAGTFLPFGLGTRLCPGNDLAKLEISVFLHHFLLGYKLTRKNPNCRVRYLPHPRPVDNCLAKITRVSSSH

SEQ ID NO: 3041 - DNA, 1415 bp, Triticum aestivum
  misc_feature: Ceres CLONE ID no. 704173
  misc_feature: Ceres CDNA ID no. 24766135
  CDS (139)..(1236): REFERENCED BY SEQ ID NO: 3042
acttcgcttccttcatcttcccgggcggtgcggtgcgtacggcgcaaccagatctcacggcgaggccgagctaaccgcctccggatccgcacaaacccccaacagccgtacgcaccgcagcagcggcggcggaggagcatggagagctcgtcgccttcggtgccgttcccgctgctgcaggcgccagtggagagcacgtaccgtgcctgcaccataccctaccgcttcccctccgacaacccccacaaggccacccccgtcgagatccagtggatcgacctcttcctgaaatccgtgccatccttcaggcagcgggcggagaatgaccccacggtgccggatgcccccgccaaggccgagaagtttgctcagaggtacactgatatgcttgaggagttgaagaagaacccagagagccatggaggacctcctgattgcatacttctttgtaggcttcgtgagctaatccttagagaattggggtttcatgacatcttcaagaaggtcaaggatgaggagaacgctaaggctatgtcactgtttgagggagttgttcagcggaatgatgaaatagaagatggtgagaaacgagcagagaacttgatccgtggaatcttagcaggaaacatatttgacttagggtctgcacagcttgcagaagtttttgctaaagatggcatgtccttcttggcgagttgccagaatcttttatctcgaccttgggttattgatgacctagatgcatttaaaagcaaatggaccaagaaatcttgggaaaaggcagttatttttgttgataattctggtgctgatatcatattgggcatattaccatttgcgagggagttgctccgacgtggcactaaggtgatacttgccgccaatgacatgccttccatcaacgatatcacttacctagagttagttgagattgtaaacaagctcaaggacgaaaatggaaagcttgctggtgtggatgtatctgacctcattgttgccaactccgggaacgatctgccagtaatagatttgtctagcgtcgcaccggaactagcctatatggcaagtgatgctgacttggtcatcctagaaggcatgggaagaggaatcgaaaccaacctatacgcacaaatgagatgtgactcgatcaagattggaatggtcaagcatcctgaagtggcgcagtttttgggtggaaggctttatgattgtgtcttcaagttcaacgaggcctgaaaaacactgaagcccctgcatggcaccagccatattgcattcattttaatcattgattactgatgcaatcgtacactgaatgtatgcgtccacgatgatagcaagtggaagaaattacaattcgcttgttgtactgtgaggaaggacaatttttattgcaaataaaaaaaaaaaaaaaa

SEQ ID NO: 3042 - protein, 365 aa, Triticum aestivum
  misc_feature: Ceres CLONE ID no. 704173
  misc_feature: Ceres CDNA ID no. 24766135
  misc_feature: Homolog of GI Number: 46402468 NR Desc: At2g17320
  misc_feature: Homolog of GI Number: 55670842 NR Desc: Chain A
  misc_feature: Homolog of GI Number: 54290537 NR Desc: pantothenate kinase
  misc_feature: Homolog of GI Number: 42569099 NR Desc: pantothenate kinase
  misc_feature: Homolog of GI Number: 30689295 NR Desc: eukaryotic pantothenate kinase family protein
  misc_feature: Homolog of GI Number: 19424184 NR Desc: pantothenate kinase 4
  misc_feature: Homolog of GI Number: 29747950 NR Desc: Pank4 protein
  misc_feature: Homolog of GI Number: 48096914 NR Desc: similar to Pantothenate kinase 4
MESSSPSVPFPLLQAPVESTYRACTIPYRFPSDNPHKATPVEIQWIDLFLKSVPSFRQRAENDPTVPDAPAKAEKFAQRYTDMLEELKKNPESHGGPPDCILLCRLRELILRELGFHDIFKKVKDEENAKAMSLFEGVVQRNDEIEDGEKRAENLIRGILAGNIFDLGSAQLAEVFAKDGMSFLASCQNLLSRPWVIDDLDAFKSKWTKKSWEKAVIFVDNSGADIILGILPFARELLRRGTKVILAANDMPSINDITYLELVEIVNKLKDENGKLAGVDVSDLIVANSGNDLPVIDLSSVAPELAYMASDADLVILEGMGRGIETNLYAQMRCDSIKIGMVKHPEVAQFLGGRLYDCVFKFNEA

SEQ ID NO: 3043 - DNA, 1930 bp, Triticum aestivum
  misc_feature: Ceres CLONE ID no. 704184
  misc_feature: Ceres CDNA ID no. 24766197
  CDS (90)..(1691): REFERENCED BY SEQ ID NO: 3044
tcccctcttcctccctccctcctcgccaccgctccgctccactccacacccctgttcccagacgcaaccaccgccgccgacgaccgacgatgcttcgcgccgtcctcctccgctcagcctccggcctccgccggtcgccgatggccgccccgctatccaccgccgccgcctcgtggctcgccgaggggacctcgtcgccgcccagggtgcgcctactcatcggcggcgacttcgtcgagtcgaaggccaccgagcacgtcgacgtcaccaaccccgcgacgcaggaggtggtgtcccggatcccgctcaccaccgccgacgagttcagggccgcggtggacgctgccaggaccgccttccctggctggcggaacactccggtcacggcgcggcagcgcatcatgttcaaataccaggagctcatccgggccaacatggataagctggcagagaacattacaaccgagcagggaaagacactgaaagatgcttggggtgatgtattccgtggtctagaggtggtggagcatgcttgtggaatggggtcacttcaaatgggcgaatacgtatctaatgtttctcatgggattgacacctttagtattagggagccactcggcgtatgtgctgggatttgcccattcaatttccctgccatgattcccctatggatgttccccatagctgttacttgtgggaatacttttgttctaaagccatcagaaaaggatccaggggctgctatgatgcttgcggagctagcgatggaggctggtttaccaaagggtgtgttgaacattgttcatggtacccatgatgttgtcaacaatatttgtgatgacgaggctattaaggcagtatcatttgttggttccaatacagcaggtatgcatatatattctagagcatctgcgagtgggaagcgtgttcagtgtaacatgggtgcaaagaatcatgccattatccttcctgatgctgatcgagatgccacattgaatgcccttattgctgccggttttggtgcagctgggcaaaggtgcatggcattgagcactgctgtttttgttggaggttcagaaccatgggaggatgaactagtcaaacgtgcaagcaaccttgtagttaattccggaacagctaatgatgctgaccttggtccagtgatcagtacacaggccaaggaccgcatctgcaagttagtccaaagtggcgctgacagtggtgctcgacttgtgctggatggaagggagattgtggttcctcaatttgaggatggcaactttattggtccaactgtgttggctgatgttaaaagtgatatggagtgttaccaggaggaaatttttggtccagttcttctcttgatgaaggcagagagcctagatgatgccatacaaattgtaaacagaaacaagtatggcaatggggcttccatctttaccacatctggtgtctcagcaaggaaatttcagacggacattgaagctggccaggtgggtatcaacgtgccgatcccggtacccctgccgttcttctccttcacgggtagcaaagcttccttcgccggagacttgaatttctacggcaaggcgggcgtgcagttcttcacccagatcaagaccatcacgcagcagtggaaggagtcgtctccccagcgcgtttctctctccatgcccacctcgcagaagtgaagtcacccgagctgactcatgtatgtcgaaataaacccaggcattgatgtggaatttaagcttcacaggagttgcctttcattaagggtaactcttgtgatgtctttcattgtgctgccggtaataagaaaatcccagattagacgaccgaatcacacgcacagcagagcatgtatttgtacagggaccaaattaatgtgtacatgcaatggctcgatatcacaaaaaaaaaaaaaaaa

SEQ ID NO: 3044 - protein, 533 aa, Triticum aestivum
  misc_feature: Ceres CLONE ID no. 704184
  misc_feature: Ceres CDNA ID no. 24766197
  misc_feature (48)..(512): Pfam Name: Aldedh PFAM Desc: Aldehyde dehydrogenase family
  misc_feature: Homolog of GI Number: 53684538 NR Desc: COG1012: NAD
  misc_feature: Homolog of GI Number: 50748470 NR Desc:  similar to methylmalonate semialdehyde dehydrogenase gene
  misc_feature: Homolog of GI Number: 11095441 NR Desc: aldehyde dehydrogenase 6A1 precursor
  misc_feature: Homolog of GI Number: 50934827 NR Desc: methylmalonate semi
  misc_feature: Homolog of GI Number: 2895866 NR Desc: methylmalonate semi
  misc_feature: Homolog of GI Number: 30144414 NR Desc: methylmalonate semialdehyde dehydrogenase
  misc_feature: Homolog of GI Number: 13591997 NR Desc: methylmalonate semialdehyde dehydrogenase gene
  misc_feature: Homolog of GI Number: 4587685 NR Desc: putative methylmalonate semi
  misc_feature: Homolog of GI Number: 50751079 NR Desc:  similar to aldehyde dehydrogenase 9A1
  misc_feature: Homolog of GI Number: 27382718 NR Desc: bll7607
MLRAVLLRSASGLRRSPMAAPLSTAAASWLAEGTSSPPRVRLLIGGDFVESKATEHVDVTNPATQEVVSRIPLTTADEFRAAVDAARTAFPGWRNTPVTARQRIMFKYQELIRANMDKLAENITTEQGKTLKDAWGDVFRGLEVVEHACGMGSLQMGEYVSNVSHGIDTFSIREPLGVCAGICPFNFPAMIPLWMFPIAVTCGNTFVLKPSEKDPGAAMMLAELAMEAGLPKGVLNIVHGTHDVVNNICDDEAIKAVSFVGSNTAGMHIYSRASASGKRVQCNMGAKNHAIILPDADRDATLNALIAAGFGAAGQRCMALSTAVFVGGSEPWEDELVKRASNLVVNSGTANDADLGPVISTQAKDRICKLVQSGADSGARLVLDGREIVVPQFEDGNFIGPTVLADVKSDMECYQEEIFGPVLLLMKAESLDDAIQIVNRNKYGNGASIFTTSGVSARKFQTDIEAGQVGINVPIPVPLPFFSFTGSKASFAGDLNFYGKAGVQFFTQIKTITQQWKESSPQRVSLSMPTSQK

SEQ ID NO: 3045 - DNA, 1695 bp, Triticum aestivum
  misc_feature: Ceres CLONE ID no. 704206
  misc_feature: Ceres CDNA ID no. 24766198
  CDS (152)..(1321): REFERENCED BY SEQ ID NO: 3046
agccacaacgggacagatcccccgcataaattcctccacccgtcgcgccgcccccattcgcccacgcccacgcgcgcgcacgcggcctccccctcctcctcccccattcgctccctccctccgccggccggggattcgggtttggggggagatggggtacgtcgggagccacggcgtggcgacgctgcgcaagtacaagtacagcggcgtcgaccactccattgtcgccaagtacatcctccagcccttctggtcgcgattcgtcaacgtcttcccgctctggttcccaccaaacatgatcacgctgacaggtttcatgtttctgctgacatcggcattccttggctttttgtattcacctcatcttgatacagcgccccctagatgggttcatctcgcgcatggaatccttctcttcctttaccagacttttgatgctgtggatggtaaacaagcaagacgtaccaactcatcaagtcctttaggcgaactttttgatcacggatgcgacgcgcttgcatgtacttttgagtccctggcttttgggagcacagctatgtgtggaaatgctaccttttggttttgggtcatttcggctgtccccttctactttgcaacctgggaacactattttacaaacacacttgttcttcctatagtcaatgggccaactgaaggccttatgctgatttatgtgtgccatatcttcacctttttcacaggagctgaatggtgggcgcaggattttcggaaatcattgcccctccttaattgggtgcctcttgttcctgaaatctcgctatatggcattgtgctgtttctaatgattgcttttgctgtaatcccgacgattggatctaacactcacaatgtttacaaagtcgttgaagcaagaaaaggaagcatggtgctggcactagcaatgctcttccctttcggtttactcatggctggaactctcgtgtggtcctatctatctccttcagatataatgagaaatcaaccacatctgctaattattggaacgggttttgcgtttggctatcttgtgggaagaatgattctggctcacttatgtgatgaacccaaaggtctgaagacaggaatgtgcatggccctggcatattttccgtttgcaattgcaaatgcgctgactgcccgacttgatgatggaaaccccctttttgatgagcagctcgttctcctgatatactgcttatttacagtggcgctgtacatgcattttgctacgtccgttatccatgaaatcaccaacgcacttgggattcattgcttcagaatcaccagcaaaaaggcgtaatctgactcagttggtaatcacatggtgtctaccaaagaagcaaacatgcctgcttgtcttcgttacaggggtgatgcccgaatcatctttgcatctgtcattacagggacactgtcccctgaaatttacatcagcactaaaatttgtgctgatgagaaaacaatgtatgtgaaacagttggcaaaattttgttgtattgttcatagagcaaatgctcagcaaaaactttatggaggaaatgctgtgctgattggcagtggttgcctttgtaacttgtcacattgtaacatcagcaaagatgcggatagtgttgttaaaaaaaaaaaaaaaaaaaaaaaaaaaaaaaaaaaaaaaaaataaaaaaaaaaaaaaaa

SEQ ID NO: 3046 - protein, 389 aa, Triticum aestivum
  misc_feature: Ceres CLONE ID no. 704206
  misc_feature: Ceres CDNA ID no. 24766198
  misc_feature (86)..(226): Pfam Name: CDP PFAM Desc: CDP
  misc_feature: Homolog of GI Number: 42571453 NR Desc: aminoalcoholphosphotransferase
  misc_feature: Homolog of GI Number: 30313359 NR Desc: aminoalcoholphosphotransferase
  misc_feature: Homolog of GI Number: 5917787 NR Desc: aminoalcoholphosphotransferase
  misc_feature: Homolog of GI Number: 2072356 NR Desc: aminoalcoholphosphotransferase
  misc_feature: Homolog of GI Number: 3927806 NR Desc: aminoalcoholphosphotransferase
  misc_feature: Homolog of GI Number: 18390098 NR Desc: aminoalcoholphosphotransferase
  misc_feature: Homolog of GI Number: 7488701 NR Desc: probable ethanolaminephosphotransferase
  misc_feature: Homolog of GI Number: 23296820 NR Desc: putative aminoalcoholphosphotransferase
  misc_feature: Homolog of GI Number: 21280905 NR Desc: putative aminoalcoholphosphotransferase
  misc_feature: Homolog of GI Number: 46981896 NR Desc: putative aminoalcoholphosphotransferase
MGYVGSHGVATLRKYKYSGVDHSIVAKYILQPFWSRFVNVFPLWFPPNMITLTGFMFLLTSAFLGFLYSPHLDTAPPRWVHLAHGILLFLYQTFDAVDGKQARRTNSSSPLGELFDHGCDALACTFESLAFGSTAMCGNATFWFWVISAVPFYFATWEHYFTNTLVLPIVNGPTEGLMLIYVCHIFTFFTGAEWWAQDFRKSLPLLNWVPLVPEISLYGIVLFLMIAFAVIPTIGSNTHNVYKVVEARKGSMVLALAMLFPFGLLMAGTLVWSYLSPSDIMRNQPHLLIIGTGFAFGYLVGRMILAHLCDEPKGLKTGMCMALAYFPFAIANALTARLDDGNPLFDEQLVLLIYCLFTVALYMHFATSVIHEITNALGIHCFRITSKKA

SEQ ID NO: 3047 - DNA, 1287 bp, Triticum aestivum
  misc_feature: Ceres CLONE ID no. 704214
  misc_feature: Ceres CDNA ID no. 36582489
  CDS (140)..(925): REFERENCED BY SEQ ID NO: 3048
acaccacaccacaccacacccagctagagcgaggcggacacccaagcaaccacactctcccaccctcagccaccgcacaaggaagaagcagaagaggtcttctctctccctgctttgcttagcttcgtttgtgactgccatgtcgtcgtcggccatggaagcgctccacgccctgatcccggagcagcaccagctggacgttgaggcggctgcggctgtcagcagcgccaccagcggcgaggagagcggccacgtgctgcaggggtgggccaagaggaagcgatcgcgccgccagcgctccgaggaggagaacctcgcgctctgcctcctcatgctctcgcgcggcggcaagcagcgtgttcaggcgccgcagccggagtcgttcgctgcgccggtgcctgccgagttcaagtgctccgtctgcggcaagtccttcagctcctaccaggcgctcggaggccacaagacgagccaccgggtgaagcagccgtctcctccctctgatgccgctgctgccccactcgtggccctcccggccgtcgccgccatcctgccgtccgccgagccggccacgtcgtccaccgccgcgtcctccgacggcgcgaccaacagagtccacaggtgctccatctgccaaaaggagttcccgactgggcaggcgctcggcgggcacaagaggaagcactacgacggaggcgtgggcgccgccgcctcgtcgaccgagcttctggccgccgcggccgccgagtctgaggtggggagcaccggcaacgggagctccgccgcccgggccttcgacctgaacattccggccgtgccggagttcgtgtggaggccgtgcgccaagggcaagatgatgtgggaggacgatgaggaggtgcagagccccctcgccttcaagaagcctcggcttctcaccgcttgagcagctcctgcatggatcccatcgatccatccaaagtttttggtccagtcgatccagtggtgaaattcgttcattcgtttggttaaatttgttctgctcctgtacagattgagtgagtgagtaatactacatacatactccagtagccatatacgtagatataggcagtaagttgtaacgacggaagagtacttgcttcctctttcagatgttgggtaggcgtcagtatattgtactagtcgacagttcatacatactcgtacagagattggtcatgaactagcagtaccgtgtaacataaagcatggatgaaattggagattattggaattgatggaaattctgcaaaaaaaaaaaaaaaa

SEQ ID NO: 3048 - protein, 261 aa, Triticum aestivum
  misc_feature: Ceres CLONE ID no. 704214
  misc_feature: Ceres CDNA ID no. 36582489
  misc_feature (90)..(112): Pfam Name: zf PFAM Desc: Zinc finger
  misc_feature: Homolog of GI Number: 485816 NR Desc: zinc
  misc_feature: Homolog of GI Number: 50918971 NR Desc: zinc finger transcription factor ZF1
  misc_feature: Homolog of GI Number: 28849865 NR Desc: zinc finger transcription factor ZFP2
  misc_feature: Homolog of GI Number: 77556908 NR Desc: Zinc finger
  misc_feature: Homolog of GI Number: 50508140 NR Desc: putative zinc finger transcription factor ZF1
  misc_feature: Homolog of GI Number: 50943777 NR Desc: putative zinc finger transcription factor ZF1
  misc_feature: Homolog of GI Number: 4666360 NR Desc: zinc
  misc_feature: Homolog of GI Number: 33771374 NR Desc: zinc finger protein PIF1
  misc_feature: Homolog of GI Number: 33331578 NR Desc: zinc finger protein
  misc_feature: Homolog of GI Number: 7228329 NR Desc: putative TFIIIA
MSSSAMEALHALIPEQHQLDVEAAAAVSSATSGEESGHVLQGWAKRKRSRRQRSEEENLALCLLMLSRGGKQRVQAPQPESFAAPVPAEFKCSVCGKSFSSYQALGGHKTSHRVKQPSPPSDAAAAPLVALPAVAAILPSAEPATSSTAASSDGATNRVHRCSICQKEFPTGQALGGHKRKHYDGGVGAAASSTELLAAAAAESEVGSTGNGSSAARAFDLNIPAVPEFVWRPCAKGKMMWEDDEEVQSPLAFKKPRLLTA

SEQ ID NO: 3049 - DNA, 1539 bp, Triticum aestivum
  misc_feature: Ceres CLONE ID no. 704319
  misc_feature: Ceres CDNA ID no. 24766200
  CDS (97)..(1119): REFERENCED BY SEQ ID NO: 3050
ctcgcgccgctggcccggcaatttccccactattccctccacaaccgaaaggtcccccccctcccctcaaaaaaaaaaaaaccccaccccagcgccatggccgccgcctcctccgccgccgccgcctcctccgccgccgccgcccccgccgacacgtacgacatcccgtgggtggagaagtaccgccccagccgcgtcgccgatgtcgtcggcaacgccgacgccgtcagccgcctcgaggtcatcgcccgcgacggcaacatgcccaacctcatcctctccgggcctccggggaccgggaagacgacgagcatcctggcgctcgcccacgagatgctcgggcccagctaccgcgagggagtgctcgagctcaacgcctcggacgacagggggcttgatgtggtgcggaacaagatcaagatgttcgcgcagaagaaggtcacactgccacccggacggcacaagatcgtcatactggacgaagctgacagcatgacaacaggagcacagcaagcactgagaagaaccatggagatttattccaacaccacaagatttgctcttgcatgcaatacttcatctaaaatcattgaacccatccaaagtcgctgcgctattgtccggttctcgaggctttcagatcaggagatccttggccgccttatggtcgtggtggcagctgagaaggtcccttatgtgccagaaggtcttgaagccatcatttttactgctgatggtgacatgaggcaagctttgaacaatttgcaagctacagtcagcgggttccgttttgttaatcaagaaaatgtgttcaaggtatgcgatcaaccacatcccttgcatgtcaagagtatggtgaaaaatgtactcgatgggaagtttgatgaggcctgctctggcctaaagcaactctatgatttgggctactctcctactgacatcatcactaccctcttccgtgtcatcaagaactatgacatggctgaatatctgaagctggaactgctgaaggaaacgggatttgcgcacatgaggatctgtgatggcgttgggtcattccttcagctttctggccttctggccaaatttgctctggtgagagaaacagcaaaggcctaacgctgtgcagctgctctgacaccagttaacagtgttgtcatgcatagcctattttatcgctcctctgtcgtggtatctcagtgtgtaagatagttctttgctgaagtgaactatttatgcttgtttagcatcggagatgtagttgtagcctgtagtgactagtgaggagactgagtcctcgtagttcgagtactgctgtatttcggaactaatctgggtatttttcgggtcttttgtagtctattgagctgtcgtaccaccatcatgaaggaaccgtcagttatccaagtcaactgcatatcaattatggattggcagaaaatggattcatcatttccttgcatttttattttaggtctgaattttacagtccaactgtctgaatttatgaacagagtttacgcaaaaaaaaaaaaaaaa

SEQ ID NO: 3050 - protein, 340 aa, Triticum aestivum
  misc_feature: Ceres CLONE ID no. 704319
  misc_feature: Ceres CDNA ID no. 24766200
  misc_feature (58)..(78): Pfam Name: AAA_5 PFAM Desc: ATPase family associated with various cellular activities
  misc_feature: Homolog of GI Number: 15991286 NR Desc: replication factor C 40kDa subunit
  misc_feature: Homolog of GI Number: 12323266 NR Desc: replication factor
  misc_feature: Homolog of GI Number: 31563534 NR Desc: replication factor C 2
  misc_feature: Homolog of GI Number: 73957665 NR Desc:  similar to replication factor C 2
  misc_feature: Homolog of GI Number: 45382983 NR Desc: replication factor C/activator 1 subunit
  misc_feature: Homolog of GI Number: 76653716 NR Desc:  similar to replication factor C 2
  misc_feature: Homolog of GI Number: 11177922 NR Desc: replication factor C
  misc_feature: Homolog of GI Number: 51711469 NR Desc: similar to replication factor C
  misc_feature: Homolog of GI Number: 539678 NR Desc: replication factor C
  misc_feature: Homolog of GI Number: 76653722 NR Desc:  similar to replication factor C 2
MAAASSAAAASSAAAAPADTYDIPWVEKYRPSRVADVVGNADAVSRLEVIARDGNMPNLILSGPPGTGKTTSILALAHEMLGPSYREGVLELNASDDRGLDVVRNKIKMFAQKKVTLPPGRHKIVILDEADSMTTGAQQALRRTMEIYSNTTRFALACNTSSKIIEPIQSRCAIVRFSRLSDQEILGRLMVVVAAEKVPYVPEGLEAIIFTADGDMRQALNNLQATVSGFRFVNQENVFKVCDQPHPLHVKSMVKNVLDGKFDEACSGLKQLYDLGYSPTDIITTLFRVIKNYDMAEYLKLELLKETGFAHMRICDGVGSFLQLSGLLAKFALVRETAKA

SEQ ID NO: 3051 - DNA, 1146 bp, Triticum aestivum
  misc_feature: Ceres CLONE ID no. 704708
  misc_feature: Ceres CDNA ID no. 40351202
  CDS (162)..(803): REFERENCED BY SEQ ID NO: 3052
atcccagccctacctgccattttcctccgttcgttcatctccttcgcctcgccaccgtccctcctcctctcttccctccctcatccctcatctcgtgtcggctcgaaagtcgaaaccctagaccaaccaccctcccctagtacgtaggaacagggacagagatgtatgcagaccagatctccaccggccgcaagcgctccatccatgaccgccttgacgccgacctcccctccgaccgcggcggcgcggacgccgccggccgggctcgtaacgcgctgtccaagaggcaacgacaaactgatgataaatggaagcatgatctttaccgggatgatgaatcagcttcaagatcagttgatccacgggatttgcgattcaagcttcagaagaaaagctctcagcaagggtttgctggccaaaagggttccggggtacgtgatctacgtgagatgttatctggaacaatgcacgcacaaccatcaaatgttgaccctcaaaagaggaaaccggtgtcagaggttgtgaaagtcacaaggcgtgaaattgttgatgaaaggcctgtacgcctaagtaagaaagtatcaaaaccatcaacatccaagaagacttctcagccaaaggctgaaagtccactcgacagttttctgaaatcacttggacttgagaagtattctattaccttccaggcggaggaggttgacatggcggccctacgtcacatgactgaaagtgatctcaaggcgttgggcatcccgatgggtcctaggaagaagattacccttgccttggaatccagagcgtagggcaatgtccctggagtacaatgtagaaaagcagggagatgtggtaggtttttgctcatctgcaaatttggcatatcttggaaagcagtggtacaggtaaacaatgcggtgtctcttgtaatggcatgttgctgtaagattattagactgctgttgtttatctggtctgcatgctttcctggccagaccagctgatttaactgatgaggtatccgtgctgttgaagctgcggtgatgttctcgctgtatactattattatgccttttttttcattggaaactggcattattagagtaatagagttgagattcttcagttagtatttcaaaaaaaaaaaaaaaa

SEQ ID NO: 3052 - protein, 213 aa, Triticum aestivum
  misc_feature: Ceres CLONE ID no. 704708
  misc_feature: Ceres CDNA ID no. 40351202
  misc_feature (150)..(212): Pfam Name: SAM_2 PFAM Desc: SAM domain
MYADQISTGRKRSIHDRLDADLPSDRGGADAAGRARNALSKRQRQTDDKWKHDLYRDDESASRSVDPRDLRFKLQKKSSQQGFAGQKGSGVRDLREMLSGTMHAQPSNVDPQKRKPVSEVVKVTRREIVDERPVRLSKKVSKPSTSKKTSQPKAESPLDSFLKSLGLEKYSITFQAEEVDMAALRHMTESDLKALGIPMGPRKKITLALESRA

SEQ ID NO: 3053 - DNA, 1037 bp, Triticum aestivum
  misc_feature: Ceres CLONE ID no. 704877
  misc_feature: Ceres CDNA ID no. 40351203
  CDS (158)..(754): REFERENCED BY SEQ ID NO: 3054
aaaaacctcagtgtccttatcggtaaaagcttcgagtcgcgttaatccaaagcggttcataagaaacgcacatccgcctcccctgtttctccagcttcgaggtattccaaccagagcagagagagcagggcgcgagaggctgcaagcggccgccgccatggagaacgagttccaggatggcaaggaggaggtcatccaagcatggtacatggatgacagtgaggaggaccagaggcttcctcatcaccgtgagcccaaagagttcattcctcttgccaaactttcagaattgggtgttgtaagctggaacctgaatgctgatgactgggagaaagacgagaatctcaagaaaatccgtgaggccaggggatactcttatgtggacatttgcgacgtatgtccagagaagttgccaaactatgaggccaagctgaagaacttctttgaagagcacttgcatactgatgaagagatacgctattgtctcgagggcagtggatactttgatgtgagggaccaaaacgaacagtggatccgtatagcagttaagaaaggtggcatgattgttttgcctgcaggaatgtatcaccgctttacattggatagtgacaactacatcaaggcaatgcggctctttgtgggagagcctatctggacgccatacaatcgtccccatgaccatctcccagccagaaaggagtacgtcgacaagattatcaacagaggtgggaaccaaaccgtcgaagctcgttgacggcttctagtgttcggcagcgagcgtgtcttctgtatgtatctacatatcacaccaaaagttactgaataagatgtgtgattggctttcgccgtgtgctcgtaccagcatcgatcctgtatcacttgtgtggttagtttgcaacatacccgttcgaaaatctttgctgaaacttcttcgcctggcgatgatgcctgtattgaataataatgatccagtgtcagcaatggtgtgacgaaaacatattcatgttcgtctaaatccctgaaaaaaaaaaaaaaaa

SEQ ID NO: 3054 - protein, 198 aa, Triticum aestivum
  misc_feature: Ceres CLONE ID no. 704877
  misc_feature: Ceres CDNA ID no. 40351203
  misc_feature (14)..(168): Pfam Name: ARD PFAM Desc: ARD/ARD' family
MENEFQDGKEEVIQAWYMDDSEEDQRLPHHREPKEFIPLAKLSELGVVSWNLNADDWEKDENLKKIREARGYSYVDICDVCPEKLPNYEAKLKNFFEEHLHTDEEIRYCLEGSGYFDVRDQNEQWIRIAVKKGGMIVLPAGMYHRFTLDSDNYIKAMRLFVGEPIWTPYNRPHDHLPARKEYVDKIINRGGNQTVEAR

SEQ ID NO: 3055 - DNA, 1475 bp, Triticum aestivum
  misc_feature: Ceres CLONE ID no. 704949
  misc_feature: Ceres CDNA ID no. 40351204
  CDS (142)..(942): REFERENCED BY SEQ ID NO: 3056
atccgtccatatatcgcttcttccgccgctccgcttcccttccacgcgcaccaaccgccgcctgctcttcgattcccccgaggccccagcaggagcagcaaccccttcttctgcttcttgttcttggtgcggtgcgcgggcatggccatcgaccacgagtcgcccttcaaggagctccgcctcaagaacaggaggatcatgggaggcggcgcccctgagccggacgaagaggaggcggaggcgcaggtggcggcggcggcgggggaggaggagcagtggccgcagtggctgcgcccgctgctgtccgcgcgcttcttcgcgcaatgcaagacgcacaccgagtcgcaccggagcggcgagtgcaacatgttctgcctcgactgcgccgccggggcggccgccggcgcggcggcgctctgctcgctgtgcctcgcgcacgcgcaccgcggccaccacaccatccagatccgccgctcctcctaccacgacgtcatccgggtgtcggacatccagcgcttcatggacatcgccggcgtgcagacctacgtcatcaacagcgcgcgcgtcgtcttcctcaacgagcgcccccagcagaagcagcccggcaaggccggcggcggcgccggcggcgccaacctctgcgaggtctgcagccgcagcctcctcgacaacttccgcttctgctccctcggctgcaaggtcgccggctgctcctccgacgggggcggcaacgacaaggcgaggatgatgcgggccagcaggcccggccgcgccaagggctcgtcggactccgaggcggcctcctcctcctctcctctgcgcaatgccgccaggcagagcttcacgccgtccacgccgccgccgcctccgcctccagcggccaagcggcgcaagggcatcccgcaccgcgcgccgttcggcaacctcatcatcgactgctaggcgcgcaccaccccgccattgacaaagctgcgacccacacgcccagttgcagagtgaatggagcgagaaagcggccaccacttcggtgcccgccattgccttcggttgtgcttctcgatgtggattccaccattagcttttcagggagaaagcaggcaggcaagaaagggaggtggatggatggaaacacagctgaaaaagcaccagccttttcttactgcttataatcatcatcatcatcactaggacagaaaccaaaaattaccacaccacagagagattactgtatatgattatggccctgctctactatttctaccacactagacttgagttttgtgataaatgttttgaggtaataccaggcaatgcgccagtggtcagctagctagagtaataagcaattgccacttgttaatcaggttttgtgatagcttgtgctttcttcatctgtaaatatggagtgctgggagaggatgactgcttgttagaaaatatggtgttgctcaaccttcagaaaaaaaaaaaaaaaa

SEQ ID NO: 3056 - protein, 266 aa, Triticum aestivum
  misc_feature: Ceres CLONE ID no. 704949
  misc_feature: Ceres CDNA ID no. 40351204
MAIDHESPFKELRLKNRRIMGGGAPEPDEEEAEAQVAAAAGEEEQWPQWLRPLLSARFFAQCKTHTESHRSGECNMFCLDCAAGAAAGAAALCSLCLAHAHRGHHTIQIRRSSYHDVIRVSDIQRFMDIAGVQTYVINSARVVFLNERPQQKQPGKAGGGAGGANLCEVCSRSLLDNFRFCSLGCKVAGCSSDGGGNDKARMMRASRPGRAKGSSDSEAASSSSPLRNAARQSFTPSTPPPPPPPAAKRRKGIPHRAPFGNLIIDC

SEQ ID NO: 3057 - DNA, 1500 bp, Triticum aestivum
  misc_feature: Ceres CLONE ID no. 704970
  misc_feature: Ceres CDNA ID no. 40351205
  CDS (150)..(1325): REFERENCED BY SEQ ID NO: 3058
aaatcacaacccccaattcttccccctccacccacccagcatatctctctattcctatttattagcacccctcacattaccttgtgtcaccaactactttgactcctttaccataccattacaataattatcaaacctaaccagtaaaaatggtgaccgtggaggaaatccgcaacgctcagcgttcccatggacccgccaccatcttggccttcggcaccgccacgccgtccaactgcgtctcccaagccgattaccctgactactacttccgcattaccaacagcgaacacatgactgatctcaaagaaaagttcaagcgcatgtgtgaaaagtccatgataaagaagcgatacatgcacctgacggaggagtttctgaaagagaacccgaacatgtgcgagtacatggcgccatcgctggacgtgagacaagacgtagtggtgatggaggtgccgaagctgggaaaacaagccgcaacgaaagcgattaaggagtggggtcaaccaaagtcaaagatcacacaccttgtgttctgcaccacttcaggcgtggacatgcccggagcagattaccagctcacgaagcttctcggcctgaggccctccgtgaagcgcctcatgatgtatcagcagggctgcttcgccggcggcaccgtactccgcctcgcgaaggacctcgccgagaacaacaagggtgcgagggtgctcgttgtctgctccgagataaccgccgtgacgttccgcggcccctcggacacgcacctcgactcgctcgtgggacaggcactgttcggagatggcgccgcagcgttgatcatcggatcagaccccgacccagcagtggagcggccgatattcgagatgatatcggccgcccagacaatcctgcccgactctgacggtgctatagatgggcaccttcgggaggtgggactcacgttccacctcttgaaagatgtgcccgggatcatctcgaagaacattgagaagagtcttgttgaagcttttgagcccatcgggatcagcgactggaactctatcttctggatcgcacatcccggtggtcccgcgatcctcgatcaagtcgaggagaagctccggctcaagccggagaaactccagtccacccggcatgtgctgagtgagtacggaaacatgtcaagcgcgtgtgttttgttcattctggatgaaatgaggaagaagtctaaggaggaagggaagagtaccactggagaagggttagagtggggggtgctattcggattcgggccgggtctaaccgttgagaccgttgttcttcacagtgttcccttggagggataaatcatgctgatgcggtgactagtgatttaagagtgatcaataaggaaccctcggaaataccagggaaagtttgttattattactagtttcacttgtggatttatcgtagcataatgttgtacaagaataatttaatatgaacaagatcgtgtgtttgtcaaaaaaaaaaaaaaaa

SEQ ID NO: 3058 - protein, 391 aa, Triticum aestivum
  misc_feature: Ceres CLONE ID no. 704970
  misc_feature: Ceres CDNA ID no. 40351205
  misc_feature (2)..(228): Pfam Name: Chal_sti_synt_N PFAM Desc: Chalcone and stilbene synthases
  misc_feature (238)..(388): Pfam Name: Chal_sti_synt_C PFAM Desc: Chalcone and stilbene synthases
MVTVEEIRNAQRSHGPATILAFGTATPSNCVSQADYPDYYFRITNSEHMTDLKEKFKRMCEKSMIKKRYMHLTEEFLKENPNMCEYMAPSLDVRQDVVVMEVPKLGKQAATKAIKEWGQPKSKITHLVFCTTSGVDMPGADYQLTKLLGLRPSVKRLMMYQQGCFAGGTVLRLAKDLAENNKGARVLVVCSEITAVTFRGPSDTHLDSLVGQALFGDGAAALIIGSDPDPAVERPIFEMISAAQTILPDSDGAIDGHLREVGLTFHLLKDVPGIISKNIEKSLVEAFEPIGISDWNSIFWIAHPGGPAILDQVEEKLRLKPEKLQSTRHVLSEYGNMSSACVLFILDEMRKKSKEEGKSTTGEGLEWGVLFGFGPGLTVETVVLHSVPLEG

SEQ ID NO: 3059 - DNA, 1367 bp, Triticum aestivum
  misc_feature: Ceres CLONE ID no. 705103
  misc_feature: Ceres CDNA ID no. 40351206
  CDS (96)..(1028): REFERENCED BY SEQ ID NO: 3060
agtcagccattccccaaatccatccgtccgtccgtccgtccgtcgccttaaaccctagccgcccctcctccgactcgccgccgccgccggttgccatggagttctggggccttgaggttaagcctaaccagtccgtcaaggtttcacctgatgatgaccacttcctccatctctcccagggtgcccttggcgaagtcaagaaggatgacaaggcaaccatgttcgtcaagatcggcgaccagaagctagccatcgggaccctctctaccgacaagttccctcagatccagtttgacctcgtcttcgagaaggagtttgagctgtcacacaattccaagacatccagcgtcttcttctctggctacaaggttttccagcctgccgagggagatgagatggattttgattctgaggatgactctgaggaggaggaagagaagatcattccagcactcaccaaggaaaatggcaaacctgaagccaaggagcagaagaagcaggttaagattgacactgctgcgccttcaaagtcaaaggccgctgccaaggatgtgggaaaatctaagaaggatgatgacagcgatgatgatgatgacagtgatgaggatgacagcgaagatgactctggtgatgatggagcattgattcccatggaggatgattctgatgacagtgaggatggtgatgactcctctgatgatagcgaggatagctctgatgaggaggaagaagaaacacccaagaagcaagagactgggaagaagagggtggctggaagcgtgttgaagacccctgttactgacaagaaggccaagattgcaacaccgtcaggccagaagacaggtgacaagaagggagctgtccatgtggcgactccgcacccggccaagaaggcaggcaagaccccagcaaccagtgagaagtcgcccaagtctggagggtcggtcgcgtgcaagtcgtgcagcaagacattcaacagtgagggcgctctagcttcgcactccaaggccaagcatgaggccaagtagattaaaagaggaggatgctggctggctgcctcctatgagattatcgttatgctcctgtcctgtgttaggctatctactatatccttatgttgtcgtgcgtgttccctaccctacctttccttacctagcctcatccttatccttttggaagggaagggaaggcaaggcaagttaagggagaaaccgttgagctgttagtgatgatgagttgttgccgtgattcggaattggaattggttggtggaatgctatggttgctcgttttgaacgaatgattcctctgtggtttggtatgcaaatgctttatttttggctaaaaaaagaaaaaaaaaaaaaaaa

SEQ ID NO: 3060 - protein, 310 aa, Triticum aestivum
  misc_feature: Ceres CLONE ID no. 705103
  misc_feature: Ceres CDNA ID no. 40351206
MEFWGLEVKPNQSVKVSPDDDHFLHLSQGALGEVKKDDKATMFVKIGDQKLAIGTLSTDKFPQIQFDLVFEKEFELSHNSKTSSVFFSGYKVFQPAEGDEMDFDSEDDSEEEEEKIIPALTKENGKPEAKEQKKQVKIDTAAPSKSKAAAKDVGKSKKDDDSDDDDDSDEDDSEDDSGDDGALIPMEDDSDDSEDGDDSSDDSEDSSDEEEEETPKKQETGKKRVAGSVLKTPVTDKKAKIATPSGQKTGDKKGAVHVATPHPAKKAGKTPATSEKSPKSGGSVACKSCSKTFNSEGALASHSKAKHEAK

SEQ ID NO: 3061 - DNA, 1052 bp, Triticum aestivum
  misc_feature: Ceres CLONE ID no. 705113
  misc_feature: Ceres CDNA ID no. 35383269
  CDS (126)..(668): REFERENCED BY SEQ ID NO: 3062
cttccatttcaggcctccagcctccgatctataccccgatcgagcctcgccggacggaggcgccccccatgccacagccctagcggcgtcaatctcaccagcccaaaccccgccgcccgcccgccatgttcggcgtcgtgttcccggaccacaccttcccgctggacgccaccgccttcgcgcaggtcgcgccggcctcctggctcctcgacctctccacgctgtccctcccctccgcgccccgctccgccgtcgtcttcctgctcccgcccgccgcggccgcgctgcccccgggcaaggccgtcgccgtctactaccaggcggccgccaaccgccccttcgccttcctcggcgcgctcggccccgcgcgcccctccgccgccctccagctcccggaggccggggacgagccggagccccctgccgggcccgccaagctgggcgtcgccgtggaggacgccgccgcgctgccctcgccccccgacgagcagcgcgccgagcgcgtcgcgctccgcgtcggcgagaacctcttcaatttcatgcagtccttctgcgccgccgacggcggcaagctggtggtgcccacggatatcctggaccgctggttccgcaagttccaggagagggccaagaaggatcccacctatctgaaaagctttgacttctgaaaccaaagctttaggtattccttactccattcttaggttccttgggtgcgaattggtacaggaatgcttagtctcattgcagtactcctgtaccaattggtgcggagtaggagttacaagggcgacaccacctccctggtagtttaagatcgtgatctacaagaggggctgagagggagatgtcctaaaaagtgtagtgttcttgggcctcttagttcgtcagctatgagatctggtgttaattttcattgtttgtgcgagttcatgacgttgattgcagcataatatgaatatgccccggtgagatgtgtgctgatagaagcttgatgttaaatatattatccctttatggaaaaatgttgttttaagaaaaaaaaaaaaaaa

SEQ ID NO: 3062 - protein, 180 aa, Triticum aestivum
  misc_feature: Ceres CLONE ID no. 705113
  misc_feature: Ceres CDNA ID no. 35383269
  misc_feature: Homolog of GI Number: 2429362 NR Desc: proline rich protein
  misc_feature: Homolog of GI Number: 12018147 NR Desc: vegetative cell wall protein gp1
  misc_feature: Homolog of GI Number: 41400384 NR Desc: plus agglutinin
  misc_feature: Homolog of GI Number: 67987177 NR Desc: 4Fe
  misc_feature: Homolog of GI Number: 488731 NR Desc: chitinase
  misc_feature: Homolog of GI Number: 32422095 NR Desc: predicted protein
  misc_feature: Homolog of GI Number: 60678627 NR Desc: plus agglutinin
MFGVVFPDHTFPLDATAFAQVAPASWLLDLSTLSLPSAPRSAVVFLLPPAAAALPPGKAVAVYYQAAANRPFAFLGALGPARPSAALQLPEAGDEPEPPAGPAKLGVAVEDAAALPSPPDEQRAERVALRVGENLFNFMQSFCAADGGKLVVPTDILDRWFRKFQERAKKDPTYLKSFDF

SEQ ID NO: 3063 - DNA, 1452 bp, Triticum aestivum
  misc_feature: Ceres CLONE ID no. 705152
  misc_feature: Ceres CDNA ID no. 40351207
  CDS (71)..(1237): REFERENCED BY SEQ ID NO: 3064
atccatccaagccttttctttcctagctactacactttcattctttgcttcagaaaattaactagctaggatggtcagtgttgaagagatccgtaatgcacaacgtgcagagggccctgccactgtcatggctattggcaccgcaactcctccaaactgtgtcgatcagagtacctatcctgactattatttccgcatcaccaacagcgagcacatgaccgagctcaaagaaaaattcaagcgcatgtgtgataagtcaatgattaagaagcgatacatgtacttaaatgaagaaatcctgaaagagaatccgagtgtttgtgcttacatggcaccttcgttggatgcaaggcaagacatggtggttgtggaggtaccaaagttgggaaaagaggctgcaactaaggcaatcaaggaatggggtcaacccaagtccaagattacccatctcatcttttgcaccactagtggtgtcgacatgcctggtgctgattatcagctcactaaactattaggccttcgcccctccgtcaagcgttacatgatgtaccaacaaggctgctttgccggtggcacggtgcttcgtttggccaaagacctcgctgaaaacaacaagggtgctcgcgtgcttgtcgtttgttctgagatcaccgcagtcacattccgcggcccaactgacacccatcttgatagccttgtgggtcaagccttgtttggagatggtgcagccgctgtcattgttggatcagaccccttaccagttgaaaagcctttgtttcagcttgtctggactgcccagacaatccttccagacagtgaaggggctattgatggacaccttcgcgaagttggtctcactttccatctcctcaaggatgttcctggactcatctccaagaatattgagaaggccttggttgaagccttccaacccttgggaatctccgattacaattctatcttctggattgcacaccctggtggacccgcaattttggaccaagttgaggctaagttaggcttgaagcctgaaaaaatggaagctactagacatgtgctcagcgagtatggtaacatgtcaagtgcatgtgtgctattcatcttggatcaaatgaggaagaaatcaatagaaaatggacttggcacaaccggtgaaggccttgactggggtgtgctatttggtttcggccctggactcaccgttgagactgttgtgctccgcagtgtcactgtctaatccatatatcttgtgcaagaccaagtccttttctttcttattcattctttcatgttaagtttgaaaaatgtattctttctcttcctttttttccctgcttccctcacatgcttctttttttatatcagtaaataagaacatgttatattactattaatgcaattaagttttcacaaaattcatctataaaaaaaaaaagaaaaaaaaaaaaaaaa

SEQ ID NO: 3064 - protein, 388 aa, Triticum aestivum
  misc_feature: Ceres CLONE ID no. 705152
  misc_feature: Ceres CDNA ID no. 40351207
  misc_feature (2)..(228): Pfam Name: Chal_sti_synt_N PFAM Desc: Chalcone and stilbene synthases
  misc_feature (237)..(387): Pfam Name: Chal_sti_synt_C PFAM Desc: Chalcone and stilbene synthases
MVSVEEIRNAQRAEGPATVMAIGTATPPNCVDQSTYPDYYFRITNSEHMTELKEKFKRMCDKSMIKKRYMYLNEEILKENPSVCAYMAPSLDARQDMVVVEVPKLGKEAATKAIKEWGQPKSKITHLIFCTTSGVDMPGADYQLTKLLGLRPSVKRYMMYQQGCFAGGTVLRLAKDLAENNKGARVLVVCSEITAVTFRGPTDTHLDSLVGQALFGDGAAAVIVGSDPLPVEKPLFQLVWTAQTILPDSEGAIDGHLREVGLTFHLLKDVPGLISKNIEKALVEAFQPLGISDYNSIFWIAHPGGPAILDQVEAKLGLKPEKMEATRHVLSEYGNMSSACVLFILDQMRKKSIENGLGTTGEGLDWGVLFGFGPGLTVETVVLRSVTV

SEQ ID NO: 3065 - DNA, 766 bp, Triticum aestivum
  misc_feature: Ceres CLONE ID no. 705167
  misc_feature: Ceres CDNA ID no. 40351208
  CDS (85)..(588): REFERENCED BY SEQ ID NO: 3066
caccgcgcatttggctatcgcatttctcaggtgagcctcaggtttcagagcagcgaagcttcaagtgcgcatctgggtaccggcatggctggagagcaagcgttccaccggggaggcgtgcacgggggcggcagcgccatcgggccggactacatgcgggccatccgcggcgacgacgactactacggcgggcacggccagggccacaaccagccggcggccgtcaccctcgcgaagggagtggccgcggcggcggcggcggggtcgatgctgctcctgtcggccctgacgctgacgggcacggtgctggcgctgatcgtggcgacgccgctgctggtgctcttcagccccgtgctggtgcccgcggccatcgcggtgacgatgctgacggccgggttcgtgtcgtcgggggcgttcggcgcggcggcggtgggggtgctggcgtggatgtacaagtacctctcgcacgggacgtcctcgccgccgggggccgacacggtggaccacgcgggcgcgaagctggactccaaggcgcacgaggtgaagaactgggcgcagcatcgcctcgaccaggcccgaacgccgtagatgcgtcgtcattcgccctcctatgcgttaccagtgtgtgcgtgtgtgtgtggatcgacgcctctatatgtacggacgtgcctgcgagcggtgctacttaacaccgatgaataataagctgcatatctgctactcatcccctctggagagggagttaagagtaaaaaaaaaaaaaaaa

SEQ ID NO: 3066 - protein, 144 aa, Triticum aestivum
  misc_feature: Ceres CLONE ID no. 705167
  misc_feature: Ceres CDNA ID no. 40351208
  misc_feature (22)..(134): Pfam Name: Oleosin PFAM Desc: Oleosin
MRAIRGDDDYYGGHGQGHNQPAAVTLAKGVAAAAAAGSMLLLSALTLTGTVLALIVATPLLVLFSPVLVPAAIAVTMLTAGFVSSGAFGAAAVGVLAWMYKYLSHGTSSPPGADTVDHAGAKLDSKAHEVKNWAQHRLDQARTP

SEQ ID NO: 3067 - DNA, 1266 bp, Triticum aestivum
  misc_feature: Ceres CLONE ID no. 705219
  misc_feature: Ceres CDNA ID no. 24766280
  CDS (125)..(1030): REFERENCED BY SEQ ID NO: 3068
aaacccgctcgagatctatcccaattctcgacctcacatcccctgctcgactcgacttcgtttaaacccaaaccctaatctcgacagagcctaaaccctagctcgggcggcggcggcggcggtcatggacggcggcggaggcatggggcccgtcggcggcggggtgggaggcatggtgggacccgtcggcgtcggcggcgggggcggcgggagcgacgtggagctcgtcagcaaaacgctgcagttcgagcacaagctcttctacttcgatctgaaggagaacccgcgggggaggtacctcaagatctccgagaagacgtccaccacgcgctccaccatcatcgtgcccatcgccggcgtcgcctggttcctcgacctcttcgactattacatccgcaccgacgagcgcgacgtcttcagcaaggagctacgcctcgacactaaggtgttctacttcgatattggggagaacaagagaggccgctaccttaaggtttcggaggcatctgtcaatagaaaccgtagcacgataattgttccggctggtagctctggcgaagaaggttgggaagcatttaggaatgtactgttagaaatcaatgacgaagcttcccgactctatgttcttccaaatcatccaagtcagcaacacctggaacctccagagcgccttcctggcctttctgacgatgttggtgctggatttatagctgggcatggcagccaatctgcatctgtacccgaggtagacgttgatgggcctcctattgaagaatttagtggcatggggctgtctaaggtgataagggcagatcagaaaaggtttttctttgacctgggcagcaacaacaggggccattatttgaggatttccgaggtcgctggagctgatcgttcgtcgataatcttgccactttctggtttgaagcagttccatgagatggtgggacactttgtagatataatgaaggacagacttgaaggaatgacgggcgcgaacgtgcgcactgtcgagcccagccagagatgattagctcgaccttgtggcacttactgctgttatgcctcctctaggatttgtgtaagtgatgtggtgtgtggttgcgtagatcacgcagtattaattcgtctgatggggataataatgtttgatgtttagttttttctttcttctgaattccgtggcgaggattgatttgcttgggaccttttctgttgaggaataataagcagtataatgttcgtgggtgaaaaaaaaaaaaaaaa

SEQ ID NO: 3068 - protein, 301 aa, Triticum aestivum
  misc_feature: Ceres CLONE ID no. 705219
  misc_feature: Ceres CDNA ID no. 24766280
  misc_feature (31)..(281): Pfam Name: PurA PFAM Desc: PurA ssDNA and RNA
  misc_feature: Homolog of GI Number: 56783985 NR Desc: purine rich element binding protein B
  misc_feature: Homolog of GI Number: 20197621 NR Desc: putative purine
  misc_feature: Homolog of GI Number: 16930405 NR Desc: At2g32080/F22D22.17
  misc_feature: Homolog of GI Number: 31211141 NR Desc: ENSANGP00000016990
  misc_feature: Homolog of GI Number: 55240131 NR Desc: ENSANGP00000016990
  misc_feature: Homolog of GI Number: 75755796 NR Desc: TO4
  misc_feature: Homolog of GI Number: 72011228 NR Desc:  similar to CG1507
  misc_feature: Homolog of GI Number: 2460293 NR Desc: Pur
  misc_feature: Homolog of GI Number: 48140847 NR Desc: similar to ENSANGP00000016990
  misc_feature: Homolog of GI Number: 6755252 NR Desc: purine rich element binding protein B
MDGGGGMGPVGGGVGGMVGPVGVGGGGGGSDVELVSKTLQFEHKLFYFDLKENPRGRYLKISEKTSTTRSTIIVPIAGVAWFLDLFDYYIRTDERDVFSKELRLDTKVFYFDIGENKRGRYLKVSEASVNRNRSTIIVPAGSSGEEGWEAFRNVLLEINDEASRLYVLPNHPSQQHLEPPERLPGLSDDVGAGFIAGHGSQSASVPEVDVDGPPIEEFSGMGLSKVIRADQKRFFFDLGSNNRGHYLRISEVAGADRSSIILPLSGLKQFHEMVGHFVDIMKDRLEGMTGANVRTVEPSQR

SEQ ID NO: 3069 - DNA, 1109 bp, Triticum aestivum
  misc_feature: Ceres CLONE ID no. 705340
  misc_feature: Ceres CDNA ID no. 25445575
  CDS (114)..(800): REFERENCED BY SEQ ID NO: 3070
tcaccacaaacagctgatctgagtccacagcagagcaccattcttctcttccattctactcaacgcaaagtctcccgctgatcagatcgagcgctaggctgtcagatccatccatggccccctcccaagaagtcgccgccgccaccaaggagccgtccaccaacggcaacgggacacaggccgccgccgccccgaagaccaagacgccggcgctgaacgagcggatcctctcctccatcacccgccggtcggtggcggcgcacccgtggcacgacctggagatcggcccggacgcgcccacaatcttcaactgcgtgatcgagatccccaaggggagcaaggtcaagtacgagctggacaagaagacggggctcatcaaggtggaccgcgtgctctactcctccgtcgtctacccgcacaactacggcttcatcccgcgcaccctctgcgacgactccgaccccatcgacgtcctcgtcatcatgcaggagcccgtcgtccccgggtgcttcctccgggccaaggccatcggcctcatgcccatgatcgaccagggcgaggccgacgacaagatcatcgccgtctgcgccgacgaccccgagtaccgccacttcaacgacatcaaggagctgcccccgcaccgcctcgccgagatcagaagattcttcgaggactacaagaagaacgagaacaaggaggtggccgtcaacgacttcctgccgtcagaggacgcctacgaggccatccagcactccatggatctctatgccacctacatctgcgagggcctgagaaggtagatgatagatccggtgacgccatgccgcttgctgcaggatcgatgttgacgaaaaattactcgtgtcgagagcgttacctagctcatacaagtcataaacatacatacatacattcttgttttgtgttacctacctgcatacacaaatacacatactagtatatgatctgatcgcccaaagccttgcattaaggcagtagcagccagataaacagggcattctttccccagctaccttatgtaatacgatttcctggctgaatgaatatgagatgttggtatactttttccctgaaaaaaaaaaaaaaaa

SEQ ID NO: 3070 - protein, 228 aa, Triticum aestivum
  misc_feature: Ceres CLONE ID no. 705340
  misc_feature: Ceres CDNA ID no. 25445575
  misc_feature: null
  misc_feature: Useful for making plants with modulated nitrogen use efficiency
  misc_feature (66)..(220): Pfam Name: Pyrophosphatase PFAM Desc: Inorganic pyrophosphatase
  misc_feature: Homolog of GI Number: 50931109 NR Desc: putative inorganic pyrophosphatase
  misc_feature: Homolog of GI Number: 6729513 NR Desc: inorganic pyrophosphatase
  misc_feature: Homolog of GI Number: 21593570 NR Desc: inorganic pyrophosphatase
  misc_feature: Homolog of GI Number: 48927683 NR Desc: putative inorganic pyrophosphatase
  misc_feature: Homolog of GI Number: 21537232 NR Desc: soluble inorganic pyrophosphatase
  misc_feature: Homolog of GI Number: 6752884 NR Desc: soluble inorganic pyrophosphatase
  misc_feature: Homolog of GI Number: 20197320 NR Desc: putative inorganic pyrophosphatase
  misc_feature: Homolog of GI Number: 26451240 NR Desc: putative inorganic pyrophosphatase
  misc_feature: Homolog of GI Number: 534916 NR Desc: soluble inorganic pyrophosphatase
  misc_feature: Homolog of GI Number: 5669924 NR Desc: soluble inorganic pyrophosphatase
  misc_feature: Useful for making ornamental plants with modified flowers
  misc_feature: Useful for making plants with altered leaf shape eg curled leaves
MAPSQEVAAATKEPSTNGNGTQAAAAPKTKTPALNERILSSITRRSVAAHPWHDLEIGPDAPTIFNCVIEIPKGSKVKYELDKKTGLIKVDRVLYSSVVYPHNYGFIPRTLCDDSDPIDVLVIMQEPVVPGCFLRAKAIGLMPMIDQGEADDKIIAVCADDPEYRHFNDIKELPPHRLAEIRRFFEDYKKNENKEVAVNDFLPSEDAYEAIQHSMDLYATYICEGLRR

SEQ ID NO: 3071 - DNA, 1405 bp, Triticum aestivum
  misc_feature: Ceres CLONE ID no. 705364
  misc_feature: Ceres CDNA ID no. 24766281
  CDS (70)..(1071): REFERENCED BY SEQ ID NO: 3072
ctcccgccgctggcccggcaatttccccacttttccctccctccctccgctcaaccccaccccagcgctatggccgcctcctcctccgccgccgcccccgccgacacgtacgacatcccgtgggtggagaagtaccgccccagccgcgtcgccgatgtcgtcggcaacgccgacgccgtcagccgcctcgaggtcatcgcccgcgacggcaacatgcccaacctcatcctctccgggcctccggggaccgggaagacgacgagcatcctggcgctggcccacgagatgctcgggcccagctaccgcgagggagtgctcgagctcaacgcctcggacgacagggggcttgatgtggtgaggaacaagatcaagatgttcgcgcagaagaaggtcacactgccgcccggacggcacaagatcgtcatactggacgaggctgacagcatgacaacaggggcacagcaagcactgagaagaaccatggagatttattccaacaccacaagatttgctcttgcctgcaatacttcatctaaaatcattgaacccatccaaagtcgctgcgctattgtccggttctcgaggctttcagatcaggagatccttggccgccttatgatcgtggttgctgctgagaaggtcccttatgtgccagaaggtcttgaagccatcatttttactgctgatggtgacatgagacaagctttgaacaatttgcaagctacagtcagtgggttccgttttgttaatcaagaaaatgtgttcaaggtttgcgatcaaccacatcccttgcatgtcaagagtatggtgaaaaatgtactagatgggaagtttgatgaggcctgctctggcctaaagcaactctatgatttgggctactctcctactgacataatcactactctcttccgtgtcatcaagaactatgacatggctgaatttctgaagctggagttgctgaaggaaaccggatttgcgcacatgaggatctgtgacggcgtcgggtcattccttcagctttctggccttctggccaagtttgctctggtgagagaaacagcaaaggcctaacgctgtgcagctgctctgacatcagttaacagtgttgtcatgcatagcctgttttatcgctactctgtcgtggtatctcagtgtgtaagatagttcttcgctgaagtgaactatttatgcttgtttagcatcggagatatagttgtagcctgtagtgactagtgaggagactgagtcctcttagttcgagtgcttttagcccagccatccgtggttcacgcgctgctgtatttcggaactaatctgggtatttttcgggtcattttgtagtctattgagctgtcgtgccagcatcatgaaggaaccgtcagttatccgaaaaaaaaaaaaaaaa

SEQ ID NO: 3072 - protein, 333 aa, Triticum aestivum
  misc_feature: Ceres CLONE ID no. 705364
  misc_feature: Ceres CDNA ID no. 24766281
  misc_feature (51)..(71): Pfam Name: AAA_5 PFAM Desc: ATPase family associated with various cellular activities
  misc_feature: Homolog of GI Number: 15991286 NR Desc: replication factor C 40kDa subunit
  misc_feature: Homolog of GI Number: 12323266 NR Desc: replication factor
  misc_feature: Homolog of GI Number: 11177922 NR Desc: replication factor C
  misc_feature: Homolog of GI Number: 51711469 NR Desc: similar to replication factor C
  misc_feature: Homolog of GI Number: 73957665 NR Desc:  similar to replication factor C 2
  misc_feature: Homolog of GI Number: 31563534 NR Desc: replication factor C 2
  misc_feature: Homolog of GI Number: 45382983 NR Desc: replication factor C/activator 1 subunit
  misc_feature: Homolog of GI Number: 76653716 NR Desc:  similar to replication factor C 2
  misc_feature: Homolog of GI Number: 539678 NR Desc: replication factor C
  misc_feature: Homolog of GI Number: 76653722 NR Desc:  similar to replication factor C 2
MAASSSAAAPADTYDIPWVEKYRPSRVADVVGNADAVSRLEVIARDGNMPNLILSGPPGTGKTTSILALAHEMLGPSYREGVLELNASDDRGLDVVRNKIKMFAQKKVTLPPGRHKIVILDEADSMTTGAQQALRRTMEIYSNTTRFALACNTSSKIIEPIQSRCAIVRFSRLSDQEILGRLMIVVAAEKVPYVPEGLEAIIFTADGDMRQALNNLQATVSGFRFVNQENVFKVCDQPHPLHVKSMVKNVLDGKFDEACSGLKQLYDLGYSPTDIITTLFRVIKNYDMAEFLKLELLKETGFAHMRICDGVGSFLQLSGLLAKFALVRETAKA

SEQ ID NO: 3073 - DNA, 1654 bp, Triticum aestivum
  misc_feature: Ceres CLONE ID no. 705443
  misc_feature: Ceres CDNA ID no. 36569819
  CDS (275)..(1444): REFERENCED BY SEQ ID NO: 3074
gcacacagtttgcgccgccgctgccgccgtccgctctaccccaggtgagcacgcgctacaatccctcctgcctcttcgccgatctgccgctgccgaagccatcactttcgcgtagttccttcgcggaggtcatattctcccgctgttctagcgttcagcgttgagcgaccgggactccggcgcgtttggtatttgcagtttgcggctctaatggttgcagatctaatggtctcggctgtttctggcatcgcaggcaaggaagggaggagcggcgatgtcgcaccgcaagttcgagcacccgaggcacggttccctcggcttcctccccaggaagcgctgctctcgccaccgcggaaaggtgaagtccttccccaaggatgaccaacagaagccttgccacctcactgcctttctgggctacaaggctggaatgacccacattgttcgtgaggtcgagaagcccggatccaagctccacaagaaggaaacctgtgaggctgttaccatcattgagacccctcctctggtcattgttggtcttgtggcctatgtgaagaccccacgtggccttcgcactctcaactctgtctgggctcagcaccttagcgaagatgtgaggagaaggttctataagaactggtgcaagagcaagaagaaggcgttcacaaagtatgccctcaagtatgacagtgatgcaggcaagaaggaaatccagttgcagcttgagaaaatgaagaagtacgccactatagtccgtgttattgcccatactcagattaggaagatgaagggcttgaaacagaagaaggctcacctcatggagatccaggttaatggtggcaccatcgcagacaaggttgactatggctacaagttctttgagaaggaagtcccagttgaagcggtcttccagaaagatgaaatggttgacatcattggtgtcaccaagggtaaggggtacgaaggtgtcgtcactcgctggggtgtgacccgccttccccgcaagacccacaggggtctccgaaaggttgcctgtatcggtgcctggcatcctgctagggtttcctacactgttgctcgtgctggtcagaatggttaccaccaccgcacagagatgaacaaaaagatttacaagatgggcaagtctggacaggagtctcacgaggcctgcactgagtttgacaggactgagaaggacatcaccccgatgggtggcttccctcactatggtgtggtgaagggtgactacctcatgatcaagggctgctgtgtgggccccaagaagagagtggtgaccctccgccagtccctgttgaagcagacctcgcggttggcccttgaggagatcaagctcaagttcatcgacacctcatccaagttcgggcatggccggttccagaccactgacgagaagcagaagttctacggcaggctcaaggcttaggctgcgacagatcttatcccatagtgttaccagctttttttcttgctttgtggcagattgtttgggaaccggtttatgcattgcaattgcaactctgagctgctgcgaatgtttgaactgatgaggtttatgcattttgaacttaatagtaatgctatttgcatgccttcaaatttggaagcaaatgtttcagcaaaaaaaaaaaaaaaa

SEQ ID NO: 3074 - protein, 389 aa, Triticum aestivum
  misc_feature: Ceres CLONE ID no. 705443
  misc_feature: Ceres CDNA ID no. 36569819
  misc_feature (50)..(343): Pfam Name: Ribosomal_L3 PFAM Desc: Ribosomal protein L3
  misc_feature: Homolog of GI Number: 62655838 NR Desc:  similar to 60S ribosomal protein L3
  misc_feature: Homolog of GI Number: 55661371 NR Desc:  similar to ribosomal protein L3
  misc_feature: Homolog of GI Number: 40882439 NR Desc: RH62603p
  misc_feature: Homolog of GI Number: 40738798 NR Desc: RL3_NEUCR 60S ribosomal protein L3
  misc_feature: Homolog of GI Number: 23397228 NR Desc: putative ribosomal protein
  misc_feature: Homolog of GI Number: 13487800 NR Desc: putative ribosomal protein
  misc_feature: Homolog of GI Number: 166858 NR Desc: ribosomal protein
  misc_feature: Homolog of GI Number: 38327504 NR Desc: ribosomal protein L3
  misc_feature: Homolog of GI Number: 303853 NR Desc: ribosomal protein L3
  misc_feature: Homolog of GI Number: 33526922 NR Desc: ribosomal protein L3
MSHRKFEHPRHGSLGFLPRKRCSRHRGKVKSFPKDDQQKPCHLTAFLGYKAGMTHIVREVEKPGSKLHKKETCEAVTIIETPPLVIVGLVAYVKTPRGLRTLNSVWAQHLSEDVRRRFYKNWCKSKKKAFTKYALKYDSDAGKKEIQLQLEKMKKYATIVRVIAHTQIRKMKGLKQKKAHLMEIQVNGGTIADKVDYGYKFFEKEVPVEAVFQKDEMVDIIGVTKGKGYEGVVTRWGVTRLPRKTHRGLRKVACIGAWHPARVSYTVARAGQNGYHHRTEMNKKIYKMGKSGQESHEACTEFDRTEKDITPMGGFPHYGVVKGDYLMIKGCCVGPKKRVVTLRQSLLKQTSRLALEEIKLKFIDTSSKFGHGRFQTTDEKQKFYGRLKA

SEQ ID NO: 3075 - DNA, 660 bp, Zea mays
  misc_feature: Ceres CLONE ID no. 705554
  misc_feature: Ceres CDNA ID no. 25445899
  CDS (3)..(569): REFERENCED BY SEQ ID NO: 3076
atcgtccatccgtatttccgtcacaactcacaacccgagccccccaaacccgaagcagcaggagctcccctgaccttgctccgcctccgatcaaggaaaaggaagatgagctactacggccagcagccccccgtcggcgtcccgccgcagcaaggctacccggggaaggacggctacccgccagcggggtacccgccggccggctaccccccgccggcgcagggctacccgccgcagggctacccgcagcagggttacccacagcagggctacccgccgcagtacgcgcagccgcctccacagcagcagcagagcagcgggccttccttcatggaaggatgcttggctgccctctgctgctgctgcctcctggacgcctgcttctgacggaaccatccgtgccgggtccaacacggctgcaagtgaagcaaccagcttacggaagagctggaactgggccgtgctattctagctttgtcctgcgttatcgccctcttttctttttttttctctctctctctctctctgttatgagactactggtactctgtcgatgtcgattggattagactagggctggtgtgtattctgtggatgctccgtgtttctggtgggattcaagttcaaccctgggattattgcaaaaaaaaaaaaaaaaaa

SEQ ID NO: 3076 - protein, 93 aa, Zea mays
  misc_feature: Ceres CLONE ID no. 705554
  misc_feature: Ceres CDNA ID no. 25445899
  misc_feature: Homolog of GI Number: 50938779 NR Desc: adhesive/proline
  misc_feature: Homolog of GI Number: 21618167 NR Desc: adhesive/proline
  misc_feature: Homolog of GI Number: 42565788 NR Desc: proline
  misc_feature: Homolog of GI Number: 113965 NR Desc: Annexin A7
  misc_feature: Homolog of GI Number: 671859 NR Desc: annexin VII
  misc_feature: Homolog of GI Number: 167666 NR Desc: annexin VII
  misc_feature: Homolog of GI Number: 60473993 NR Desc: annexin VII
  misc_feature: Homolog of GI Number: 45511081 NR Desc: rhodopsin
MSYYGQQPPVGVPPQQGYPGKDGYPPAGYPPAGYPPPAQGYPPQGYPQQGYPQQGYPPQYAQPPPQQQQSSGPSFMEGCLAALCCCCLLDACF

SEQ ID NO: 3077 - DNA, 759 bp, Zea mays
  misc_feature: Ceres CLONE ID no. 706040
  misc_feature: Ceres CDNA ID no. 36698043
  CDS (55)..(522): REFERENCED BY SEQ ID NO: 3078
gtgacacttccaagaaccaaaaaagacgccaagtcgtccgttccagtggtagtaatggatgcactgaatccttcttcttccggcgcttctctgttcctcgccaatcttccctctcgcggcctcttctcttccaccgtcgtttcgtccaatccgggtgggatgcgggtctacgtatgcgatcatgatacctcaccaccagaaggtcaacatattaagacaaaccaacaaaacatactgattagatcactcaccctcaagaaacaaaggggtgattccagctcaaaggatggatctgatggttcaagaaagaggaatgctgaaaagggtttggaaagagcatcagccaagaaaacaaataaccaaataaattccagacaagagggatcaaacagtcaaacaaccactagggacttccacaacctgactgtagagaggcttcgtgctcttttgaaatctaaaggtctttcaaccaaaggaaagaaggaggagcttattactcgtctaaaagatgcaactggttaagcgtagcatggtggaaggaatactctgttcattaagcatccaaatgtaagagtagctagtgtttaatgtaacttaggatctggaactctaatatatataaacccagtgcaaattacagttacagttgaatattatcgttttggtgctactgtttcatgacaatcagcattaattatgttttttggtgcgtgaattatagagggcaacggtggctttcaagtaaaaaaaaaaaaaaaa

SEQ ID NO: 3078 - protein, 155 aa, Zea mays
  misc_feature: Ceres CLONE ID no. 706040
  misc_feature: Ceres CDNA ID no. 36698043
  misc_feature (120)..(154): Pfam Name: SAP PFAM Desc: SAP domain
  misc_feature: Homolog of GI Number: 42573780 NR Desc: SAP domain
MDALNPSSSGASLFLANLPSRGLFSSTVVSSNPGGMRVYVCDHDTSPPEGQHIKTNQQNILIRSLTLKKQRGDSSSKDGSDGSRKRNAEKGLERASAKKTNNQINSRQEGSNSQTTTRDFHNLTVERLRALLKSKGLSTKGKKEELITRLKDATG

SEQ ID NO: 3079 - DNA, 1429 bp, Triticum aestivum
  misc_feature: Ceres CLONE ID no. 706218
  misc_feature: Ceres CDNA ID no. 36582555
  CDS (89)..(1144): REFERENCED BY SEQ ID NO: 3080
aaattaattcggcagatcggcccgcccctccccaccagcgacacgacacacacagacacacgggagccgcacagcgcacctacccccgatggacgtgctcctcctggagaaggccctgctgggcctcttcgccgcggcggcggcggcgggcgtggtggtgcgccgcaggctgcagctcatgatgtacaacgacatgttccgcatcatgttcgaccgccgcttcgagagcaccgccgacccgctcttcaaccagctcaaggcgctcaacgccgagcgcagcatcctctcccagagcttcgactacaactacggcgacttcatccccgtcctccgccccttcctccgccgctacctcaaccgctgcaccaacctcaagaccaagcgcatgaaggtgttcgaggaccagttcgtccaaccgcgcaaggaggcgttggagaagacgggcgagatcaggtgcgccatggaccacatcctggaggccgagagaaagggcgagatcaaccatgacaacgtcctctacatcgtcgagaacatcaacgtcgcagccattgagacgacgctgtggtcgatcgagtggggcatcgcggagctggtgaaccacccggacatccagcagaagctgcgcgaggagatcgtcgccgtgctcggcgccggcgtggcggtgacggagcccgacctggagcgcctcccctacctgcagtccgtggtgaaggagacgctccgcctccgcatggccatcccgctcctcgtgccccacatgaacctcagcgacgccaagctcgccggctacgacatccccgccgagtccaagatcctcgtcaacgcctggttcctcgccaacgaccccaagcggtgggtgcgcgccgacgagttcaggcccgagcggttcctcgaggaggagaaggccgtcgaggcccacggcaacgacttccggttcgtgcccttcggcgtcggccgccggagctgccccgggatcatcctcgcgctgcccatcatcggcatcacgctcggacgcctggtgcagaacttccagctgctgccgccgcccgggcaggacaagatcgacaccaccgagaagcccgggcagttcagcaaccagatcctcaagcacgccaccatcgtctgcaagccactggaggcttaagaattttcgatgaacgacatggaggtttatggcatgcgtgcgtccacgctgatgcggggagatccatctatgcatgtgactttgtattttgcatttcttttttggtgttttgtagtagtataagtttaaattatttttttggtgttgggctatttgtcttcatgtgaggcgtcgtgttgtaaatttccatatataatgtgatgtaaaacttcttggctccaaaaaacgacatggttactcattttgcaatgcaaactccgagctggcccaaaaaaaaaaaaaaaa

SEQ ID NO: 3080 - protein, 351 aa, Triticum aestivum
  misc_feature: Ceres CLONE ID no. 706218
  misc_feature: Ceres CDNA ID no. 36582555
  misc_feature: The plant flowers significantly late compared to wild-type.
  misc_feature: The plant is abnormally small.
  misc_feature: Useful for making plants with modulated biomass
  misc_feature: Useful for making plants with modulated flowering time
  misc_feature (15)..(345): Pfam Name: p450 PFAM Desc: Cytochrome P450
  misc_feature: Homolog of GI Number: 31711916 NR Desc: At2g30490
  misc_feature: Homolog of GI Number: 51702531 NR Desc: Cinnamic acid 4
  misc_feature: Homolog of GI Number: 19864010 NR Desc: Trans
  misc_feature: Homolog of GI Number: 3915095 NR Desc: Trans
  misc_feature: Homolog of GI Number: 3915089 NR Desc: Trans
  misc_feature: Homolog of GI Number: 3915112 NR Desc: Trans
  misc_feature: Homolog of GI Number: 3915088 NR Desc: Trans
  misc_feature: Homolog of GI Number: 586082 NR Desc: Trans
  misc_feature: Homolog of GI Number: 44889626 NR Desc: cinammate 4
  misc_feature: Homolog of GI Number: 473229 NR Desc: cinnamate 4
MDVLLLEKALLGLFAAAAAAGVVVRRRLQLMMYNDMFRIMFDRRFESTADPLFNQLKALNAERSILSQSFDYNYGDFIPVLRPFLRRYLNRCTNLKTKRMKVFEDQFVQPRKEALEKTGEIRCAMDHILEAERKGEINHDNVLYIVENINVAAIETTLWSIEWGIAELVNHPDIQQKLREEIVAVLGAGVAVTEPDLERLPYLQSVVKETLRLRMAIPLLVPHMNLSDAKLAGYDIPAESKILVNAWFLANDPKRWVRADEFRPERFLEEEKAVEAHGNDFRFVPFGVGRRSCPGIILALPIIGITLGRLVQNFQLLPPPGQDKIDTTEKPGQFSNQILKHATIVCKPLEA

SEQ ID NO: 3081 - DNA, 1453 bp, Triticum aestivum
  misc_feature: Ceres CLONE ID no. 706223
  misc_feature: Ceres CDNA ID no. 24766282
  CDS (156)..(1019): REFERENCED BY SEQ ID NO: 3082
ctcttcctcctctcgccccccgccgccgccatcccttccttatagagacagcgtgtaggcgccgggcgagcaggccaccaccgcaaccctagccagccagcccgactaacgccgccggttggagaggactagctattgctgctcgagagagagagatgtcgtcgggacggtacatggcctactcgccctccccgtccaccacgccgcactccccgcgcatctccggcctccgcgcctcctccgccgccgtcgccgaccaggagaagtaccttgcggagctgctcgcggagcgccacaagctgaacccgttcgtcccagtgctccctcatagcatacggttgctgaatcaagaaattttacgtgtttccacactattggagaacgcctcccttttaaaccaaagtggctttgaacatggtagtccactaacatcgggaggattatattcaaatggagcagcaactgatatgaatggatggacatcagcatttcaatcagaaagttcatcagcttatagttggcttggagggtctcaaggcagctcatctggactaattgtcaagaaaacaatgagggttgatattccagtagacaaatatccaacatacaacttcgttggtcgcatccttggtcccagaggaaattccttgaagcgagtggaggcaactactgactgccgtgtgcttataagaggccggggtagcattaaagatccagctcgggaggaaatgatgcgtggaaagccaggatatgaacatctgaatgaacccctacatatattggtcgaggcagagctgcctgttgaaattattgatgctcgtctgatgcaagcccgcgagatccttgaggatctgttaaggccaatgcaggacgagtctcaggacttcttcaagaagcagcagctccgggagcttgcaatgctcaatggcaccctccgtgaggaagggatgcaaagatctggttccgcatcccctttccacaacagccttggaatgaagagggccaagacaagggggtaaaaggccacgagtaccatgggagaagcaatcatctgtcctgagacggaaactgagtatgcctatgggtttgccttcgtggctaatggcgcaaaaatggtctcgcaccgctagcgtcggagcagcccgtacttgataatacatatgcctggagtcgtgttcgctgctactggagaggtttggttatggcaagactgggtgtcgactgtcgagctatatatcgggttgtgcaagaaagtggtttgtgtattgctatgagctatgactggggttttgatttatggttcttgtgcttgtatttgaacttttgaagaatgttatctggttaagttatttgggattgaaatgatgttgtaatctgttacagttatagtattgcttaataatagatggatattgtaataaaaaaaaaaaaaaaaaaaaaaaaaaaaaaaaaa

SEQ ID NO: 3082 - protein, 287 aa, Triticum aestivum
  misc_feature: Ceres CLONE ID no. 706223
  misc_feature: Ceres CDNA ID no. 24766282
  misc_feature: Homolog of GI Number: 50912257 NR Desc: putative KH domain protein
  misc_feature: Homolog of GI Number: 24030184 NR Desc: putative RNA
  misc_feature: Homolog of GI Number: 19424087 NR Desc: putative RNA
  misc_feature: Homolog of GI Number: 56785233 NR Desc: QUAKING isoform 5
  misc_feature: Homolog of GI Number: 34900448 NR Desc: KH domain
  misc_feature: Homolog of GI Number: 54638712 NR Desc: GA10223
  misc_feature: Homolog of GI Number: 2190986 NR Desc: KH
  misc_feature: Homolog of GI Number: 17863060 NR Desc: SD10595p
  misc_feature: Homolog of GI Number: 1842047 NR Desc: muscle
  misc_feature: Homolog of GI Number: 1622930 NR Desc: putative RNA
  misc_feature: Useful for delaying flowering time
  misc_feature: Useful for increasing chlorophyll and photosynthetic capacity
  misc_feature: Useful for making ornamental plants with modified leaves
  misc_feature: Useful for making plants with increased biomass and foliage
  misc_feature: Useful for making shorter plants
MSSGRYMAYSPSPSTTPHSPRISGLRASSAAVADQEKYLAELLAERHKLNPFVPVLPHSIRLLNQEILRVSTLLENASLLNQSGFEHGSPLTSGGLYSNGAATDMNGWTSAFQSESSSAYSWLGGSQGSSSGLIVKKTMRVDIPVDKYPTYNFVGRILGPRGNSLKRVEATTDCRVLIRGRGSIKDPAREEMMRGKPGYEHLNEPLHILVEAELPVEIIDARLMQAREILEDLLRPMQDESQDFFKKQQLRELAMLNGTLREEGMQRSGSASPFHNSLGMKRAKTRG

SEQ ID NO: 3083 - DNA, 779 bp, Glycine max
  misc_feature: Ceres CLONE ID no. 706592
  misc_feature: Ceres CDNA ID no. 24766283
  CDS (193)..(684): REFERENCED BY SEQ ID NO: 3084
attgtttcctttccattgctgatatatgacaaaacacccgtagccatccaataagaccaccacacacacacacacacacatttcttcaaactcactcctttctttccattccctcactttcacacccacaagtcacacccacttggttccttcctccaccccattatttttttctctttttttgatccaaacatgtcctccacacacccaaaaaacccagcaacgacaacaacatccactactctcatcgtgctctcaattatactcctttgttttccgacaaccgcaaaaaccgacaaccctccatgcccttatccgtgttacccaccacccattggaacggttactcccaccactccttcaggtggttccactgttccaccagcaccacctcaacccggattactatatccaccaccttctgggaattacccttattaccccacaccaccttacggcggcggcggtcgtgttggcagcaacgacggtagcggtagcggtagtggtggttttggcagcccaccaccaccggaccctattctaccctactttccattctactacagaaagcctcctcacaagccagaagacaattcagcatcaacaaccactatgtacaaatggacagggatggttggtattactagtctattatcttcatctttgcttcttctctttgtataactctcatgaatcatgatcaaaatcttcatgtaatatctaaacagttaatttaatgcttgttaatttaatggtattttttaaaaaaaaaaaaaaaa

SEQ ID NO: 3084 - protein, 163 aa, Glycine max
  misc_feature: Ceres CLONE ID no. 706592
  misc_feature: Ceres CDNA ID no. 24766283
  misc_feature: Homolog of GI Number: 34894480 NR Desc: OJ1116_C07.3
  misc_feature: Homolog of GI Number: 37202016 NR Desc: At4g16140
  misc_feature: Homolog of GI Number: 52077531 NR Desc: extensin like protein
  misc_feature: Homolog of GI Number: 31792269 NR Desc: Probable Proline
  misc_feature: Homolog of GI Number: 15840514 NR Desc: proline
  misc_feature: Homolog of GI Number: 7442095 NR Desc: extensin CYC17 precursor
MSSTHPKNPATTTTSTTLIVLSIILLCFPTTAKTDNPPCPYPCYPPPIGTVTPTTPSGGSTVPPAPPQPGLLYPPPSGNYPYYPTPPYGGGGRVGSNDGSGSGSGGFGSPPPPDPILPYFPFYYRKPPHKPEDNSASTTTMYKWTGMVGITSLLSSSLLLLFV

SEQ ID NO: 3085 - DNA, 676 bp, Glycine max
  misc_feature: Ceres CLONE ID no. 706622
  misc_feature: Ceres CDNA ID no. 24766284
  CDS (101)..(523): REFERENCED BY SEQ ID NO: 3086
atccccaaatgccccatccaaaacgagacactgaacactgatactctcttcactctcagtgctatcagcaaggaaaaccagagtacccaaagaaaaactaatgatttcactacgaccctataacacatgtcttgaaacaacaacgtttctcttcaacccttcaaagcttggaatctctagacaaacccaaacatgcatgatagcacaaaggaaagcaacaccacgtagaatagaagtcaaatgcagtggtgcagaaaataagggtgagagaacgtttttgacactggaggaagctggtttggttgagatatcaggcttgagcacacatgaacgctttctatgccgtttaacgatatcgtcgttgaacttgctaagagtgatatcggagcaagaagggtgtccaattgaggagctcaatgctgccaagatatgtgattggttcctcaaagataagctcaaaagagaacagaacttaggctctgcggttcttcaatgggatgataattccgactacaaattttaattttctatttactacttgtttctttcttaagtcacgagttttctaggattatgttaatcgagaaaggggtgacaccttttttcggtattggattctaaaattcttatggtaaatgattcggattgttgacgctgctcaaaaaaaaaaaaaaaa

SEQ ID NO: 3086 - protein, 140 aa, Glycine max
  misc_feature: Ceres CLONE ID no. 706622
  misc_feature: Ceres CDNA ID no. 24766284
MISLRPYNTCLETTTFLFNPSKLGISRQTQTCMIAQRKATPRRIEVKCSGAENKGERTFLTLEEAGLVEISGLSTHERFLCRLTISSLNLLRVISEQEGCPIEELNAAKICDWFLKDKLKREQNLGSAVLQWDDNSDYKF

SEQ ID NO: 3087 - DNA, 574 bp, Glycine max
  misc_feature: Ceres CLONE ID no. 706632
  misc_feature: Ceres CDNA ID no. 24766285
  CDS (58)..(369): REFERENCED BY SEQ ID NO: 3088
acacagcactttgtctctagaaaataaatttccaaacagagaaggggcaacacaaaaatgaagaagggtctctcctttgtgctgctgctgatccttgtgatcatccactacaaggtagtcaacgccaacaacaacaactgtgttacagaggattgcctcattggtcatagtttggagtcagagttctcgtttggctcccatgtggcaagaatgctctatgatgtgagccaatctgtgtctggccaaacagggaatagcaacaatgctgctgttaattgtccagaaagcaatggttatcgtagctgcttgccatctcaaaacggtggtggccctaaccaaaattgcggtgattacaccaggacttgctaagaaatatattaccagcaggtatttcatttctgatttcaaggttgtcatattattgagattgtcataatctgaagatgcgtgtaataattgttgctgtcggttcatacttgtgttgtggatgtattattgtgtatcacatgtagtcttggttattaaatgttgataagaatagtattccattcgagatggaaaaaaaaaaaaaaaa

SEQ ID NO: 3088 - protein, 103 aa, Glycine max
  misc_feature: Ceres CLONE ID no. 706632
  misc_feature: Ceres CDNA ID no. 24766285
MKKGLSFVLLLILVIIHYKVVNANNNNCVTEDCLIGHSLESEFSFGSHVARMLYDVSQSVSGQTGNSNNAAVNCPESNGYRSCLPSQNGGGPNQNCGDYTRTC

SEQ ID NO: 3089 - DNA, 798 bp, Glycine max
  misc_feature: Ceres CLONE ID no. 706956
  misc_feature: Ceres CDNA ID no. 40041299
  CDS (64)..(582): REFERENCED BY SEQ ID NO: 3090
tttcccctttcttcttcttcttcttctctctaatttcatttccttgattatagctttcaattaatgggcttctacgctgaagatcctctctcaggcttgacaataggccaggccatatatgaggtagctctcatgattgcagttctgagatgggtcttgtgcttgatcttcagagtgatcaacgacagaagaacaacacaatccgacgagaccccaacaccagaaccatgttctcagatgacaagggacaaggacagcattcttttgctgacgactttcggagagattaaggagaggcttccagagacagaggagacgtgtgcggtgtgcctgagccagctgagcgtggaggacgaggttagggagctcatgaactgctaccacgtgttccacagagagtgcatagacagatggttggaacacgaacacgagaatcacagcgccacgtgtcctatctgcagggctcctttgctcagttcttcttgccaccacagctctgccacgtgtctgcctcctcctcagcctagttgggctgtggagagactcctctatctctttggagatgatctgcttccttgttagttacttgttttctttgtagattgtgcagaaaaaaaatagtttaggggattcattatttgttatgtttatcatctgagccttgtaattgttgcttgctgccacaaaataactaaactaagacacaaactagcttcctgtttgtgtgtgtgtatatacatatatttttcacatttgactaatattaatgttgcctttaatccaaaaaaaaaaaaaaaa

SEQ ID NO: 3090 - protein, 172 aa, Glycine max
  misc_feature: Ceres CLONE ID no. 706956
  misc_feature: Ceres CDNA ID no. 40041299
  misc_feature (86)..(132): Pfam Name: zf PFAM Desc: Zinc finger
  misc_feature: Homolog of GI Number: 50928191 NR Desc: OSJNBa0011J08.19
  misc_feature: Homolog of GI Number: 50253143 NR Desc: putative BRH1 RING finger protein
  misc_feature: Homolog of GI Number: 4689366 NR Desc: BRH1 RING finger protein
  misc_feature: Homolog of GI Number: 33589712 NR Desc: At1g63840/T12P18_14
  misc_feature: Homolog of GI Number: 72536737 NR Desc: At1g63840
  misc_feature: Homolog of GI Number: 72536735 NR Desc: At1g63840
  misc_feature: Homolog of GI Number: 21554155 NR Desc: RING zinc finger protein
  misc_feature: Homolog of GI Number: 28394017 NR Desc: putative RING zinc finger protein
  misc_feature: Homolog of GI Number: 34903920 NR Desc: OSJNBa0038J17.5
  misc_feature: Homolog of GI Number: 50928223 NR Desc: OSJNBa0064M23.12
MGFYAEDPLSGLTIGQAIYEVALMIAVLRWVLCLIFRVINDRRTTQSDETPTPEPCSQMTRDKDSILLLTTFGEIKERLPETEETCAVCLSQLSVEDEVRELMNCYHVFHRECIDRWLEHEHENHSATCPICRAPLLSSSCHHSSATCLPPPQPSWAVERLLYLFGDDLLPC

SEQ ID NO: 3091 - DNA, 1033 bp, Glycine max
  misc_feature: Ceres CLONE ID no. 707044
  misc_feature: Ceres CDNA ID no. 24766286
  CDS (234)..(746): REFERENCED BY SEQ ID NO: 3092
actcttgtactgtcttagatctcgtttctctcttcgactcgtccacactttgtcgtcgttcccaatcgcaggccatatcgccgggggcattcccgccgtatcatccttgcctcttaccgaacactgaaacggggaattactcaggagagcttcgcaatcccactaacagctgctacccgcggttttggttttttcgctagtatcaatctattcttcatccctgttgatcaagaatgcaattctttggggggtctgagattagtccttcacctcctgctccgacagcttcaggaaacaatggccatatgatgtatgtgttcaataggaatggtgtgtgcctgctctatagggagtggaatcgtcccttgcggacattggatgcccagcaagaccaaaagttaatgtttggtctacttttctctctgaagtcattaactgccaagatggaccccactagtgctgttgagaaaggaaaccttggtatgccacagttacctggccaaggttgttcatttcacagtttccgcactaatacgtacaaacttagtttcatggaaagtccttctggaataaagatcatcttggtgactcatcctagaactggtgatctacgggaatccttaaagtatatctacaatttgtatgttgaatatgttgtcaagaatccgctctatacacctggatctcctattaggtgtgagctgttcaatacaacgttggaccagtatgtgagaggcatttcatagatgctgagttgtttccaatcaatagtgtggtttttacgccttgttttgcatggtgtatgtgagaggcattgcatagaagccgagttgtttccattcaacactattgatgacttgtgtggtgtaacgccttgtttgtcatggtggtcactacattgttgttagtcagaaacttttagggagttttcttaagcttgagctgtaccttttttgttacagataacactagtgatactccattttaattgaatcctacaatttatgttgccctgttaaaaaaaaaaaaaaaa

SEQ ID NO: 3092 - protein, 170 aa, Glycine max
  misc_feature: Ceres CLONE ID no. 707044
  misc_feature: Ceres CDNA ID no. 24766286
  misc_feature (24)..(169): Pfam Name: Sybindin PFAM Desc: Sybindin
  misc_feature: Homolog of GI Number: 34914656 NR Desc: P0504D03.19
  misc_feature: Homolog of GI Number: 27672872 NR Desc: similar to MUM2 protein
  misc_feature: Homolog of GI Number: 49522147 NR Desc: MGC83988 protein
  misc_feature: Homolog of GI Number: 62901898 NR Desc: MUM2
  misc_feature: Homolog of GI Number: 49901436 NR Desc: Zgc:100969 protein
  misc_feature: Homolog of GI Number: 10864021 NR Desc: trafficking protein particle complex 1
  misc_feature: Homolog of GI Number: 56800279 NR Desc: novel Sybindin
  misc_feature: Homolog of GI Number: 73955586 NR Desc:  similar to trafficking protein particle complex 1 isoform 3
  misc_feature: Homolog of GI Number: 72071136 NR Desc:  similar to Trafficking protein particle complex subunit 1
  misc_feature: Homolog of GI Number: 55245063 NR Desc: ENSANGP00000018747
  misc_feature: Useful for delaying flowering time
  misc_feature: Useful for making plants with increased biomass and foliage
  misc_feature: Useful for making taller plants and plants with longer inflorescences
  misc_feature: Useful for sterility
MQFFGGSEISPSPPAPTASGNNGHMMYVFNRNGVCLLYREWNRPLRTLDAQQDQKLMFGLLFSLKSLTAKMDPTSAVEKGNLGMPQLPGQGCSFHSFRTNTYKLSFMESPSGIKIILVTHPRTGDLRESLKYIYNLYVEYVVKNPLYTPGSPIRCELFNTTLDQYVRGIS

SEQ ID NO: 3093 - DNA, 757 bp, Glycine max
  misc_feature: Ceres CLONE ID no. 707228
  misc_feature: Ceres CDNA ID no. 24766000
  CDS (96)..(482): REFERENCED BY SEQ ID NO: 3094
aaacccatcatcgctcccagaaagttgtatcggtttctcttcttaagttttcttcaccatctcaagattaagctttttgggttcattacaggaaaatgttgaaattcttgtcgagagtgaaaatcgagttcaacgcgttggacccgcgaacggcgtcgtgtatggagtttctggcgcaatgcaactcgcggaaggcgaaggagtcgaacccggcgtgcgaagtggaggtgaagcgcgtgagggaagagcgcgcgccgcagataacggtgacgttcgttaacggcgttgaggaagtgttcgacgcgacggcgacgccggctcagagcatacgaaacttgattctggaaaagggtcagcacctcgagacggagcagatgttccgcgaagctggggaaccctggcccgttgtcatccccgacgaggagctctcgcaaatcgcaccccctaccaaaccaaggaaagcagaagacaagaagcaataggcaatagctgaatattgttgagcttattaacggctatggattcttctgggttttgtcaccctttctcttgtttctttttggtgggagatatggcatctgattcctgctgttggtgctgcataccttgctgtatttcagcacttaattattgaatgcataactatgtatgagttgcacaataatgtaaggctctgaattgctaattttgaaactgtaatcttgtcatgattgtttttgcttagtttggtttccagaggataaaaaaaaaaaaaaaa

SEQ ID NO: 3094 - protein, 128 aa, Glycine max
  misc_feature: Ceres CLONE ID no. 707228
  misc_feature: Ceres CDNA ID no. 24766000
MLKFLSRVKIEFNALDPRTASCMEFLAQCNSRKAKESNPACEVEVKRVREERAPQITVTFVNGVEEVFDATATPAQSIRNLILEKGQHLETEQMFREAGEPWPVVIPDEELSQIAPPTKPRKAEDKKQ

SEQ ID NO: 3095 - DNA, 615 bp, Glycine max
  misc_feature: Ceres CLONE ID no. 707261
  misc_feature: Ceres CDNA ID no. 40041300
  CDS (149)..(451): REFERENCED BY SEQ ID NO: 3096
gaccaaacttggctacatcgtttgatattttgaagtctttgtgattgagaatgtcgtacactctgtgctttgctcccatttgttccttgaaatccacaaacagacctgggacaattgccggtaattcattacccaaaaggcttttgggatgaacgaagtgtgtcagaattctaaagttccaagctttcagtccttgaaggttaaggctacagaagataaaactacacaaagcaaaacaattaggagcattgtttgttctgattgtgatggaaatggtgcaaaatcatgtactcaatgcaaaggtactggagttaattctgtagatcacttcaatggacaatttaaagctggtggattgtgttggctatgcaggggaaaaaaggatattttgtgtggatcttgtaatggagctggctttcttggtggattcatgagcacatgtgatgattaaaagtttggctagattgaattcaaagattcctaacggttatacaaagagaaaaggatgtaggaatctgcttgttccttcgttggtctttttgcaatgtgtattaaataatgtattctgcagttttggtaataagattttgtcttaatccaaaaaaaaaaaaaaaa

SEQ ID NO: 3096 - protein, 100 aa, Glycine max
  misc_feature: Ceres CLONE ID no. 707261
  misc_feature: Ceres CDNA ID no. 40041300
  misc_feature: Homolog of GI Number: 13430174 NR Desc: putative chaperon P13.9
  misc_feature: Homolog of GI Number: 50725497 NR Desc: putative bundle sheath defective protein
  misc_feature: Homolog of GI Number: 4732091 NR Desc: bundle sheath defective protein 2
MNEVCQNSKVPSFQSLKVKATEDKTTQSKTIRSIVCSDCDGNGAKSCTQCKGTGVNSVDHFNGQFKAGGLCWLCRGKKDILCGSCNGAGFLGGFMSTCDD

SEQ ID NO: 3097 - DNA, 1001 bp, Glycine max
  misc_feature: Ceres CLONE ID no. 707667
  misc_feature: Ceres CDNA ID no. 40351209
  CDS (74)..(760): REFERENCED BY SEQ ID NO: 3098
ggtctccaccgacatctcttgtattctcttcacaatcccgtgatcccatttcgttccgttcacttcaatctcaatggccgataataagcaacccaatcacgaggaggcaagtcctcttctccaccagtcccaacccaaatccgaaccaccaacgccacctgagactcccgagtttcttctcggatggaccgctgatgggctcccgctgggccacggcagcgtcgtgggccagcccatgggccgcgccccttggaactcctccatctgcgcctgtctcggccaaaccgatcacttctgcagcagcgatctcgaagtttgtcttcttgggagtgtggctccttgcgtgctgtatggaagcaatgttgagagacttgaatctgctcctgggacatttgccaatcactgcttgccatattctggaatgtatataattggaaattcctgctttggttggaattgccttgcaccgtggttttcctatcctagccgtactgctattcgtcgcaggttcaatttagagggaagttgcgaagcacttaatagatcatgcggatgctgcggaagcattttggaagatgaggtgcagcgtgaacagtgtgagtcaacatgtgacttggcaactcatgtcttctgtcatgtatgtgctctttgtcaagaaggtcgtgagctccgtcgcaggttacctcatcctggctttaatgctcaaccagtactggttatgattcccccaggagagcagaccatgggacgtgaggcttgaaaatttcatccttcatcttggaagtgctattcatgcgtatattactgttgccttgtctctatataatttgatgttgttgaaccgtgttatgactttatcaaaagagggtcctgtattttttattttatttttattatgagaacatgaaacatcatcgtaatttctgtttgcttccctactgttttgtatcatatatagattggaatgatttgggagaaaaaaaacaaaaaaaaaaaaaaaa

SEQ ID NO: 3098 - protein, 228 aa, Glycine max
  misc_feature: Ceres CLONE ID no. 707667
  misc_feature: Ceres CDNA ID no. 40351209
  misc_feature (60)..(199): Pfam Name: PLAC8 PFAM Desc: PLAC8 family
MADNKQPNHEEASPLLHQSQPKSEPPTPPETPEFLLGWTADGLPLGHGSVVGQPMGRAPWNSSICACLGQTDHFCSSDLEVCLLGSVAPCVLYGSNVERLESAPGTFANHCLPYSGMYIIGNSCFGWNCLAPWFSYPSRTAIRRRFNLEGSCEALNRSCGCCGSILEDEVQREQCESTCDLATHVFCHVCALCQEGRELRRRLPHPGFNAQPVLVMIPPGEQTMGREA

SEQ ID NO: 3099 - DNA, 859 bp, Glycine max
  misc_feature: Ceres CLONE ID no. 707840
  misc_feature: Ceres CDNA ID no. 35383270
  CDS (114)..(584): REFERENCED BY SEQ ID NO: 3100
ttattcatttcattgttcatactcactcgcacctaactccgccatggcttctcttcccaccactttcgctataaccaaatctgggttttcaaattctggtttctgccttaacgatgtcagtgtttcaaaaatcatcctccataaacaaggtggaccactctctggtcaagatcaaaccatacaacttctctctcaatctaaatcgtcaagggaccatgcaaacatctttaaccagaaggcctctaacaattcaagctacgtatagtgatggtggaaggcccagcagtgctagtgtatttgttggtgggtttctcttgggaggattaatagttggtactcttggttgcgtgtatgcacctcagatcagcaaggccctagctggagctgacaggaaggagttaatgagaaaattgccaaagtttatatatgatgaagaaaaggctttagagaaaacccggaaagtactggctgagaagattgaacaactgaatgctgccatagatgatgtttctgctcagctaaggtcagaggaggcctcaaatggagtagctgtgaactctgatgaaattgaagctgccacatgagactgctgcagtgatgtcatggtacacaatcggctattactctgtccagtaaaaatcttgttggtacaaaatgtatttgaatttcttgtaatatctttctatttcttcttaataataaactaagttgttttctgtttttggccaccgctactgtgggtatatagtcgtactgtttttatggctgatttcttgtgttctattggccatttagttatagtgaaaagtttccatgattggcataatactggaatttctagttaaaaaaaaaaaaaaaa

SEQ ID NO: 3100 - protein, 156 aa, Glycine max
  misc_feature: Ceres CLONE ID no. 707840
  misc_feature: Ceres CDNA ID no. 35383270
MSVFQKSSSINKVDHSLVKIKPYNFSLNLNRQGTMQTSLTRRPLTIQATYSDGGRPSSASVFVGGFLLGGLIVGTLGCVYAPQISKALAGADRKELMRKLPKFIYDEEKALEKTRKVLAEKIEQLNAAIDDVSAQLRSEEASNGVAVNSDEIEAAT

SEQ ID NO: 3101 - DNA, 910 bp, Glycine max
  misc_feature: Ceres CLONE ID no. 707855
  misc_feature: Ceres CDNA ID no. 40041301
  CDS (106)..(687): REFERENCED BY SEQ ID NO: 3102
aattcaaagtattgtttgttttttgtttgttggtgcttacaccgggagaagaaagttcttggaaggaaggaagaagccaaaaggcaaagagacaccggcaccggcatgggtcaagcttttcggaagctatttgacaccttctttggcaacaccgagatgagggttgtgatgcttggtcttgatgctgctggcaaaacaactatactttacaagcttcacattggagaagttttatccactgttcctacaattggtttcaatgtggagaaagttcagtataaaaatgttattttcacagtttgggatgttggaggacaagagaaactaaggccactttggaggcactattttaacaacacagatggcctgatttatgttgttgatagcttggatcgtgagagaataggtaaagcaaagcaggaatttcagacaatcataaatgacccatttatgctcaatagtgtcatcttggtgtttgccaacaaacaagacctgagaggggcgatgacgccaatggaagtatgtgaaggactaggtctctttgatctaaagaatagaaaatggcacatacatggcacttgtgcactcaagggagatggtctttatgagggcctggactggttggcttcaacactgaaggaaagaaaagctgctggatactcttcaataggaacctcatccttctaatctaggtattttgtcattgaggaacgtgcagggtttggccagtttcattcaaggatgttgtaaaaaagtaatcaaattttttgagttacatttcgttacctctacagctgatgaattatatagatgctttgactttcaaggtgcttagatatgactttgcagtgtatagaagtttgggcatgatgaatgaaaatgaatttgagacccaaaaaaaaaaaaaaaa

SEQ ID NO: 3102 - protein, 193 aa, Glycine max
  misc_feature: Ceres CLONE ID no. 707855
  misc_feature: Ceres CDNA ID no. 40041301
  misc_feature: null
  misc_feature: Useful for making plants with altered terpenoid content
  misc_feature (4)..(177): Pfam Name: Arf PFAM Desc: ADP
  misc_feature: Homolog of GI Number: 58220034 NR Desc: ADP
  misc_feature: Homolog of GI Number: 6714424 NR Desc: putative ADP
  misc_feature: Homolog of GI Number: 21554981 NR Desc: ADP
  misc_feature: Homolog of GI Number: 50911799 NR Desc: putative ADP
  misc_feature: Homolog of GI Number: 37537196 NR Desc: putative ADP
  misc_feature: Homolog of GI Number: 51963840 NR Desc: PREDICTED P0576F08.9 gene product
  misc_feature: Homolog of GI Number: 34897926 NR Desc: putative ADP
  misc_feature: Homolog of GI Number: 78709066 NR Desc: ADP
  misc_feature: Homolog of GI Number: 3182915 NR Desc: ADP
  misc_feature: Homolog of GI Number: 32401087 NR Desc: ADP
  misc_feature: Useful for increasing seed/fruit yield or modifying fruit content
  misc_feature: Useful for making ornamental plants with modified leaves
  misc_feature: Useful for sterility
MGQAFRKLFDTFFGNTEMRVVMLGLDAAGKTTILYKLHIGEVLSTVPTIGFNVEKVQYKNVIFTVWDVGGQEKLRPLWRHYFNNTDGLIYVVDSLDRERIGKAKQEFQTIINDPFMLNSVILVFANKQDLRGAMTPMEVCEGLGLFDLKNRKWHIHGTCALKGDGLYEGLDWLASTLKERKAAGYSSIGTSSF

SEQ ID NO: 3103 - DNA, 1334 bp, Glycine max
  misc_feature: Ceres CLONE ID no. 707898
  misc_feature: Ceres CDNA ID no. 36582098
  CDS (67)..(996): REFERENCED BY SEQ ID NO: 3104
actcacacactctttcttaagttctcagaaaccttaaaaacaacaacgtaggagtgttcggaaaagatggctaagcaggaagtggtggaagggttcaagttcgagcagaggcacgggaaagaacgcgtgagagtggcgcgcgtgtggaagacgaggcaggggcagcacttcattgtggagtggcgcgtggggatcactctcttttcggattgcgtcaactcgtacctccgcgatgacaactctgacatcgttgctactgataccatgaaaaacaccgtgtatgcaaaagcaaaggaatgctctgacatactttctgccgaggagtttgctattctgcttgctaagcactttgtatcattttaccagaaggttactggtgctattgtgaatattgtggaaaaaccatgggagcgtgtcactgtggatggtcaacctcatgaacatggtttcaaacttgggtctgagaagcatacaacagaggcgatagtacaaaagtctggttcacttcagttgacttctggtattgaaggattgtcagtgttgaagacaacccagtctggttttgtgaatttcataagagacaagtacacagcacttcctgatacccgtgaaaggatggtagcaacagaagtaaccgcactgtggaggtattcgtatgaatcgctgtatagcctccctcagaagccgctttactttacagaaaagtatcaggaagtgaaaaaagttctggctgacactttttttggcccaccaaaagggggagtctatagcccatctgttcaaaacacactctacctgatggcaaaggccacactgaacaggtttcctgacatagcttatgtcagtctaaagttgccaaatcttcatttcatacctgtcaatatctcaaaccaggatggccctattgtgaagtttgaggatgatgtgtacttgccaacggatgagccacatgggtcaattcaagctagtttgagccgcctttggtcaaagctgtagaaactgcagaaactatggtgctcatcccttctggtggattgctagtgcagcctaaactagcaaacctggcctcagataatgctttccattaatgtgtcttgtaattctggtttttgttatctttatcttttgttttgtttcatgaagaactattatgcatgaataacttccaggagggatattctgtgggttgcaccaatgttaagctttttgtttctactattccaataatttcctagtgtccttgtggaatctgaaataagtcttactatgacgttgatgcaatgcttttttatggtcatataaagatggtcatactcgcaaaaaaaaaaaaaaaa

SEQ ID NO: 3104 - protein, 309 aa, Glycine max
  misc_feature: Ceres CLONE ID no. 707898
  misc_feature: Ceres CDNA ID no. 36582098
  misc_feature (13)..(142): Pfam Name: Uricase PFAM Desc: Uricase
  misc_feature: Homolog of GI Number: 6175091 NR Desc: Uricase II
  misc_feature: Homolog of GI Number: 549169 NR Desc: Uricase II isozyme 1
  misc_feature: Homolog of GI Number: 6136152 NR Desc: Uricase II isozyme 2
  misc_feature: Homolog of GI Number: 170031 NR Desc: nodulin 35
  misc_feature: Homolog of GI Number: 1944193 NR Desc: nodulin 35
  misc_feature: Homolog of GI Number: 81803 NR Desc: urate oxidase
  misc_feature: Homolog of GI Number: 1498172 NR Desc: uricase
  misc_feature: Homolog of GI Number: 432629 NR Desc: uricase II
  misc_feature: Homolog of GI Number: 170033 NR Desc: uricase II subunit
  misc_feature: Homolog of GI Number: 1498170 NR Desc: uricase
MAKQEVVEGFKFEQRHGKERVRVARVWKTRQGQHFIVEWRVGITLFSDCVNSYLRDDNSDIVATDTMKNTVYAKAKECSDILSAEEFAILLAKHFVSFYQKVTGAIVNIVEKPWERVTVDGQPHEHGFKLGSEKHTTEAIVQKSGSLQLTSGIEGLSVLKTTQSGFVNFIRDKYTALPDTRERMVATEVTALWRYSYESLYSLPQKPLYFTEKYQEVKKVLADTFFGPPKGGVYSPSVQNTLYLMAKATLNRFPDIAYVSLKLPNLHFIPVNISNQDGPIVKFEDDVYLPTDEPHGSIQASLSRLWSKL

SEQ ID NO: 3105 - DNA, 689 bp, Glycine max
  misc_feature: Ceres CLONE ID no. 707949
  misc_feature: Ceres CDNA ID no. 36580734
  CDS (64)..(450): REFERENCED BY SEQ ID NO: 3106
actcactctctctctctctcccgagagatcgatcaaaaaacagaaaatcaaagcctatcaccgatgccgccaccaacgcccctgagcagcgcctccgccgcgctccggcggcggctgcagcagtccctgcggacccgcggcggcgcggagtccgggccgagccggtggacgagccccggccacgaggagaggccgaaggggtacctcttcaatcggacccctccgcccccgggccagtcccgcaagtgggaggactgggagctcccctgctacgtcaccagcttcctcactatcgtcatcctcggcgtcggcctcaacgccaagcccgatctcaccatcgaaacctgggcccacgaaaaagccctcgagcgcctcaagatcgaaaactccctcgccgccgccgcaaccaataacaacagcgagtcgtcgtcctacgacgaatcggactgagtcgactcggatccgtccatgttaggttttgttaaaggaaaaacaaaaaaggtttcttcgctgtaataagggtatacaactcttggaatttgaactccttggttactcttatttttcttctgtgttttgaattttgaattgtgatgatgatgatgagattgttgactcgcttgatattgttgttattgactctttcttgaatgtggataaggcgttctgcgttaaaaaaaaaaaaaaaa

SEQ ID NO: 3106 - protein, 128 aa, Glycine max
  misc_feature: Ceres CLONE ID no. 707949
  misc_feature: Ceres CDNA ID no. 36580734
  misc_feature: Homolog of GI Number: 9858777 NR Desc: BAC19.9
  misc_feature: Homolog of GI Number: 73959074 NR Desc:  similar to serine/arginine repetitive matrix 2 isoform 2
  misc_feature: Homolog of GI Number: 61858096 NR Desc:  similar to mKIAA0324 protein
  misc_feature: Homolog of GI Number: 55740439 NR Desc: hydroxyproline
MPPPTPLSSASAALRRRLQQSLRTRGGAESGPSRWTSPGHEERPKGYLFNRTPPPPGQSRKWEDWELPCYVTSFLTIVILGVGLNAKPDLTIETWAHEKALERLKIENSLAAAATNNNSESSSYDESD

SEQ ID NO: 3107 - DNA, 615 bp, Glycine max
  misc_feature: Ceres CLONE ID no. 707974
  misc_feature: Ceres CDNA ID no. 40041302
  CDS (97)..(540): REFERENCED BY SEQ ID NO: 3108
atcttccactgccttaattgcttctacttctcactttaaccattttcataaaccaaagaaaaaagggtcactccttttttttcgttgtaacacaacatgtcttcctcagaaggtgtctttgaattgggaattgatttctcggaatcaaacaatgttcttctcatgtcactaatggaagaaacccaagaagaagagtactatggcgatgatagacttgtgaccatgattcagtcattggaggcagagatcactgacactgaaatgggtcaaatgtatgagatgggacacgtggatagtcaagattgctccacgtcagtcagtgatcctaatcaatgggttgacatggaattgatctcttccttgccttttgatgagatgaatgcatggatcccttgtggagatgacatgatggaacatgcagcaatggaatatgaagctgggcatgatatcaatgattttcaattgttttatggagttttcttggagcaacaatatagagagactaattatttggcacaagggtgtgatgcagtattatgaaattaattaaactgtagtttttatatatatgaaacagaagagaacttggattactttgtaaaaaaaaaaaaaaaa

SEQ ID NO: 3108 - protein, 147 aa, Glycine max
  misc_feature: Ceres CLONE ID no. 707974
  misc_feature: Ceres CDNA ID no. 40041302
MSSSEGVFELGIDFSESNNVLLMSLMEETQEEEYYGDDRLVTMIQSLEAEITDTEMGQMYEMGHVDSQDCSTSVSDPNQWVDMELISSLPFDEMNAWIPCGDDMMEHAAMEYEAGHDINDFQLFYGVFLEQQYRETNYLAQGCDAVL

SEQ ID NO: 3109 - DNA, 551 bp, Glycine max
  misc_feature: Ceres CLONE ID no. 708206
  misc_feature: Ceres CDNA ID no. 40351210
  CDS (100)..(432): REFERENCED BY SEQ ID NO: 3110
aactgaaaaccctgcctagaccaatatttgtgacgcaaacgcaagaagcaacgctttgagttcagcgaggaagtaggttgtggatattgatagaaacaaatgagatccgacgccttccaaacagctaacatttatcgccttcttctcaaggcagtcaagaaacatattgggaaggaagagaacaagagacattttatagaatttgtaacctcagagttccgtaacaaccgaaatttgtctgactgtgtggctatccaacagaaaataaagcttgctcgtgattatacttttcttcttaacagtgtacaccatcacaaggatttacttttttcatacaatattgccgtggataggtcagatgaagtaaaaaggactcttggaaaatctgcttctagtgttggtcttcagcttcccgaggtttatcagccataatgattggtagtgttcatttttgcatgcatggaacatgcctttgtactacactgtagattttggtggggtgactgtttcttctgaatgaaaaaaatggtttcacaaaaaaaaaaaaaaaa

SEQ ID NO: 3110 - protein, 110 aa, Glycine max
  misc_feature: Ceres CLONE ID no. 708206
  misc_feature: Ceres CDNA ID no. 40351210
MRSDAFQTANIYRLLLKAVKKHIGKEENKRHFIEFVTSEFRNNRNLSDCVAIQQKIKLARDYTFLLNSVHHHKDLLFSYNIAVDRSDEVKRTLGKSASSVGLQLPEVYQP

SEQ ID NO: 3111 - DNA, 968 bp, Glycine max
  misc_feature: Ceres CLONE ID no. 708591
  misc_feature: Ceres CDNA ID no. 35383271
  CDS (115)..(684): REFERENCED BY SEQ ID NO: 3112
attttattgaccatttactattatgtccggtgagcgttggtgaaaaaaacgttgaggctgagtgttattcttccctaaccttcgtctgaaaccctaaaacattgaatcttaagaatggaactgtcatggttgagtgccattctggtgggggctggttatctcgctttgggctacttcattggttctcagtatccccctcgtttcctcttctcacataaattatcgactaaacaaaaagatgcttcacttctcaatgacagcgacaataagaagaggaatactaagtccaaactcgaagacccccttgagattgaacaactcgctgaaattctcgatgattttaagatgatacttgttgtcaggaatgatcttaaaatgggtaaagggaagattgctgctcaatgcagtcatgcaacgttaggtctctataaaaagatccttcgtcgagcaccaaaggctttgaataggtgggagatgtctgcacagcctaaggtggttgtcaaaattgaatgtgaagaagatatgctggctttgcaagaaagagctaaatctctgaagttacctacccatatcacaattgatgctgggagaacacagattgcaccaaattccagaacagtgatggcaattcttggacctgttgaagtggtagatgaggtaacaggtggactgaaactactatagttttctgtcggatcaacttggtacattgcttaccatgaacctgagtgagtgttcatgaaggataacagattgaactaattatgggcctcgtgaagatttacgattaaatctttagttgacagtatgatgatgatgatgaaaacttctcttaggagatctggaatcatgtgtaattcagtttgtacgagatatattacggtgattctaggctcagtgcccaaaacttttattcatggtggtttcatgattggttttggaaggtatgtgcaaaaaaaaaaaaaaaa

SEQ ID NO: 3112 - protein, 189 aa, Glycine max
  misc_feature: Ceres CLONE ID no. 708591
  misc_feature: Ceres CDNA ID no. 35383271
  misc_feature: Homolog of GI Number: 50929249 NR Desc: OSJNBa0060D06.11
  misc_feature: Homolog of GI Number: 72006225 NR Desc:  similar to Bcl
  misc_feature: Homolog of GI Number: 7706351 NR Desc: Bcl
  misc_feature: Homolog of GI Number: 55646669 NR Desc:  similar to Peptidyl
  misc_feature: Homolog of GI Number: 57091197 NR Desc:  similar to Peptidyl
  misc_feature: Homolog of GI Number: 60650282 NR Desc: Bcl
  misc_feature: Homolog of GI Number: 72139543 NR Desc:  similar to protein i
  misc_feature: Homolog of GI Number: 61869638 NR Desc:  similar to Bcl
MELSWLSAILVGAGYLALGYFIGSQYPPRFLFSHKLSTKQKDASLLNDSDNKKRNTKSKLEDPLEIEQLAEILDDFKMILVVRNDLKMGKGKIAAQCSHATLGLYKKILRRAPKALNRWEMSAQPKVVVKIECEEDMLALQERAKSLKLPTHITIDAGRTQIAPNSRTVMAILGPVEVVDEVTGGLKLL

SEQ ID NO: 3113 - DNA, 1939 bp, Glycine max
  misc_feature: Ceres CLONE ID no. 708814
  misc_feature: Ceres CDNA ID no. 40041303
  CDS (195)..(1709): REFERENCED BY SEQ ID NO: 3114
gatgttgtgtttgttatctcaccatgtcgggtatgaaatgagaagaataagagtagcttggtctctttcgtttgaaacgacgagtttaattacacgcacggcgctttgatccttccttccttccttgatagttgctaccgtgcgagagagattggaagcgtgtggcactggcattcctttccggagcggagaagatgaccatcgacttggattcgatcgctcgccgagtcgaggttgataatcgcattcccatccgctattactatcagattgccgataacctcctcaagcaggcaactatctaccgggaggagcataatgtagttgacttgtacatcattctccttagatttttaagtttggtttctgaaactataccatatcatcgagattatcaagcttcactgcccaatgaaagagcagcatataagaagagatcgcgagctgtgttggatgagcttgaatctttgaagcccgaatttaaactccgggtggaaaaaatgaatgactcacatgtaaaagctctattgcctgaagaaaatggtttcaataaggctttgcagagttcagtgaattcatctttgcaatggccggctgtcaataaacagcctgctgcgggattcagttcacagtcttcatggaattatgataatatgttatctttagattcctggcctattgacaagcagtttcagaaactatctgttattctaccccctccaaataaggagactttgtccagacactcatttttaggaccaaatggccttcggggccaatggcttggacctagtgcggaaataaaggttcaatatccaagcagtggtgagctcacacaggccaaggattcaagcccgaatcaggctgggctatatgatcttgtggcaattaaagatggcgatcaaggaccagttacatccacaatggactcagttctctctttggatgatggaagatggttgcgtcctgctgtggagtcctgttctcctgttgtaactgaatcaagggaggaccccttacaattgctcaacatcaagcaacctttgccgcctcctattcttgctcaggtgtatccagaacgtgtccccattcctccttcaaaagttgcagatccaaggccaggaccagctaaatcgtctcatgattctagacttgatgcaactacatatcaacacctacatatacctgtcaaaatgatggaagagtttttaagattggcttcggaaaacacaaggaaaaacttggagacatgtggtgttcttgcagggtccctgaaaaaaagggtatttcatatcacaacacttataatcccaaagcaagaatcaacttcagactcgtgtcaaacattgaacgaagaagaaatatttgaagttcaagacagcttatcactttttcctttaggttggatacatacacacccatctcagacttgtttcatgtcttctgtggatctacacactcattactcataccagatcatgttaccagaggcaattgctattgtcatggcccctacagatactacaagtccacatggcatatttcatctgtctgatccgggtggtgtgtctgtcattcgtaactgtcagcaacgtggatttcatccccatgaggagcctgaggatggaactccaatatatgagcactgttctcatgtctatatgaatgctaacttgaagttcgatgttgttgaccttcgagagcgatgattgattgattcataaatcatcatatgagtgtgggctctctgatgaaagcagtgatttactttgcatcttttctaccagacgcgatatttaaaattgcattggtataggtggattcttttgtatttatgaatggagagaattactaattgccaattcctcgattttgtactatatctgtgaagcagtaaaaagatagttgtgtatatgatactttaaaaaaaaaaaaaaaa

SEQ ID NO: 3114 - protein, 504 aa, Glycine max
  misc_feature: Ceres CLONE ID no. 708814
  misc_feature: Ceres CDNA ID no. 40041303
  misc_feature (323)..(432): Pfam Name: Mov34 PFAM Desc: Mov34/MPN/PAD
  misc_feature: Homolog of GI Number: 56381981 NR Desc: At4g16144
  misc_feature: Homolog of GI Number: 34894964 NR Desc: B1088D01.3
  misc_feature: Homolog of GI Number: 56202279 NR Desc: STAM binding protein
  misc_feature: Homolog of GI Number: 34905406 NR Desc: B1111E11.23
  misc_feature: Homolog of GI Number: 55773965 NR Desc: ALM beta
  misc_feature: Homolog of GI Number: 50899960 NR Desc: putative associated molecule with the SH3 domain of STAM
  misc_feature: Homolog of GI Number: 60729637 NR Desc: AMSH
  misc_feature: Homolog of GI Number: 73996083 NR Desc:  similar to associated molecule with the SH3 domain of STAM
  misc_feature: Homolog of GI Number: 54637402 NR Desc: GA15312
MTIDLDSIARRVEVDNRIPIRYYYQIADNLLKQATIYREEHNVVDLYIILLRFLSLVSETIPYHRDYQASLPNERAAYKKRSRAVLDELESLKPEFKLRVEKMNDSHVKALLPEENGFNKALQSSVNSSLQWPAVNKQPAAGFSSQSSWNYDNMLSLDSWPIDKQFQKLSVILPPPNKETLSRHSFLGPNGLRGQWLGPSAEIKVQYPSSGELTQAKDSSPNQAGLYDLVAIKDGDQGPVTSTMDSVLSLDDGRWLRPAVESCSPVVTESREDPLQLLNIKQPLPPPILAQVYPERVPIPPSKVADPRPGPAKSSHDSRLDATTYQHLHIPVKMMEEFLRLASENTRKNLETCGVLAGSLKKRVFHITTLIIPKQESTSDSCQTLNEEEIFEVQDSLSLFPLGWIHTHPSQTCFMSSVDLHTHYSYQIMLPEAIAIVMAPTDTTSPHGIFHLSDPGGVSVIRNCQQRGFHPHEEPEDGTPIYEHCSHVYMNANLKFDVVDLRER

SEQ ID NO: 3115 - DNA, 599 bp, Glycine max
  misc_feature: Ceres CLONE ID no. 708835
  misc_feature: Ceres CDNA ID no. 29191342
  CDS (23)..(397): REFERENCED BY SEQ ID NO: 3116
atagactagagagagagttgcaatggccgtttctttggcagtgaaccgtcctctgcttggtcttcacgagaatgtaccattagctgttgctcatccccaattcctcccgttcaaatggccacccaagtccaaactcccctccgtcgtcggaattcgatgctcctcctcccctttcaacgacaaaaccctcatttccatcacacctaacacttcccacctcaatcccaaccctctcgcttgtcgctttcacgcttcccagtttggagaacaggagagcaacaaatacgtggaagcctatgctgtaggacgaaatattcgtatgtctgctaataaagctcggagagtgatcgatcagattcgtggacgtaaatatgacgggtggcaactacatcgctaactgcaagctgcttcgtgatctctctatctgtccacgtagtttgaaatgcatgtgttattggacaagcatcacctatgattcttgggtaggtctgtttgggtttaggtcttgtatacatgcctttatttgtaggcatttgtttaatgagttccacaaatttccaattatatattgaaatctatttataaaaaaaaaaaaaaaa

SEQ ID NO: 3116 - protein, 124 aa, Glycine max
  misc_feature: Ceres CLONE ID no. 708835
  misc_feature: Ceres CDNA ID no. 29191342
  misc_feature (93)..(117): Pfam Name: Ribosomal_L22 PFAM Desc: Ribosomal protein L22p/L17e
  misc_feature: Homolog of GI Number: 2738560 NR Desc: ribosomal protein L22
  misc_feature: Homolog of GI Number: 100064 NR Desc: ribosomal protein L22 precursor
  misc_feature: Homolog of GI Number: 552436 NR Desc: ribosomal protein CL22
MAVSLAVNRPLLGLHENVPLAVAHPQFLPFKWPPKSKLPSVVGIRCSSSPFNDKTLISITPNTSHLNPNPLACRFHASQFGEQESNKYVEAYAVGRNIRMSANKARRVIDQIRGRKYDGWQLHR

SEQ ID NO: 3117 - DNA, 467 bp, Glycine max
  misc_feature: Ceres CLONE ID no. 708955
  misc_feature: Ceres CDNA ID no. 40351211
  CDS (41)..(214): REFERENCED BY SEQ ID NO: 3118
ggaagtgcggaaaccctagtggtagtggagttgggtgagaatgggaatagcaggtaaggttggggattatgctttcaaggcattcaccgccactcttggagtcgccactatttacctcactgcaaccttctctgtcaacgtttacagaggcctctcttggcacaatgctcaaaccaaacttgataaacaagatgctgatgagcaagcaccgtgacttgatctcataagcccaccatcttaaatttcaaatcatgttgtgtagaaaaataatttaaagttgtataattccatgtaatgagccgtttctcggattgacttcaaatcaccgtttatctattccggttgtaacagcttttcgaggcagcatttaaatttcaaatattttttgatgcattttgttaaacatacgcgttgtatgaatctgttatgacttatatgggtccatttgttcaaaaaaaaaaaaaaaa

SEQ ID NO: 3118 - protein, 57 aa, Glycine max
  misc_feature: Ceres CLONE ID no. 708955
  misc_feature: Ceres CDNA ID no. 40351211
MGIAGKVGDYAFKAFTATLGVATIYLTATFSVNVYRGLSWHNAQTKLDKQDADEQAP

SEQ ID NO: 3119 - DNA, 1639 bp, Glycine max
  misc_feature: Ceres CLONE ID no. 709152
  misc_feature: Ceres CDNA ID no. 40351212
  CDS (420)..(1412): REFERENCED BY SEQ ID NO: 3120
aatcgaaaagaacatcttccatagagaaaacggacggggtggttatagttactcatcattctccattgctccattctccgcatacactcactacccgcttttctctctcaaacatcgtcgccgcccttccctccgattcatctccgtcggcctcgccgacacgaaaccgtagacgaataactccaacaattctcaggtttgaggcaatgccatcgccggcattgtaattgcgtgttcggtagatccgtcgccggcattgtaattgcgtgtgcggtagatccttcgccggcattgtaattgcgtgtgcggtagatccttcgccggcattttctttctttaatattttgagaggagcaccaggaatcgtttggcactaaagagaaagtgagagagggagatgaaataagttcgtactgaagatggcgtcgaggcaaatggaagagattcggaagaaattggctgaccttaattacccgagagcgaatgcccctgcacagtccctcctatttgctggcatggagcgctatgcccttctagagtggctcttctttcggcttttaggtgataagtcacccttttctcaacaaaacatacaaggggatggccttgatcgtgatgaggagacaggtcgaattcagtatttggctgagattgctaagtttctgggtattacaacaactgtagatacagatgccattcaggggcatggaagctatgaagaccgtactgcaatgcttcgtcttattgtagatctagtggacgcaacaatatgcgcagataatccagaatggagtgttgacgagcaggtagccaaggacatccaattaatagactccattgcagaaaaacaagctcaaatattttctgaagaatgtaaattgtttcctgcagatgttcagattcagtccatatatccattgccagatgtttctgagctggagttgaagttttctgaacaatcaaaaatattgttgaatcttcaacaaaaagttgatgacttggcatccaagcatgcttacaatcctgatgaggagtatactgaggtggaatcccaattgcgggcacatttggaatcttttctagaaacagctagaacattcaatttgatttacaccaaggaaattcgtccatggacacacatgatggaggttccgcaacttcatggatttggaccagctgccaatcgtttattggaggcctataaaatgcttttgaagtttttgggcaacctacggaatcttagggactcacatgcagcacttgccttcggttcttctgagacatccgacgggccttcatctgtcacacgaataatctctgaatgtgaatctgcattgacagtcttaaatcgtgatcttggaattctctctgcttccattgctcgtgaacaggtagagaagatgaacatttgacgaaacatgagaaacaagttattaatccttattcttttggattttgtgaacttgtgcataatgttcatattgttgacatgatgtgtgctgatgtgaagtcagcacggttgtcagactgggtctatgtaaacttgtggagggtctgaagtgtgacacatagacttcacttgtaaactgagaagagtatagctaatacaaaaatattattaaaaaaccaaaaaaaaaaa

SEQ ID NO: 3120 - protein, 330 aa, Glycine max; identical to SEQ ID NO: 1768
  misc_feature: Ceres CLONE ID no. 709152
  misc_feature: Ceres CDNA ID no. 40351212
  misc_feature (1)..(324): Pfam Name: Plant_NMP1 PFAM Desc: Plant nuclear matrix protein 1

SEQ ID NO: 3121 - DNA, 611 bp, Glycine max
  misc_feature: Ceres CLONE ID no. 709433
  misc_feature: Ceres CDNA ID no. 40351213
  CDS (91)..(408): REFERENCED BY SEQ ID NO: 3122
ctctctcttcattttctcttcactcttcacctatttttccccaaattgtacgcaccaaactcacacagatacgaggttgcaagaatcacaatgagtctggcatgtcttgtgtgccatagtgtggatagtccatcaccgtcacactctttcaggagttactctgtttcaagtgcagaaaatgaaggaagatgtcatgctgttgcaacctgcttaaccaggaaattatctcttccaccctctacatttcactcttttcttgcaccatcatcatcctccaaagtgaccccacaacctactggttcaagtaacaacttgatacctggtacaccgcggcttgtacgaagccgtgccgtgacaagggacagagtaagaaactggaattttgatgaaattgcaatggagtcctagtctaaactataagatagaataagactagggaattttcttgtgggatagtttatagcatgttattgctattttgcccctttgaattttgttatgggtgcaatttatctctttctctagttttctagtaaaagagtatgacatctgtagccatgaaaaaattctacggtgtgattctactttatttggcaaaaaaaaaaaaaaaa

SEQ ID NO: 3122 - protein, 105 aa, Glycine max
  misc_feature: Ceres CLONE ID no. 709433
  misc_feature: Ceres CDNA ID no. 40351213
MSLACLVCHSVDSPSPSHSFRSYSVSSAENEGRCHAVATCLTRKLSLPPSTFHSFLAPSSSSKVTPQPTGSSNNLIPGTPRLVRSRAVTRDRVRNWNFDEIAMES

SEQ ID NO: 3123 - DNA, 812 bp, Glycine max
  misc_feature: Ceres CLONE ID no. 709531
  misc_feature: Ceres CDNA ID no. 40351214
  CDS (148)..(465): REFERENCED BY SEQ ID NO: 3124
aaaattagaaagggggtttctttcacttcagatttggttaattagggttccgttggcgcgagctaagaacgaaggaagtagaagcagcaaaacccaatcaaagaccctcactctcaccccacacttcacgtaagtgaaaacggcaccatggacagcatagttgattctctgaataatgcctatcaagattttgttgttgcagcagcaaatgtgttggaagccaaagaaaatgctggttccattaaaacaacagcaaccgatactgctctagaaaactttaagcagaagtgggaattgtttagagtagcatgtgatcaagccgaggagtttgtggagtctgtgaagcaaaggataggatccgagtgtctggtggatgaggcaacaaggcctgtagcaggaaaacctggacaagctaccatgactggtcttcctcccatcagtgcagttcggttgctgttgttttaatggaaccagcattttctttggcttccaacacatttgctgctgcaacaacaaaatcttgataggcattattcagagaatcaagctcaccaccacccgaaaagccaatgctaagaagcgtcttcttcgggtttggcagaatgaagctgtcctcaaagcctgttctgccactcccaacgaacctcaacctacaccagtggctacaccagtggctagttaagttcaagcccacccatctcaatttcattacttttcttttcccttcccttcaaaaatattgtcactacttttagcttcatttacataattaaaaatcatctggaggaggttatgcaaaaaaaaaaaaaaaa

SEQ ID NO: 3124 - protein, 105 aa, Glycine max
  misc_feature: Ceres CLONE ID no. 709531
  misc_feature: Ceres CDNA ID no. 40351214
MDSIVDSLNNAYQDFVVAAANVLEAKENAGSIKTTATDTALENFKQKWELFRVACDQAEEFVESVKQRIGSECLVDEATRPVAGKPGQATMTGLPPISAVRLLLF

SEQ ID NO: 3125 - DNA, 483 bp, Glycine max
  misc_feature: Ceres CLONE ID no. 709721
  misc_feature: Ceres CDNA ID no. 24766001
  CDS (134)..(349): REFERENCED BY SEQ ID NO: 3126
aacaaacaacaatctctctcctacctttctcgtgtctcttttattcttgtaacacaccttctcttttctcctagaaattctgagagggtgagtggtttttttgagttttgatagagagcaatagaatagctacatggggaagctcgtcgagattcttgaccaaggggtcaggattgctgcaaggtttcactctaattgcccccaaacgggccgcaagtactaccaccctccatccctctccgacaaccacggccaccactaccacgctggtgccaccaccaccagcgccggcggagtcaaagaggccgtggcggctaggagcattgacataattctttattctgtttgacagaaccatattttttttgtattttttgttcgattcgatcattgcgaggccattcatacatgtaattttgagctcaagttgataccaattttaaattttacaaacacttttctatgttaaaaaaaaaaaaaaaa

SEQ ID NO: 3126 - protein, 71 aa, Glycine max
  misc_feature: Ceres CLONE ID no. 709721
  misc_feature: Ceres CDNA ID no. 24766001
MGKLVEILDQGVRIAARFHSNCPQTGRKYYHPPSLSDNHGHHYHAGATTTSAGGVKEAVAARSIDIILYSV

SEQ ID NO: 3127 - DNA, 1859 bp, Glycine max
  misc_feature: Ceres CLONE ID no. 709796
  misc_feature: Ceres CDNA ID no. 40351215
  CDS (74)..(1579): REFERENCED BY SEQ ID NO: 3128
gtattacaattagtctcagtccccaacgactggttctgttttctctctgctgcttcgattcattcacacaaccatgactagccttactaatggcgatgctggctccctcaacaaggtccccacgatcaagttcaccaagctcttcattaatggagacttcgttgactctctgtcaggaaagacatttgagacaatagatccaagaacaggagatgttatagcgaggataagcgagggagataaagaagacattgacattgctgttaaagcagcacgtcatgcatttgacaacggtccatggcctcgccttcccggctctgagagagcaagaatattgctgaaatgggcagaaataattgaggaaaacgcagaagaacttgcagcactagatgcgattgatgcggggaagttgtaccatatgtgtaggaatgtggaagttccagcagcggcaaacactcttcgttactatgctggtgcagccgataagattcatggagaggtgttgaaaatgtctcgagagttccatgcctatacattacttgaaccacttggtgttgtgggacacattactccctggaatttccccaataccatgttctacatcaaagtcgctccttctttagctgctggctgcaccatggtcctcaagcctgctgagcaaacacccctctctgctttgttttctgctcatcttgctaaattggctggaatcccagatggagtgatcaatgtagtgcctggatttggcccaactgctggtgctgcattaagctcacacatggatgttgataaggtcagctttaccggttcaacacaaacaggccgtgtgataatgcaggctgcagcaaagagtaacttgaaacaagtttcacttgaattaggaggcaagtcacccctcataatttttgatgatgcagatatagacaaagctactgagctagctctactaggcatcctatataacaagggagaagtttgtgttgcaagttcccgtgtgtttgttcaagaagggatctatgatgaatttgagaaaaaactggtggagaaggcaaaagcttgggtcgttggggatccctttgatcctaaagttcaacaaggccctcaggttgacaaggaacaatttgaaaaagttctttcatatattgagcatggaaagaaagaaggagctacccttttgaccgggggtaaaacagtggggaacaagggctactttattgagccgacaattttctccaatataagggaggatatgcttatagcacaggatgaaatatttggcccagtgatggcactgaagaagtttaagaccactgaggaagcaattaagagtgctaacaataccaagtatggcctagcagcaggcatagtgaccaagaatttggatacagcaaacacagtgtcaaggtctattcgggcaggcactatatggatcaactgctattttgcctttggcgatgatgttccctttggaggatataagatgagtggatttggaaaagatcatggattggaagcccttcacaagtacctacaagttaaatctgttgttactcccctttacaattctccctggctttgaatgtctactgcatggatcttggaaaatggtccattctggccatttcctatcaatttgcatctgccatgaggcatggaaattcagttcttgaacagtggtgtctattatattgtcaacaagctggccttttcctacttttcagtcatgctttaatagaaaatgtatggaagaaaaatagtaattttatttttgtttggtttgtaattaaaaggaaatatcaacacaatttaacttattgcttcaacagaatatatgaattgttagaaaaaaaaaaaaaaaa

SEQ ID NO: 3128 - protein, 501 aa, Glycine max
  misc_feature: Ceres CLONE ID no. 709796
  misc_feature: Ceres CDNA ID no. 40351215
  misc_feature (29)..(491): Pfam Name: Aldedh PFAM Desc: Aldehyde dehydrogenase family
MTSLTNGDAGSLNKVPTIKFTKLFINGDFVDSLSGKTFETIDPRTGDVIARISEGDKEDIDIAVKAARHAFDNGPWPRLPGSERARILLKWAEIIEENAEELAALDAIDAGKLYHMCRNVEVPAAANTLRYYAGAADKIHGEVLKMSREFHAYTLLEPLGVVGHITPWNFPNTMFYIKVAPSLAAGCTMVLKPAEQTPLSALFSAHLAKLAGIPDGVINVVPGFGPTAGAALSSHMDVDKVSFTGSTQTGRVIMQAAAKSNLKQVSLELGGKSPLIIFDDADIDKATELALLGILYNKGEVCVASSRVFVQEGIYDEFEKKLVEKAKAWVVGDPFDPKVQQGPQVDKEQFEKVLSYIEHGKKEGATLLTGGKTVGNKGYFIEPTIFSNIREDMLIAQDEIFGPVMALKKFKTTEEAIKSANNTKYGLAAGIVTKNLDTANTVSRSIRAGTIWINCYFAFGDDVPFGGYKMSGFGKDHGLEALHKYLQVKSVVTPLYNSPWL

SEQ ID NO: 3129 - DNA, 1752 bp, Glycine max
  misc_feature: Ceres CLONE ID no. 710076
  misc_feature: Ceres CDNA ID no. 40041304
  CDS (286)..(1398): REFERENCED BY SEQ ID NO: 3130
acgacggtgaatctctctctctctctctctctctctctctctctctctattcacaagattttttgtgcaaatcccttatcaccaatccctgcatttgcgataccatgttccctttgaatcgcatagaccgacccaccaaacctaactccaaaaagacctaatttttgcactcgttatagctacccaatagctttttgcaatctgggtcgaacccatttcgttttgtgctctctgggtcgaacccatttcgttttgtgctctctgggatcttatggtggagaaagcatggaggagattgaaggggtgaattgttgtagtgaaagtgaaagtaggagctccagtgtgactcgacctcccaatcccaacccaccttcgtatcgccaatgcaaacttgttcgccacgcttctctcaagatgaacacgaagttgtctgatgtatctgctgagccggagcatgtaactgaagattgtcagtctgatttctttccaatgcttcgttctggagcttgtactgatattggattccggtcaaatatggaagatgcatatgtttgtgttgacaattttatggaggattatggactcaagaaccatatagacggacccagtgctttctatggggtatttgatggacatgggggaaagcatgctgctgactttgcttgtcttcatctgccaaagttcattgttgatgacaaagatttccctagagatattgaaaggatagttgcttcagcatttctgcaagcagacaatgcctttgcagaagcttgctctctggatgccgcacttgcatctgggaccactgcattagctactcttgttataggaaggttgctggtggtggcaaatgcaggagattgccgagctgtgctgtgccgtcgtggaaaagcaattgaaatgtcaagagatcataaaccaggttgcaacaaagaaaagaagcgtatcgaggcatctggggggtatgtctacgatggatatctcaatggacaacttaatgttgctcgtgcacttggtgactggcacatggaaggaatgaagagcaaagacggtggaccactgactgcagaaccagaacttatgactacaaaactgactgccgaggacgaatttctcatcattggttgtgatgggatttgggatgtatttcggagccaaaatgcagtggattttgctcggcgcaggcttcaggagcataacgatccagccatgtgtagtaaggatctggttgacgaggctttaaagagaaaaagtggagacaatttggctgcagtcgtggtttgcttccagcagcaacctcctcctaacttggtggcaccacgctctagagtacaacggagcttctctgctgaaggtttgaaggagttgcaaagcttcctggacagcttgggtaactgagttggtacaactccttctgctttaattttctttttgaggtgagaattaagattcatttgtaattgtacgtgcaggctgagaggaaactttgactgtaacatatgcggcatctagtcgacatttaatttagtcattggatatttagaattactgtcattgctttattcttactacattttttgcatggtaaaaaccaatcaatacatagcttcagggcttgtgtggttctcacttctgactatgagccatgaggggcacttcctttgcggtttcgtgtgatgaatgatagttgctcttttctttaaaaaaaaaaaaaaaaaaaaaaaaaaaaaaaaaccaaaaaaaaaaaaaaaa

SEQ ID NO: 3130 - protein, 370 aa, Glycine max
  misc_feature: Ceres CLONE ID no. 710076
  misc_feature: Ceres CDNA ID no. 40041304
  misc_feature (70)..(327): Pfam Name: PP2C PFAM Desc: Protein phosphatase 2C
  misc_feature: Homolog of GI Number: 20146108 NR Desc: protein phosphatase 2C
  misc_feature: Homolog of GI Number: 21693562 NR Desc: DNA
  misc_feature: Homolog of GI Number: 50933583 NR Desc: putative DNA
  misc_feature: Homolog of GI Number: 51972144 NR Desc: At3g51470
  misc_feature: Homolog of GI Number: 51536570 NR Desc: At1g48040
  misc_feature: Homolog of GI Number: 79360914 NR Desc: catalytic/ protein phosphatase type 2C/ protein serine/threonine phosphatase
  misc_feature: Homolog of GI Number: 11994541 NR Desc: protein phosphatase 2C
  misc_feature: Homolog of GI Number: 33087518 NR Desc: putative serine/threonine phosphatase 2C ptc2
  misc_feature: Homolog of GI Number: 50748830 NR Desc:  similar to protein phosphatase 1A isoform 1
  misc_feature: Homolog of GI Number: 19075856 NR Desc: protein phosphatase 2c homolog 2
MEEIEGVNCCSESESRSSSVTRPPNPNPPSYRQCKLVRHASLKMNTKLSDVSAEPEHVTEDCQSDFFPMLRSGACTDIGFRSNMEDAYVCVDNFMEDYGLKNHIDGPSAFYGVFDGHGGKHAADFACLHLPKFIVDDKDFPRDIERIVASAFLQADNAFAEACSLDAALASGTTALATLVIGRLLVVANAGDCRAVLCRRGKAIEMSRDHKPGCNKEKKRIEASGGYVYDGYLNGQLNVARALGDWHMEGMKSKDGGPLTAEPELMTTKLTAEDEFLIIGCDGIWDVFRSQNAVDFARRRLQEHNDPAMCSKDLVDEALKRKSGDNLAAVVVCFQQQPPPNLVAPRSRVQRSFSAEGLKELQSFLDSLGN

SEQ ID NO: 3131 - DNA, 1280 bp, Glycine max
  misc_feature: Ceres CLONE ID no. 710165
  misc_feature: Ceres CDNA ID no. 25401747
  CDS (141)..(926): REFERENCED BY SEQ ID NO: 3132
aagcggtttttgttcctcctgctctctctgactctgtctcggtgcagcaaaaaccttccttcttcatcaattccacgaactcagacaacaaataattcattctttcaaatttcaattctaacatagaaataagaataaaaatgggttgtttcgccagcaaaaacgctgacaccaaggccagtagggctgcgcgttggcgatccacgggcattgttgctttgcgcgattccaaattaaagacgtttccggatgaaattcttgagttagacacatctgttcgcactcttgacttgacgcataatcggatagttgacattccggtggaaatcagcaaattaattaatgtacagcgcctgatattagcggagaacctcattgagagactgccagtgaatttggggaaactccaatctctgaaactgatgaacctggatggaaatcgaattacttccttgcctgatgaattgggccagttagtaaggctggaacgcatatccatctcagggaatttgttaacatccttgccagcaaccattggaagtttgagaaatctggtgcttttaaatgtgtcaaataacaagttacagtctcttccagaatctgttgggagttgcttctctttggaagaattacaagctaatgataatcttattgaagatcttccctctttggtgtgcaatctttctcacttgaagtcactttgcttggataacaataatgtgaagcagatacctctgaatttattgaaagactgcattgctcttcagaacatatcactgcatggtaatcctatatcaatggatcaatttcagcagatggaggggtttcaagagtttgaagcaaggaggaaaaagaagtttgacaaacaaattgattcaaatgtgatgatcggttccaaaggtcttgatgagggtgttgatctatgaagtgatcttaggcttgttgatggggtctttcagttgtacatttggatgagcttttggatgtagcgtggaatacaaggtgtcttatccatgccttttatttcacagatgaaataagtttgtggggatccttgtgtcacgttgtatattattgtttttttttgttaccctatccaagtttgcctacaaatgtgctggattgtagatgctggcattatacaggcattatacagcactagactaaatttccctatatggtatttgaagtcattttgttgataatgatatatgtatctcagcagctgtaaattaaaaaggcattgcattctttgcccaaaaaaaaaaaaaaaaaaaaaa

SEQ ID NO: 3132 - protein, 261 aa, Glycine max
  misc_feature: Ceres CLONE ID no. 710165
  misc_feature: Ceres CDNA ID no. 25401747
  misc_feature (45)..(67): Pfam Name: LRR_1 PFAM Desc: Leucine Rich Repeat
  misc_feature: Homolog of GI Number: 31432454 NR Desc: putative leucine
  misc_feature: Homolog of GI Number: 30684470 NR Desc: ubiquitin family protein
  misc_feature: Homolog of GI Number: 24215147 NR Desc: putative outermembrane protein
  misc_feature: Homolog of GI Number: 47937602 NR Desc: MGC80229 protein
  misc_feature: Homolog of GI Number: 45656721 NR Desc: putative lipoprotein
  misc_feature: Homolog of GI Number: 24215148 NR Desc: putative outermembrane protein
  misc_feature: Homolog of GI Number: 24215152 NR Desc: Leucine
  misc_feature: Homolog of GI Number: 50947559 NR Desc: putative PSR9
  misc_feature: Homolog of GI Number: 48837704 NR Desc: COG1100: GTPase SAR1 and related small G proteins
  misc_feature: Homolog of GI Number: 25149274 NR Desc: scribbled
MGCFASKNADTKASRAARWRSTGIVALRDSKLKTFPDEILELDTSVRTLDLTHNRIVDIPVEISKLINVQRLILAENLIERLPVNLGKLQSLKLMNLDGNRITSLPDELGQLVRLERISISGNLLTSLPATIGSLRNLVLLNVSNNKLQSLPESVGSCFSLEELQANDNLIEDLPSLVCNLSHLKSLCLDNNNVKQIPLNLLKDCIALQNISLHGNPISMDQFQQMEGFQEFEARRKKKFDKQIDSNVMIGSKGLDEGVDL

SEQ ID NO: 3133 - DNA, 679 bp, Glycine max
  misc_feature: Ceres CLONE ID no. 710274
  misc_feature: Ceres CDNA ID no. 29191875
  CDS (3)..(452): REFERENCED BY SEQ ID NO: 3134
attgctcgtccagggttttagccgccgccgccgccgcccccgccccagccccccccccacagagagaagcgagcgacagcgaggtcgacgccatggtgcagcgcctgacgtaccggaagcggcacagctacgccaccaagtccaaccagaccagggttgtcaaaaccccaggagggaggcttgtgtaccagtacaccaagaagagggcgagcgggccgaaatgtccggtcaccggcaagaagatccaggggatacctcatctaaggcctactgagtacaaaagatccagattatccaggaacaggagaacagtgaaccgtccttatggtggtgttctatctggtcaggctgttagggagaggatcatccgtgctttccttgttgaagagcaaaagattgtgaagaaggttttgaagatccagaagaccaaggagaagcagccatcaaagtgaaatggccaaggcttttttttggaggacagatggtgatgagtgttcagtcaagcgtgcgcagtatgctaagcccgtggttactgaattattaagctagagatttccgtccattttcttgtttgaggggtggatctggatctcattacccgtatgctatcactttgtgtttgacggtttgacttgagtacttggttatattacagttttggacaaaaaaaaaaaaaaaa

SEQ ID NO: 3134 - protein, 119 aa, Glycine max
  misc_feature: Ceres CLONE ID no. 710274
  misc_feature: Ceres CDNA ID no. 29191875
  misc_feature (5)..(103): Pfam Name: Ribosomal_L34e PFAM Desc: Ribosomal protein L34e
  misc_feature: Homolog of GI Number: 50941301 NR Desc: putative ribosomal protein L34
  misc_feature: Homolog of GI Number: 50946109 NR Desc: putative ribosomal protein
  misc_feature: Homolog of GI Number: 57471712 NR Desc: ribosomal protein l34
  misc_feature: Homolog of GI Number: 2119150 NR Desc: ribosomal protein L34
  misc_feature: Homolog of GI Number: 1076636 NR Desc: ribosomal protein L34
  misc_feature: Homolog of GI Number: 47824936 NR Desc: Ribosomal protein L34e
  misc_feature: Homolog of GI Number: 13194822 NR Desc: putative 60S ribosomal protein L34
  misc_feature: Homolog of GI Number: 21436403 NR Desc: putative 60S ribosomal protein L34
  misc_feature: Homolog of GI Number: 21594659 NR Desc: 60s ribosomal protein L34
  misc_feature: Homolog of GI Number: 20259165 NR Desc: putative 60S ribosomal protein L34
MVQRLTYRKRHSYATKSNQTRVVKTPGGRLVYQYTKKRASGPKCPVTGKKIQGIPHLRPTEYKRSRLSRNRRTVNRPYGGVLSGQAVRERIIRAFLVEEQKIVKKVLKIQKTKEKQPSK

SEQ ID NO: 3135 - DNA, 1674 bp, Glycine max
  misc_feature: Ceres CLONE ID no. 710576
  misc_feature: Ceres CDNA ID no. 14304152
  CDS (29)..(1562): REFERENCED BY SEQ ID NO: 3136
acaaacacttgatagtactactcaaggtatggcttttcaagtgttgttcatttgtttgatctcaaccatcgtgtttgcatccatactatggagaaaacaaaacaaaaacaagacccttcttccaccgagtccaatgcccctacccatcattggacacctccaccttctttctccaacacctcaccaagattttcacaagctctcactccgctatggacccataatacacctttttcttggttcagtcccctgtgtggtggcttccacagcagaagccgccaaagagttcctcaaaactcacgaacccgccttctccaaccgccccgctaacactgtcgccgtcgaaaccttaacctacggtttccaagacttcttgttcgcaccctacggaccctattggaagttcatgaagaaactctgcatgtccgaactcctcggtggccacatgctggaccagtttcttcccgtgagacagcaagagacaaaaaaattcatcaaacgtgtcctccaaaagggtatttctggtgaggccgtggattttgggggagagttcatcacgctctcgaacaacatcgtgtcgagaatgatcgtgagtcagacgagtactactgaggacgagaacgaagttgaagagatgaggaagctggtgaaggatgccgcagagctctcggggaagttcaacatatcggacttcgtttcgttcttgaagcgctttgatttgcaggggttcaacaagaggctcgagaagattcgggactgctttgacaccgtgttggacagaatcataaagcaacgtgaagaggaaagaaggaacaagaatgaaaccgttggaaaacgagaatttaaggatatgcttgatgttttgtttgacatatctgaagatgagagttctgaaattaaattaaacaaagaaaacattaaggccttcatcttggacatattaattgctgggactgacacctcagctgtaacgatggaatgggctatggcagagttaatcaacaatccaggtgtgttggagaaggcaagacaagaaatggatgcagtggttggaaagagtagaatagtagaagaatcagatattgccaaccttccttacttgcaaggcattgttagagaaacattaagacttcacccagctggtccattgctttttagagagtcatctagaagagctgtggtttgtgggtatgatattccagcaaagactcgattatttgtcaatgtttgggctattggtagggaccccaatcactgggagaaccctcttgagtttaggccagagaggtttgttgaaaatgggaagagtcaattggatgttaggggacaacattatcatctacttccgttcggtagtgaaagaagagcatgtcctggtacttctttggcattgcaagttgtgcatgtgaatttggcagttctaattcagtgtttccaatggaaggttgactgtgacaatggcaaggtgaacatggaagaaaaggctggcatcactcttccgagggctcaccccataatttgtgtccctattcgaagacttaacccattccctgttgtgtgattgttttttattttaaacatcatttttccattcacgtatatgatatgatgtcatgtcaaacatttatgcactttttacataatatatttggggattcaaaaaaaaaaaaaaaa

SEQ ID NO: 3136 - protein, 510 aa, Glycine max
  misc_feature: Ceres CLONE ID no. 710576
  misc_feature: Ceres CDNA ID no. 14304152
  misc_feature (32)..(499): Pfam Name: p450 PFAM Desc: Cytochrome P450
MAFQVLFICLISTIVFASILWRKQNKNKTLLPPSPMPLPIIGHLHLLSPTPHQDFHKLSLRYGPIIHLFLGSVPCVVASTAEAAKEFLKTHEPAFSNRPANTVAVETLTYGFQDFLFAPYGPYWKFMKKLCMSELLGGHMLDQFLPVRQQETKKFIKRVLQKGISGEAVDFGGEFITLSNNIVSRMIVSQTSTTEDENEVEEMRKLVKDAAELSGKFNISDFVSFLKRFDLQGFNKRLEKIRDCFDTVLDRIIKQREEERRNKNETVGKREFKDMLDVLFDISEDESSEIKLNKENIKAFILDILIAGTDTSAVTMEWAMAELINNPGVLEKARQEMDAVVGKSRIVEESDIANLPYLQGIVRETLRLHPAGPLLFRESSRRAVVCGYDIPAKTRLFVNVWAIGRDPNHWENPLEFRPERFVENGKSQLDVRGQHYHLLPFGSERRACPGTSLALQVVHVNLAVLIQCFQWKVDCDNGKVNMEEKAGITLPRAHPIICVPIRRLNPFPVV

SEQ ID NO: 3137 - DNA, 431 bp, Glycine max
  misc_feature: Ceres CLONE ID no. 710807
  misc_feature: Ceres CDNA ID no. 40351217
  CDS (3)..(221): REFERENCED BY SEQ ID NO: 3138
agggtttggttattagggttttcgctgaccggtgcgcagtcgagcctccagaagacgaatcgaaaatgccgtcgcacaagacattcagaatcaagaagaagttggcgaagaagatgaggcagaacaggcccattccctactggatccgcatgaggaccgataacaccatcaggtacaacgcgaagcgccgtcactggcgtcgcaccaagcttggattctgaggtgtatgctctgcctaggttcaatttatccaattaattagtgttttattttcttgaggcaaaaacaatgttttgagtttttaatattttccatttgttcgaagactatattgtgtaaggaacttattgtagttcatactcatggcgtttgtcaactccttttaaagtattttcggattcattgcatttggtacaaaaaaaaaaaaaaaa

SEQ ID NO: 3138 - protein, 51 aa, Glycine max; identical to SEQ ID NO: 2406
  misc_feature: Ceres CLONE ID no. 710807
  misc_feature: Ceres CDNA ID no. 40351217
  misc_feature (9)..(51): Pfam Name: Ribosomal_L39 PFAM Desc: Ribosomal L39 protein

SEQ ID NO: 3139 - DNA, 691 bp, Glycine max
  misc_feature: Ceres CLONE ID no. 710867
  misc_feature: Ceres CDNA ID no. 25891379
  CDS (50)..(421): REFERENCED BY SEQ ID NO: 3140
gaaaactctttgtattgtggtgaatgtttgagtgcagaaggtataaaaaatggtggtgaagattcgattggcaaggctcgggtgcaggaaccacccattctatcgcgtggttgttactgatagcaaaacaacaagagatggcaagcaacttgaagttttaggtttctacaatcccgtcgcaggcaaggatgatgagaaaagaatgagtctcaaactggaaagagtcaagtattggctttctgtcggagctaagccttcagagcctgttgagcatcttctgtttcgagcaggtttaggacaatctcatcaattccctgttgctgctctaaatggacatttcctcaaccaagaccaaccaaccaatgctgatcacaatggtgtatctccagaagctatattttctattggcctacaagtttgaagagaatagctaccatacatttggagaaggtgggtggtgttgtgatcaattttttgcaccctgttcaataccacctagaaacaaattgataggttatcttgctgtctagaaactggttagatttgtttcctgggaagatgttatcacagtagcaaaagtagcttcatttgattttggcttatgtatgcatttctgacattgttgtcaacacaccagttggtttttatgcttatgcaatttttcttgattctgacaaaaaaaaaaaaaaaa

SEQ ID NO: 3140 - protein, 123 aa, Glycine max
  misc_feature: Ceres CLONE ID no. 710867
  misc_feature: Ceres CDNA ID no. 25891379
  misc_feature (9)..(70): Pfam Name: Ribosomal_S16 PFAM Desc: Ribosomal protein S16
  misc_feature: Homolog of GI Number: 34905148 NR Desc: 30S ribosomal protein S16
  misc_feature: Homolog of GI Number: 23505749 NR Desc: At4g34620/T4L20_200
  misc_feature: Homolog of GI Number: 21554119 NR Desc: 30S ribosomal protein S16
  misc_feature: Homolog of GI Number: 16323518 NR Desc: putative 30S ribosomal protein S16
  misc_feature: Homolog of GI Number: 58416463 NR Desc: 30S ribosomal protein S16
  misc_feature: Homolog of GI Number: 57238863 NR Desc: 30S ribosomal protein S16
  misc_feature: Homolog of GI Number: 77464629 NR Desc: 30S ribosomal protein S16
  misc_feature: Homolog of GI Number: 48765006 NR Desc: COG0228: Ribosomal protein S16
  misc_feature: Homolog of GI Number: 15966995 NR Desc: PROBABLE 30S RIBOSOMAL PROTEIN S16
  misc_feature: Homolog of GI Number: 83370357 NR Desc: Ribosomal protein S16
MVVKIRLARLGCRNHPFYRVVVTDSKTTRDGKQLEVLGFYNPVAGKDDEKRMSLKLERVKYWLSVGAKPSEPVEHLLFRAGLGQSHQFPVAALNGHFLNQDQPTNADHNGVSPEAIFSIGLQV

SEQ ID NO: 3141 - DNA, 987 bp, Glycine max
  misc_feature: Ceres CLONE ID no. 712315
  misc_feature: Ceres CDNA ID no. 40351218
  CDS (114)..(818): REFERENCED BY SEQ ID NO: 3142
atcctgatgccaattaactagccacctgcttccttccttctccgaattttgctgttgattaaaatcgtgcagggcaagaatatttgttagccttattaaccaaagtagtattcatgaaccaaaagggtcatgagaagaaaattgaaaaaccagatgatgagtcagagagctatggtcggagttggaggctaacggttgaagcaaacaatgcgcgttcatggaggattgttccagacaactgctacaaccaccttcagaactacatgtctggtggacaataccagcttgaccttaacctcgtcgtccaacatatcttgtcctatgcccatgagattcctcttgctgccgacggcatggatgcctggattttggatgttgatgacacttgcatctccaacattgattattacaaaggaaggcgattcgggtgcgacccatttgactcagcgatattcaaggcatggattatgaagggaaagtgtcccgcaaatcctgccgtgctagaactgtttaacgccttgataaagaaaggattcaaagtgttcttgcttactggtagagaccaagcaactctcgctcaaatcaccactaacaacttgcgtaaccagggattcatcggctaccaacgtcttattctcaggagtgctcagtacaaaggacaaagtgcagtgagatacaagtcagcaattcggaaggagatagaaggagaagggtacaggatacggggaaatgtgggagaccagtggagtgatcttcaaggagagtgtttgggcaatcgtacattcaagctccctaatcccatgtatttcatttcttgatcaacaaaatctcgctatattatttactagtattttccttcaacttaatttctatctatctgcattctcccttcttctaagccttagggaacttattttcgacttagcttgtactcaagaaaccaataaatgcattggctacgtactcaattcaaaaaaaaaaaaaaaa

SEQ ID NO: 3142 - protein, 234 aa, Glycine max
  misc_feature: Ceres CLONE ID no. 712315
  misc_feature: Ceres CDNA ID no. 40351218
  misc_feature (7)..(234): Pfam Name: Acid_phosphat_B PFAM Desc: HAD superfamily
MNQKGHEKKIEKPDDESESYGRSWRLTVEANNARSWRIVPDNCYNHLQNYMSGGQYQLDLNLVVQHILSYAHEIPLAADGMDAWILDVDDTCISNIDYYKGRRFGCDPFDSAIFKAWIMKGKCPANPAVLELFNALIKKGFKVFLLTGRDQATLAQITTNNLRNQGFIGYQRLILRSAQYKGQSAVRYKSAIRKEIEGEGYRIRGNVGDQWSDLQGECLGNRTFKLPNPMYFIS

SEQ ID NO: 3143 - DNA, 641 bp, Glycine max
  misc_feature: Ceres CLONE ID no. 712714
  misc_feature: Ceres CDNA ID no. 35383272
  CDS (75)..(446): REFERENCED BY SEQ ID NO: 3144
cccttatttaactctagggtttacagagaagctaagaggcgcagccgtagcaaaagctcgtggaattgctagcaatggcgaggatcaaggtttacgagctgaggcagaagacgaaggctgatctgctgaatcaactgaaggacctgaaggcggagcttgccttgcttcgtgttgctaaggtcaccggtggtgcccctaacaagctttccaagataaaggtggtgaggttgaacattgcccaggttttgacggtgatttctcagaagcagaaggctgcgttgagggatgcctacaagaataagaagtacttgcctctcgatctccgccctaagaagaccagggctattcgcaggaggcttactaagcaccaggcatcattgaagacagagagggagaagaagaaagagttatatttcccactaaggaaatatgctatcaaggtgtaactttagagcaatcttatcggttaattggacatttacctcctttatactcgacaagttttgatatatctcgttttgtagtttcatgtttattgcttattggctgtgttaaacttcatgtcttctttagacctggggtttcttgaagctaccaggatttatgggtatcgttagtttccgtttaaaaaaaaaaaaaaa

SEQ ID NO: 3144 - protein, 123 aa, Glycine max
  misc_feature: Ceres CLONE ID no. 712714
  misc_feature: Ceres CDNA ID no. 35383272
  misc_feature (6)..(64): Pfam Name: Ribosomal_L29 PFAM Desc: Ribosomal L29 protein
  misc_feature: Homolog of GI Number: 6984224 NR Desc: 60S ribosomal protein L35
  misc_feature: Homolog of GI Number: 71535092 NR Desc: putative 60S ribosomal protein L35
  misc_feature: Homolog of GI Number: 62751093 NR Desc: similar to 60S ribosomal protein L35
  misc_feature: Homolog of GI Number: 21592412 NR Desc: putative 60S ribosomal protein L35
  misc_feature: Homolog of GI Number: 17104643 NR Desc: putative 60S ribosomal protein L35
  misc_feature: Homolog of GI Number: 33589770 NR Desc: At5g02610
  misc_feature: Homolog of GI Number: 30102548 NR Desc: At3g55170
  misc_feature: Homolog of GI Number: 50923665 NR Desc: OSJNBb0006N15.8
  misc_feature: Homolog of GI Number: 51979244 NR Desc: PREDICTED OJ1126_B06.24 gene product
  misc_feature: Useful for sterility
MARIKVYELRQKTKADLLNQLKDLKAELALLRVAKVTGGAPNKLSKIKVVRLNIAQVLTVISQKQKAALRDAYKNKKYLPLDLRPKKTRAIRRRLTKHQASLKTEREKKKELYFPLRKYAIKV

SEQ ID NO: 3145 - DNA, 1136 bp, Glycine max
  misc_feature: Ceres CLONE ID no. 713480
  misc_feature: Ceres CDNA ID no. 40351219
  CDS (85)..(705): REFERENCED BY SEQ ID NO: 3146
atacttctcgtatccccaaccctcaaccccaacaaagcaagagaagtagggtttttgtgcttggcaaaagaaagagaagagaagatggtgtcaggttcggggatctgcgcgaagcgcgtggtggtggacgcccggcaccacatgctgggtcggctcgcctcgattgtggcaaaggagctgctgaacggacaaaaagtggtggtcgtgcgatgcgaagagatttgcatctccggtggtctggtgaggcagaaaatgaagtacttgaggttcctccgcaaacgcatgaacaccaagccttcccacggccccatccacttccgcgcaccctccaagatcttctggcgcaccgttcgtggaatgataccacacaagacaaagcgtggggaagccgctctcgctcgtttgaaggtttatgagggaattcctcctccatatgacaagataaagagaatggttgttccagatgctctgaaggtgttgagacttcagaaaggacacaagtactgcatactgggcaggttgtcatctgaagttggatggagctactatgataccatcagggagctagaaaagaagagaaaggaaaaggcacaattggtttatgagagaaagaagcagctcaacaaattaagggtgaaagccgagaaggttgctgaagacaagctcggttcccaacttgatattcttgctccagtcaagtactgagtagtctatgtttttaaatttttttatgcaacttatacccaattgaaactacctttcagttttgcttgttattggctatgaagtattgacaccgatacggacaccggacacggacacgttgacacctgtaatgtccaaaatatagaacgtagtatgggtgttgtgtccgtgttggacactgacacggacgtgggtcgaacatcggacacgacaaagggctggggtgtccgtgcttcataggttattggatcatcatatcatagatttgatatctgataactttggaagctatttttatttaactgggctttgtagaaattttatttatgtcatttcatcaagaaaacttccattgccttgaatcaatgatgttcacaatcacagttgacgtctttctactgagtaattatttttcaaaaaaaaaaaaaaaa

SEQ ID NO: 3146 - protein, 206 aa, Glycine max
  misc_feature: Ceres CLONE ID no. 713480
  misc_feature: Ceres CDNA ID no. 40351219
  misc_feature (11)..(127): Pfam Name: Ribosomal_L13 PFAM Desc: Ribosomal protein L13
MVSGSGICAKRVVVDARHHMLGRLASIVAKELLNGQKVVVVRCEEICISGGLVRQKMKYLRFLRKRMNTKPSHGPIHFRAPSKIFWRTVRGMIPHKTKRGEAALARLKVYEGIPPPYDKIKRMVVPDALKVLRLQKGHKYCILGRLSSEVGWSYYDTIRELEKKRKEKAQLVYERKKQLNKLRVKAEKVAEDKLGSQLDILAPVKY

SEQ ID NO: 3147 - DNA, 1851 bp, Glycine max
  misc_feature: Ceres CLONE ID no. 713920
  misc_feature: Ceres CDNA ID no. 25891541
  CDS (139)..(1548): REFERENCED BY SEQ ID NO: 3148
gtccagaactaactacactggccttttgttctcgtgtcaatttctaaatccaccaccacaccctctcttctattctctattattattatctccacacccttcactctctctcactcttctctcgaatcttccaccgcaatggccaccgctgccgagaaactctccgctctcaaatccgccgtcgccggattgaacgaaatcagtgagaatgagaagaacggattcatcagcctcgtcggccgctatctcagtggcgaagcgcagcatgtggaatggagcaagatccagacgcctacggacgaagtggttgtgccttacgacactttggcgccaactcctgaaggttcttcggaggtgaagaatctattggacaagcttgtggtgttgaagctaaatggaggcttgggaacaactatgggttgcactggtcctaaatctgtaattgaagttcgtgatgggttgacatttctagatttaattgtcatccaaattgagaatctcaattccaaatatggaagcaatgttcctttgcttttgatgaattcattcaacactcatgatgacactcaaaagattgttgaaaaataccaaaactcaaatattgagattcatacttttaaccagagccagtatcctcgattggttgttgaggactttttgccattgccttccaaagggcatactgacaaggatggatggtaccctcctggccatggtgatgtcttcccatcattattgaacagtggcaaacttgatgcactattgtcacagggtaaagagtatgtgtttgttgccaattcggataacttgggagctatagttgacttgaaaatcttgaatcatttgatccagaacaagaatgaatactgtatggaggtgactcccaaaacattggctgatgtaaagggtggcactttgatttcttacgaaggaagggttcagctcctggaaattgcacaagtccccgatgaacatgtcaatgagttcaagtcaatagagaagttcaaaattttcaacacaaataatttgtgggtgaacttaaacgcagttaaaaggcttgttgaagctgatgctcttaagatggaaattattcccaatccaaaggaagttgacggaataaaagttcttcagctggaaactgcagctggtgctgcaataaggttctttgacaaggctattgggattaatgttcctcgatcacgattccttcctgtgaaggcaacttcagatttgcttcttgtccagtctgacctctacactttggaagacggatttgtcattcggaacaaagctagggaaaatcctgaaaacccttctattgaactgggaccagaatttaagaaggttagcaacttcttgggccgcttcaagtcaattcctagtatcgttgagcttgacagtctaaaagtggctggtgatgtatggtttggagctggtgttatcctcaaggggaaagtcagcattgtatcaaagcccggtgtaaagctggaagttcccgacggtgttgccattgtagacaaggaaattaatggcccagaggacctgtgaggaagacagatgactttaactaaagaatgaattgtatcagaccgtatcttatctatctatatggtctagtgtttttactactcccatgtttgataggtaaagaaaataagaagtctttttgttgagaggatgtcttggtgtggatctttactccattgtcttggaattctgtttagaacagcaaaaaaatgacaagtttggtgataagtttcatgtcatttggtacaatagcattgtgtccccctgtcgaacaaatcaaggcctaagaaaaaagaagtgttaaaaccaaaaaaaaaaaaaaaa

SEQ ID NO: 3148 - protein, 469 aa, Glycine max
  misc_feature: Ceres CLONE ID no. 713920
  misc_feature: Ceres CDNA ID no. 25891541
  misc_feature (25)..(437): Pfam Name: UDPGP PFAM Desc: UTP
  misc_feature: Homolog of GI Number: 17026394 NR Desc: UDP
  misc_feature: Homolog of GI Number: 9280626 NR Desc: UDP
  misc_feature: Homolog of GI Number: 37729658 NR Desc: UDP
  misc_feature: Homolog of GI Number: 6625908 NR Desc: UDP
  misc_feature: Homolog of GI Number: 32527831 NR Desc: UDP
  misc_feature: Homolog of GI Number: 1388021 NR Desc: UDP
  misc_feature: Homolog of GI Number: 76160958 NR Desc: UDP
  misc_feature: Homolog of GI Number: 6136112 NR Desc: UTP
  misc_feature: Homolog of GI Number: 57225831 NR Desc: UTP
  misc_feature: Homolog of GI Number: 28863903 NR Desc: UTP:alpha
MATAAEKLSALKSAVAGLNEISENEKNGFISLVGRYLSGEAQHVEWSKIQTPTDEVVVPYDTLAPTPEGSSEVKNLLDKLVVLKLNGGLGTTMGCTGPKSVIEVRDGLTFLDLIVIQIENLNSKYGSNVPLLLMNSFNTHDDTQKIVEKYQNSNIEIHTFNQSQYPRLVVEDFLPLPSKGHTDKDGWYPPGHGDVFPSLLNSGKLDALLSQGKEYVFVANSDNLGAIVDLKILNHLIQNKNEYCMEVTPKTLADVKGGTLISYEGRVQLLEIAQVPDEHVNEFKSIEKFKIFNTNNLWVNLNAVKRLVEADALKMEIIPNPKEVDGIKVLQLETAAGAAIRFFDKAIGINVPRSRFLPVKATSDLLLVQSDLYTLEDGFVIRNKARENPENPSIELGPEFKKVSNFLGRFKSIPSIVELDSLKVAGDVWFGAGVILKGKVSIVSKPGVKLEVPDGVAIVDKEINGPEDL

SEQ ID NO: 3149 - DNA, 487 bp, Glycine max
  misc_feature: Ceres CLONE ID no. 714336
  misc_feature: Ceres CDNA ID no. 40041305
  CDS (258)..(473): REFERENCED BY SEQ ID NO: 3150
aagcacaagtaagtccatcttagctatgagagaatgctgtatggtgatgtttcttccaagcgagtgtgtatgggtagagtggagacggtgcaagatgggtatggggtcattactcatgtgactaaggaaacagagggaaaagacgaggcttctacggagcagaggagggagtcagttggagatgatggcacatcggcggcctccggagaggaggtccgccgagccaaatgaaaatcctaggctggaactgccgtggcatgctctcctccacggcagttcgcgagctcttggatttacaagggcgcatcaaggcagatttgatttttctttctgggtctcatttgaataaatgtaaagccgatgagctgcgtagtgttctaagttttgagtcgatgtttgtagctgagagtgatggtcgggccggtggccttgttttattttataatgagatgaataaagtcgtcttgaactaaaaaaaaaaaaaaaa

SEQ ID NO: 3150 - protein, 65 aa, Glycine max
  misc_feature: Ceres CLONE ID no. 714336
  misc_feature: Ceres CDNA ID no. 40041305
MLYGDVSSKRVCMGRVETVQDGYGVITHVTKETEGKDEASTEQRRESVGDDGTSAASGEEVRRAK

SEQ ID NO: 3151 - DNA, 1284 bp, Glycine max
  misc_feature: Ceres CLONE ID no. 714688
  misc_feature: Ceres CDNA ID no. 35383273
  CDS (99)..(1076): REFERENCED BY SEQ ID NO: 3152
atttggtagccaatttccattgagacatttcaataattcaaaacctcggtagttgagggtttagcggtagcatagagatagcgcggattgaaactctaatggcactctcaacccctctcttctctttctcttcttcttttcttcattcatcttctcctctatgtcttccaaagcccctcttcccttatttgacagtgagcaattcaaccttccagaccaccagtctcgccgttcgctccgaaatgggttcttcccctgagcccatcaatttcaggaagtccgagattccgtccatgtctcacttgagactctcaatgaacgaaagtagcaagccttcatttaaatggcgaagggttttgctcaaagttagcggagaagcacttgctggagaccactctcagaacattgaccctaagataaccatggccattgcaagggaggtggcagcagtgactcgccttggcattgaggttgcactggtagttggtgggggtaacatcttccgtggatcctcctgggctggaagtagcggactagaccgctcatctgctgattatattgggatgttggccactgttatgaatgctatatttcttcaagcaacaatggagagtataggcattcctactcgggtgcagaccgcatttcgtatgtctgaggttgcagaaccgtatattcgcagaagggcagtgaggcatttggaaaaaggaagggttgtcatttttgctgctggaactggaaatccattctttaccacagacactgctgcagcactccgatgtgcagaaattaatgccgaggttgtactcaaagcaacaaacgttgatggagtttttgatgaggacccaaagcgtaatccacaagcacgtcttcatgagacactaacctatcaggaggtaacttccaaagatctgtcagtgatggacatgactgccataactttatgccaagaaaataatattccagttattgtctttaatcttaacaaacctggtaacattgagaaagctattaaaggagaaagagttggcactttgattggggccacctggaattctaccgtatcaagagcatgaaaatatttgtagtctggttacccattgattacttcttgtgtttttcttttcctatacaatcctccagccgaggatgccaaatatgtgaggtgcattacttgcgcattggtggttttgatggacttcaagggtgctgttgagtcataaatttgtaaatataacaagttaaattatcgtttgatgtttccctccaaaaaaaaaaaaaaaa

SEQ ID NO: 3152 - protein, 325 aa, Glycine max
  misc_feature: Ceres CLONE ID no. 714688
  misc_feature: Ceres CDNA ID no. 35383273
  misc_feature: The plant is abnormally small.
  misc_feature: The plant produces a reduced number of seeds.
  misc_feature: Useful for biocontainment applications
  misc_feature: Useful for making plants with modulated biomass
  misc_feature (84)..(294): Pfam Name: AA_kinase PFAM Desc: Amino acid kinase family
  misc_feature: Homolog of GI Number: 57900163 NR Desc: putative UMP
  misc_feature: Homolog of GI Number: 34905872 NR Desc: putative uridylate kinase
  misc_feature: Homolog of GI Number: 42572477 NR Desc: aspartate/glutamate/uridylate kinase family protein
  misc_feature: Homolog of GI Number: 71673942 NR Desc: Aspartate/glutamate/uridylate kinase
  misc_feature: Homolog of GI Number: 16331152 NR Desc: uridine monophosphate kinase
  misc_feature: Homolog of GI Number: 23126084 NR Desc: COG0528: Uridylate kinase
  misc_feature: Homolog of GI Number: 56751023 NR Desc: uridylate kinase
  misc_feature: Homolog of GI Number: 53764245 NR Desc: COG0528: Uridylate kinase
  misc_feature: Homolog of GI Number: 53762956 NR Desc: COG0528: Uridylate kinase
  misc_feature: Homolog of GI Number: 66779508 NR Desc: Aspartate/glutamate/uridylate kinase
  misc_feature: Useful for making lethal plants for genetic confinement systems
  misc_feature: Useful for making shorter plants
  misc_feature: Useful for sterility
  misc_feature: Useful for sterility
MALSTPLFSFSSSFLHSSSPLCLPKPLFPYLTVSNSTFQTTSLAVRSEMGSSPEPINFRKSEIPSMSHLRLSMNESSKPSFKWRRVLLKVSGEALAGDHSQNIDPKITMAIAREVAAVTRLGIEVALVVGGGNIFRGSSWAGSSGLDRSSADYIGMLATVMNAIFLQATMESIGIPTRVQTAFRMSEVAEPYIRRRAVRHLEKGRVVIFAAGTGNPFFTTDTAAALRCAEINAEVVLKATNVDGVFDEDPKRNPQARLHETLTYQEVTSKDLSVMDMTAITLCQENNIPVIVFNLNKPGNIEKAIKGERVGTLIGATWNSTVSRA

SEQ ID NO: 3153 - DNA, 576 bp, Glycine max
  misc_feature: Ceres CLONE ID no. 714828
  misc_feature: Ceres CDNA ID no. 40351220
  CDS (28)..(462): REFERENCED BY SEQ ID NO: 3154
atctggctttggtttgatttctagaaaatgggtgcactagattacctctccaacttttgcactgtaaccagcactaggacaaagcagaaagcaatgcagacagcagagataaaagtgagaatggactgcgatggttgcgaaagaagagtgagaaatgcagtgagttcaataaaaggagtgaaatctgtggaggtgaacagaaaggagagcagggtggtagtgagaggatatgtggatccaaagaaggtgctgaagagggtaaggagcacagtgaaagtaagagctcagttttggccatatgttgaacagcatctggtctaccatccttatgcccccggagtatatgaccgtagagcaccctccggttatgttagaaacgtcttccagccttcatctcatgcccaagacaactttctctcctttttcagcgacgacaacgtaaatgcatgttccatcatgtaatcatttctcttgtatcaattaacatgcttttttcagtttaattcacaaaccctcaagtgcagtgccatgctatctatatacacaaatattaatctgtcaaaaaaaaaaaaaaaa

SEQ ID NO: 3154 - protein, 144 aa, Glycine max
  misc_feature: Ceres CLONE ID no. 714828
  misc_feature: Ceres CDNA ID no. 40351220
  misc_feature (26)..(88): Pfam Name: HMA PFAM Desc: Heavy
MGALDYLSNFCTVTSTRTKQKAMQTAEIKVRMDCDGCERRVRNAVSSIKGVKSVEVNRKESRVVVRGYVDPKKVLKRVRSTVKVRAQFWPYVEQHLVYHPYAPGVYDRRAPSGYVRNVFQPSSHAQDNFLSFFSDDNVNACSIM

SEQ ID NO: 3155 - DNA, 568 bp, Glycine max
  misc_feature: Ceres CLONE ID no. 714893
  misc_feature: Ceres CDNA ID no. 40351221
  CDS (47)..(451): REFERENCED BY SEQ ID NO: 3156
attcattgctccctcgaactgttgtttggtctcttctctcttatccatggcatcaacgtttctcaccctaccaactcccttcctacacaaaaccaatgccatcagtttctctaacaagagaccctcatttttgcagaggagctctctgaagattcatgcaattaccaaaaaatgggaacccacaaaggttgtgcctcaggctgatagagttcttattcgtttggaggagctttcagataaaacagttggtggagttttgctgcctaaatcagctgttaaatttgagcgctatcttgtgggagaaatcctaactgttggtgctgaggctggagaactaaaggctggaacaaaggtactattcactgacatgaatgcttatgaggtggatttggggactgatgcaaaacactgcttctgtaaagcaagtgacttattggccgttgtggagtagggttttggccattgaacgagacaaaaagggagcaatcttttttgtgatatctttgataagtgtatttttagtagaataaaccattttttttcattggtgttaaaaaaaaaaaaaaaa

SEQ ID NO: 3156 - protein, 134 aa, Glycine max
  misc_feature: Ceres CLONE ID no. 714893
  misc_feature: Ceres CDNA ID no. 40351221
  misc_feature (47)..(133): Pfam Name: Cpn10 PFAM Desc: Chaperonin 10 Kd subunit
MASTFLTLPTPFLHKTNAISFSNKRPSFLQRSSLKIHAITKKWEPTKVVPQADRVLIRLEELSDKTVGGVLLPKSAVKFERYLVGEILTVGAEAGELKAGTKVLFTDMNAYEVDLGTDAKHCFCKASDLLAVVE

SEQ ID NO: 3157 - DNA, 663 bp, Glycine max
  misc_feature: Ceres CLONE ID no. 715439
  misc_feature: Ceres CDNA ID no. 35389132
  CDS (123)..(314): REFERENCED BY SEQ ID NO: 3158
aagtagaagcctgaaaagcgtgagtgaggggtagtgatagaaggataaggtgaggtgacgataaaccgtggaaagtggaaacggtggtgtagtctgtgagtgtcattgtgaagttggagacaatgttagcttcttctctctccttcctccattactctcctccaccatctcctaagaagccatacaagtacccatcacctccaccaccagtacaccctccttacactccccacccagtttatcactctcctccaccacctcctaccaacaagccttacatctatgcgtcacctccccctccttaccactattagctagcatagctctatggatatgaagaatatgtgcaacgaataaaagaaagcgatagaaaaggaagaagaagcgcttcgcgatgcacgaaagagaagaattggaagcaaagtttcggcgttttgtcttttataaaaaaaatgttaaatcattataattttctatgatagggattggtttcttgtcttttttcttttgtttatgaatatcggtgtattttaacagttgtaaagcactgcgccctcgctgcatgatcatgtagttttcaaccagctgcgtttgcaggggttgtaaaactaataacatatataattaaataaattatattctctcccaaaaaaaaaaaaaaaa

SEQ ID NO: 3158 - protein, 63 aa, Glycine max
  misc_feature: Ceres CLONE ID no. 715439
  misc_feature: Ceres CDNA ID no. 35389132
  misc_feature: Homolog of GI Number: 425682 NR Desc: extensin=nodule
  misc_feature: Homolog of GI Number: 15021742 NR Desc: root nodule extensin
  misc_feature: Homolog of GI Number: 15021748 NR Desc: root nodule extensin
  misc_feature: Homolog of GI Number: 15021750 NR Desc: root nodule extensin
  misc_feature: Homolog of GI Number: 15021756 NR Desc: root nodule extensin
  misc_feature: Homolog of GI Number: 15021752 NR Desc: root nodule extensin
  misc_feature: Homolog of GI Number: 15021754 NR Desc: root nodule extensin
  misc_feature: Homolog of GI Number: 37051099 NR Desc: hydroxyproline
  misc_feature: Homolog of GI Number: 15021744 NR Desc: root nodule extensin
  misc_feature: Homolog of GI Number: 15021746 NR Desc: root nodule extensin
MLASSLSFLHYSPPPSPKKPYKYPSPPPPVHPPYTPHPVYHSPPPPPTNKPYIYASPPPPYHY

SEQ ID NO: 3159 - DNA, 1197 bp, Glycine max
  misc_feature: Ceres CLONE ID no. 715539
  misc_feature: Ceres CDNA ID no. 40351222
  CDS (63)..(809): REFERENCED BY SEQ ID NO: 3160
atgacgtgggtttttctagggtttggaggctatgccgaaaacgggttaaataagctcggaaaatgattctcacaaagcagtaccgatgcatacactcagctagttgtcaatgtactaaagggcatttaagtgaagatatgatattcttagtatttcataatttgaattggaatcccaagctaattgcaactctatcatgtgtgtgcaaatggtttgatgatcttgccaagcgagttctatggaaagagttttgtcgaacaagagctccgaaaatgttgtgtgatctgcaatctaatgggagccacattgttgatgggaactggagggccctagggaagcttcttatatactgttcaggatgcacaaaaggtggcttgttcaatagcattcagattcctggtcactttgtttatcagacacgattttctagaacatcaggaaagagctttcttttgccacaatgcaggactgatgttttgtatgtatgtgatccttgtgagcatcttgaccaaggtgaggaaggagatgtaggattcttccgtggcatttttaagtcatttgcaacctcaaaggtcaggaagatgcttattaataaaggtgccaagctccatccaacagaagtctgcccttattgtaaggcaaagttgtggagcatgctgcaagccaaaatgatccctcaaagtgctagttgcaggttgggttcttatgatgattgcattgagtattatgtgtgcctcaacggccacatgcttgggatatgtaccctattaccattgtctgattcagaagaggcatctgaattggagtaatacctaaatgattttcaggttggcagtaaatcttcacaagtcggttgaacgctgccggtatactcctggtttaattgactactcagcacctaaaatatgcattaacttgccctcaagcttgaagctgcaatctcacccatcccaagccagcatttccaaggatggtcgaagatattaatcaatttctcgtatgaatcattatacagaaggttgttactgtgaaccatgtgatatcccatttagattgatacgtggtgtctctgcgtgtgtaataattcatacttgttcaatatagaatcaggattatcactttactctccaaccccctaccccggttgatgaagaatacaaaataaattggatttaaataagaaaacaaaaaaaaaaa

SEQ ID NO: 3160 - protein, 248 aa, Glycine max; identical to SEQ ID NO: 1746
  misc_feature: Ceres CLONE ID no. 715539
  misc_feature: Ceres CDNA ID no. 40351222

SEQ ID NO: 3161 - DNA, 420 bp, Glycine max
  misc_feature: Ceres CLONE ID no. 715598
  misc_feature: Ceres CDNA ID no. 29191876
  CDS (12)..(278): REFERENCED BY SEQ ID NO: 3162
attagaagaaaatggcgggtggtggaaaggtttcgttcaaagtcacactcacctccgatccaaagttacccttcaaagtgtttagcgttccagaggcggcaccttttactgccgttctcaaattcgccgccgaagaattcaaagtcccgccccagaccagcgctatcatcaccaacgatggtgttggcataaatccccagcagagcgcaggcaatgtcttccttaagcatggttcagaactgcgcctgattccgcgtgatagggtcggtgccttttagatgttacgggtgtctgacttgatattgaccttttttgcaaaatacatgaactgttgtagcttcctaagtagagtaatcaataaataccatggttactgatttcatatataatagtcttcaaccgataaaaaaaaaaaaaaaa

SEQ ID NO: 3162 - protein, 88 aa, Glycine max; identical to SEQ ID NO: 2380
  misc_feature: Ceres CLONE ID no. 715598
  misc_feature: Ceres CDNA ID no. 29191876
  misc_feature (5)..(80): Pfam Name: UPF0185 PFAM Desc: Uncharacterised protein family
  misc_feature: Homolog of GI Number: 34905822 NR Desc: P0483G10.15
  misc_feature: Homolog of GI Number: 56112391 NR Desc: PR46a
  misc_feature: Homolog of GI Number: 58396265 NR Desc: ENSANGP00000017552
  misc_feature: Homolog of GI Number: 72005426 NR Desc:  similar to protein similar to human bone marrow protein BM
  misc_feature: Homolog of GI Number: 38174609 NR Desc: 1810045K17Rik protein

SEQ ID NO: 3163 - DNA, 868 bp, Glycine max
  misc_feature: Ceres CLONE ID no. 715613
  misc_feature: Ceres CDNA ID no. 29191506
  CDS (81)..(509): REFERENCED BY SEQ ID NO: 3164
atcatctctttgagttgccattgaagaagaagctcagatcggaaaaattcacctctccaatcccaatcccatcgttgcaaatgatccgattcattctgttgcagaacaggcagggcaagacccgtcttgccaaatactacgttcctctcgaggactccgagaagcacaaggtcgaatacgaggttcatcggctcgtcgtaaacagagaccctaaatacacaaatttcgtcgagtttcgtacgcacaagataatatacaggcgatatgctgggttatttttctcactctgtgttgatatcactgataatgagttggcgtatttagagtgcatccatttgtttgtggaaatattggatcacttcttcagcaatgtctgtgagctcgatttggtttttaacttccacaaggtctatcttatacttgatgaattcattctagcgggtgaactgcaagaaacaagcaagaaggctatcattgagagaatgggggaacttgaaaaactagaatgaaaaattacttttcagcagtcatatcaatttggagatttcgatgacttactcatgcccttggcttaattcttgtatttcaattgtgatacagaattttgaaaatcttttccgttgagccatgtattcaatgccctttaccttcgcttcttattcggcttatgtttatatttgtaagacatttataaaatcagggttttcagtagcctttctgttactgtctctgttttgtttcactttttataaatttatttgctcttcttggttgttagtaaaacacttaatggaaatgtaattggatgattgtagtatataagcaatgcaaaacgattaattttgatggtacaaaaaaaaaaaaaaaa

SEQ ID NO: 3164 - protein, 142 aa, Glycine max
  misc_feature: Ceres CLONE ID no. 715613
  misc_feature: Ceres CDNA ID no. 29191506
  misc_feature (1)..(142): Pfam Name: Clat_adaptor_s PFAM Desc: Clathrin adaptor complex small chain
  misc_feature: Homolog of GI Number: 17149110 NR Desc: clathrin assembly protein AP17
  misc_feature: Homolog of GI Number: 30983940 NR Desc: clathrin coat assembly protein
  misc_feature: Homolog of GI Number: 27764984 NR Desc: At1g47830
  misc_feature: Homolog of GI Number: 2959358 NR Desc: clathrin coat assembly protein AP17
  misc_feature: Homolog of GI Number: 57230864 NR Desc: vesicle
  misc_feature: Homolog of GI Number: 66850406 NR Desc: AP
  misc_feature: Homolog of GI Number: 19070753 NR Desc: clathrin coat assembly protein
  misc_feature: Homolog of GI Number: 76641811 NR Desc:  similar to Clathrin coat assembly protein AP17
  misc_feature: Homolog of GI Number: 72016543 NR Desc:  similar to CG6056
  misc_feature: Homolog of GI Number: 72078433 NR Desc:  similar to Clathrin coat assembly protein AP17
  misc_feature: Useful for making stronger plants
MIRFILLQNRQGKTRLAKYYVPLEDSEKHKVEYEVHRLVVNRDPKYTNFVEFRTHKIIYRRYAGLFFSLCVDITDNELAYLECIHLFVEILDHFFSNVCELDLVFNFHKVYLILDEFILAGELQETSKKAIIERMGELEKLE

SEQ ID NO: 3165 - DNA, 762 bp, Glycine max
  misc_feature: Ceres CLONE ID no. 715672
  misc_feature: Ceres CDNA ID no. 36707417
  CDS (1)..(522): REFERENCED BY SEQ ID NO: 3166
tcctttcctccactcgcgcttcgctctcagatcccttctcctccgtctcgcccgcgtgttggggtaggagccatggcggaccagctcaccgacgaccagatcgccgagttcaaggaggccttcagcctcttcgacaaggacggagacggctgcatcaccaccaaggagcttggaactgtgatgcgctcgctggggcagaaccccactgaggcagagcttcaggatatgatcaatgaagtggatgctgatggcaatggaacgattgactttcctgagttcctcaacctgatggcacgtaagatgaaggacactgattccgaggaggagcttaaggaggctttccgtgtgtttgacaaggaccagaatggtttcatctcggcagctgaactccgccatgtcatgaccaaccttggtgagaagctgacagacgaggaggtggatgagatgatccgtgaggctgacgtggatggtgacggccagatcaattacgaagagtttgtgaaggtgatgatggccaagtgagctgccatactaagctagttctctctttttagatgaactaagctagttctctcttgatgttagcagctagtttagccttgaaaactgacagcactcggtactactgttaagtccagtgaatgaacatattgcgcgtgcttccttctcagggatgttgagaatttcgtttggattttcttgcagttgtattacctttgtacaatgtagctttccttccaaattggaaaaaaaaaaaaaaaa

SEQ ID NO: 3166 - protein, 149 aa, Glycine max; identical to SEQ ID NO: 208
  misc_feature: Ceres CLONE ID no. 715672
  misc_feature: Ceres CDNA ID no. 36707417
  misc_feature (12)..(40): Pfam Name: efhand PFAM Desc: EF hand
  misc_feature: Homolog of GI Number: 21913285 NR Desc: calmodulin 1
  misc_feature: Homolog of GI Number: 34304717 NR Desc: calmodulin 8
  misc_feature: Homolog of GI Number: 20190 NR Desc: calmodulin
  misc_feature: Homolog of GI Number: 1755001 NR Desc: calmodulin TaCaM2
  misc_feature: Homolog of GI Number: 4103961 NR Desc: calmodulin
  misc_feature: Homolog of GI Number: 50299519 NR Desc: calmodulin cam
  misc_feature: Homolog of GI Number: 60729721 NR Desc: calmodulin
  misc_feature: Homolog of GI Number: 30683369 NR Desc: calmodulin
  misc_feature: Homolog of GI Number: 20259049 NR Desc: putative calmodulin
  misc_feature: Homolog of GI Number: 50748592 NR Desc:  similar to calmodulin 1 (phosphorylase kinase

SEQ ID NO: 3167 - DNA, 697 bp, Glycine max
  misc_feature: Ceres CLONE ID no. 715736
  misc_feature: Ceres CDNA ID no. 36701208
  CDS (57)..(524): REFERENCED BY SEQ ID NO: 3168
ttctcacccccaaactctgcatcggaagaaaccctagccactctcccggcgtcacgatgcagatcttcgtgaaaaccctaacgggtaaaacgatcacgttggaggtggagtcttcggacaccatcgacaacgtgaaggccaagatccaggacaaggaaggcatccctccggaccagcagcgcctcatcttcgccgggaagcagctggaggacggccgcaccctcgccgactacaacatccagaaggagtccacgcttcacctcgtcctccgcctccgtggcggcgccaagaagcgcaagaagaagacctacaccaagcccaagaagatcaagcacaagcacaagaaggtcaagctcggcattcttcagttctacaaggtcgacgattctggaaaagtccagaggctccgcaaggagtgccccaacgccgagtgcggcgccggcaccttcatggccaaccacttcgaccgccactactgcggcaagtgcggcttgacctacgtctaccagaaggccgatgcttaatttgcggttttaattttattttagtatttaaaagttttggtttatgtttttgttcaattagtgttatgactgtttgggctttgattaaacctttattcaatactgttttgcgttggattacttatcatccgctttaaatatattgttagttcggtctaaaaaaaaaaaaaaaa

SEQ ID NO: 3168 - protein, 155 aa, Glycine max; identical to SEQ ID NO: 1852
  misc_feature: Ceres CLONE ID no. 715736
  misc_feature: Ceres CDNA ID no. 36701208
  misc_feature (1)..(74): Pfam Name: ubiquitin PFAM Desc: Ubiquitin family
  misc_feature (101)..(147): Pfam Name: Ribosomal_S27 PFAM Desc: Ribosomal protein S27a
  misc_feature: Homolog of GI Number: 438111 NR Desc: ubiquitin extension protein
  misc_feature: Homolog of GI Number: 438109 NR Desc: ubiquitin extension protein
  misc_feature: Homolog of GI Number: 34581769 NR Desc: ubiquitin extension protein
  misc_feature: Homolog of GI Number: 18252349 NR Desc: ubiquitin extension protein
  misc_feature: Homolog of GI Number: 1771780 NR Desc: ubiquitin extension protein
  misc_feature: Homolog of GI Number: 2894306 NR Desc: ubiquitin extension protein
  misc_feature: Homolog of GI Number: 71913239 NR Desc: ubiquitin extension protein
  misc_feature: Homolog of GI Number: 28395459 NR Desc: ubiquitin/ribosomal fusion protein
  misc_feature: Homolog of GI Number: 21601 NR Desc: ubiquitin monomer/ribosomal protein
  misc_feature: Homolog of GI Number: 10180023 NR Desc: ubiquitin/ribosomal protein 27a

SEQ ID NO: 3169 - DNA, 717 bp, Glycine max
  misc_feature: Ceres CLONE ID no. 716811
  misc_feature: Ceres CDNA ID no. 36700976
  CDS (63)..(551): REFERENCED BY SEQ ID NO: 3170
aggttttcttagttattgttaccatttgctcccagcactgagcttaaccgagcttcacaaagatgaatcgggaaaaattgatgaagatggccggttcggttagaactgggggaaagggcaccgtgagaagaaagaagaaggctgtccacaagacaacaaccacagatgacaaaaggcttcagagcaccctgaagagaataggggtgaatgccatcccggctattgaggaggtcaatatctttaaggatgacgtagttatccagtttctaaatcccaaagttcaagcatccattgctgctaatacttgggttgtcagtggttctccacaaacaaagaagttgcaggatatactccctagcattatccaccaattaggaccagataacttggaaaacctgaagaagctggccgagcaattccagaagcaggctcctgaaggagccactggttcaaccaccgcccaagaggagaatgatgatgacgatgtcccagagcttgttccaggccaggattttgagacagctgctgaggagaccaaggctgcttcctagagtgttttgttattgtgccattgccatatatatcccgtgtttttaaatttttttcttcttgattttccattttaagtatttaaggtgttcagttctcctgtcatactttaaacagttcaaatactttattaaatatgctttccttcatccaaaaaaaaaaaaaaaa

SEQ ID NO: 3170 - protein, 162 aa, Glycine max
  misc_feature: Ceres CLONE ID no. 716811
  misc_feature: Ceres CDNA ID no. 36700976
  misc_feature: The plant is abnormally large.
  misc_feature: Useful for making plants with modulated growth and phenotype characteristics
  misc_feature: The sequence is a functional homolog of  SEQ ID NO 1614 in the  11/479,226 US patent application
  misc_feature: The sequence is a functional homolog of  SEQ ID NO 1617 in the  11/479,226 US patent application
  misc_feature: The sequence is a functional homolog of  SEQ ID NO 784 in the  10/412,699 US patent application
  misc_feature: The sequence is a functional homolog of  SEQ ID NO 786 in the  10/412,699 US patent application
  misc_feature: Useful for making plants with modulated biomass
  misc_feature (35)..(92): Pfam Name: NAC PFAM Desc: NAC domain
  misc_feature: Homolog of GI Number: 33945882 NR Desc: transcription factor homolog BTF3
  misc_feature: Homolog of GI Number: 82623431 NR Desc: putative transcription factor BTF3
  misc_feature: Homolog of GI Number: 17104709 NR Desc: putative RNA polymerase B transcription factor 3
  misc_feature: Homolog of GI Number: 21537065 NR Desc: putative transcription factor BTF3
  misc_feature: Homolog of GI Number: 12083222 NR Desc: putative transcription factor
  misc_feature: Homolog of GI Number: 83584406 NR Desc: BTF3
  misc_feature: Homolog of GI Number: 16323127 NR Desc: At1g17880/F2H15_10
  misc_feature: Homolog of GI Number: 49616929 NR Desc: BTF3b
  misc_feature: Homolog of GI Number: 50920111 NR Desc: putative transcription factor
  misc_feature: Homolog of GI Number: 31432723 NR Desc: putative transcription factor
MNREKLMKMAGSVRTGGKGTVRRKKKAVHKTTTTDDKRLQSTLKRIGVNAIPAIEEVNIFKDDVVIQFLNPKVQASIAANTWVVSGSPQTKKLQDILPSIIHQLGPDNLENLKKLAEQFQKQAPEGATGSTTAQEENDDDDVPELVPGQDFETAAEETKAAS

SEQ ID NO: 3171 - DNA, 602 bp, Glycine max
  misc_feature: Ceres CLONE ID no. 717222
  misc_feature: Ceres CDNA ID no. 40351223
  CDS (278)..(430): REFERENCED BY SEQ ID NO: 3172
aaaaacaaagtggtgaatctgctggcacgacagactggtttctaaaacaacaaccatagccaatcagtgtttggtctctttttcttttagacccaccctttctcttctcttccctttcaacttcaactcaacaacccttcccttctcaaactcattcttgcctttctttttgttcatacttttatttttattgctacttactttttatttctatccaatcatcctggttggactcagggactaccaggacgacaaggctgacgtcatcctcaagtacatgcccgacgaggccaggctcctcaaggcctacggcgagctccccgataccactcgcctcaacgagggcatcggcgccggcttggacgaggaggacgacgccaccgccaacgactacatcgagttcgaggatgaggatattgataaaatctaatccctctctcgccctcaattatcattcatataatatcatcatcatatctgtctctagcaatatttcgttatctgcttgtctgcaactctccgtgttggatttcgttttataattgtgcactattatttcaataacccgcagatatttctgattcccaaaaaaaaaaaaaaaa

SEQ ID NO: 3172 - protein, 50 aa, Glycine max
  misc_feature: Ceres CLONE ID no. 717222
  misc_feature: Ceres CDNA ID no. 40351223
  misc_feature (1)..(18): Pfam Name: eIF PFAM Desc: Eukaryotic initiation factor 1A
MPDEARLLKAYGELPDTTRLNEGIGAGLDEEDDATANDYIEFEDEDIDKI

SEQ ID NO: 3173 - DNA, 792 bp, Glycine max
  misc_feature: Ceres CLONE ID no. 718097
  misc_feature: Ceres CDNA ID no. 25891377
  CDS (86)..(499): REFERENCED BY SEQ ID NO: 3174
aactcttctcctaagctctagcacttaactagtaatatttattagaatttgccagagaattagaagaataaacataataccccagatggcttcaaaaacttgttcctcccttgcccttttcctcacactcaacctcgttttcttctcacttgtctctgcatgcggttatacaccatgccctggtccaaacccaaagccaaggcccaaccccaaccctaaccctaaccccagcccaagtggctcgtgcccccgtgacgcactcaaactaggtgtatgcgccaatgtgctaaacttggtgaacgccactttgggtcaaccaccagttaccccttgttgctcccttctcgatggtctcgttgaccttgaggctgcagtgtgcctttgcactgctctcaaagcaaacattttgggcatcaacctcaaccttccgatctcactcagcttgcttctcaatgtttgctcaaggaaagccccacgtgatttccaatgtgcctactaagcttatactataagtataacatatcatcttaaatcttcttttgcttcgggtttgctctagttgtggctttccattttttcttcttcaaattctattgatcagagtgtggttctaattgtacgtgcatgggggggattaacttccgatcgctattccttcctttttagtggttttttttatttgtattgttagtgttgcgataaataaagttcctgatgctggcttatgtaaatcgctagggaaccaaaaagatgatgaactagtgtgttatttatttaaaaaaaaaaaaaaaa

SEQ ID NO: 3174 - protein, 137 aa, Glycine max
  misc_feature: Ceres CLONE ID no. 718097
  misc_feature: Ceres CDNA ID no. 25891377
  misc_feature (54)..(135): Pfam Name: Tryp_alpha_amyl PFAM Desc: Protease inhibitor/seed storage/LTP family
  misc_feature: Homolog of GI Number: 21693573 NR Desc: extensin
  misc_feature: Homolog of GI Number: 7484770 NR Desc: extensin like protein
  misc_feature: Homolog of GI Number: 46095207 NR Desc: arachidonic acid
  misc_feature: Homolog of GI Number: 62321154 NR Desc: At1g62510
  misc_feature: Homolog of GI Number: 60542797 NR Desc: arachidonic acid
  misc_feature: Homolog of GI Number: 4454097 NR Desc: hybrid proline
  misc_feature: Homolog of GI Number: 21436101 NR Desc: putative pEARLI 1
  misc_feature: Homolog of GI Number: 58578282 NR Desc: extensin
  misc_feature: Homolog of GI Number: 21360370 NR Desc: extensin
  misc_feature: Homolog of GI Number: 37536722 NR Desc: putative lipid transfer protein
MASKTCSSLALFLTLNLVFFSLVSACGYTPCPGPNPKPRPNPNPNPNPSPSGSCPRDALKLGVCANVLNLVNATLGQPPVTPCCSLLDGLVDLEAAVCLCTALKANILGINLNLPISLSLLLNVCSRKAPRDFQCAY

SEQ ID NO: 3175 - DNA, 1166 bp, Glycine max
  misc_feature: Ceres CLONE ID no. 718575
  misc_feature: Ceres CDNA ID no. 25087902
  CDS (351)..(833): REFERENCED BY SEQ ID NO: 3176
ataaatcaggtaccaactctttctccttctcctctcatcccaataaccctttatttttctcgttttttttttttttataaaaaaaaagaaaaaagaaacatattcttgcaatttcgttgtacaaacaaaattcccctattttcggcacgcctttgttgaatttccaatctctatttttctttctttctatttatacgtaataattccaaaaagcctaacgcgagagattcatcagtttttcaattattcctcgaattttgaaggaatcatacaaacgcttgaaatattcgtcatcaacaacaacctcacgctgctatagattttttttttctcttcttacagatccaaacatggccgaagaacaccgatgccaagctcccgaaggtcacagactctgctccaacaactgcggcttcttcggtagccccgccacaatgaatctctgttccaaatgctacagagacatccgtttgaaggaagaagaacaagccaaaactaaatccacaatcgaaaccgctctttctggatcttcctccgccaccgtcgccgttgcctccgccgtggattctcttccggcgccggttgaatccctccctcaaccgtcggtggtgagttcgccagatgtggccgcaccggttcaggcgaaccggtgcggcgcgtgtaggaagcgcgtgggattgactgggtttaagtgcaggtgcggaaccacgttttgtgggactcaccggtaccccgagaaacacgcgtgtggcttcgatttcaaggcggtggggagagaggagatagcacgggcgaatcccgtgatcaaaggcgagaagctacggaggatttaatctgcaccgttgatatgatgatcgaagcgattagggtgagttgatcaggaccgtccgtcgtgggccgttgatacgaacctatttcgagcgtgtgtaagaaaaaaaaaaatctattagttatgacgacattgggaagggttgaataagtcatattttggaggctttgctttgtgtttgttcattaaaaatggaaaatgttaggtccacccacgttcggaaattgaggggtttgtttagaattgcaatgcaatgtaaaaaagtgtagtttaatatttttctacaggcatttctatttttcttccgtttgcgagaaaggcaaaaaaaaaaaaaaaa

SEQ ID NO: 3176 - protein, 160 aa, Glycine max
  misc_feature: Ceres CLONE ID no. 718575
  misc_feature: Ceres CDNA ID no. 25087902
  misc_feature (101)..(141): Pfam Name: zf PFAM Desc: AN1
  misc_feature (13)..(37): Pfam Name: zf PFAM Desc: A20
  misc_feature: Homolog of GI Number: 7669954 NR Desc: zinc finger
  misc_feature: Homolog of GI Number: 18377546 NR Desc: zinc finger
  misc_feature: Homolog of GI Number: 50909195 NR Desc: putative multiple stress
  misc_feature: Homolog of GI Number: 23198266 NR Desc: putative zinc finger protein
  misc_feature: Homolog of GI Number: 38566602 NR Desc: At1g12440
  misc_feature: Homolog of GI Number: 8778645 NR Desc: F5O11.17
  misc_feature: Homolog of GI Number: 60202503 NR Desc: zinc finger protein
  misc_feature: Homolog of GI Number: 41350259 NR Desc: putative zinc finger protein ZmZf
  misc_feature: Homolog of GI Number: 30908921 NR Desc: putative zinc finger transcription factor ZFP33
  misc_feature: Homolog of GI Number: 50946101 NR Desc: putative zinc finger protein
  misc_feature: Useful for making plants with increased biomass and foliage
MAEEHRCQAPEGHRLCSNNCGFFGSPATMNLCSKCYRDIRLKEEEQAKTKSTIETALSGSSSATVAVASAVDSLPAPVESLPQPSVVSSPDVAAPVQANRCGACRKRVGLTGFKCRCGTTFCGTHRYPEKHACGFDFKAVGREEIARANPVIKGEKLRRI

SEQ ID NO: 3177 - DNA, 449 bp, Glycine max
  misc_feature: Ceres CLONE ID no. 719664
  misc_feature: Ceres CDNA ID no. 40351224
  CDS (83)..(403): REFERENCED BY SEQ ID NO: 3178
accagtacagaaaacgcagttctcaccatttccctctcgattgtgagacttgttgttgttaactgaacttttctgagcaagaatgtctgggcgtggaaagggaggcaagggtttgggaaagggaggagcgaaacgacaccgtaaggtgctgcgcgataacattcagggaatcaccaagcccgcgattcggcgtttggctcgtaggggtggcgtgaagcgtatcagtggtctcatctacgaagagacacgtggcgtgctcaagatctttttggagaacgtgattcgtgacgccgttacctacactgagcatgctaggagaaagaccgttacggcaatggacgtggtttatgctctcaagagacagggaaggaccctctacggatttggacatcctttagggtgaacgttttattagtttatgccaatttcaaccaaaaaaaaaaaaaaaa

SEQ ID NO: 3178 - protein, 106 aa, Glycine max
  misc_feature: Ceres CLONE ID no. 719664
  misc_feature: Ceres CDNA ID no. 40351224
  misc_feature (66)..(92): Pfam Name: TAF PFAM Desc: TATA box binding protein associated factor
MSGRGKGGKGLGKGGAKRHRKVLRDNIQGITKPAIRRLARRGGVKRISGLIYEETRGVLKIFLENVIRDAVTYTEHARRKTVTAMDVVYALKRQGRTLYGFGHPLG

SEQ ID NO: 3179 - DNA, 1128 bp, Glycine max
  misc_feature: Ceres CLONE ID no. 720809
  misc_feature: Ceres CDNA ID no. 35383274
  CDS (166)..(918): REFERENCED BY SEQ ID NO: 3180
aaaaggattcataatcataagttttcgtgtccaaagggcaattcgagtctttgaaatctccctttcaaaccttacactcctcatttcgtttccgtagcagttttctcacacttcaccgctgcttccccttcacctccgatttcgtatcagtagtcagagatcaaaatgtctcgaagatatgacagccgtacaacaatcttctcccctgaaggacgtctttaccaagtggaatatgcaatggaggctattggtaacgctggtaccgcaatagggatcttatcaaaagatggggttgtgctggttggtgaaaagaaagtcacatccaagctgctccaaacttcaacttccaccgagaaaatgtacaagattgacgatcatgttgcatgtgctgtggctgggataatgtctgatgcgaacatcctaatcaataccgctagggtccaagcacaacgctacacatacgcctatcaagagcccatgccagttgagcagttagttcagtctctctgtgataccaagcaaggttacacccaattcggtggtcttcggccattcggagtctcgtttctgtttgcgggatgggacaaaaactttggctttcaactttacatgagtgaccctagtggaaattacggtggctggaaagctggagccattggggcaaataaccaggcagcacaatcaatactaaaacaggattacaaggatgatatcacaagagaagaagcagtgcaacttgcattgaaggttttgagtaaaaccatggacagcacaagtctaacctcggaaaagcttgaacttgcagaggttttcctttcaccctctggaaaagtcaagtatgaagtttgctccccagaggccctgactaagatgttggtgaagtctggtgtaacccaacctgcaacagacactgcctagtttgctattccatgcttattgcactttgattatgcctatcttattcatttgtggtgcttttggcattagatggcagatattggctcaaacatttttcaagttaaaacacattgcatgttggtaatgctaatggctttgtattagagatattgatggtatgtgcgttccatttgattaaccaccgaatttccatgaaaaaaaaaaaaaaaa

SEQ ID NO: 3180 - protein, 250 aa, Glycine max
  misc_feature: Ceres CLONE ID no. 720809
  misc_feature: Ceres CDNA ID no. 35383274
  misc_feature (28)..(215): Pfam Name: Proteasome PFAM Desc: Proteasome A
  misc_feature: Homolog of GI Number: 77999303 NR Desc: proteasome
  misc_feature: Homolog of GI Number: 76160982 NR Desc: proteasome alpha subunit
  misc_feature: Homolog of GI Number: 1262146 NR Desc: proteasome subunit
  misc_feature: Homolog of GI Number: 23197586 NR Desc: 20S proteasome subunit PAC1
  misc_feature: Homolog of GI Number: 2511584 NR Desc: multicatalytic endopeptidase
  misc_feature: Homolog of GI Number: 3608483 NR Desc: proteasome alpha subunit
  misc_feature: Homolog of GI Number: 6984140 NR Desc: proteasome 27 kDa subunit
  misc_feature: Homolog of GI Number: 34898416 NR Desc: alpha 3 subunit of 20S proteasome
  misc_feature: Homolog of GI Number: 34898478 NR Desc: Similar to Spinacia oleracea proteasome 27 kD subunit
  misc_feature: Homolog of GI Number: 14594915 NR Desc: putative alpha3 proteasome subunit
  misc_feature: Useful for increasing chlorophyll and photosynthetic capacity
  misc_feature: Useful for making bigger plants
  misc_feature: Useful for making plants with increased biomass
MSRRYDSRTTIFSPEGRLYQVEYAMEAIGNAGTAIGILSKDGVVLVGEKKVTSKLLQTSTSTEKMYKIDDHVACAVAGIMSDANILINTARVQAQRYTYAYQEPMPVEQLVQSLCDTKQGYTQFGGLRPFGVSFLFAGWDKNFGFQLYMSDPSGNYGGWKAGAIGANNQAAQSILKQDYKDDITREEAVQLALKVLSKTMDSTSLTSEKLELAEVFLSPSGKVKYEVCSPEALTKMLVKSGVTQPATDTA

SEQ ID NO: 3181 - DNA, 873 bp, Glycine max
  misc_feature: Ceres CLONE ID no. 720889
  misc_feature: Ceres CDNA ID no. 40351225
  CDS (98)..(556): REFERENCED BY SEQ ID NO: 3182
attatcatagtagatattcattccccttatctttctctcttctctctccccgcccaaaccctaactccctaccctattccgctttctctcatccatcatgaaaggaggaaagtccaagaccgaatctaagagagccgatgccaaacttgctgtgaataagaagggcgccgccaccaagactaggaaacccgccggaaaggggaaggcagcgaaagatcctaacaagccaaagaggcctccaagtgctttcttcgttttcatggaggaattcaggaaggtgttcaacaaggaacatcccgacaacaaagcagtgtctgctgtgggcaaagctgctggagcaaaatggaagacgatgtctgatgctgaaaaagcaccttatgtggcaaagtctgagaaaaggaaagtggagtacgagaagaacatgagagcttataacaagaaacaggcggaaggtcctactggtggggatgaagaagaatctgagaagtctgtatctgaggtgaatgatgaggatgatgacgaggaaggcagtggcgaggaggaggatgacgattagagaatggactgatgataatagcatttatgtaggttctgatgattttgatcatccgtgtaggtggtctggtcatttccttataaacatatttctctttccaaaaaatatttccctgctcctccttccgtaaattgctcgtctttccaaaacgtgaatagtttaaagaagggagttctctttatttgtatttctaaatccaactgtttagttaagggatggttatctcttgtagagcttttagtttgatttagagttttcttgttgaaatctggttaagtttgtatcaatataattgacttatcatccccaaaaaaaaa

SEQ ID NO: 3182 - protein, 152 aa, Glycine max
  misc_feature: Ceres CLONE ID no. 720889
  misc_feature: Ceres CDNA ID no. 40351225
  misc_feature (44)..(113): Pfam Name: HMG_box PFAM Desc: HMG
MKGGKSKTESKRADAKLAVNKKGAATKTRKPAGKGKAAKDPNKPKRPPSAFFVFMEEFRKVFNKEHPDNKAVSAVGKAAGAKWKTMSDAEKAPYVAKSEKRKVEYEKNMRAYNKKQAEGPTGGDEEESEKSVSEVNDEDDDEEGSGEEEDDD

SEQ ID NO: 3183 - DNA, 614 bp, Glycine max
  misc_feature: Ceres CLONE ID no. 721157
  misc_feature: Ceres CDNA ID no. 25445500
  CDS (119)..(454): REFERENCED BY SEQ ID NO: 3184
atcaaaagaacaaccacaaatgacagagccattgtactaagctcaaattcggtgcaaaatatcctcagctcaacatcaacataacacttagcaggaactttgaaatagtatcacacagatgtcactcctccaactccaactcagctctcatgcattgcgctctatcacttcctcttcccataacttcagacccacctattcctctaagcgtgtcagctatgtaagaaccagaattagagctgttggcacagtccccgagaaggactctgactcagacaccaccgaccccgatgagccaccttatgtcggactcgtgtttgttagttctgtattgctaccagatggaacaccagatatgcactttcgttctgcttgtggaggccagaggcttaggaagataatgctcgattccaatgttgaacgaaagtgcatatctggtgttccatcatattagaggaaagttggtttctgaggtaagtgttatgtaatgtttcttgttcctttttgccccttttgttgtatttctgctcttaaaccttgtttgaccttcttaataggtgtagtaatttaatttacatatcagtcgtctgaatgtctcaaaaaaaaaaaaaaaa

SEQ ID NO: 3184 - protein, 111 aa, Glycine max
  misc_feature: Ceres CLONE ID no. 721157
  misc_feature: Ceres CDNA ID no. 25445500
  misc_feature: Homolog of GI Number: 50937261 NR Desc: 2Fe
MSLLQLQLSSHALRSITSSSHNFRPTYSSKRVSYVRTRIRAVGTVPEKDSDSDTTDPDEPPYVGLVFVSSVLLPDGTPDMHFRSACGGQRLRKIMLDSNVERKCISGVPSY

SEQ ID NO: 3185 - DNA, 920 bp, Glycine max
  misc_feature: Ceres CLONE ID no. 721219
  misc_feature: Ceres CDNA ID no. 35383275
  CDS (141)..(812): REFERENCED BY SEQ ID NO: 3186
atagttttttattactctttccggaactatgaacctctgagaaaggatcaacttccaaaggctggaattaactttggtgctgcttgggaagtaaaactagaaagagaaaatgatggagcaaaggttacagagggtggagaatgagtctgatgagtagtcttctacctcctcttgcttcttcttcttacataaacacagctcctaaactgaaaactactcacactccaaaccttgtacttggacagagggtcctacctaatctcctctctttggcccttgctgtaaccttagcctctcctttaccatctcatgcaatcccatccctcaattctcaaccccctccaatctccctcaccactcccttttctcaatccaagaatttggagcttggacttgaaaatggaaaaattagaccttgcccatcaatcaatccaggttgtatatcaacaaatcccaagtcatcatctttttcgtttccttggcttattccctcaaattcctcggatgatgctattcagaaactacgtgaagcaatcctgaagacccagaaaaatgtgaaatttcagcctgtggaagatactccagatggtcaatatctacaagctgaagttgatggaggatttggtagagatattcttgagtttctggtgaaaggtgatgtggttgcatacaggtgtgtggcaatgaaagtaacttatgtgtaccctttcactactgcattcggagattcaaagggtcaagaagcaagactgaagcaaatcaatgaccagttgggatggtatgctccaagttttgattccatggaggaatagtgttgtttcgttctttcgttggtttagttctttgattggtgcctgtctgaatccttaattccttttatgttatattttgcctcattatgtgcaaaaaaaaaaaaaaaa

SEQ ID NO: 3186 - protein, 223 aa, Glycine max
  misc_feature: Ceres CLONE ID no. 721219
  misc_feature: Ceres CDNA ID no. 35383275
  misc_feature: Homolog of GI Number: 34894026 NR Desc: P0672D08.25
MSLMSSLLPPLASSSYINTAPKLKTTHTPNLVLGQRVLPNLLSLALAVTLASPLPSHAIPSLNSQPPPISLTTPFSQSKNLELGLENGKIRPCPSINPGCISTNPKSSSFSFPWLIPSNSSDDAIQKLREAILKTQKNVKFQPVEDTPDGQYLQAEVDGGFGRDILEFLVKGDVVAYRCVAMKVTYVYPFTTAFGDSKGQEARLKQINDQLGWYAPSFDSMEE

SEQ ID NO: 3187 - DNA, 995 bp, Glycine max
  misc_feature: Ceres CLONE ID no. 721266
  misc_feature: Ceres CDNA ID no. 40351226
  CDS (71)..(832): REFERENCED BY SEQ ID NO: 3188
accaagtgaaaagaaaagaaaagaaaaagagacaccacaacacaagactcattcttcctcattccgaaaaatggcgtctttgcagcaccccacagcttccctccaatccaaacacatcctaatcccccgaaataccctctcccagaaacccatcctcaacctctccctccatggtaccaccttcacccccctcaagctcaaattcggcgttaccaccaccaccaccgccgccgccgccacccgccgctccaccggcgccacgggagccagaatgtcagctaccgcagcctccagctacgccgcggccctcgccgacgtggcggccgcgaacaacaccctcgacgcgacaaccgcggacatcgagaaaatcgacgaaatcttctcggacccgcaggtgtcggactacttcgcggaccccaccctggccgtggagaagaagcgccagctgatagacgagattgcggaatcctcggagttccagccccacacgagaaacttcctctacatcctcgtggacgcgcagaggatagacctcatcaacgagatagcaaaagagttcgaactggtttacaattccttgaccgaaacggagctggcggtggtgacgtcggtggtgaagctggagtcgcagcacctggcgcagatcgcgaagcaggttcagaagctcactgggacgaagaacgtgagaattaagacgctccttgaccctagtttggtggcgggtttcactgtcaggtattcgggctctaagttgattgacatgagcgtcaggaagcagcttgaggatattgctgctcagcttgagctgggtgatatctcactcgccgtatgacatttccctcccttccgttgcgttgctgccttccttctgtttgtttttcgtttcgatttcgtttactattatttttggggccaagtataacgtgtattaaatactatgaatgaatgaattccaaaacttaatttacattttttatttaaaaaaaaaaaaaaaa

SEQ ID NO: 3188 - protein, 253 aa, Glycine max
  misc_feature: Ceres CLONE ID no. 721266
  misc_feature: Ceres CDNA ID no. 40351226
  misc_feature (72)..(244): Pfam Name: OSCP PFAM Desc: ATP synthase delta
MASLQHPTASLQSKHILIPRNTLSQKPILNLSLHGTTFTPLKLKFGVTTTTTAAAATRRSTGATGARMSATAASSYAAALADVAAANNTLDATTADIEKIDEIFSDPQVSDYFADPTLAVEKKRQLIDEIAESSEFQPHTRNFLYILVDAQRIDLINEIAKEFELVYNSLTETELAVVTSVVKLESQHLAQIAKQVQKLTGTKNVRIKTLLDPSLVAGFTVRYSGSKLIDMSVRKQLEDIAAQLELGDISLAV

SEQ ID NO: 3189 - DNA, 532 bp, Glycine max
  misc_feature: Ceres CLONE ID no. 721303
  misc_feature: Ceres CDNA ID no. 40351227
  CDS (21)..(314): REFERENCED BY SEQ ID NO: 3190
acatcgaaaagaaagcaaacatggggtgtttttgcttccgagctagaaaggaaggagatgataacaaatacaagcccaatgatattatgacagcaggtgctgctgctgctgctgctgctgctccaaccaaaacttgtgatgaaactcatggtaccactacagatcataatcatggaactcatgatacctcagctcatcatcatggtagtcatgataccacaggccatcatcttcatcatcataccgttggtcatgatggaggcgctcattttagtgatggaggcgctcattttagtgatggtggcggtttctgaggttccattctgttttgtgttttaagtttgatgtcaatttatattttgtttggtttgtattttttttctttcagtttaatgtttttaatagcgtttgccttttttctattatttaaatattcttgtaataattgaaatatggtatgattttttatttttagaattttattaaggaaataatacaaataataaattgcgccctaaaaaaaaaaaaaaaa

SEQ ID NO: 3190 - protein, 97 aa, Glycine max
  misc_feature: Ceres CLONE ID no. 721303
  misc_feature: Ceres CDNA ID no. 40351227
MGCFCFRARKEGDDNKYKPNDIMTAGAAAAAAAAPTKTCDETHGTTTDHNHGTHDTSAHHHGSHDTTGHHLHHHTVGHDGGAHFSDGGAHFSDGGGF

SEQ ID NO: 3191 - DNA, 616 bp, Glycine max
  misc_feature: Ceres CLONE ID no. 721312
  misc_feature: Ceres CDNA ID no. 40351228
  CDS (79)..(489): REFERENCED BY SEQ ID NO: 3192
acaatacttccaccctcaccatttgagttcatatcattcgtcttcttcttccaacgtgaagcaatctctgtgttcgaaatggctcgtacgaagcaaaccgcaaggaagtccaccggaggaaaagctccgaggaagcaactcgccacgaaagcagcacgcaagtccgctccggcgaccggcggcgtgaagaagccacaccgtttcaggccgggtacggtggcgctgagggagatccgaaaataccagaagagcaccgagcttctcataaggaagcttcctttccagagactcgtaagggaaatcgctcaggacttcaagaccgatctccgcttccagagcagcgctgtctccgctctgcaggaagccgcggaggcctaccttgttgggctgttcgaggacaccaacctctgcgccattcacgccaagagagttaccattatgcccaaggacattcagcttgctcgtaggattaggggcgagagggcttagggtttgttcgtgtgatgtacaaagctgtagtactttcttagtgttattgttttgtaatcgattatgaaacttctattttcactgtgactggattggaaaatcatttgtagtaaaaaaaaaaaaaaaa

SEQ ID NO: 3192 - protein, 136 aa, Glycine max; identical to SEQ ID NO: 588
  misc_feature: Ceres CLONE ID no. 721312
  misc_feature: Ceres CDNA ID no. 40351228
  misc_feature (58)..(134): Pfam Name: Histone PFAM Desc: Core histone H2A/H2B/H3/H4

SEQ ID NO: 3193 - DNA, 1044 bp, Glycine max
  misc_feature: Ceres CLONE ID no. 721752
  misc_feature: Ceres CDNA ID no. 25401152
  CDS (138)..(743): REFERENCED BY SEQ ID NO: 3194
ataaaagaagtaagaacagatcgcaacacacaaagttgtaatttccaaattccaaattccaaatgtggtcgcttgcagttactctctagttatagcttcccttccaaattccatttgattccgtcggagagcttgcgatggacgcttcttccttcaagattatattgggctcatcctccgtcgcgcgccgcaagatattatccgaaatgggatacctattcacgataatgactgcagatattgatgaaaagagcatccgaaaggaaactccagaagacttagttatggctctcgccgaagccaaggcagaagccatcttacaaaggctccctgttgatgactacttaaaggaagctgagccaacattattaattacctctgaccaagtggtggtgtacgaaggtgtgattagggaaaaaccaacaagcaaagaagaagctcgacaattcttgaaagattattctggaaggcatgctgcaactgtgggatctgtactagttactaacctcaaaacaggattgagaaaaggagattcggatcgtgtggagatatatttcaatgaaataccggatgagatcattgagaaactggttgatgagggaattactctcaatgttgctggggggctgataatagaacatcctttagtattgccatttgtcaaagaagtggtagggacaaccgacagtgtgatgggactccccaaagctctgactgaaaaactgttgaaggaggccctgtagcttgagctaccgttccaccttgtaggactgctaagtgttaagtattggcttaatctgtgaatcagaatcttaacctttgttctcaacatttttcgaaactcattgctgtcttttctggtcatagttatgtgtaggctggcatgtaccgtgtggcagttacaccttaactattattgggtattctgatcctagttaatcaattgggccatattttattagtaacataagactgtattgcgactattaatcggtctattagaataagaattgcatgttgacatctccaaaaaaaaaaaaaaaa

SEQ ID NO: 3194 - protein, 201 aa, Glycine max
  misc_feature: Ceres CLONE ID no. 721752
  misc_feature: Ceres CDNA ID no. 25401152
  misc_feature (6)..(201): Pfam Name: Maf PFAM Desc: Maf
  misc_feature: Homolog of GI Number: 77551376 NR Desc: Maf
  misc_feature: Homolog of GI Number: 77551385 NR Desc: Maf
  misc_feature: Homolog of GI Number: 22328154 NR Desc: Maf family protein
  misc_feature: Homolog of GI Number: 37718756 NR Desc: putative Maf
  misc_feature: Homolog of GI Number: 42568283 NR Desc: Maf family protein
  misc_feature: Homolog of GI Number: 23308245 NR Desc: At5g66550/K1F13_22
  misc_feature: Homolog of GI Number: 27262394 NR Desc: Maf protein
  misc_feature: Homolog of GI Number: 34101434 NR Desc: probable inhibitor of septum formation
  misc_feature: Homolog of GI Number: 23484056 NR Desc: Maf
  misc_feature: Homolog of GI Number: 14603259 NR Desc: ASMTL protein
MDASSFKIILGSSSVARRKILSEMGYLFTIMTADIDEKSIRKETPEDLVMALAEAKAEAILQRLPVDDYLKEAEPTLLITSDQVVVYEGVIREKPTSKEEARQFLKDYSGRHAATVGSVLVTNLKTGLRKGDSDRVEIYFNEIPDEIIEKLVDEGITLNVAGGLIIEHPLVLPFVKEVVGTTDSVMGLPKALTEKLLKEAL

SEQ ID NO: 3195 - DNA, 1176 bp, Glycine max
  misc_feature: Ceres CLONE ID no. 721806
  misc_feature: Ceres CDNA ID no. 40351229
  CDS (23)..(1012): REFERENCED BY SEQ ID NO: 3196
actattgtagtgttccagagtgatgatggaagtgatgatctgtgagaatttccggtattcaccactctccatcttatcttcttctccttcacctcgttgccatctctctgttccatcttcttctttgaggattaaaccttcttcttcatcttcatcatcatcatctgtgtcttgttctctcatggagaatcaggagacccaacgcagcaaattcatggactttccgttcgtttcatctgcccagaagaacctcatggttgatctcgtttcaacacttgagaatcgctttcactctcagcttcttccttgcacactcccctctgatgttcagtattaccaaagccaaactgccactgcccaagcttcccttcatattagaccagctcataatgactcccagatagattttgtgttgggaagctgggtgcattcagagctaccaacaggagggtccttagatataacaagtctttcagcctatctcaacagctcaactgatgcgccaaattttgtgtttgaaatgatccgcagtagtccaacaatgctagttctcattcttgatttgcctcccaggaaagaccttgtgctttggcctgatgacctcaaaactttctatgaggacactcaactagacaaacatcggcaagctctggacagagttccagaggttcaaccatacttctcttcttccctttacatccgcactgtttcctctcctacagccataatggttcgcattctgacggaaaatggcggagtggaacgcatggaggagatcatcagggaccatttggaccccatttcaaagcaagtgttggggatctggttggatcattgtgcttgtgccaagcgacaagttggagaggcagaaagagcttatcttaagaaaagggatggtctcattagaaacaagaccattgagattgatcttggttcaagctttcccagattgtttggtccagaagtagcaaaccgggtactggatgctatcaaggagtattttacagtctgagatgcaaatttatttggaattgttggatattctatgtattacatacacgtacctaatttgctgtgcaatctaatgaggcctcagtatttgctgaatctctctagtcaagtatcatatccgtaaatgattatgatagtttctgctttctaaaaaaaaaaaaaaaa

SEQ ID NO: 3196 - protein, 328 aa, Glycine max
  misc_feature: Ceres CLONE ID no. 721806
  misc_feature: Ceres CDNA ID no. 40351229
  misc_feature (72)..(326): Pfam Name: RCC_reductase PFAM Desc: Red chlorophyll catabolite reductase
MEVMICENFRYSPLSILSSSPSPRCHLSVPSSSLRIKPSSSSSSSSSVSCSLMENQETQRSKFMDFPFVSSAQKNLMVDLVSTLENRFHSQLLPCTLPSDVQYYQSQTATAQASLHIRPAHNDSQIDFVLGSWVHSELPTGGSLDITSLSAYLNSSTDAPNFVFEMIRSSPTMLVLILDLPPRKDLVLWPDDLKTFYEDTQLDKHRQALDRVPEVQPYFSSSLYIRTVSSPTAIMVRILTENGGVERMEEIIRDHLDPISKQVLGIWLDHCACAKRQVGEAERAYLKKRDGLIRNKTIEIDLGSSFPRLFGPEVANRVLDAIKEYFTV

SEQ ID NO: 3197 - DNA, 756 bp, Glycine max
  misc_feature: Ceres CLONE ID no. 722021
  misc_feature: Ceres CDNA ID no. 36700928
  CDS (3)..(611): REFERENCED BY SEQ ID NO: 3198
atatcgcgtatagtgtggtagcagcagctgagcttgtttccgtcgccgcttcacccaccgtagcaaccatgatcattcccgagaagaaccgtaaagagatctgcaaatacctcttccaagagggagtttgctttgcgaagaaggacttcaatctggcaaagcacccagagattgatgtgccgaatctgcaggtgataaagctgatgcagagcttcaaatccagagagtatgtgagggagacatttgcgtggatgcactattactggttcctcaccaacgatggaattgagttcctcaggacatacctcaaccttccttccgaaattgtccctgccactctcaagaagcaggccaagcccgcgggaagaccattcggtggcccacccggtgatcgccccaggggcccacctcgctttgacggagagaggagattcggtggtgaccgtgatggataccgtggaggtccacgcggacctggtggtgatttcggtgacaagggtggagctcctgctgactacaggccttcttttgggggtggtcctggtggaaggcctggttttggtcgtggttccggtggttatggtgcaccaactagttcaaacattccttaaatataatgttatgtgctctaatttttgcagttttggctgtcattggagttaatagtagttgttcccctctcccaatagttgctcatctgacaatttacttactcggttatttatgcaatgaatattttgaaaaaaaaaaaaaaaa

SEQ ID NO: 3198 - protein, 180 aa, Glycine max
  misc_feature: Ceres CLONE ID no. 722021
  misc_feature: Ceres CDNA ID no. 36700928
  misc_feature (3)..(98): Pfam Name: S10_plectin PFAM Desc: Plectin/S10 domain
  misc_feature: Homolog of GI Number: 81074037 NR Desc: 40S ribosomal protein S10
  misc_feature: Homolog of GI Number: 81076822 NR Desc: 40S ribosomal protein S10
  misc_feature: Homolog of GI Number: 21281207 NR Desc: putative ribosomal protein S10
  misc_feature: Homolog of GI Number: 50909311 NR Desc: 40S ribosomal protein S10
  misc_feature: Homolog of GI Number: 20140213 NR Desc: 40S ribosomal protein S10
  misc_feature: Homolog of GI Number: 34905824 NR Desc: putative ribosomal protein S10
  misc_feature: Homolog of GI Number: 79325265 NR Desc: structural constituent of ribosome
  misc_feature: Homolog of GI Number: 40642980 NR Desc: ribosomal protein S10
  misc_feature: Homolog of GI Number: 61654720 NR Desc: S10
  misc_feature: Homolog of GI Number: 24266976 NR Desc: ribosomal protein S10
MIIPEKNRKEICKYLFQEGVCFAKKDFNLAKHPEIDVPNLQVIKLMQSFKSREYVRETFAWMHYYWFLTNDGIEFLRTYLNLPSEIVPATLKKQAKPAGRPFGGPPGDRPRGPPRFDGERRFGGDRDGYRGGPRGPGGDFGDKGGAPADYRPSFGGGPGGRPGFGRGSGGYGAPTSSNIP

SEQ ID NO: 3199 - DNA, 1167 bp, Glycine max
  misc_feature: Ceres CLONE ID no. 722224
  misc_feature: Ceres CDNA ID no. 40351230
  CDS (303)..(914): REFERENCED BY SEQ ID NO: 3200
atattcatctcagttcaaaggtttgtttctctcctattatcgatttgcctaacttgtattgttttttgtcgaaaccatcacactttacaactcaactattatgattttcctgttgtttatcccttcatcttattcatctttcatggaggaccacaccccatttctctagcactgattaaacaataatctttgatttttttggtcctccggtcatccttgatgtgttcacaggagtggctagtatagaagaaccataagcactgagggaaaaagtgattagtactttagccaacaaattaaaaatggctgtcaccaaggtctacattgtgtattactccttatatggacatgtagacaccatggctagagaagtacacagaggggctgctacagttgaaggtgttgaagcaacactttggagggtacctgagatgctttcggaactaatattggataagttgaaggcccctcctaaaccaaatgatgtaccagacataatgccagaacaatttgtggaggctgatggtttgatatttggttttccttctcgttttgggatgatgccgagccagctcaaggccttctttgatgcaactagtgagctatgggcatcccaagcacttgccggcaaacctgctggaatcttctggagtactggtttttatggtggaggccaagaactatcagcattgacagctataactcaattagctcatcatggtatgctttttgttcctcttggatacacctttggaagtggcatgtttgagatagatgaggtaaaaggaggatctgcatatggtgctggaacttttgcaggagatggatctcgtcaacctacagaactagaactgcagcaggcattttaccagggtaaatatcttgccgaagtaacaaaaaagctgaaaagctaacttctctgcctaacaaatacatgacaggatactatgaactgtgatgtgctacattatctataacatttgattgaagactcgatgattatttttaccggtaagacaagatagaaagacctcatgtggcttttctttttctgggttctgttgttgcaacaatgtatatcttctgttatctctttcagaaaactctcaaattattccaatgaaatgataaacaagatattcagtatttccaaaaaaaaaaaaaaaa

SEQ ID NO: 3200 - protein, 203 aa, Glycine max
  misc_feature: Ceres CLONE ID no. 722224
  misc_feature: Ceres CDNA ID no. 40351230
  misc_feature (4)..(170): Pfam Name: FMN_red PFAM Desc: NADPH
MAVTKVYIVYYSLYGHVDTMAREVHRGAATVEGVEATLWRVPEMLSELILDKLKAPPKPNDVPDIMPEQFVEADGLIFGFPSRFGMMPSQLKAFFDATSELWASQALAGKPAGIFWSTGFYGGGQELSALTAITQLAHHGMLFVPLGYTFGSGMFEIDEVKGGSAYGAGTFAGDGSRQPTELELQQAFYQGKYLAEVTKKLKS

SEQ ID NO: 3201 - DNA, 1760 bp, Glycine max
  misc_feature: Ceres CLONE ID no. 722441
  misc_feature: Ceres CDNA ID no. 40351231
  CDS (113)..(1621): REFERENCED BY SEQ ID NO: 3202
aaaaaaacaaaaagatgaatggtcagactcggaggatttctatttagtaaaaatctttcttagtttctttcatatgcactccatagttgaaggtggaagctaaggtattattatggcttatcaagtgttggtgatttgtgtggtctccagcatagtgtttgcatacatagtatggagaaaagaaaggaagaaaaagcttccaccgagtccaaagggccttcccatcattgggcacctccaccttgtgtccccaataccccaccaagatttttacaagctctcactccgccatggacccatcatgcaacttttcctcggctcagtcccttgtgtggtggcttccaccgcggaagccgccaaagagttcctcaaaacccacgaaatcaacttctccaaccgccccggccaaaacgtcgccgttcagttcttaacctacgtgtttggcccttacggaccctccgtgaagttcatcaagaaactttgcatgtccgaactcctcggtgggcgcatgctggaccagttccttcctgtgagacagcaagagacaaaaaaattcatcaaacgcgtcctccaaaagggtatcgctggtgaagccgttgacttcggaggagagttcatgagactctccaacaacatcatttcgagaatgaccatgaaccagacgagttccgaggacgagaaacaggccgaagagatgaggatgctggtggcggatgtcgcagaactcatgggcacgttcaacgtgtcggacttcatttggttcttgaagccttttgatttgcaggggttcaacaagaggatcaggaaaacgaggatcagattcgacgctgtcttggacagaatcatcaagcagcgtgaagaggaaagaaggaacaacaaggaaatcggtggaacgcgtcagtttaaggatatacttgatgttttgttggacataggcgaagatgacagttctgaaatcaaattaaccaaagagaacattaaggccttcatcatggatatatttgttgccgggactgacacgtcagctgcaaccatggaatgggctatggcagagttaatcaacaatccatgtgtgttggagaaggcaaggcaagagatagatgcagtggttggaaatagtagaataatagaagaatcagacattgtcaaccttccttacctacaagccattgttagagaaacacttaggattcacccaggtggtccattgattgttagagagtcatcaaaaagtgttgtggtttgtgggtatgaaattccagccaagacccgattatttgtcaatgtttgggctattggaagggaccccaatcattgggagaacccatttgagtttaggccggagaggttttttgaaaatggacaaagtcaattggatgttaggggacaacattatcattttattccattcgggagtggaagaagatcatgccctggtacttctctggcattgcagattgtgcatgtgaatctggctattatgattcagtgttttcagtggaagtttgataatggcaataacaaggtggacatggaagagaagtctggcatcactcttccgagggctcaccccataatttgtgtccctgttccaaggcttaacccattccctgttatgtgattgacgctccaaatgacattaaacaccttgtgagagagtgaaaaaagagagaatataaatattatgaatggtgaaaatgttgtgatacaaagagaaataaataacaggtgttaacaatgtgtcaaaaaaaaaaaaaaaa

SEQ ID NO: 3202 - protein, 502 aa, Glycine max
  misc_feature: Ceres CLONE ID no. 722441
  misc_feature: Ceres CDNA ID no. 40351231
  misc_feature (30)..(491): Pfam Name: p450 PFAM Desc: Cytochrome P450
MAYQVLVICVVSSIVFAYIVWRKERKKKLPPSPKGLPIIGHLHLVSPIPHQDFYKLSLRHGPIMQLFLGSVPCVVASTAEAAKEFLKTHEINFSNRPGQNVAVQFLTYVFGPYGPSVKFIKKLCMSELLGGRMLDQFLPVRQQETKKFIKRVLQKGIAGEAVDFGGEFMRLSNNIISRMTMNQTSSEDEKQAEEMRMLVADVAELMGTFNVSDFIWFLKPFDLQGFNKRIRKTRIRFDAVLDRIIKQREEERRNNKEIGGTRQFKDILDVLLDIGEDDSSEIKLTKENIKAFIMDIFVAGTDTSAATMEWAMAELINNPCVLEKARQEIDAVVGNSRIIEESDIVNLPYLQAIVRETLRIHPGGPLIVRESSKSVVVCGYEIPAKTRLFVNVWAIGRDPNHWENPFEFRPERFFENGQSQLDVRGQHYHFIPFGSGRRSCPGTSLALQIVHVNLAIMIQCFQWKFDNGNNKVDMEEKSGITLPRAHPIICVPVPRLNPFPVM

SEQ ID NO: 3203 - DNA, 1439 bp, Glycine max
  misc_feature: Ceres CLONE ID no. 722475
  misc_feature: Ceres CDNA ID no. 29191600
  CDS (223)..(1164): REFERENCED BY SEQ ID NO: 3204
gattggagggagtgaagtctttccctccacaagaaaaaaaaatcagaaaaaggaaatgagagattgttggacaccgtgcaaatcaagcactttgcttgttatttcacgcgccctctctccattttgacctccctttcctcttcgttccccactcactgcaacggcgccggagatccgtcgctctcctcctcctcctcctcctcctcctcctcctccgccgcgatgggcgccaattccatgctctccgagtcctctcacgatctcgacgaccagatctcccagctcatgcagtgcaagccactctccgagcaacaggtcagaggtttatgtgagaaggctaaggagattttaatggatgaaagtaatgttcagcctgttaaaagccctgtgacaatttgtggcgatattcatgggcaatttcatgatcttgctgaactgtttcgaattggagggaagtgtccagatactaactacttgtttatgggtgattatgtggaccggggttattattcagttgagactgtatcgctccttgtggcactgaaagttcggtatccccagcgaattactattcttagaggaaaccatgaaagccgtcagattactcaagtatatggattttatgatgaatgccttagaaagtatggtaatgctaatgtttggaagacctttacagacctttttgatttttttccattgactgcattggttgaatctgaaatattctgtttgcatggtggactgtcaccttcaattgagacccttgataacataaggaactttgatcgtgttcaagaggttcctcatgaaggccccatgtgtgatctattgtggtctgacccagatgacagatgtggctggggaatttctcctcgtggtgctggatatacttttggccaggatatatctgaacaattcaatcacactaacagccttaaattgattgctagagctcatcagcttgttatggatggatttaactgggctcatgaacaaaaggtggttaccatttttagtgcacctaactactgttaccgatgtgggaacatggcttccatattggaggttgatgattgcaagggtcacacattcatccagtttgaacctgctcctaggagaggagaacctgatgtcactcgtagaacgcctgattacttcttataatgtagctgttgaatgtcatactgttatatcatggttacctctactgcactaatttcaggcaggtaacattccactgattacactcgaggaattgctggacaccttgtctggagaagtcgccaagatgatgtcataatacgtattgttccagcaaaatgtggtcttttttttttttttttcgtgtttattttttgtatcttatgttcagtaactcccttttatggctttacaagctatatgactggattttgttggtcgcaaaaaaaaaaaaaaaa

SEQ ID NO: 3204 - protein, 313 aa, Glycine max
  misc_feature: Ceres CLONE ID no. 722475
  misc_feature: Ceres CDNA ID no. 29191600
  misc_feature (54)..(249): Pfam Name: Metallophos PFAM Desc: Calcineurin
  misc_feature: Homolog of GI Number: 45187972 NR Desc: ADR099Cp
  misc_feature: Homolog of GI Number: 33589738 NR Desc: At2g42500/F14N22.23
  misc_feature: Homolog of GI Number: 3255943 NR Desc: PP2A1 protein
  misc_feature: Homolog of GI Number: 49645498 NR Desc: YlPPH21
  misc_feature: Homolog of GI Number: 17848 NR Desc: phosphatase 2A
  misc_feature: Homolog of GI Number: 81694 NR Desc: phosphoprotein phosphatase
  misc_feature: Homolog of GI Number: 418777 NR Desc: phosphoprotein phosphatase
  misc_feature: Homolog of GI Number: 287811 NR Desc: phosphoprotein phosphatase type 2A
  misc_feature: Homolog of GI Number: 5419931 NR Desc: protein phosphatase 2A catalytic subunit
  misc_feature: Homolog of GI Number: 15810367 NR Desc: putative phosphoprotein phosphatase 2A isoform 4
MGANSMLSESSHDLDDQISQLMQCKPLSEQQVRGLCEKAKEILMDESNVQPVKSPVTICGDIHGQFHDLAELFRIGGKCPDTNYLFMGDYVDRGYYSVETVSLLVALKVRYPQRITILRGNHESRQITQVYGFYDECLRKYGNANVWKTFTDLFDFFPLTALVESEIFCLHGGLSPSIETLDNIRNFDRVQEVPHEGPMCDLLWSDPDDRCGWGISPRGAGYTFGQDISEQFNHTNSLKLIARAHQLVMDGFNWAHEQKVVTIFSAPNYCYRCGNMASILEVDDCKGHTFIQFEPAPRRGEPDVTRRTPDYFL

SEQ ID NO: 3205 - DNA, 571 bp, Glycine max
  misc_feature: Ceres CLONE ID no. 723186
  misc_feature: Ceres CDNA ID no. 40351232
  CDS (3)..(203): REFERENCED BY SEQ ID NO: 3206
catatttatctgcgacttggaggctagggtttccggattcttgcgttttaatctttgcaattcaaaagcatggggcactccaatgtgtggaactctcatccaaagaactacggacctggttctcgcacctgccgtgtgtgtgggaatcctcatggattgatcaggaagtatgggcttatgtgttgcaggcagtgcttccgtagcaatgccaaggaaattggcttcattaagtatcgctgaaggattagtgtccaactgccccattcggtttggattcttgcattaggctgggttgattttactgtctgaagaacctaagaatttttgtgacatttagtgaagttaattatcaaaactcaatttgtggaactaagaatatttttgttttttatataattgttttgagctatctacatctttctccgtgagccatcattctgcagttcttttccttgtgtatgctctctcactttgaccatgatgggaaagccatcatcgactcgactccatacaatgctatacttttaaatgttaggtctgattgtttcttaacctaaaaaaaaaaaaaaaa

SEQ ID NO: 3206 - protein, 56 aa, Glycine max
  misc_feature: Ceres CLONE ID no. 723186
  misc_feature: Ceres CDNA ID no. 40351232
  misc_feature (3)..(56): Pfam Name: Ribosomal_S14 PFAM Desc: Ribosomal protein S14p/S29e
MGHSNVWNSHPKNYGPGSRTCRVCGNPHGLIRKYGLMCCRQCFRSNAKEIGFIKYR

SEQ ID NO: 3207 - DNA, 812 bp, Glycine max
  misc_feature: Ceres CLONE ID no. 723352
  misc_feature: Ceres CDNA ID no. 40351233
  CDS (90)..(521): REFERENCED BY SEQ ID NO: 3208
ctctgttcacaagtttcgtttccaggtttcggcgcaatcggcttctgcttcaaggaaggagagcttgttattctctatcaacaagtaaaatgtcaggtgaagagggtgtcattgcagttgagccagctgctgctgctgctgccatcccaggcgagccaatggatatcatgactgccttacaacttgtgctcagaaaatctctggcttatggtggtttgtcgcgtggccttcatgaaggtgcaaaagtgattgagaagcatgctgcacaactctgtgttcttgcagaagactgtgaccagcctgactatgttaaactggttaaggccctttgtgcagagcacaatgttagcctgctgacagttccgagtgcaaagacccttggagaatgggctggtttgtgcaagattgattccgaaggaaaagcaaggaaggttactggttgctcctgtgtggttgtgaaggatttcggtgaggagcatgaagcctataacgtcgttctgcagcatgtgaaatctcaatgagttgcaagattcatagattttatgcacttcacattttcattttgggttattccttgagaatgaattttgccttgtggctggattatatctaccttgggttttgattgtttaatatgactttgccacattctcaatgttgctgttacttttttttatcctctgatgcattgctgtggctctaattaggaactcttgtttcacattaatcatataaagtagaagttaagaatttggccctttatttggcattaatgttaattcatgcgttgcccgagaaaaaaaaaaaaaaaa

SEQ ID NO: 3208 - protein, 143 aa, Glycine max
  misc_feature: Ceres CLONE ID no. 723352
  misc_feature: Ceres CDNA ID no. 40351233
  misc_feature (28)..(123): Pfam Name: Ribosomal_L7Ae PFAM Desc: Ribosomal protein L7Ae/L30e/S12e/Gadd45 family
MSGEEGVIAVEPAAAAAAIPGEPMDIMTALQLVLRKSLAYGGLSRGLHEGAKVIEKHAAQLCVLAEDCDQPDYVKLVKALCAEHNVSLLTVPSAKTLGEWAGLCKIDSEGKARKVTGCSCVVVKDFGEEHEAYNVVLQHVKSQ

SEQ ID NO: 3209 - DNA, 547 bp, Glycine max
  misc_feature: Ceres CLONE ID no. 723453
  misc_feature: Ceres CDNA ID no. 40351234
  CDS (61)..(420): REFERENCED BY SEQ ID NO: 3210
ataaacttcaagcgagcaaacaaacaactagcaagggaagaaagaaactacagaaaagaaatggcttccacttctgcagtttcaatggctatgccagtaacttatgctagccagaagagggtggtgcctagctcggatgcattcttcaagccactgcctctacggtcttccaaggcagtgacagcatcaaaactcaatggaaggtttcaagtgagggcctccatgaaggagaaagttgtgacggggctcaccgcagctgcattgacagcttcaatgatggttcctgatgtggctgaggctgccgttacaccttctctcaagaacttcttgctcagcatcgcggcaggtggagttgttgttgttgccattattggtgctgtgatcggtgtttccaatttcgatcccgtcaagcgtagctgatggagttctgaggcactgtgttttatttatttttttgttacctcttatcatgatatgtatctttaatgtaatgttcttcagaaatgaagtgaaccctctgatgtgtgtactaaaaaaaaaaaaaaaa

SEQ ID NO: 3210 - protein, 119 aa, Glycine max; identical to SEQ ID NO: 1716
  misc_feature: Ceres CLONE ID no. 723453
  misc_feature: Ceres CDNA ID no. 40351234
  misc_feature (82)..(119): Pfam Name: PsbX PFAM Desc: Photosystem II reaction centre X protein

SEQ ID NO: 3211 - DNA, 736 bp, Glycine max
  misc_feature: Ceres CLONE ID no. 723527
  misc_feature: Ceres CDNA ID no. 25891373
  CDS (55)..(495): REFERENCED BY SEQ ID NO: 3212
atagtgtgttaagcctcgccgactcggttgctatcagcgagtgagagtgagtgaatggttctcttgcagcaacaaggtttagtgacaccaaacagactggaaatgggtcgtggggtcagtgctggtggtggactgagttccttggattatctctttggcagtggggtacctgccagcagtgcaaatggtgctcgcactcaaaatgcaagtgctccttcaccaccggttgataagcaaagtccagcaccagcagcagcagcagcacctgcacctgcagcagcagcagcaccagcacctgcaccagcaccagcaccagcaccagctgataagcaaattccagctggaattcctggaagtctcaaaaacaattaccatcgcgctgatgggcaaaactgtggcaactttctcactgatcggccatctaccaaggttcatgctgccccgggtggtggatcttccttgcattacctctttggtggtcctccagggaactgattcatacctaccatgtgatgtatcatgtgtaaaatggatagtgttgcattgtgtttagaccagtggactttgtttcttgttcaattgaatctcttgacaatgttggtgtggcttgatggccaaactaagctgattcataggtttgttgttctgtgttattgtgtgggtttcgattaatgaaatttactgtgcgaatgagctaaagtggctcataaatgttctcttaaaaaaaaaaaaaaaa

SEQ ID NO: 3212 - protein, 130 aa, Glycine max
  misc_feature: Ceres CLONE ID no. 723527
  misc_feature: Ceres CDNA ID no. 25891373
  misc_feature: Homolog of GI Number: 2765837 NR Desc: NAP16kDa protein
  misc_feature: Homolog of GI Number: 21280823 NR Desc: putative nitrilase
  misc_feature: Homolog of GI Number: 28827480 NR Desc: putative nitrilase associated protein
  misc_feature: Homolog of GI Number: 21592782 NR Desc: nitrilase associated protein
  misc_feature: Homolog of GI Number: 21592628 NR Desc: putative nitrilase
  misc_feature: Homolog of GI Number: 7800652 NR Desc: PspA
  misc_feature: Homolog of GI Number: 10945166 NR Desc: TapA protein
  misc_feature: Homolog of GI Number: 992946 NR Desc: p57KIP2
  misc_feature: Homolog of GI Number: 38099663 NR Desc: predicted protein
  misc_feature: Homolog of GI Number: 4557441 NR Desc: cyclin
MGRGVSAGGGLSSLDYLFGSGVPASSANGARTQNASAPSPPVDKQSPAPAAAAAPAPAAAAAPAPAPAPAPAPADKQIPAGIPGSLKNNYHRADGQNCGNFLTDRPSTKVHAAPGGGSSLHYLFGGPPGN

SEQ ID NO: 3213 - DNA, 684 bp, Glycine max
  misc_feature: Ceres CLONE ID no. 724313
  misc_feature: Ceres CDNA ID no. 40041306
  CDS (108)..(395): REFERENCED BY SEQ ID NO: 3214
aattacaatacaaccttcagctcttgttcacgaaacacgcgctttttcacagccttcgaagtcaaagattctggctgagcagtcctaagtaagtcattgtagaagtcatggttctagagtccattttgtcgtcttcgaagtcaccatctttcaggaggcagtttgcaaagcatgaactgggcagttggtcgacactcttgaagaggcaccgcttcctcttatttgctcttgctctactaactgtcctctgtaccatttatctatattttgcagttacatttgcagccaatgactcctgctctgggttgaatggacctctgaaagattcctgtcatatggagcatgttaaggcttctgtagccaagagtaaactgaaaggtctgagacatttctgattccaattcaagttgtgctggagagtttttatcttttcctttaggagacatgaaatcgaaatatgatttttcggctcagtgttactataatatgtattatttatctatactgtttatcttagtatttgtgagccaaaatgtacaatccatgttagaaagcaatttcttgattgctcattttggggggctgctttatgatggctaatataagttcggtgagcatcctagcagcccaaatcaaatttgagtttttacaatgttgatggttaattcaaaaaaaaaaaaaaaa

SEQ ID NO: 3214 - protein, 95 aa, Glycine max
  misc_feature: Ceres CLONE ID no. 724313
  misc_feature: Ceres CDNA ID no. 40041306
  misc_feature: Homolog of GI Number: 6587823 NR Desc: ESTs gbT41688
MVLESILSSSKSPSFRRQFAKHELGSWSTLLKRHRFLLFALALLTVLCTIYLYFAVTFAANDSCSGLNGPLKDSCHMEHVKASVAKSKLKGLRHF

SEQ ID NO: 3215 - DNA, 440 bp, Glycine max
  misc_feature: Ceres CLONE ID no. 724589
  misc_feature: Ceres CDNA ID no. 25891374
  CDS (27)..(215): REFERENCED BY SEQ ID NO: 3216
actacttaacttcattcgcctcaacaatggcttcctctcaattcctaatcatgaccacaatggcggtctttctcgccgtcgtctccgccgctcacgccgccgatgcgccggcacctagccccacctctcccgcctccgtcatctctccgtccttcgccgccggttttctcaccgccgccgttgctctcgtcttcggatcttctctcaggatctgaacatgttgcgcttcggcctctggattttcattttctttctaatttttttttgtgtggatttatcagagatcgaggcttgactagtactagagtattgatgtgcagagactttatgtgttcgtttctggatcttaagtaattttgctatttcatggctattatcatttgttatcattggtttggtacataatgaattttatttgatattcaaaaaaaaaaaaaaaa

SEQ ID NO: 3216 - protein, 62 aa, Glycine max
  misc_feature: Ceres CLONE ID no. 724589
  misc_feature: Ceres CDNA ID no. 25891374
  misc_feature: Homolog of GI Number: 25992536 NR Desc: fiber protein Fb7
MASSQFLIMTTMAVFLAVVSAAHAADAPAPSPTSPASVISPSFAAGFLTAAVALVFGSSLRI

SEQ ID NO: 3217 - DNA, 1128 bp, Glycine max
  misc_feature: Ceres CLONE ID no. 724767
  misc_feature: Ceres CDNA ID no. 29191902
  CDS (171)..(866): REFERENCED BY SEQ ID NO: 3218
agttgagtatcctttttcttattcctttgcacttttatttgtgctcgttcttcttctttcctttacacagaacaatagtagcaagcagagccccaagatctgtgcttgaaccttcacttgtgtttccttccttctgcagacgagcttcaccttgcgccgaagggccacagatggttgaaaccgatatggatgccgaaactgttgcaaatgtggttccaccaaaggagactccaaacagtgttcccatctcttatcattcctcacactcacaccctcctcttaatgagaggattatttcatccatgaccagaagatctgttgctgcacacccgtggcacgaccttgagatagggcctggtgctccaacgatcttcaattgtgtgattgagattgggaaagggagcaaggtgaaatatgaactggacaaaaaatcgggtcttatcaagatcgaccgtgttctttactcatcagttgtgtatcctcacaattatgggtttatcccacgtactatttgtgaggacagtgatcccctggatgtcttgattattatgcaggagccggttcttccaggttgctttcttcgggccaaagcaattggtctcatgcccatgattgatcagggggagaaagatgataagataattgctgtctgtgctgatgatcccgagtatcgacattacaatgatatcaaggagcttcctccacatcgtttagctgaaattcgtcgtttttttgaagactacaagaagaatgaaaacaaggaagtcgcagtaaacgactttttgcctgcctcagctgctttcgaagcggttaatagatccatgagcttgtatgcggactacatagtggagagcttgagacggtagtcgttgatgaatgatgcacgtcaaggatttttaactgacggaccaatggaagatgtttgcttgaaaaaaggctgcattatcaatattatgtaggaataaaaaaaaacattttactttagctgcctcttagctcatgcatgttctacaaactgtgcttaatttcaaatatgtcatccctgcaatatcaaatttacctgcctcttatagcacatgcacaatccaatatcaaatgttttaatcttgtataaaaaaaaaaaaaaaa

SEQ ID NO: 3218 - protein, 231 aa, Glycine max
  misc_feature: Ceres CLONE ID no. 724767
  misc_feature: Ceres CDNA ID no. 29191902
  misc_feature: null
  misc_feature: Useful for making plants with modulated nitrogen use efficiency
  misc_feature (69)..(223): Pfam Name: Pyrophosphatase PFAM Desc: Inorganic pyrophosphatase
  misc_feature: Homolog of GI Number: 6752884 NR Desc: soluble inorganic pyrophosphatase
  misc_feature: Homolog of GI Number: 48927683 NR Desc: putative inorganic pyrophosphatase
  misc_feature: Homolog of GI Number: 6729513 NR Desc: inorganic pyrophosphatase
  misc_feature: Homolog of GI Number: 50931109 NR Desc: putative inorganic pyrophosphatase
  misc_feature: Homolog of GI Number: 21593570 NR Desc: inorganic pyrophosphatase
  misc_feature: Homolog of GI Number: 2706450 NR Desc: magnesium dependent soluble inorganic pyrophosphatase
  misc_feature: Homolog of GI Number: 5669924 NR Desc: soluble inorganic pyrophosphatase
  misc_feature: Homolog of GI Number: 21537232 NR Desc: soluble inorganic pyrophosphatase
  misc_feature: Homolog of GI Number: 534916 NR Desc: soluble inorganic pyrophosphatase
  misc_feature: Homolog of GI Number: 78708597 NR Desc: inorganic pyrophosphatase
  misc_feature: Useful for making plants with altered leaf shape eg curled leaves
MVETDMDAETVANVVPPKETPNSVPISYHSSHSHPPLNERIISSMTRRSVAAHPWHDLEIGPGAPTIFNCVIEIGKGSKVKYELDKKSGLIKIDRVLYSSVVYPHNYGFIPRTICEDSDPLDVLIIMQEPVLPGCFLRAKAIGLMPMIDQGEKDDKIIAVCADDPEYRHYNDIKELPPHRLAEIRRFFEDYKKNENKEVAVNDFLPASAAFEAVNRSMSLYADYIVESLRR

SEQ ID NO: 3219 - DNA, 771 bp, Triticum aestivum
  misc_feature: Ceres CLONE ID no. 725084
  misc_feature: Ceres CDNA ID no. 25891162
  CDS (57)..(518): REFERENCED BY SEQ ID NO: 3220
atctcccatcctttgtttgttgatccatctcttgtttcttgctttctttcttcaccatgtcacttgctgggaaaatcaccactgaaatcggggttcatgcaaccgctacaaagtggttcaacctcttcgcaacacaactccatcatgttcaaaacctaactgatagagtgcatggaaccaagctgcatcaaggtgaagactggcatcacaacgagacagtcaagcactggacttataccatagatggtaaggttacaacatgtctggagagtattgaatccattgatgaacagagcaaaacaatcacctacaagctcttcagtggtgacattgatcataattataagaactttaagttcatctttcaagccattgatgataatgatcatggcggtactattatcaaatggaccgttgaatacgagaggcttcgtgaggaggttgatcctccatatggccacattgaatacctgcacaaatgcactaaagatattgatggtcatcttctcaaagcatagctagctctaaaagttatgcactaaaaaataatgggcttgacctttggataagtgcttatatgtataataaaatcggtgtgaagtttgacgagaagaatgcttagttatgtagatccttcctttgtatggaaaataaacttggatatgcatgtcggtgatatcttgaagtgtgttaaattatatttggaagtgctcaatgtgatgcatgggaatattattaatgaatggatgtttatgaaaaaaaaaaaaaaaa

SEQ ID NO: 3220 - protein, 153 aa, Triticum aestivum
  misc_feature: Ceres CLONE ID no. 725084
  misc_feature: Ceres CDNA ID no. 25891162
  misc_feature (2)..(153): Pfam Name: Bet_v_I PFAM Desc: Pathogenesis
  misc_feature: Homolog of GI Number: 5739198 NR Desc: ripening related protein
  misc_feature: Homolog of GI Number: 20975622 NR Desc: putative ripening related protein
  misc_feature: Homolog of GI Number: 34452233 NR Desc: ripening
  misc_feature: Homolog of GI Number: 48714607 NR Desc: putative Bet v I family protein
  misc_feature: Homolog of GI Number: 7406710 NR Desc: putative ripening
  misc_feature: Homolog of GI Number: 2465015 NR Desc: ripening
  misc_feature: Homolog of GI Number: 3164115 NR Desc: major latex
  misc_feature: Homolog of GI Number: 13172242 NR Desc: major latex
  misc_feature: Homolog of GI Number: 30698759 NR Desc: Bet v I allergen family protein
MSLAGKITTEIGVHATATKWFNLFATQLHHVQNLTDRVHGTKLHQGEDWHHNETVKHWTYTIDGKVTTCLESIESIDEQSKTITYKLFSGDIDHNYKNFKFIFQAIDDNDHGGTIIKWTVEYERLREEVDPPYGHIEYLHKCTKDIDGHLLKA

SEQ ID NO: 3221 - DNA, 517 bp, Triticum aestivum
  misc_feature: Ceres CLONE ID no. 725110
  misc_feature: Ceres CDNA ID no. 25891163
  CDS (14)..(376): REFERENCED BY SEQ ID NO: 3222
atcaacagcaacgatggtgcagaggctcacttatcgcaagcgccatagctatgctaccaaatccaaccagcaccgggttgttaagacccctggtgggaagttggtgtaccagaccactaagaagagagcaagtggacctaagtgccctgtcactggcaagaggatccaagggattccacacttaagacctgctgaatacaagaggtctagattgcctaggaaccgcaggaccgtaaaccgagcctatggaggtgttttatccgggggagctgttagagaaaggattattcgcgctttccttgttgaagagcaaaaaattgtgaaaaaggtattgaagatccagaaggcaaaagaaaagcaggcatcaaagagttaagctgttgagttattcgtgagtgaaaaaaagatcttgttaaaatttgtgctaaagaattttgactttgaatggtgttaactatgaatgtggaaacttaatttgaaatttattttatgattcttgtgccaaaaaaaaaaaaaa

SEQ ID NO: 3222 - protein, 120 aa, Triticum aestivum
  misc_feature: Ceres CLONE ID no. 725110
  misc_feature: Ceres CDNA ID no. 25891163
  misc_feature (5)..(103): Pfam Name: Ribosomal_L34e PFAM Desc: Ribosomal protein L34e
  misc_feature: Homolog of GI Number: 47824936 NR Desc: Ribosomal protein L34e
  misc_feature: Homolog of GI Number: 2119150 NR Desc: ribosomal protein L34
  misc_feature: Homolog of GI Number: 1076636 NR Desc: ribosomal protein L34
  misc_feature: Homolog of GI Number: 21436403 NR Desc: putative 60S ribosomal protein L34
  misc_feature: Homolog of GI Number: 21594659 NR Desc: 60s ribosomal protein L34
  misc_feature: Homolog of GI Number: 13194822 NR Desc: putative 60S ribosomal protein L34
  misc_feature: Homolog of GI Number: 20259165 NR Desc: putative 60S ribosomal protein L34
  misc_feature: Homolog of GI Number: 50941301 NR Desc: putative ribosomal protein L34
  misc_feature: Homolog of GI Number: 50946109 NR Desc: putative ribosomal protein
  misc_feature: Homolog of GI Number: 57471712 NR Desc: ribosomal protein l34
MVQRLTYRKRHSYATKSNQHRVVKTPGGKLVYQTTKKRASGPKCPVTGKRIQGIPHLRPAEYKRSRLPRNRRTVNRAYGGVLSGGAVRERIIRAFLVEEQKIVKKVLKIQKAKEKQASKS

SEQ ID NO: 3223 - DNA, 860 bp, Triticum aestivum
  misc_feature: Ceres CLONE ID no. 725111
  misc_feature: Ceres CDNA ID no. 25891164
  CDS (123)..(638): REFERENCED BY SEQ ID NO: 3224
aatcttcacttattgacagattcacggcgcacgagccctagctcttatccgtgccgttgaatctcgccgtccggctgctgctgttagtcgacggagctctcctactattcaaaacagaagctatgaaatcgttcaatataaatggaaccactctttctgttgcactctacactgacgtaacaaattcaaaagaactcttggaaagtatgcaagccgggacattggagccagaagttgcattcctcaatgctttacttattccagatattttccctgttctagcagctgcacacaaaacacttgtagccaagtctcgagactctttgaccacacgcactcttcattcagagcttgtttacaactactcagggtctaagcatattactgaatctttgaaaagatgcggcatctctgacagcacaacttgtatccttgctgctcgatttgatgctagtcctgatgagataaaagctatagggaagctcattaacggcaaagagattgacctggaggagctagaagggagagcaaaccaatcccagatacaaaagatttacaagatatcttcctcggaacttggagtatcatcacttgctgatgcaataacttgtcgtatagctgctcgtgatgccctgtgagaagaatgaacgtgatctgcttgagttttcttatctccttgatctattgcagaaaatgtcatgaaatttataagaaagcttcaggctacctttatatatactttagctttcatgtgctgtaatgctgatgtatttttttattatcattcttactgcagtaacatttcttatggaaaataaaaaagtagatggtcatttgatctgataaaaaaaaaaaaaaaa

SEQ ID NO: 3224 - protein, 171 aa, Triticum aestivum
  misc_feature: Ceres CLONE ID no. 725111
  misc_feature: Ceres CDNA ID no. 25891164
  misc_feature: Homolog of GI Number: 38454120 NR Desc: At4g34412
  misc_feature: Homolog of GI Number: 62422579 NR Desc: Prpk
  misc_feature: Homolog of GI Number: 20071790 NR Desc: 1810034M08Rik protein
  misc_feature: Homolog of GI Number: 20809577 NR Desc: CGI
  misc_feature: Homolog of GI Number: 12001980 NR Desc: My019 protein
  misc_feature: Homolog of GI Number: 26224770 NR Desc: CGI
  misc_feature: Homolog of GI Number: 61812574 NR Desc:  similar to CGI
  misc_feature: Homolog of GI Number: 50792175 NR Desc:  similar to CGI
MKSFNINGTTLSVALYTDVTNSKELLESMQAGTLEPEVAFLNALLIPDIFPVLAAAHKTLVAKSRDSLTTRTLHSELVYNYSGSKHITESLKRCGISDSTTCILAARFDASPDEIKAIGKLINGKEIDLEELEGRANQSQIQKIYKISSSELGVSSLADAITCRIAARDAL

SEQ ID NO: 3225 - DNA, 1658 bp, Triticum aestivum
  misc_feature: Ceres CLONE ID no. 725299
  misc_feature: Ceres CDNA ID no. 24766167
  CDS (83)..(1615): REFERENCED BY SEQ ID NO: 3226
aacagccaagcttcttctactgctagtctgaaggcagtagttactgctagtatcactatcgtgagttgccgactatttgtcaatggcggccttcgcaaagatcgccatggagtgcgtgcacgatcccctcatctggctacttattgcgtcggtggccttggtcatcctgcgaagacggcggctgaacccgccgctccctccgggccccaagccgctgccgatcatcggcaacatgatgatggcggaccagctgactcaccgtggcctggcggcgctggcgaagcagtacggcgggttgctgcacctccgcctgggctcgctccgcgtcttcgcggtgtcgaccccggagtacgcgcgcgaggtgctccaggcgcaggacggcgacttctggcaccgcccagcctccatcgccgtccgctacctcacctacggctgctccgacatggcgttcgcgcgcgacgggccctactggcgccagatgcgcaagctgtgcgtcacgaggctcttcagccgccggcgcgccgagacgtggctcgccgtgcgcgacgggtacggggagctcgcccgggccgtcggcaggtccggcggcgaggccgtgaacctcggcgagctcatcttcaagcacaccgtgagcgtcatcttccgggccgccttcggcgtccgcgacgtccaaggactggacgagttcatccccatgttcaaggagttctccaagctcttagaagcgttccacgtcggtgacttcttcccttggcttagctggatgggccgacggggcttcgaccgccgcctccgcaccgtgcgcgccgctctcgggacgtttgtggacaagatcattgacgagcacgtgaggaggggcaagaaccccgacgacgccgacgccgacatggtagacggcctactcgcgttactcgctgatgcgaaccaagccagcggggaggacgacctccgcttcacccgcgacaacgtcagggccatgatgatggacatgttgtttggcggaccagacacagtggggttcaccatcgagtgggcgatggcagagatgatccattgccctcacatcctcctgcggctgcagcaggagctcgccgacgttgtggggctcgaccggattgttaccgaatcggacctcggcaagctccccttcctcaagtgcgtcgtcaaggagacgctccgactgcacccgccgatcccgatccacctccacgggacgaccaaagattgcgtcctcggtggctactcggtgcccaggggctcccgtgtcttcatcaacgcgtgggcgatcaaccgcgacggcgaggcgtggaaggaccctgacacgttccggccgtcgaggttcatgccagacggggaagccgccgggctggatctcaagggcggttgctatgagttgttgtcgttcgggtcgggtcgacgctcgtgcccggcacaggggcttggtcagcacgccgtggagttcgccgtcgcgcagcttgtgcatgggttcgactggaagctacccggcgacatgaaaccgacggagctcgacatgagcgacatgaacggtgtcaccgtgtcccgcgccacacggctctacgcggttcccacgccccggctcacttgtcctttgtgatattaattgaaacatcgctcttgttgtaaaaaaaaaaaaaaaa

SEQ ID NO: 3226 - protein, 510 aa, Triticum aestivum
  misc_feature: Ceres CLONE ID no. 725299
  misc_feature: Ceres CDNA ID no. 24766167
  misc_feature (39)..(501): Pfam Name: p450 PFAM Desc: Cytochrome P450
  misc_feature: Homolog of GI Number: 5731998 NR Desc: aldehyde 5
  misc_feature: Homolog of GI Number: 46403211 NR Desc: coniferylalcohol 5
  misc_feature: Homolog of GI Number: 10197650 NR Desc: cytochrome p450
  misc_feature: Homolog of GI Number: 10197652 NR Desc: cytochrome p450
  misc_feature: Homolog of GI Number: 47933890 NR Desc: ferulate 5
  misc_feature: Homolog of GI Number: 12578895 NR Desc: ferulate
  misc_feature: Homolog of GI Number: 12578899 NR Desc: ferulate
  misc_feature: Homolog of GI Number: 12578911 NR Desc: ferulate
  misc_feature: Homolog of GI Number: 6688937 NR Desc: ferulate
  misc_feature: Homolog of GI Number: 30696845 NR Desc: cytochrome P450 71B10
  misc_feature: Useful for delaying flowering time
  misc_feature: Useful for delaying senescence
  misc_feature: Useful for increasing chlorophyll and photosynthetic capacity
  misc_feature: Useful for making ornamental plants with modified flowers
  misc_feature: Useful for making ornamental plants with modified flowers
  misc_feature: Useful for making plants with altered leaf shape eg curled leaves
  misc_feature: Useful for making plants with increased biomass and foliage
  misc_feature: Useful for making shorter plants
  misc_feature: Useful for making smaller plants
  misc_feature: Useful for making stronger plants
MAAFAKIAMECVHDPLIWLLIASVALVILRRRRLNPPLPPGPKPLPIIGNMMMADQLTHRGLAALAKQYGGLLHLRLGSLRVFAVSTPEYAREVLQAQDGDFWHRPASIAVRYLTYGCSDMAFARDGPYWRQMRKLCVTRLFSRRRAETWLAVRDGYGELARAVGRSGGEAVNLGELIFKHTVSVIFRAAFGVRDVQGLDEFIPMFKEFSKLLEAFHVGDFFPWLSWMGRRGFDRRLRTVRAALGTFVDKIIDEHVRRGKNPDDADADMVDGLLALLADANQASGEDDLRFTRDNVRAMMMDMLFGGPDTVGFTIEWAMAEMIHCPHILLRLQQELADVVGLDRIVTESDLGKLPFLKCVVKETLRLHPPIPIHLHGTTKDCVLGGYSVPRGSRVFINAWAINRDGEAWKDPDTFRPSRFMPDGEAAGLDLKGGCYELLSFGSGRRSCPAQGLGQHAVEFAVAQLVHGFDWKLPGDMKPTELDMSDMNGVTVSRATRLYAVPTPRLTCPL

SEQ ID NO: 3227 - DNA, 1041 bp, Triticum aestivum
  misc_feature: Ceres CLONE ID no. 725662
  misc_feature: Ceres CDNA ID no. 40351235
  CDS (63)..(863): REFERENCED BY SEQ ID NO: 3228
actccagtcttcctcgcaacactcctcccgttccattcgctccactgcctccaaaagtcgacatggctgcccgcaccaccgtccccttgctcccggagggggcgacggcgttgcggattcccaccgaccgcccggccttctacgacgtcttcaagggctacgatgtcctcccggccgccgccgccgtccgcctggccgtcccgccgtcgcagacgccccggtcccgtccggagctcgcgtacgttacgctgcgccgcagcccggaggaggtgctctacgcgaagcgcttcgcgtacgcgtacatcaccccggggacggggacggacccggtgcccctcatccgccgcgtcttccgcgccctggcccccgacctgccgcacaccttggaggtgttcccgacctgcgggtacggcgacgccacgctccgcttcggcacgcccgccgagcgggaggcggccatgcgcaggcagccgttcgaggtcgacggcgtcacggtgaagctcctgcgggataccgagagcgtccccaacgtccccgtccccgagaccgactgcatggcccacgtcgccctgcacgactaccccgtggagcagcggaccgccgaggacatcgaggacaactgccggcgcttcgggttcctgcgcgagatcgacccggcctgcttcacggcgcccgacctctccacggtccgcgtcgtccttgagctggggcaccctcgagagatcccgcgcgagctccggatcgcctacatgtttgacgactcctccagcgtcgtccccgtccagatcgtcaaggtctggaactgcgcgcattcctacgacgcccggggacgctacgtgcgtctcttccacgccccggcctgacggatgcggggagcagagtgctgctagctctgtttggttgtgcctgaatctatgcaatggttatgtcaggaagtagtagttcaaactcttaattatgtttttttcaattgaagttcttaattatgctctgttggcgttagcgcttactagctttaactcttgaaaaaaaaaaaaaaaa

SEQ ID NO: 3228 - protein, 266 aa, Triticum aestivum
  misc_feature: Ceres CLONE ID no. 725662
  misc_feature: Ceres CDNA ID no. 40351235
MAARTTVPLLPEGATALRIPTDRPAFYDVFKGYDVLPAAAAVRLAVPPSQTPRSRPELAYVTLRRSPEEVLYAKRFAYAYITPGTGTDPVPLIRRVFRALAPDLPHTLEVFPTCGYGDATLRFGTPAEREAAMRRQPFEVDGVTVKLLRDTESVPNVPVPETDCMAHVALHDYPVEQRTAEDIEDNCRRFGFLREIDPACFTAPDLSTVRVVLELGHPREIPRELRIAYMFDDSSSVVPVQIVKVWNCAHSYDARGRYVRLFHAPA

SEQ ID NO: 3229 - DNA, 1423 bp, Triticum aestivum
  misc_feature: Ceres CLONE ID no. 726598
  misc_feature: Ceres CDNA ID no. 40041307
  CDS (45)..(1091): REFERENCED BY SEQ ID NO: 3230
gaaattgttaaagcagagcaagctgcgagccatccaggaggtggatggcaccaccgtcgccgtcgccgccgccgccgcgagtgtgcgtgaccggcggcggcgggttcatcgcctcgtggctcgtcaagctgctcctctcccggggctacgccgtccacgccacgctccgcgacccgagtgatccgaagaacgcgcatctgatgcagctggacggcgcggcggagagcctgagcttgttcaaggccgacgtgctcgaccgcgccgcgctggccgccgccgtcgcgggttgccagggcgtcttccatgtcgcctcccctgtgcccgcggagaagatcgtcgatcctgagtcagaagtcatggtgcctgccgtgaagggcaccttaaatattcttgaagtttgttcatctctgaaggttcagaaagttgtggtggtgtcatccactgctgccgttcattatgatcccaactggcctcagggtaaacccaaagacgagagttgctggtcggacagaaaagtatgcaaggataatgagatctggtatagtcttgctaaaactgttgctgaagagacagtttgggaatatgcagagaagtacaggctaaatgctgttgcagtatgcccttgtattgttctggggccacaattgcaatgtgctgtcaatactacaagcgaactcctcctctatgtcataacaggaggtcctaatgcgttgaatgacgtgctgtggcacatagtcgatgtccgtgatgtggccgatgccctgcttctgctatacgagaaacccgaatcatccgggagatatatctgcgcaccaaattacattagcacaaaggctttgctggagctgctaaagaagacgcaccctgactacaactatgtgaaatgcaaggctgatgcgcagcagaactctcgtatcacgccgatctcgtcgggaaaactgagtaatctgggctggaagccgagggcattggaggagacgctcctggatagcatcgaataccaccggaaggcgggaaatctgcagggtgtggagggacagacctaccgccttcctgatattttccgtcattttcaagctgccgacgaatgagtcgagagcgcagagcggcagtggcctgtgctttatagttatgtcattgtccttgtgagtgctgaatattgtgggaaatagttaaggatctgctgggaagttggtaggagaccagagagagtgaagctgctcattgcctcgccgtcgattggctttggcaacacaacttttcggttcaggatcgtatctcctgatcttctgctgtgttgtgtccagatctcattgatgaagcaaactggattacaaatgttattgttcagaacattttaccctcgtcgataatgaaggggtagaaccccgattacatgaatgaagcaaaaaaaaaaaaaaaa

SEQ ID NO: 3230 - protein, 348 aa, Triticum aestivum
  misc_feature: Ceres CLONE ID no. 726598
  misc_feature: Ceres CDNA ID no. 40041307
  misc_feature (13)..(86): Pfam Name: NmrA PFAM Desc: NmrA
  misc_feature (231)..(256): Pfam Name: Epimerase PFAM Desc: NAD dependent epimerase/dehydratase family
  misc_feature: Homolog of GI Number: 23197694 NR Desc: putative cinnamoyl
  misc_feature: Homolog of GI Number: 51091033 NR Desc: putative cinnamoyl
  misc_feature: Homolog of GI Number: 12323980 NR Desc: putative cinnamoyl
  misc_feature: Homolog of GI Number: 51091030 NR Desc: putative cinnamoyl
  misc_feature: Homolog of GI Number: 6554472 NR Desc: putative cinnamoyl
  misc_feature: Homolog of GI Number: 30984536 NR Desc: At2g33600
  misc_feature: Homolog of GI Number: 57282092 NR Desc: cinnamoyl
  misc_feature: Homolog of GI Number: 17978649 NR Desc: cinnamoyl
  misc_feature: Homolog of GI Number: 2960364 NR Desc: cinnamoyl CoA reductase
  misc_feature: Homolog of GI Number: 31414896 NR Desc: cinnamoyl CoA reductase
  misc_feature: Useful for making shorter plants
  misc_feature: Useful for sterility
MAPPSPSPPPPRVCVTGGGGFIASWLVKLLLSRGYAVHATLRDPSDPKNAHLMQLDGAAESLSLFKADVLDRAALAAAVAGCQGVFHVASPVPAEKIVDPESEVMVPAVKGTLNILEVCSSLKVQKVVVVSSTAAVHYDPNWPQGKPKDESCWSDRKVCKDNEIWYSLAKTVAEETVWEYAEKYRLNAVAVCPCIVLGPQLQCAVNTTSELLLYVITGGPNALNDVLWHIVDVRDVADALLLLYEKPESSGRYICAPNYISTKALLELLKKTHPDYNYVKCKADAQQNSRITPISSGKLSNLGWKPRALEETLLDSIEYHRKAGNLQGVEGQTYRLPDIFRHFQAADE

SEQ ID NO: 3231 - DNA, 936 bp, Triticum aestivum
  misc_feature: Ceres CLONE ID no. 726616
  misc_feature: Ceres CDNA ID no. 35383276
  CDS (133)..(570): REFERENCED BY SEQ ID NO: 3232
agtctaagcccagagtccctcccccttcgctcgcctccctccctcccgtgaataggtcccagccgccgccgccgccgcgcccgccggcatctcccttcctctcccctgatccgtccttccgcaggttgcgcgatgcttgccctgtccaggacgctcgcgaggcggctcttctccaccgccgccgcgcccgagggcgccgccgccgccgcctccacgtcgctggcgaggaagccgcagaaccccctcgaggagttcttcgaggtcgagcggagcacccaggacgaccagcccgcgccccactacggtcgtggctggaaggcttctgaactgcgcctcaagtcctgggacgaccttcataagttgtggtatgtcctgctaaaggagaagaacatgctcatgtcccaacgccagatgctggcttcagagagcatgcgtttcccaaacccggagcgcatttccaaggtaaggagatcgatgtgccggatcaagcacgtgctgacggagcgggccatagcggaccctgacccgaggaggactgcggagatgaagcggatgatcaacgccatgtgaccgacccgcgccgcgccgtgcttctactgtccgtaagcagcagccgtagcagcattagcatctatctagtggaaagaacgaatttgctcgcttttccttcttgggttgtatgcctccccccgtgagatgcataagaccagcaatccttgagacgccgtcgcccccgacagtcccacggatgggcgaacgtcaatggacttgtgttcgaataatcgcaaccgtcctttttttcttttgcatgtgtgtgtgtgtgtgtgtgtggcaaagtaccatccggctgtttgtttgcacaatgtgttatggatgtccattggtttcatttctggctctgcgtagccagagcttggttcaaaaaaaaaaaaaaaa

SEQ ID NO: 3232 - protein, 145 aa, Triticum aestivum
  misc_feature: Ceres CLONE ID no. 726616
  misc_feature: Ceres CDNA ID no. 35383276
  misc_feature (38)..(125): Pfam Name: MRP PFAM Desc: Mitochondrial 39
  misc_feature: Homolog of GI Number: 52075615 NR Desc: ribosomal protein L29 protein
  misc_feature: Homolog of GI Number: 19548071 NR Desc: At1g07830/F24B9_7
  misc_feature: Homolog of GI Number: 66526686 NR Desc:  similar to CG9378
  misc_feature: Homolog of GI Number: 72124941 NR Desc:  similar to mitochondrial ribosomal protein L47
  misc_feature: Homolog of GI Number: 55246284 NR Desc: ENSANGP00000013554
  misc_feature: Homolog of GI Number: 68362148 NR Desc:  similar to Mrpl47 protein
  misc_feature: Homolog of GI Number: 50752448 NR Desc:  similar to 4833424P18Rik protein
  misc_feature: Homolog of GI Number: 58569233 NR Desc: GekBS177P
  misc_feature: Homolog of GI Number: 21618497 NR Desc: MRPL47 protein
  misc_feature: Homolog of GI Number: 74003175 NR Desc:  similar to mitochondrial ribosomal protein L47 isoform 1
MLALSRTLARRLFSTAAAPEGAAAAASTSLARKPQNPLEEFFEVERSTQDDQPAPHYGRGWKASELRLKSWDDLHKLWYVLLKEKNMLMSQRQMLASESMRFPNPERISKVRRSMCRIKHVLTERAIADPDPRRTAEMKRMINAM

SEQ ID NO: 3233 - DNA, 815 bp, Triticum aestivum
  misc_feature: Ceres CLONE ID no. 727067
  misc_feature: Ceres CDNA ID no. 25446234
  CDS (62)..(598): REFERENCED BY SEQ ID NO: 3234
aacgaacgtcgttcgctcccttttccgaattaggaaagagtgagaaaaaggagagaactccatggcagccgagggttccgccggcggcggcggcgggcggaaaacaccgttgccccataacccaagagagcgcggagcggcgaaattcctcaccggcttgccatcgcgaggaaacttctcctcaagttccatctcttccaatctgggaggcctcagggtttatgtctgcgagcacgacacaaatcctccagagggacaagtgatcgagacggatacgacaaatatcttaatcagacatctgcaactaaagaagaaagatagtgaggccaaagacgcaggttctaggactccaggggaaagtggcaagggtaaaagatgtgctgccagaagtttgggtgtgcaaaagtcgtcaaaaaagcccaacctgggcagttcttccggattgccttcctctgatgaagcaatatctggcttttcacagcacacactgcagtccttcaccgtagagaggttgcgtgcacttctccgacaaagaggcctcacaaccaaggggaaaaaggacgaactgatcactcgcttaagagaggcgcagagttgatatcaatctcaagtttctgccttgtttgtgattgatcaattgcctactggcactgtaaaacgttgctgagttgaatgaatcatcaggctttacttgttgacattttgtcactattgcatattgtaggtgtataacttaaggtgatgtagtgatttactcaggctcaggctatcatgaatttgacgtcttgtagcgaactttaaaaaaaaaaaaaaaa

SEQ ID NO: 3234 - protein, 178 aa, Triticum aestivum
  misc_feature: Ceres CLONE ID no. 727067
  misc_feature: Ceres CDNA ID no. 25446234
  misc_feature (143)..(177): Pfam Name: SAP PFAM Desc: SAP domain
  misc_feature: Homolog of GI Number: 42573780 NR Desc: SAP domain
MAAEGSAGGGGGRKTPLPHNPRERGAAKFLTGLPSRGNFSSSSISSNLGGLRVYVCEHDTNPPEGQVIETDTTNILIRHLQLKKKDSEAKDAGSRTPGESGKGKRCAARSLGVQKSSKKPNLGSSSGLPSSDEAISGFSQHTLQSFTVERLRALLRQRGLTTKGKKDELITRLREAQS

SEQ ID NO: 3235 - DNA, 723 bp, Triticum aestivum
  misc_feature: Ceres CLONE ID no. 727337
  misc_feature: Ceres CDNA ID no. 36706182
  CDS (87)..(536): REFERENCED BY SEQ ID NO: 3236
atccaactctctaaacaacacattaacctttctcattccccatctcctcaccttattcagccactgctaatttctagggttccgaaatggacgctggcggaaagatcaagaagggcgccggaggaagaaagggcggcggccctaagaagaagccggtttcaaggtccgtcaaggccggtctccaattccccgtcggaagaattggccgttatttgaagaaaggaaggtacgcccagcgtgtcggtaccggtgctcccgtttacttggccgcagttctcgagtacctagctgctgaggtgcttgagttggctgggaatgctgcacgtgacaacaagaagaacaggattattccgagacatgtgctattggctgtgaggaacgatgaggagttggggaaattgcttgctggtgtcaccattgcacatggtggtgtgcttccaaacattaaccctgttttgttgcctaagaagacggagagggctgccaaggagcctaagtctccatccaaggctactaaatctcctaagaaggcctagattatcctttttttttttttttttaaatctagtgttgtatatcggtgcttagatgcttttggtgtaacaggaaatttgatgtgtttcttaaacattgtaattcttgtcccattgtgttgcttgtaggagtgagtttgctttattaatgaaaagtggaaacctcttgttttcaaaaaaaaaaaaaaaa

SEQ ID NO: 3236 - protein, 149 aa, Triticum aestivum; identical to SEQ ID NO: 2576
  misc_feature: Ceres CLONE ID no. 727337
  misc_feature: Ceres CDNA ID no. 36706182
  misc_feature (26)..(101): Pfam Name: Histone PFAM Desc: Core histone H2A/H2B/H3/H4
  misc_feature: Homolog of GI Number: 7649159 NR Desc: histone H2A
  misc_feature: Homolog of GI Number: 47026912 NR Desc: histone H2A
  misc_feature: Homolog of GI Number: 47026919 NR Desc: histone H2A
  misc_feature: Homolog of GI Number: 729669 NR Desc: Histone H2A
  misc_feature: Homolog of GI Number: 34914498 NR Desc: putative histone H2A
  misc_feature: Homolog of GI Number: 122006 NR Desc: Histone H2A
  misc_feature: Homolog of GI Number: 50931693 NR Desc: putative histone H2A
  misc_feature: Homolog of GI Number: 729671 NR Desc: Histone H2A
  misc_feature: Homolog of GI Number: 68441407 NR Desc:  similar to replication
  misc_feature: Homolog of GI Number: 68441405 NR Desc:  similar to histone H2A

SEQ ID NO: 3237 - DNA, 663 bp, Triticum aestivum
  misc_feature: Ceres CLONE ID no. 727519
  misc_feature: Ceres CDNA ID no. 40351236
  CDS (41)..(391): REFERENCED BY SEQ ID NO: 3238
cacagttatacagctctagagaattatcatacccttcaagatgaaaccgtacctacgtccaatattcctattattccttatccttctcgaccaatccatttcggcgagtgctgctataaatattaatggtctgagaaacaaaattagagaagttctaaacaagcacccgagcatcaatcttccggcagataaactgaagaaggtgaagagaccactgaaggcactggattatctgcttggcgaatgtaaggacaggccgcctcaagaatttcaagaattttgcccgaaatttaagaacgattatcaacaaaattgcccgaatgccgcgtatgaagcagtttgcccgttactgaagcaagcgattcaaatatgttgccagaaacacgcataactctgcaagccacggtgggcgtttggatgtgcttttagttaccactttctctcttggatttgcttacgtattgctccttttgtattagtggctcctgtcccaccttgcttttggacttgagctttttatatttctgattgttcaatgtctgttgtgtgtgctctccaacctgtggtgactttccggtttattcctgtggctgtttcttgtaggcctttcgacctccagtattaaataaaagatcatcttgtagctgaaaaaaaaaaaaaaaa

SEQ ID NO: 3238 - protein, 116 aa, Triticum aestivum
  misc_feature: Ceres CLONE ID no. 727519
  misc_feature: Ceres CDNA ID no. 40351236
MKPYLRPIFLLFLILLDQSISASAAININGLRNKIREVLNKHPSINLPADKLKKVKRPLKALDYLLGECKDRPPQEFQEFCPKFKNDYQQNCPNAAYEAVCPLLKQAIQICCQKHA

SEQ ID NO: 3239 - DNA, 552 bp, Triticum aestivum
  misc_feature: Ceres CLONE ID no. 727586
  misc_feature: Ceres CDNA ID no. 40351237
  CDS (55)..(366): REFERENCED BY SEQ ID NO: 3240
cattccaagcttcaccatccacacgagtcccttcttcccccaaatcgagcgacgatgtctgggcgcggcaagggcggcaaggggctgggaaagggcggcgccaagcgccaccggaaggtcctccgcgacaacatccagggcatcaccaagccggcgatccgcaggctggcgaggaggggcggcgtgaagcgcatctccggcctcatctacgaggagacccgcggcgtcctcaagatcttcctcgagaacgtcatccgcgacgccgttacctacaccgagcacgcccgccgcaagaccgtcactgccatggacgtcgtctacgcgctcaagcgacagggccgcaccctctacggtttcggaggctagattcatgtagtccgccagcagtggggcaacttcctcgtttgctctctgtgatgtgtgctgtggtagatgagatttactggtttgcgtgtgttgttgtgttctgtcttggggttcagtaggctctgtaatagctttgttctgttcaatgcaatcagttcgattctgaatcgaaaaaaaaaaaaaaaa

SEQ ID NO: 3240 - protein, 103 aa, Triticum aestivum; identical to SEQ ID NO: 8
  misc_feature: Ceres CLONE ID no. 727586
  misc_feature: Ceres CDNA ID no. 40351237
  misc_feature (66)..(92): Pfam Name: TAF PFAM Desc: TATA box binding protein associated factor

SEQ ID NO: 3241 - DNA, 595 bp, Triticum aestivum
  misc_feature: Ceres CLONE ID no. 727759
  misc_feature: Ceres CDNA ID no. 40351238
  CDS (135)..(353): REFERENCED BY SEQ ID NO: 3242
atataccgaaccctaagccgtggaacgaacgacccagaagccacccaccacccaccccatccctgagtttgatcggagccggaggagagcatccacaccgaggaagaaggagaagcggcgaggcgaggcgaaagatggggaagatgccggtgcggatgaaggcggtggtgtacgcgctgtcgccgttccagcagcaggtgatgccgggcctgtggaaggacatcaccaccaagatccaccacaaggtctccgagaactggatctccgccacgctcctcatcacccccgtcgtcggcacctaccagtatgcgatgtggtacaaggagcaggagaagctgtcccacagatactaaaggtggagctttctccaatatcgcagcagttggaatttccatgttctataatccaccaagagtgatttaacattttcggaatcacttctagttgtactcttttgctctttccgttgcatatgcaatgatgcagtaagtgtgacttgcaaacctattttgaggcctcaaatgttgagttgtccatcactggagtgattttgtgcaataaagcaaattaaccagtcagaaaaaaaaaaaaaaaa

SEQ ID NO: 3242 - protein, 72 aa, Triticum aestivum
  misc_feature: Ceres CLONE ID no. 727759
  misc_feature: Ceres CDNA ID no. 40351238
MGKMPVRMKAVVYALSPFQQQVMPGLWKDITTKIHHKVSENWISATLLITPVVGTYQYAMWYKEQEKLSHRY

SEQ ID NO: 3243 - DNA, 1033 bp, Triticum aestivum
  misc_feature: Ceres CLONE ID no. 727775
  misc_feature: Ceres CDNA ID no. 36582809
  CDS (77)..(745): REFERENCED BY SEQ ID NO: 3244
ctcactcatcacccacacagcgtgcacaacacaaacacaaacacagatcgatcgagatccagagcaaccaggagcaatggcgggcgagaagggcctggtgctgctggacttctgggtgagcccgttcgggcagcgcgtccgcatcgcgctggcggagaagggcctgccctacgagtacgcggaggaggacctgatggccggcaagagcgaccgcctcctccgcgccaacccggtgcacaagaagatcccggtgctcctccacgacggccgccccgtcaacgagtccctcatcatcctccagtacctggaggacgccttcccggacgccccggcactgctcccctccgacccctacgcgcgcgcgcaggcccgcttctgggccgactacgtcgacaagaaggtctacgactgcggctcccgcctctggaagctcaagggcgagccgcaggcgcaggcgcgcgccgagatgctggacatcctcaagaccctcgacggcgcgctcggggacaagcccttcttcggcggcgacaagttcgggttcgtcgacgccgccttcgcgcccttcaccgcgtggttccacagctacgagaggtacggcgagttcagcctgccggaggtggcgcccaagatcgcggcgtgggccaagcgctgcggcgagcgggagagcgtcgccaagagcctctactcgccggacaaggtgtacgacttcatcggcctgctcaagaagaagtacggcatcgagtagccgcgcggacggacgggcggccatgcatgcgccatcccgccggccggccaataaatcagggagcgtttgggtggcctacagtgcgtacgtttcggatattgatttcttcgtggagtctagtgttcgtgcgtgtgtggttggtggtagttgtttggttttgttagtgtgagtgcgtcgtgggtgccgtgtactcctgtgtgtgtgtcaagtgttgccacctgcgattccattttcattccgtgcgatgaataaattaagaaggggtcttctggaaaaaaaaaaaaaaaa

SEQ ID NO: 3244 - protein, 222 aa, Triticum aestivum; identical to SEQ ID NO: 2858
  misc_feature: Ceres CLONE ID no. 727775
  misc_feature: Ceres CDNA ID no. 36582809
  misc_feature (7)..(79): Pfam Name: GST_N PFAM Desc: Glutathione S
  misc_feature (88)..(196): Pfam Name: GST_C PFAM Desc: Glutathione S
  misc_feature: Homolog of GI Number: 20067419 NR Desc: glutathione transferase
  misc_feature: Homolog of GI Number: 20067415 NR Desc: glutathione transferase
  misc_feature: Homolog of GI Number: 20067417 NR Desc: glutathione transferase
  misc_feature: Homolog of GI Number: 6683765 NR Desc: glutathione
  misc_feature: Homolog of GI Number: 75674128 NR Desc: glutathione
  misc_feature: Homolog of GI Number: 2288969 NR Desc: glutathione transferase
  misc_feature: Homolog of GI Number: 33357809 NR Desc: Chain D
  misc_feature: Homolog of GI Number: 11385489 NR Desc: glutathione S
  misc_feature: Homolog of GI Number: 2944088 NR Desc: glutathione s
  misc_feature: Homolog of GI Number: 50509467 NR Desc: putative glutathione

SEQ ID NO: 3245 - DNA, 662 bp, Triticum aestivum
  misc_feature: Ceres CLONE ID no. 727840
  misc_feature: Ceres CDNA ID no. 40351239
  CDS (112)..(450): REFERENCED BY SEQ ID NO: 3246
atcaaattgatgaactagtgtgacattagagaagaaccaatttaaaagaagagcagcggagctaaagaggggagaggagagaggagaagagaagctaaagaaagaaaggagatgggagtggagaagcagttgttgaggtctggcaccggtccgaagccaattcccggtcagaacgtaaccgttcactgcactggtttcgggaagaacggtgacctttctcagaaattctggagcacaaaggatcctggccagaacccattcactttcaaaatcggccaaggttctgttatcaaaggatgggatgaaggtgtgcttggcatgcaaattggtgaagttgctcgtctccggtgctctccggattatgcttatggtgctggtggctttcctgcttggggaatacggcccaactctgtcttggaatttgaaatcgaagtcttaagtgcgcaatgaaaaccttggtagtctgtctctgtcctaaagaataaaattcttccattttcatggacttgtacaatggtatccccacattgtgacttgtgggtgatatctacagtggttgagttgtccaagtgaaatactaaataactttctgaatgatctcaaactctctaatattatattgggtagcctttactttcttccccaaaaaaaaaaaaaaaaaa

SEQ ID NO: 3246 - protein, 112 aa, Triticum aestivum
  misc_feature: Ceres CLONE ID no. 727840
  misc_feature: Ceres CDNA ID no. 40351239
  misc_feature (11)..(109): Pfam Name: FKBP_C PFAM Desc: FKBP
MGVEKQLLRSGTGPKPIPGQNVTVHCTGFGKNGDLSQKFWSTKDPGQNPFTFKIGQGSVIKGWDEGVLGMQIGEVARLRCSPDYAYGAGGFPAWGIRPNSVLEFEIEVLSAQ

SEQ ID NO: 3247 - DNA, 2135 bp, Triticum aestivum
  misc_feature: Ceres CLONE ID no. 728038
  misc_feature: Ceres CDNA ID no. 25401321
  CDS (365)..(1798): REFERENCED BY SEQ ID NO: 3248
ggccctctcgctctctctctctggcacagcacagccaacccggcgcctcttttccccttccatccatccatccaaccccccgccccgagaaagagaagcaaaagctgccgctgccagtccaaaaggccgcaccgcaaatttcggcgacggatttccgggccggtggtggctggcgcgcccgacccttccccgcccccctccctcggctccggcggtcggtcggggacagcgattacggcgggaatttgcccggctggtgtggagcggtgcggcgcgcggatctggccggaggcgggcgatggggaggcgggagtaggggaggggtcgaggggaagcaggcgcggcgatctcggggcggtctcccatggggggctgcttctcgctcgaggagcagcggctccagagcaggacaggcacttcggctgaagctggtggaccagatgggctgaggaagtgcaaatctgattctaaagctatttcaagtgttcttgctcctccgaaagatgtggaggacctgcaaacagaaggatatggaaatgtcaacattttcacatacaacgaactgcgagcagccacaaagaactttcggcctgatcagattcttggggagggtggatttggagttgtttacaaaggcgtcatcgatgaaaatgttagaataggttttccatccagacaggttgctgtgaaagaactgaacccagaaggttttcaaggagacaaggaatggttggcagaagtcaactatcttgggcaacttagtcatgcaaatctagtcgaactgattggctattgctgcgagggttcacatagattacttgtctacgagtacatggcttgtggcagtcttgaaaagcacctttttcgacgggtttgccttaatatgccatggtcgactcgcatgaagattgcgcttggtgcagcaagggggcttgagtacctccacggagctgagagatccattatctatagggatttcaagacatcaaacatcttgctagatgcggattataatgctaagctttcagactttggcctagcaagaactggacctagtggagaccaaacccatgtctcaactcgggtcatgggaacttatggctatgcagctcctgaatatgtgatgactggccatttgacagcacggagtgatgtttatgggtttggtgttgtgcttctcgagatgattattgggaggagggctgtggacaagagccggccgagccgtgagcataacctagttgagtgggcacgccccctccttgtccacaaccggaagctcttcagaatcattgatcctagaatggaaggccaatactccaccaaggctgccattgaagtggccagcctttgctaccggtgcttgagccagaaccctaaagggcgtcctactatgagccaggtcgtcgaaacctttgaggaggttcaaagcatgccggaatgccaggacatactcctgcagaattgcatgaccggatctgtgacgctatacgaggtcccaaaggagcctgttgagcatgtggagacagagaaggcgaagcaagaaccaacagcaaagactgatgccgtggcggtggccgtgccaccggcgaacggaaagccagtgccccagagcaggaggacgcggccggcaaacggcaggagcaagagcgagccgcctctggagtgcaagctgtacatcccttcgcctgactccgacgggcatcagctggggctggaagccctggcatcgcccccttccagaaacagcagcagggatgatcctcctcccgtggacgaagatctgtacaagatataaagtaataacagcagtttttgacgaggctcaacaagcctctgtttacccgtgtcgtctcgtgtcgccatccatcttgttgtcaagatcgatcggtcggtcagtcagtcagtcagctggtgtttttgttttttcttctgatggcggaactaccaaagctagggttcttgttcttgcggttagcgaattgtatgtagagagaggggcgtcgtgggaagcatgtaatgtgagttccatgatggtgttcgtgctgtaaactcggaacagttctctgggaaagatccacaccaaaatggaaatggagagatttctcttgtcgccgctaaaaaaaaaaaaaaaa

SEQ ID NO: 3248 - protein, 477 aa, Triticum aestivum
  misc_feature: Ceres CLONE ID no. 728038
  misc_feature: Ceres CDNA ID no. 25401321
  misc_feature (325)..(351): Pfam Name: Pkinase_Tyr PFAM Desc: Protein tyrosine kinase
  misc_feature: Homolog of GI Number: 77548413 NR Desc: protein kinase
  misc_feature: Homolog of GI Number: 77552885 NR Desc: protein kinase
  misc_feature: Homolog of GI Number: 9542860 NR Desc: protein kinase
  misc_feature: Homolog of GI Number: 53791911 NR Desc: putative Avr9/Cf
  misc_feature: Homolog of GI Number: 30725688 NR Desc: At5g56460
  misc_feature: Homolog of GI Number: 53857147 NR Desc: Avr9/Cf
  misc_feature: Homolog of GI Number: 34906046 NR Desc: putative serine/threonine
  misc_feature: Homolog of GI Number: 28804505 NR Desc: serine/threonine protein kinase
  misc_feature: Homolog of GI Number: 50939237 NR Desc: putative auxin
  misc_feature: Homolog of GI Number: 50920343 NR Desc: Putative serine/threonine protein kinase
  misc_feature: Useful for decreasing plant size
MGGCFSLEEQRLQSRTGTSAEAGGPDGLRKCKSDSKAISSVLAPPKDVEDLQTEGYGNVNIFTYNELRAATKNFRPDQILGEGGFGVVYKGVIDENVRIGFPSRQVAVKELNPEGFQGDKEWLAEVNYLGQLSHANLVELIGYCCEGSHRLLVYEYMACGSLEKHLFRRVCLNMPWSTRMKIALGAARGLEYLHGAERSIIYRDFKTSNILLDADYNAKLSDFGLARTGPSGDQTHVSTRVMGTYGYAAPEYVMTGHLTARSDVYGFGVVLLEMIIGRRAVDKSRPSREHNLVEWARPLLVHNRKLFRIIDPRMEGQYSTKAAIEVASLCYRCLSQNPKGRPTMSQVVETFEEVQSMPECQDILLQNCMTGSVTLYEVPKEPVEHVETEKAKQEPTAKTDAVAVAVPPANGKPVPQSRRTRPANGRSKSEPPLECKLYIPSPDSDGHQLGLEALASPPSRNSSRDDPPPVDEDLYKI

SEQ ID NO: 3249 - DNA, 1178 bp, Triticum aestivum
  misc_feature: Ceres CLONE ID no. 728057
  misc_feature: Ceres CDNA ID no. 40041308
  CDS (117)..(998): REFERENCED BY SEQ ID NO: 3250
ctggcgccggcaatcccagcagcaacccagggagatcgcctttttgtcctccagccggccttgagcagcagcagcagccggagatcgagagcaggcgagctgagccgagctgagcgatgatgatgagggagccgtggatggaggtgctgccgccggcggcgatgggctactacggcgggccgcggggcgcgggcggctggttcacggggcagccgcgcgcctggacggcggacgagaacaagcagttcgagcgggcgctggccgggctggacctgcgcagcccggactgggacaaggtggcgcacgccaccggcaagacggtccgcgaggtcgtcgaccacttcaagagcctcgagctcgacgtccgccagatcgagtccggcaccttccccggccccggccccggctacggccccggcgccttcaccctgcagtgggacggcagcggcggccacgccggggccggggacttccggcacggctaccgcttcggcggctgcggcggcgggcggcggcacggcggccgcacgccggagcaggagaggaagaagggggtgccgtggaccgaggacgagcacaagttgttcctcctaggcctgaagaagtacggcaaaggggactggaggaacatttcgcgcaacttcgtgcagacgaggacgccgacgcaggtggccagccacgcgcagaagtacttcatcaggctcagctccggtggcggcaaggacaagaggaggtcgagcatccacgacatcaccacggtgcacctggacgaccagcccccctcgccgtcccagtcatcgatgatcacccagtccagcgcgccggcaccgagcccagcaacggggcagtactcgctgccggccgacaccaagcagcacggcggagcgaatgcgccatacaattcgccgccgagctacggcatgggtttgcaagatcaaggcctgcagtgtggccctctgcatgatcagctggccgcgaaccggagtatgctgtattagaagatgcagccgttcgatccattccgacgccaccggtcagatgtctagtgtaatatggcccttgctgtagcttcactgcctgtattattattcaagtaagtaattgattatggggatttttcagaacatagcagagagagagagagagagagagagagagagagaaaaaaaaaaaaaaaa

SEQ ID NO: 3250 - protein, 286 aa, Triticum aestivum
  misc_feature: Ceres CLONE ID no. 728057
  misc_feature: Ceres CDNA ID no. 40041308
  misc_feature (139)..(186): Pfam Name: Myb_DNA PFAM Desc: Myb
  misc_feature: Homolog of GI Number: 55770209 NR Desc: putative MYB
  misc_feature: Homolog of GI Number: 34895714 NR Desc: putative myb
  misc_feature: Homolog of GI Number: 18874263 NR Desc: MYB
  misc_feature: Homolog of GI Number: 3335378 NR Desc: putative MYB family transcription factor
  misc_feature: Homolog of GI Number: 29824293 NR Desc: putative MYB family transcription factor
  misc_feature: Homolog of GI Number: 34908386 NR Desc: P0529E05.19
  misc_feature: Homolog of GI Number: 56784263 NR Desc: putative MYB transcription factor
  misc_feature: Homolog of GI Number: 51557078 NR Desc: MYB transcription factor
  misc_feature: Homolog of GI Number: 21618234 NR Desc: MYB
MEVLPPAAMGYYGGPRGAGGWFTGQPRAWTADENKQFERALAGLDLRSPDWDKVAHATGKTVREVVDHFKSLELDVRQIESGTFPGPGPGYGPGAFTLQWDGSGGHAGAGDFRHGYRFGGCGGGRRHGGRTPEQERKKGVPWTEDEHKLFLLGLKKYGKGDWRNISRNFVQTRTPTQVASHAQKYFIRLSSGGGKDKRRSSIHDITTVHLDDQPPSPSQSSMITQSSAPAPSPATGQYSLPADTKQHGGANAPYNSPPSYGMGLQDQGLQCGPLHDQLAANRSMLY

SEQ ID NO: 3251 - DNA, 721 bp, Triticum aestivum
  misc_feature: Ceres CLONE ID no. 728181
  misc_feature: Ceres CDNA ID no. 40351240
  CDS (87)..(536): REFERENCED BY SEQ ID NO: 3252
atccaactctctaaacaacacattaacctttctcattccccatctcctcaccttattcagccactgctaatttctagggttccgaaatggacgctggcggaaagatcaagaagggcgccggaggaagaaagggcggcggccctaagaagaagccggtttcaaggtccgtcaaggccggtctccaattccccgtcggaagaattggccgttatttgaagaaaggaaggtacgcccagcgtgtcggtaccggtgctcccgtttacttggccgcagttctcgagtacctagctgctgaggtgcttgagttggctgggaatgctgcacgtgacaacaagaagaacaggattattccgagacatgtgctattggctgtgaggaacgatgaggagttggggaaattgcttgctggtgtcaccattgcacatggtggtgtgcttccaaacattaaccctgttttgttgcctaagaagacggagagggctgccaaggagcctaagtctccatccaaggctactaaatctcctaagaaggcctagattatcctttttttttttttttaaatctagtgttgtatatcggtgcttagatgcttttggtgtaacaggaaatttgatgtgtttcttaaacattgtaattcttgtcccattgtgttgcttgtaggagtgagtttgctttattaatgaaaagtggaaacctcttgttttcaaaaaaaaaaaaaaaa

SEQ ID NO: 3252 - protein, 149 aa, Triticum aestivum; identical to SEQ ID NO: 2576
  misc_feature: Ceres CLONE ID no. 728181
  misc_feature: Ceres CDNA ID no. 40351240
  misc_feature (26)..(101): Pfam Name: Histone PFAM Desc: Core histone H2A/H2B/H3/H4

SEQ ID NO: 3253 - DNA, 946 bp, Triticum aestivum
  misc_feature: Ceres CLONE ID no. 728357
  misc_feature: Ceres CDNA ID no. 35383277
  CDS (25)..(654): REFERENCED BY SEQ ID NO: 3254
ttttcgacagcggccactcccgccatggccaccgcagcgcgcgccgtcgccgccgccgcgcgcccggtgcacccggtgttcctgtcgcggcgcctcccctgcccctccgcgcgccccgcgcggcctcgcgtcggccgcgccgtccgctgcatggcgcggcggcccgacgcctcgtactcgccgctgcggccggggcagggcggggaccgcgcgccgctcttccccggctgcgactacgagcactggctcatcgtcatggacaagcccggcggcgagggcgccaccaagcagcagatgatcgactgctacatccagaccctcgccaaggtcgtggggagcgaggaggacgcgaagaagaggatctacaacgtgtcctgtgagcgttactttgggtttgggtgcgagattgacgaggagacatccaacaagctggaaggcctcccgggtgttctttttgtgcttcctgattcctatgttgatgctgagaacaaggactatggcgccgagttgtttgtgaacggagaaatcgtccaacgatcaccggaaaggcagagaagggtggagccggtgcctcagagagctcaagatagaccgcgttacagcgaccggactcgctatgtgaagcgtagggagaaccaggcctaccaacggtgacatgcccccgtcggtgcaccgcaagcgccccactgctatcgctcttgccctagatatagcaactgctccacgcccgaaatgcccatcgtcgtctttgctgcattgtagccacgccatatctgggcgtttattttcttcattcacgaactgtaggttaagaactgcatgtactactataagtgagttgttttggtaacggtatcttggtttgcggcggaaagagtaaaagaagttgtaagagagcatttaaacttgatgaactctccttgctctgtcaaaaaaaaaaaaaaaa

SEQ ID NO: 3254 - protein, 209 aa, Triticum aestivum
  misc_feature: Ceres CLONE ID no. 728357
  misc_feature: Ceres CDNA ID no. 35383277
  misc_feature: Homolog of GI Number: 50928485 NR Desc: OSJNBa0041A02.8
  misc_feature: Homolog of GI Number: 34897972 NR Desc: putative plastid protein
  misc_feature: Homolog of GI Number: 20453405 NR Desc: At2g33430/F4P9.20
  misc_feature: Homolog of GI Number: 2246378 NR Desc: plastid protein
  misc_feature: Homolog of GI Number: 21617909 NR Desc: plastid protein
  misc_feature: Homolog of GI Number: 2440029 NR Desc: DAL1 protein
  misc_feature: Homolog of GI Number: 55775182 NR Desc: putative DAL1 protein
  misc_feature: Homolog of GI Number: 20465721 NR Desc: putative plastid protein
  misc_feature: Homolog of GI Number: 51979643 NR Desc: PREDICTED OJ1119_D01.18 gene product
  misc_feature: Homolog of GI Number: 50726526 NR Desc: putative plastid protein
MATAARAVAAAARPVHPVFLSRRLPCPSARPARPRVGRAVRCMARRPDASYSPLRPGQGGDRAPLFPGCDYEHWLIVMDKPGGEGATKQQMIDCYIQTLAKVVGSEEDAKKRIYNVSCERYFGFGCEIDEETSNKLEGLPGVLFVLPDSYVDAENKDYGAELFVNGEIVQRSPERQRRVEPVPQRAQDRPRYSDRTRYVKRRENQAYQR

SEQ ID NO: 3255 - DNA, 814 bp, Triticum aestivum
  misc_feature: Ceres CLONE ID no. 728361
  misc_feature: Ceres CDNA ID no. 25891873
  CDS (77)..(562): REFERENCED BY SEQ ID NO: 3256
accgaccgagcatcttcgcaaacccctcaaccctcgccgccgccgcgccggccgctcagcccccgccgccgacgccatgggcaagttccgcaagctcgggcgccacgccgcgcaccgcgtgtccatgctcaggacgatggtgtcgcagctggtgaagcacgagcgcatcgagaccaccgtcgccaaggcgaaggaggtgcggcgcaaggcggatcagatggtgcagctcggcaaagatggtacactggatgcagcaagacgtgcttctgcttttgttcgcggagatgatgttgtccataagctgttcacagagctggcctaccgctataaagatcgagcaggcggatatacaagacttttgcgaactaggatacgaataggtgatgctgcaccaatggcatacattgagtttgtggacagagagaacgaactccgagaggccaaacctgcaacgccgccgctgcctcagcgggttccacttgatccatgggccaagtctcgtgctagccaacagtgggcaggacctaaagttaccgtgaaccccaaatcagaaggcttatgagagcagcatctgcactgtgtttctatctggtgaatcacagtattcatttcgttcgtgggactatgcacgaggcttgtcatgcaggaggatttttgtcagcgtataattgtcaatagaataattcaacttagatttgctatccctccagcgaatattgatatatgattgaatggggatgcggtgttatccgcgcgacagtatggcacaagaaatgttgtgttggtttggtttttcctaaaaaaaaaaaaaaaa

SEQ ID NO: 3256 - protein, 161 aa, Triticum aestivum
  misc_feature: Ceres CLONE ID no. 728361
  misc_feature: Ceres CDNA ID no. 25891873
  misc_feature (17)..(113): Pfam Name: Ribosomal_L17 PFAM Desc: Ribosomal protein L17
  misc_feature: Homolog of GI Number: 56784661 NR Desc: putative 50S ribosomal protein L17
  misc_feature: Homolog of GI Number: 50931683 NR Desc: putative 50S ribsomal protein L17
  misc_feature: Homolog of GI Number: 21592350 NR Desc: ribsomal protein
  misc_feature: Homolog of GI Number: 18424850 NR Desc: ribosomal protein L17 family protein
  misc_feature: Homolog of GI Number: 72384434 NR Desc: 52O08_5
  misc_feature: Homolog of GI Number: 21555473 NR Desc: 50S ribosomal protein L17
  misc_feature: Homolog of GI Number: 7671412 NR Desc: ribsomal protein
  misc_feature: Homolog of GI Number: 10178068 NR Desc: 50S ribosomal protein L17
  misc_feature: Homolog of GI Number: 26451578 NR Desc: putative 50S ribosomal protein L17
  misc_feature: Homolog of GI Number: 9759008 NR Desc: 50S ribosomal protein L17
MGKFRKLGRHAAHRVSMLRTMVSQLVKHERIETTVAKAKEVRRKADQMVQLGKDGTLDAARRASAFVRGDDVVHKLFTELAYRYKDRAGGYTRLLRTRIRIGDAAPMAYIEFVDRENELREAKPATPPLPQRVPLDPWAKSRASQQWAGPKVTVNPKSEGL

SEQ ID NO: 3257 - DNA, 542 bp, Triticum aestivum
  misc_feature: Ceres CLONE ID no. 729026
  misc_feature: Ceres CDNA ID no. 40351241
  CDS (55)..(366): REFERENCED BY SEQ ID NO: 3258
aaaacaaactccgaaagaaacagtcagaatcagaatcagaagaagcgagcaaagatgtcgggtcgtggaaagggaggcaagggtttgggtaagggaggagccaagaggcacaggaaggtgctccgcgataacatccagggaatcacaaaacccgccattcgccgtttggctcgcagaggcggcgtcaagagaatcagtggcctcatctatgaagaaacccgcggcgtccttaagatcttcctcgagaacgttattcgcgacgctgttacctacaccgagcatgctaggaggaagactgttaccgctatggatgttgtttatgctctcaagaggcagggcaggactctctatggtttcggtggttaaattttagggttttgatgggcttagcagctggttatttttgtaaatggtcgtttgtttgggagtatttgattttgtgcttttttgttttttagcctttcttgttaggtgtattgttatttttgcttcaattgaaatggaacaaagagtgttttgtttctggaaaaaaaaaaaaaaaa

SEQ ID NO: 3258 - protein, 103 aa, Triticum aestivum; identical to SEQ ID NO: 8
  misc_feature: Ceres CLONE ID no. 729026
  misc_feature: Ceres CDNA ID no. 40351241
  misc_feature (66)..(92): Pfam Name: TAF PFAM Desc: TATA box binding protein associated factor

SEQ ID NO: 3259 - DNA, 773 bp, Triticum aestivum
  misc_feature: Ceres CLONE ID no. 729074
  misc_feature: Ceres CDNA ID no. 40351242
  CDS (90)..(521): REFERENCED BY SEQ ID NO: 3260
ctctgttcacaagtttcgtttccaggtttcggcgcaatcggcttctgcttcaaggaaggagagcttgttattctctatcaacaagtaaaatgtcaggtgaagagggtgtcattgcagttgagccagctgctgctgctgctgccatcccaggcgagccaatggatatcatgactgccttacaacttgtgctcagaaaatctctggcttatggtggtttgtcgcgtggccttcatgaaggtgcaaaagtgattgagaagcatgctgcacaactctgtgttcttgcagaagactgtgaccagcctgactatgttaaactggttaaggccctttgtgcagagcacaatgttagcctgctgacagttccgagtgcaaagacccttggagaatgggctggtttgtgcaagattgattccgaaggaaaagcaaggaaggttactggttgctcctgtgtggttgtgaaggatttcggtgaggagcatgaagcctataacgtcgttctgcagcatgtgaaatctcaatgagttgcaagattcatagattttatgcacttcacattttcattttgggttattccttgagaatgaattttgccttgtggctggattatatctaccttgggttttgattgtttaatatgactttgccacattctcaatgttgctgttacttttttttatcctctgatgcattgctgtggctctaattaggaactcttgtttcacattaatcatataaagtagaagttaagaatttggccaaaaaaaaaaaaaaaa

SEQ ID NO: 3260 - protein, 143 aa, Triticum aestivum; identical to SEQ ID NO: 3208
  misc_feature: Ceres CLONE ID no. 729074
  misc_feature: Ceres CDNA ID no. 40351242
  misc_feature (28)..(123): Pfam Name: Ribosomal_L7Ae PFAM Desc: Ribosomal protein L7Ae/L30e/S12e/Gadd45 family

SEQ ID NO: 3261 - DNA, 642 bp, Triticum aestivum
  misc_feature: Ceres CLONE ID no. 729256
  misc_feature: Ceres CDNA ID no. 40351243
  CDS (104)..(493): REFERENCED BY SEQ ID NO: 3262
gtgcttgtgacgctcttgtccttttgccacgcttaagatcacccaagagagaacctaagacacacaacacaacacacagagagagtttgaggaagaaatcatcatggcttcagcagcatctgggtttgtgctgtctcttaatgttgcagcttccaccacaaactcaagggtggtcttgttcaacacaaagaaccacgcttctaggcttcttgtgagggcttcagacgagcctgcagcggcggcacccgcaaccaccacccctccagctgaagctgaagcaaagccaaaaccaccacctattggccccaagagaggtgctaaggtgaagattcttaggaaggaatcctactggtacaaaggcactggttcagtggttgctgttgatcaggaccccaacactcgctaccctgttgtggttcgattcaacaaagtcaactatgccaatgtatcaacaaacaactatgctttggatgagatcgtggaagtggaatgagtccaatttatttgtaattttgattctggtcatgctatcgcagttactagcctaagtttttttcatgcgacaaaaaaaaaaaagaatctgtatcatattctctctgatatctatccccttgatttctattctcaaaaaaaaaaaaaaaa

SEQ ID NO: 3262 - protein, 129 aa, Triticum aestivum
  misc_feature: Ceres CLONE ID no. 729256
  misc_feature: Ceres CDNA ID no. 40351243
  misc_feature (68)..(129): Pfam Name: PSI_PsaE PFAM Desc: Photosystem I reaction centre subunit IV / PsaE
MASAASGFVLSLNVAASTTNSRVVLFNTKNHASRLLVRASDEPAAAAPATTTPPAEAEAKPKPPPIGPKRGAKVKILRKESYWYKGTGSVVAVDQDPNTRYPVVVRFNKVNYANVSTNNYALDEIVEVE

SEQ ID NO: 3263 - DNA, 492 bp, Triticum aestivum
  misc_feature: Ceres CLONE ID no. 729322
  misc_feature: Ceres CDNA ID no. 40351244
  CDS (69)..(380): REFERENCED BY SEQ ID NO: 3264
atcaaatcaaaaaccctaattcccaaattctctcatttatcaagtttcaaccaagaaaagcagcaacaatgtcgggtcgcggaaagggtgggaagggtttaggaaagggaggagcaaagaggcatcgcaaggtgctccgcgacaatatccagggaatcacgaagcccgcgattcggagactggcgagaagaggtggcgtgaagagaatcagtggtttgatctacgaagagaccaggggcgtgctcaagatctttctcgagaacgtgattcgcgatgccgtgacgtacacggagcacgctaggaggaagacagtgacggccatggatgtcgtttacgctctcaagaggcagggaaggactctctatggtttcggaggctgagggtttggccttctttggtggctttggtttgtgtaaatggaaggaatttgtgttttgtagtgattatatatgtacttggattatcttctgctcggtaaaaaaaaaaaaaaaa

SEQ ID NO: 3264 - protein, 103 aa, Triticum aestivum; identical to SEQ ID NO: 8
  misc_feature: Ceres CLONE ID no. 729322
  misc_feature: Ceres CDNA ID no. 40351244
  misc_feature (66)..(92): Pfam Name: TAF PFAM Desc: TATA box binding protein associated factor

SEQ ID NO: 3265 - DNA, 1396 bp, Triticum aestivum
  misc_feature: Ceres CLONE ID no. 729802
  misc_feature: Ceres CDNA ID no. 29191547
  CDS (174)..(1112): REFERENCED BY SEQ ID NO: 3266
acttcactcgccagagtccaacggagtctttcttccccccctagactggagatgccgcagtaggggaagggggtgctgagtcgactgtagtgtactgcgtttcctcctcctcgtcgctcttcttcttatctcatccccgactccgacgagccccggcgacctaccggcgagggatggcggcgacggcgacgaagctgagcagcggccacgagatgccggctgtggggctcggcgtctggcggatggactccgccgccgtccgcggcctcatccactccgccctccgcgccggctaccgccacttcgactgcgccgctgactacaaaaacgaggctgaagttggcgatgcgctcgcggaggcgttcgaaactgggcttgtcaagagagaggatcttttcatcacaaccaagttgtggaactcagatcacggtcatgtggtcgaagcctgcaaggatagcctgaagaagctgcgattggattatctagatctctaccttattcacttccctgtagctactaagcatactggagttggcacaactggcagtgctcttggtgatgatggtgtgcttgatatcgataccactatcacattggagacaacgtggcatgcaatggaagatcttgtttccatgggacttgttcgtagcatcggaattagcaactacgacatattcctcaccagagactgcttggcctacgctaagataaagcccgcggtgaaccaaatcgagacacacccttacttccagcgcgactctcttgtgaagttctgccagaagcatggaatctctgtcaccgcacacacacccctgggcggctccactgccaataccgaatggtttggctcggtctcatgcctcgacgatcctgtcatcaagtccctggctgagaaatacggcaagacgccggcccagctggtcctccggtggggcctccagaggaacacggtggtcatccccaagacctccaaggtagagaggctggaggagaactttgcggtcttcgacttcgacatctccgtcgaggacatggagaagatcaaggccctcgaccgcaactaccgcaccaaccagccggccaagttttggggcagcaatctctacgcttgattccactgcatgatttgcttccctgacattacaaccaataatatgggagcttgtcattagcgtaaatgaactttgagttatagatgatatatttgcagcacaatttaccaggttaccattctattcgtgctgagccatgcccggttcattctcccagttatcttcaggaaaaccatacaaggttgaactccattcaacaaatcagtcctaccaaattattggtcacacaacttaatcctctgtatttagttgatttctttcattgcctaaaaaaaaaaaaaaaa

SEQ ID NO: 3266 - protein, 312 aa, Triticum aestivum
  misc_feature: Ceres CLONE ID no. 729802
  misc_feature: Ceres CDNA ID no. 29191547
  misc_feature (8)..(295): Pfam Name: Aldo_ket_red PFAM Desc: Aldo/keto reductase family
  misc_feature: Homolog of GI Number: 10334991 NR Desc: NADPH
  misc_feature: Homolog of GI Number: 51963828 NR Desc: PREDICTED P0575F10.14 gene product
  misc_feature: Homolog of GI Number: 21554266 NR Desc: putative NADPH dependent mannose 6
  misc_feature: Homolog of GI Number: 21592829 NR Desc: putative NADPH dependent mannose 6
  misc_feature: Homolog of GI Number: 20198120 NR Desc: putative NADPH dependent mannose 6
  misc_feature: Homolog of GI Number: 20260680 NR Desc: putative NADPH
  misc_feature: Homolog of GI Number: 50904895 NR Desc: putative NADPH
  misc_feature: Homolog of GI Number: 32400786 NR Desc: NADPH
  misc_feature: Homolog of GI Number: 1835701 NR Desc: NADPH
  misc_feature: Homolog of GI Number: 217951 NR Desc: NADP
  misc_feature: Useful for making plants with increased biomass and foliage
MAATATKLSSGHEMPAVGLGVWRMDSAAVRGLIHSALRAGYRHFDCAADYKNEAEVGDALAEAFETGLVKREDLFITTKLWNSDHGHVVEACKDSLKKLRLDYLDLYLIHFPVATKHTGVGTTGSALGDDGVLDIDTTITLETTWHAMEDLVSMGLVRSIGISNYDIFLTRDCLAYAKIKPAVNQIETHPYFQRDSLVKFCQKHGISVTAHTPLGGSTANTEWFGSVSCLDDPVIKSLAEKYGKTPAQLVLRWGLQRNTVVIPKTSKVERLEENFAVFDFDISVEDMEKIKALDRNYRTNQPAKFWGSNLYA

SEQ ID NO: 3267 - DNA, 831 bp, Triticum aestivum
  misc_feature: Ceres CLONE ID no. 730207
  misc_feature: Ceres CDNA ID no. 35383278
  CDS (3)..(566): REFERENCED BY SEQ ID NO: 3268
tgccgagccgatccatcattccctcggcacggcctgtgactccattcagatcgatcccaatccacagaaacatcaatggcgtccgtgaagctcgccgccgcgctcgctcttgtagccgtgtgcgccgcgctcgcggcgacgccggccacggcgttcccgcccgagagctgcgcgacgcagggcagctacttcatcaactgccttcgccgcgggttcggcgagaggtgctgcgccatggtggagaaccccaggtgcttctgccaggtggagcgggaggccgagatccgctgcgtgcccgggcggagctgccccagccgtggcattgccaaggtcgtgaaggtcgccgagatgcacctctcctgcatgaggaacctcaagtgcaagcgtgcctaagcttagctgcctcatttttgtatgttttctctgcttcctcgcgatgtgctggccgtaactatgtgtggtttgtttcgtttgggtcggcggtagctgtggtactctttgaatgttcttcatccgctccatctttggacaaaggtggcatggttctatcatgtgagttgttttaggtgatgaatctgtgctagattgttgtgggtcagtttgtcgttcgcagtgtcttcttcaaaatatgccttttttttatgaagttgtgggtgcagttaactgatctgtagttctgtactatgagtatccgatctgtgatttaaatcacgcatgtagctgatttactatgagtgtcattctgtatgcttatgagtatcactccataaactatacacttcttgcccctcttaggtgagacagcaaaatagatcaaaaaaaaaaaaaaaa

SEQ ID NO: 3268 - protein, 105 aa, Triticum aestivum
  misc_feature: Ceres CLONE ID no. 730207
  misc_feature: Ceres CDNA ID no. 35383278
MASVKLAAALALVAVCAALAATPATAFPPESCATQGSYFINCLRRGFGERCCAMVENPRCFCQVEREAEIRCVPGRSCPSRGIAKVVKVAEMHLSCMRNLKCKRA

SEQ ID NO: 3269 - DNA, 528 bp, Triticum aestivum
  misc_feature: Ceres CLONE ID no. 730377
  misc_feature: Ceres CDNA ID no. 40351245
  CDS (74)..(385): REFERENCED BY SEQ ID NO: 3270
acaaccaaccaccactgctcctcctccaatcccacattcggtcgcagctcgaaccaaggagggatcgtcagccatgtccgggcgcggcaagggaggcaaggggctcggcaagggcggcgccaagcggcacaggaaggtgctgcgcgacaacatccagggcatcaccaagccggcgatccggcgcctggcgaggaggggcggcgtgaagcgcatctcggggctcatctacgaggagacccgcggcgtgctcaagatcttcctcgagaacgtcatccgcgacgccgtcacctacaccgagcacgcccgacgcaagaccgtcaccgccatggacgtcgtctacgcgctcaagcgccagggccgcaccctctacggcttcggcggctaggcttttcctcgcccccctcccctgcagatatcccaaaagcttgatggaaccgcggcttgtttagctctctatttgctctgtagttcgaactgaatcgtggaacaaagtgcttcgcatatgttgctggaaaaaaaaaaaaaaaa

SEQ ID NO: 3270 - protein, 103 aa, Triticum aestivum; identical to SEQ ID NO: 8
  misc_feature: Ceres CLONE ID no. 730377
  misc_feature: Ceres CDNA ID no. 40351245
  misc_feature (66)..(92): Pfam Name: TAF PFAM Desc: TATA box binding protein associated factor

SEQ ID NO: 3271 - DNA, 459 bp, Triticum aestivum
  misc_feature: Ceres CLONE ID no. 730613
  misc_feature: Ceres CDNA ID no. 35383279
  CDS (88)..(276): REFERENCED BY SEQ ID NO: 3272
atcgaaaattctccctccacaaccgccgccgccgccgccgccgcaaaccctcgcgcactcgccctccaacccaccgccgccgtcgacatgggtaaggtgcacggatcgctcgcccgtgccgggaaggtgcgcggccagacgcccaaggtcgcgaagcaggacaagaagaagcagccccgcggccgcgcccacaagaggatccagtacaaccgccgcttcgtcaccgccgtcgtcggcttcggcaagaagcgcggccccaactcctccgagaagtaggcgcgccgcaccgccgagccaagaaaaaggctcttcctttgcgctagttttcctctcgtttgttgttacgcaagattatgatgatggaagagacattactgaagtgttaaagtatgcatgttttgcttagttgaagaatctgagatattgtggtatgggttcatggcaaaaaaaaaaaaaaaa

SEQ ID NO: 3272 - protein, 62 aa, Triticum aestivum
  misc_feature: Ceres CLONE ID no. 730613
  misc_feature: Ceres CDNA ID no. 35383279
  misc_feature (3)..(61): Pfam Name: Ribosomal_S30 PFAM Desc: Ribosomal protein S30
  misc_feature: Homolog of GI Number: 55773694 NR Desc: 40S ribosomal protein S30
  misc_feature: Homolog of GI Number: 30102786 NR Desc: At5g56670
  misc_feature: Homolog of GI Number: 25295582 NR Desc: 40S ribosomal protein S30
  misc_feature: Homolog of GI Number: 27527721 NR Desc: putative 40S ribosomal protein S30
  misc_feature: Homolog of GI Number: 6679753 NR Desc: Finkel (FBR-MuSV) ubiquitously expressed (fox derived)
  misc_feature: Homolog of GI Number: 15822932 NR Desc: Finkel (FBR-MuSV) ubiquitously expressed (fox derived)
  misc_feature: Homolog of GI Number: 60678256 NR Desc: Finkel
  misc_feature: Homolog of GI Number: 63694872 NR Desc:  similar to Finkel (FBR-MuSV) ubiquitously expressed (fox derived)
  misc_feature: Homolog of GI Number: 62641779 NR Desc:  similar to Finkel (FBR-MuSV) ubiquitously expressed (fox derived)
  misc_feature: Homolog of GI Number: 1127861 NR Desc: arsenite
MGKVHGSLARAGKVRGQTPKVAKQDKKKQPRGRAHKRIQYNRRFVTAVVGFGKKRGPNSSEK

SEQ ID NO: 3273 - DNA, 622 bp, Triticum aestivum
  misc_feature: Ceres CLONE ID no. 731032
  misc_feature: Ceres CDNA ID no. 35383280
  CDS (2)..(565): REFERENCED BY SEQ ID NO: 3274
atgctgtgcgaatccatcattccctcggcctgtgactccatccagatcgatcccagtccacagaaacatcaatggcgtccgtgaagctcgccgccgcgctcgctcttgtcgccgtgtgcgccgcgctcgcggcgacgccggccacggcgttcccgcccgagagctgcgcgacgcagggcagctacttcatcaactgccttcggcgcgggttcggcgagaggtgctgcgccatggtggagaaccccaggtgcttctgccaggtggagcgggaggccgagatccggtgcgtgcccgggcggagctgcccgagccgtggcattgccaaggtcgtgaaggtcgccgagatgcatctctcctgcatgaggaacctcaagtgcaagcgtgcctaagcttagctgcttgcttcatttttgtatgttttctctgcttcctcgcgatgtgctggtcgtatggccgtaactatgtgtggtttgtttcgtttgggtcggcggtagctgtggtactctttgaatgctcttcatccggtccatctttggacaaaggtggcatggtttctatcatgtgagttgctcttggtgatgaatctgtgctagattgttatggggcaaaaaaaaaaaaaaaa

SEQ ID NO: 3274 - protein, 105 aa, Triticum aestivum; identical to SEQ ID NO: 3268
  misc_feature: Ceres CLONE ID no. 731032
  misc_feature: Ceres CDNA ID no. 35383280

SEQ ID NO: 3275 - DNA, 1246 bp, Triticum aestivum
  misc_feature: Ceres CLONE ID no. 731057
  misc_feature: Ceres CDNA ID no. 40351246
  CDS (133)..(1053): REFERENCED BY SEQ ID NO: 3276
aaaaaattcttattttgttttttaaactttcttaacgcaacaaacacatagccacatcttctctttctcttcccatggcattctgactcatacccaaatcattgattgtttgtctatcgaatcggtgagaaaatggcagtggagctgatggggttcccccaaatgggcgaacagaaggcaattgaagaagcagccgccgaaggcctcaagggcatggaacacctcctccgtctcctctcccatcaaccttcccacctccgcactcaccacaccgacgccaccgtttccaacttcaaaaaactcatctcccttctcaaccgccgcaccggccatgcccgtttccgccgcgcacccctcccttccacttccaactctctcgccccatcccctccaccggctaacccggtcaccttcgccccttcgcagtcacagagtctaaccctcgatttctcaaaacctaacatgttcaacaccaccaacgccaaatccatggacctcgagttctctaaagaaaccttcagcgtctcctccaactcctccttcatgtcctccgctatcaccggcgacggtagcgtctccaatggcaaactaggatcctccctcttcctcactcctccgccagtctccgccggaaaacctcctctctcgtttgctccgatcaagaagaggtgccacgaccaccgcgagcactccgacgacatctccgggaaactctccggctccagcaagtgccactgcatcaagagaaggaagaatcgtgtgaagaaaacggttagagttccggcgattagttcgaaggtcgccgatattccgccggatgagtactcgtggaggaagtacggacagaagccgatcaagggatcaccgtacccgagggggtattacaagtgcagtaccgtgagagggtgcccggcgaggaaacacgtggagcgtgcttcggacgatccgacgatgttgattgtaacgtacgagggggagcaccgacactcgattcagaccgcgatgcaggagaacatttccgggggagtgggtttggtattcgagtcaacgtgagtgtggaattaaagaaaggggaactgttggggggctttttttttgtagtaggaaaaaaaaaagaggtgaataggaaaattgaattaaggtggtggttgcaatgtaaatctgaccttattgaaagaaaatattattgtgctgttattatattattacagggtatcttaatcttctctcaaaaaaaaaaaaaaaa

SEQ ID NO: 3276 - protein, 306 aa, Triticum aestivum
  misc_feature: Ceres CLONE ID no. 731057
  misc_feature: Ceres CDNA ID no. 40351246
  misc_feature (227)..(287): Pfam Name: WRKY PFAM Desc: WRKY DNA
MAVELMGFPQMGEQKAIEEAAAEGLKGMEHLLRLLSHQPSHLRTHHTDATVSNFKKLISLLNRRTGHARFRRAPLPSTSNSLAPSPPPANPVTFAPSQSQSLTLDFSKPNMFNTTNAKSMDLEFSKETFSVSSNSSFMSSAITGDGSVSNGKLGSSLFLTPPPVSAGKPPLSFAPIKKRCHDHREHSDDISGKLSGSSKCHCIKRRKNRVKKTVRVPAISSKVADIPPDEYSWRKYGQKPIKGSPYPRGYYKCSTVRGCPARKHVERASDDPTMLIVTYEGEHRHSIQTAMQENISGGVGLVFEST

SEQ ID NO: 3277 - DNA, 457 bp, Triticum aestivum
  misc_feature: Ceres CLONE ID no. 731197
  misc_feature: Ceres CDNA ID no. 24766710
  CDS (3)..(200): REFERENCED BY SEQ ID NO: 3278
cccgccgcgtcgatcgaatcccgaatcccaattcccggccagccgccatcagcgccgccgccgccgccgccgccgcgatgagcgtggtggggctcgacgtcggcaacgacaccctggtggcggcggcggcgcggcagcgtggcatcgacgtgctgctcaacgccgagtccaagcgcgagtcgcccgccgccgacgagtagaaagggccaagttgcgtcgcgtagttctgcatctgagatgggagagaaagagagagatcatgtgatcctgtatgtaatgcctggtcctgagtccgaactggtagtagtctgtagcgtcgattgatcttgaatcactgctgaaatgaagctggaaacttgatcgtttagccaattccaatcttctccgtgtcaatctctcgaatttttgcgggttcttgctttaaaaaaaaaaaaaaaaaaaaaaaaaaaaaaaaaaa

SEQ ID NO: 3278 - protein, 40 aa, Triticum aestivum
  misc_feature: Ceres CLONE ID no. 731197
  misc_feature: Ceres CDNA ID no. 24766710
  misc_feature: Homolog of GI Number: 52076581 NR Desc: putative heat
  misc_feature: Homolog of GI Number: 34906196 NR Desc: putative heat
MSVVGLDVGNDTLVAAAARQRGIDVLLNAESKRESPAADE

SEQ ID NO: 3279 - DNA, 529 bp, Triticum aestivum
  misc_feature: Ceres CLONE ID no. 731525
  misc_feature: Ceres CDNA ID no. 25891367
  CDS (92)..(286): REFERENCED BY SEQ ID NO: 3280
gcagcatccattcttgttctcttctttctttcgatcagggtttcccctcgtctccgggctcgtttcgttctcgaataatcgatctacgataatgactcgcggtagccagagggatcgtgatcgcgaaagggctcaggctagaactggtgctaaaggcaagcagaaagatgatggattgacccctgaacagcgcagggaaagagatgcaaaggcgctgcaggagaaggccgcaaagaaagcggcacagggtgcaggagggaataatgcagctggaagcaaaaaataggcaataattcaatgagtagtttgagtttgccgtttgttgattgtggacatggaatttgtggaaattttatgttgcattattcatggagtatgatgtgtttattaatgtaacttgcgacggaagaacaaataagttgtgcttctttgaaagatgttgtcgctgggggcagaatcaataacttgtatctttgtttggaataatagtatttggcaattatattgtgttccaaaaaaaaaaaaaaaa

SEQ ID NO: 3280 - protein, 64 aa, Triticum aestivum
  misc_feature: Ceres CLONE ID no. 731525
  misc_feature: Ceres CDNA ID no. 25891367
  misc_feature (1)..(57): Pfam Name: 4F5 PFAM Desc: 4F5 protein family
  misc_feature: Homolog of GI Number: 15229580 NR Desc: four F5 family protein / 4F5 family protein
MTRGSQRDRDRERAQARTGAKGKQKDDGLTPEQRRERDAKALQEKAAKKAAQGAGGNNAAGSKK

SEQ ID NO: 3281 - DNA, 700 bp, Triticum aestivum
  misc_feature: Ceres CLONE ID no. 731812
  misc_feature: Ceres CDNA ID no. 29191548
  CDS (75)..(539): REFERENCED BY SEQ ID NO: 3282
tccgccacccaccttcccctgcacacaactctccaccgtagcccccaatccccacccatcttcccggagcagcgatggcccccaaggcggagaagaagccggcggcgaagaagcccgcggaggaggagcccgcggcggagaaggccgagaagacccctgccgggaagaagcccaaggccgagaagcggctgccggcgggcaagaagaccgcctccaaggagggcggcggcgagaagaggggccggaagaagggcaagaagagcgtggagacctacaagatctacatcttcaaggtgctgaagcaggtgcaccccgacatcggcatctcctccaaggccatgtccatcatgaactccttcatcaacgacatcttcgagaagctcgccggcgaggccgccaagctcgcccgctacaacaagaagcccaccatcacctcccgggagatccagacctccgtccgcctcgtcctccctggggagctcgccaagcacgccgtctccgagggcaccaaggcagtcaccaagttcacctcctcttagattccattgcctgtatctaaatagctgttcgccctggttatcaccaagtagaagtagtgctagtgcttgatgggagttgctgaatgtttgccgatgcttcgttcgctgtaagaacagaattatgaatctatggtgccgcttttgcaaaaaaaaaaaaaaaa

SEQ ID NO: 3282 - protein, 154 aa, Triticum aestivum
  misc_feature: Ceres CLONE ID no. 731812
  misc_feature: Ceres CDNA ID no. 29191548
  misc_feature: No seed is being produced by the plant
  misc_feature: The plant flowers significantly late compared to wild-type.
  misc_feature: Useful for biocontainment applications
  misc_feature: Useful for making plants with modulated flowering time
  misc_feature (61)..(133): Pfam Name: Histone PFAM Desc: Core histone H2A/H2B/H3/H4
  misc_feature: Homolog of GI Number: 21801 NR Desc: histone H2B
  misc_feature: Homolog of GI Number: 34895900 NR Desc: putative histone H2B
  misc_feature: Homolog of GI Number: 577825 NR Desc: H2B histone
  misc_feature: Homolog of GI Number: 34895904 NR Desc: putative histone H2B
  misc_feature: Homolog of GI Number: 22325 NR Desc: H2B histone
  misc_feature: Homolog of GI Number: 34895838 NR Desc: putative histone H2B
  misc_feature: Homolog of GI Number: 34895832 NR Desc: putative histone H2B
  misc_feature: Homolog of GI Number: 22323 NR Desc: H2B histone
  misc_feature: Homolog of GI Number: 34895896 NR Desc: putative histone H2B
  misc_feature: Homolog of GI Number: 34895908 NR Desc: putative histone H2B
MAPKAEKKPAAKKPAEEEPAAEKAEKTPAGKKPKAEKRLPAGKKTASKEGGGEKRGRKKGKKSVETYKIYIFKVLKQVHPDIGISSKAMSIMNSFINDIFEKLAGEAAKLARYNKKPTITSREIQTSVRLVLPGELAKHAVSEGTKAVTKFTSS

SEQ ID NO: 3283 - DNA, 994 bp, Triticum aestivum
  misc_feature: Ceres CLONE ID no. 732132
  misc_feature: Ceres CDNA ID no. 40041309
  CDS (136)..(678): REFERENCED BY SEQ ID NO: 3284
acttgctcgcgctctccctcgcccacgtttccccggccggcacaggctaaaagctaagccaggaccagcgcccagctctggtcacggggagcgtgtgtgccggtgtgcggctgcggcgggccggagtgagcgaggatggggaactgccaggcggcggaggtggcggcggcggtggtgcagcacccgggcgggcgggtggagcggctctactggtccacccccgctgcggaggtgatgcgcgccaacccgggccactacgtcgcgctcgtcacgctccgggtcgccgaggagcgccaggacgccgacggcggcggcgcgcgccgcaccgtgcgcctcacccgcgtcaagctcctcaagcccaaggagacgctgctcctcggccacgtctaccgcctcatcaccgccaacgaggtgaccaaggcggtgcaggcgaggaaggaggagaagctgaggaaggcgcggcagcagctgcagcagctggagtcgtcgacgcggcagagcaagctgcggccggcggccgacggtgacgacgtcgacgacgacgacgacgaggccagcttggatgagagtctcgatcagttggcacgccaggacggaggagatggccaccggagctccggcgcccggcaccggcaatggcggccctcgctgcacagcatcgacgaggccgcgagctgatgcccggccatacatagccctcggtggatcttctgtattttcggcgtccacccggcttcaacagattaatctagctcgtgtttatggtttgctgccacatctgtgttggatcgacaccccgatacgagcgggccgcttctgaagcgactccgtcgatcggagcgtgtcctgtgtctttgtacattttcagggtttctcgtcagggtctgttagtgagagcgagactgcctttttctttctttctcttgatacatttgcacctgattaagatgcatgaaagaagttcagaacacgactagcaaaaaaaaaaaaaaaa

SEQ ID NO: 3284 - protein, 180 aa, Triticum aestivum
  misc_feature: Ceres CLONE ID no. 732132
  misc_feature: Ceres CDNA ID no. 40041309
  misc_feature: Homolog of GI Number: 5091546 NR Desc: T10O24.15
  misc_feature: Homolog of GI Number: 66778899 NR Desc: UvrD/REP helicase
  misc_feature: Homolog of GI Number: 74000907 NR Desc:  similar to Mothers against decapentaplegic homolog 6
  misc_feature: Homolog of GI Number: 67664537 NR Desc: ABC transporter
MGNCQAAEVAAAVVQHPGGRVERLYWSTPAAEVMRANPGHYVALVTLRVAEERQDADGGGARRTVRLTRVKLLKPKETLLLGHVYRLITANEVTKAVQARKEEKLRKARQQLQQLESSTRQSKLRPAADGDDVDDDDDEASLDESLDQLARQDGGDGHRSSGARHRQWRPSLHSIDEAAS

SEQ ID NO: 3285 - DNA, 790 bp, Triticum aestivum
  misc_feature: Ceres CLONE ID no. 732235
  misc_feature: Ceres CDNA ID no. 25891368
  CDS (139)..(648): REFERENCED BY SEQ ID NO: 3286
gtttttcttctgtgtcttgacgaacctaaataccattccttacagtttcaaacacttgttcttcatcttcttcttctcttttatacctttctttctctgtggatctacaccgactaagatgctagccgtattctaaaaatggaaaacaatcaaagtgctgcaggaacacaagatagttctatgatgaagtctgttgatcaaagagcacgatcaaaagggcgcaatgacataatgactcaacgtctgaagaatcgagagagacaacgaagatatagggcacgtaagcgtctagaagccgaaacaaagaagtcatttgttgtggaagagacaccagctgtgcaagttgaactacaaccaaacaggaaccccaacaacaacttcgtgacccgtatctattgtaaacgagattggaaaaaggacgcaagacgggcccatattttaaagcatcaacaaatgaatggattcattgatcgtccagccataactagtgtacctgaggtgacatgcttagccattggaaacaagtcagaaacagtgccagagagggaaattcagtctggatcttctggtgttgctagtactgatgctcctagagtggtgctgggtcgaagagattggaaagcagaagctagaagaaagaaaaactagttgactcgccatttcttcttttaaaaaaagtatttagcacagtgagctttctgttgtattatagaacattatataatgtaaagaatgctggataaccgctgttccattacctggcaggctttgaaattataaaaaaaaaaaa

SEQ ID NO: 3286 - protein, 169 aa, Triticum aestivum
  misc_feature: Ceres CLONE ID no. 732235
  misc_feature: Ceres CDNA ID no. 25891368
MENNQSAAGTQDSSMMKSVDQRARSKGRNDIMTQRLKNRERQRRYRARKRLEAETKKSFVVEETPAVQVELQPNRNPNNNFVTRIYCKRDWKKDARRAHILKHQQMNGFIDRPAITSVPEVTCLAIGNKSETVPEREIQSGSSGVASTDAPRVVLGRRDWKAEARRKKN

SEQ ID NO: 3287 - DNA, 1566 bp, Triticum aestivum
  misc_feature: Ceres CLONE ID no. 732445
  misc_feature: Ceres CDNA ID no. 40351247
  CDS (258)..(1292): REFERENCED BY SEQ ID NO: 3288
gaggctcggcgtggctcggctggcatttgcttgtcctgtttctcgtggccgcctacttgtaatccgctgccagccaaatcgctagctcactccctccctcgtcagcctccggcagatcctcctccataccgctcgaagctccgccctcctcctcccgacacctcgagatctccgccccggacccatttcttccccaccaaggtccagcgccgtccggccggccctccctgttgcaggcaggcgacgccgccgccgccatgtccaagtcgggagccctggatctcgcgtccggccttggcgggaagatcgacaaggaacaggtcaaatccgcggtcgacgagtatgagaaatatcatggatattacggagggaaggaggaatcgaggaaatccaactacaccgatatggttaataaatactatgatcttgctactagcttctatgagtatggctggggtgaatccttccactttgctcacaggtggaatggggaatctttaagggaaagcatcaaacgacacgagcactttctggccttacagcttgagttgaaaccaggcatgaaggttttggatgtcggctgtggaataggcgggccattaagagaaattgcgagatttagctccacctcagttactggattgaacaacaacgactaccagataactaggggaaaggcgcttaatcggtcggtaggacttggcgcaacttgtgattttgtcaaggcagacttcatgaagatgccattctctgataacactttcgatgctgtttatgccattgaggcaacatgccacgcacctgatccggttggctgctacaaggagatctaccgtgtattaaaacccgggcagtgttttgctgtatatgagtggtgcattaccgatcactatgatccaaacaatgcaacccacaagaggattaaggatgaaattgagcttgggaatggcctgccagatatcagaagtactcggcaatgtcttcaagctgttaaagatgctgggtttgaggttatttgggacaaggatcttgctgaagattctccgttgccttggtacttgcccttggacccaagtcggttttcattgagtagtttccggttgactaccgtgggacgaataattactcgcaatatggtcaaggtattggaatatgttggtctggctccggaaggcagccagagggtctctagtttcttagagaaggccgcggaaggtcttgttgaaggtggcaagaaggaaatcttcaccccgatgtacttctttgtggttcggaagcctctttcagaatgagcaaccttcaggcaatgcaaagatgcattttgaaggcgggctcgaccggggagtttggttatgcgatcctcggttcttatctgtagaagaagacgtagtgaaatgtgttgcgtttctgtttgttttgtatttaatgttgagcttctgttttgttgttttgtcgtgcgagcctttcgatgctcgtcgattaactgacagtttgacaccattgtgctaagctattagtggcataaataaactagatgcagttttcttcccaaaaaaaaaaaaaaaa

SEQ ID NO: 3288 - protein, 344 aa, Triticum aestivum
  misc_feature: Ceres CLONE ID no. 732445
  misc_feature: Ceres CDNA ID no. 40351247
  misc_feature (42)..(292): Pfam Name: CMAS PFAM Desc: Cyclopropane
MSKSGALDLASGLGGKIDKEQVKSAVDEYEKYHGYYGGKEESRKSNYTDMVNKYYDLATSFYEYGWGESFHFAHRWNGESLRESIKRHEHFLALQLELKPGMKVLDVGCGIGGPLREIARFSSTSVTGLNNNDYQITRGKALNRSVGLGATCDFVKADFMKMPFSDNTFDAVYAIEATCHAPDPVGCYKEIYRVLKPGQCFAVYEWCITDHYDPNNATHKRIKDEIELGNGLPDIRSTRQCLQAVKDAGFEVIWDKDLAEDSPLPWYLPLDPSRFSLSSFRLTTVGRIITRNMVKVLEYVGLAPEGSQRVSSFLEKAAEGLVEGGKKEIFTPMYFFVVRKPLSE

SEQ ID NO: 3289 - DNA, 811 bp, Triticum aestivum
  misc_feature: Ceres CLONE ID no. 732697
  misc_feature: Ceres CDNA ID no. 25891369
  CDS (60)..(521): REFERENCED BY SEQ ID NO: 3290
cccatctcccatcctttgtttgttgatccatctcttgtttcttgctttctttcttcaccatgtcacttgctgggaaaatcaccactgaaatcggggttcatgcaaccgctacaaagtggttcaacctcttcgcaacacaactccatcatgttcaaaacctaactgatagagtgcatggaaccaagctgcatcaaggtgaagactggcatcacaacgagacagtcaagcactggacttataccatagatggtaaggttacaacatgtctggagagtattgaatccattgatgaacagagcaaaacaatcacctacaagctcttcagtggtgacattgatcataattataagaactttaagttcatctttcaagccattgatgataatgatcatggcggtactattatcaaatggaccgttgaatacgagaggcttcgtgaggaggttgatcctccatatggccacattgaatacctgcacaaatgcactaaagatattgatggtcatcttctcaaagcatagctagctctaaaagttatgcactaaaaaataatgggcttgacctttggataagtgcttatatgtataataaaatcggtgtgaagtttgacgagaagaatgcttagttatgtagatccttcctttgtatggaaaataaacttggatatgcatgtcggtgatatcttgaagtgtgttaaattatatttggaagtgctcaatgtgatgcatgggaatattattaatgaatggatgtttatgattttcgtgagtatatactttcgtgcagtacttttttaaaaaaaaaaaaaaaa

SEQ ID NO: 3290 - protein, 153 aa, Triticum aestivum; identical to SEQ ID NO: 3220
  misc_feature: Ceres CLONE ID no. 732697
  misc_feature: Ceres CDNA ID no. 25891369
  misc_feature (2)..(153): Pfam Name: Bet_v_I PFAM Desc: Pathogenesis
  misc_feature: Homolog of GI Number: 5739198 NR Desc: ripening related protein
  misc_feature: Homolog of GI Number: 20975622 NR Desc: putative ripening related protein
  misc_feature: Homolog of GI Number: 34452233 NR Desc: ripening
  misc_feature: Homolog of GI Number: 48714607 NR Desc: putative Bet v I family protein
  misc_feature: Homolog of GI Number: 7406710 NR Desc: putative ripening
  misc_feature: Homolog of GI Number: 2465015 NR Desc: ripening
  misc_feature: Homolog of GI Number: 3164115 NR Desc: major latex
  misc_feature: Homolog of GI Number: 13172242 NR Desc: major latex
  misc_feature: Homolog of GI Number: 30698759 NR Desc: Bet v I allergen family protein

SEQ ID NO: 3291 - DNA, 422 bp, Triticum aestivum
  misc_feature: Ceres CLONE ID no. 734011
  misc_feature: Ceres CDNA ID no. 40351248
  CDS (66)..(221): REFERENCED BY SEQ ID NO: 3292
agggtttggttattagggttttcgctgaccggtgcgcagtcgagcctccagaagacgaatcgaaaatgccgtcgcacaagacattcagaatcaagaagaagttggcgaagaagatgaggcagaacaggcccattccctactggatccgcatgaggaccgataacaccatcaggtacaacgcgaagcgccgtcactggcgtcgcaccaagcttggattctgaggtgtatgctctgcctaggttcaatttatccaattaattagtgttttattttcttgaggcaaaaacaatgttttgagtttttaatattttccatttgttcgaagactatattgtgtaaggaacttattgtagttcatactcatggcgtttgtcaactccttttaaagtattttcggattcattacaaaaaaaaaaaaaaaa

SEQ ID NO: 3292 - protein, 51 aa, Triticum aestivum; identical to SEQ ID NO: 2406
  misc_feature: Ceres CLONE ID no. 734011
  misc_feature: Ceres CDNA ID no. 40351248
  misc_feature (9)..(51): Pfam Name: Ribosomal_L39 PFAM Desc: Ribosomal L39 protein

SEQ ID NO: 3293 - DNA, 791 bp, Triticum aestivum
  misc_feature: Ceres CLONE ID no. 734233
  misc_feature: Ceres CDNA ID no. 25446635
  CDS (67)..(612): REFERENCED BY SEQ ID NO: 3294
aagtgtggaagtatttgcagaactttgtttcccaacctccattgcctccgcttctacctcgctaccatgatcattcctgagaagaaccgcaaggagatctgcaaatacctcttccaagagggagtttgctttgcgaagaaggacttcaatttggcgaagcaccctgagattgacgtgccgaatctgcaggtgattaagctgatgcagagtttcaagtctcgcgagtatgtgagggagacttttgcttggatgcactattactggttcctcaccaacgatggaatcgagtttctcagaacttaccttaaccttccttccgaaattgtccctgctactttgaagaaacaggccaagccacctggcaggccctttggcggcccatccggtgatcgccctaggggtccaccacgctttgaaggggagcgtaggtttggtggtgatcgtgatggataccgtggaggtccccgaggaggacctggtggtgactttggaggagacaagggaggagctcctgctgactacaggccctcttttgggggtgctggtggaaggcctggctttggtcgtggatctggtggttttggagcgccaaccagctcaaatcttccctaagtataatgctatctgctatattttttgtttagttttctaggaagacttgtttgtagttggaatcaatgataattttccatctcatatagattgttttatcggcctgacactagtttatattcagtttttcgttcaatgaagattttgatttttgagtgtttgcaaaaaaaaaaaaaaaa

SEQ ID NO: 3294 - protein, 181 aa, Triticum aestivum
  misc_feature: Ceres CLONE ID no. 734233
  misc_feature: Ceres CDNA ID no. 25446635
  misc_feature (3)..(98): Pfam Name: S10_plectin PFAM Desc: Plectin/S10 domain
  misc_feature: Homolog of GI Number: 81076822 NR Desc: 40S ribosomal protein S10
  misc_feature: Homolog of GI Number: 81074037 NR Desc: 40S ribosomal protein S10
  misc_feature: Homolog of GI Number: 50909311 NR Desc: 40S ribosomal protein S10
  misc_feature: Homolog of GI Number: 20140213 NR Desc: 40S ribosomal protein S10
  misc_feature: Homolog of GI Number: 21281207 NR Desc: putative ribosomal protein S10
  misc_feature: Homolog of GI Number: 34905824 NR Desc: putative ribosomal protein S10
  misc_feature: Homolog of GI Number: 79325265 NR Desc: structural constituent of ribosome
  misc_feature: Homolog of GI Number: 40642980 NR Desc: ribosomal protein S10
  misc_feature: Homolog of GI Number: 61654720 NR Desc: S10
  misc_feature: Homolog of GI Number: 50344478 NR Desc: S10e ribosomal protein
MIIPEKNRKEICKYLFQEGVCFAKKDFNLAKHPEIDVPNLQVIKLMQSFKSREYVRETFAWMHYYWFLTNDGIEFLRTYLNLPSEIVPATLKKQAKPPGRPFGGPSGDRPRGPPRFEGERRFGGDRDGYRGGPRGGPGGDFGGDKGGAPADYRPSFGGAGGRPGFGRGSGGFGAPTSSNLP

SEQ ID NO: 3295 - DNA, 602 bp, Triticum aestivum
  misc_feature: Ceres CLONE ID no. 735604
  misc_feature: Ceres CDNA ID no. 36699990
  CDS (93)..(332): REFERENCED BY SEQ ID NO: 3296
gttctagtgtatgtgattgttgtgactcgttcttcttcgtcgttatcttcttcttttgttgtttgtgtgtttgttttttctctcacctgaaaatgtcttgctgcggtggtaactgtggttgcggaagcgcctgcaagtgcggcaacggctgcggaggctgcaagatgtacccagacttgagctacaccgagtcaaccaccaccgagaccttggtcatgggagtggcaccagttaaggctcaattcgagagtgctgaaatgggtgttcccgctgagaacgatggctgcaaatgtggagctaactgcacctgcaacccctgcacttgcaagtgaggtgttggagagctaaagcttcaagcagaaatggcccttagaaataatgataaaaactatatgtagtttcaaaacttcaaaattatgtagtatgtattatgttgcactctggtgttttgtgtctaaacaaacacccttagaataaagtggtcatttcttgcccttgagcaagttcaagtgttttggacttgtgatgggtgtgttaaggtcatggttgccttttttatatatatatatatatataaatgtttggcaaaaaaaaaaaaaaaa

SEQ ID NO: 3296 - protein, 79 aa, Triticum aestivum; identical to SEQ ID NO: 1962
  misc_feature: Ceres CLONE ID no. 735604
  misc_feature: Ceres CDNA ID no. 36699990
  misc_feature (1)..(78): Pfam Name: Metallothio_2 PFAM Desc: Metallothionein
  misc_feature: Homolog of GI Number: 47076854 NR Desc: type 2 metallothionein
  misc_feature: Homolog of GI Number: 541943 NR Desc: metallothionein
  misc_feature: Homolog of GI Number: 47076858 NR Desc: type 2 metallothionein
  misc_feature: Homolog of GI Number: 47076850 NR Desc: type 2 metallothionein
  misc_feature: Homolog of GI Number: 71040685 NR Desc: metallothionein
  misc_feature: Homolog of GI Number: 2815246 NR Desc: class I type 2 metallothionein
  misc_feature: Homolog of GI Number: 71040683 NR Desc: type 2 metallothionein
  misc_feature: Homolog of GI Number: 74476676 NR Desc: type 2 metallothionein
  misc_feature: Homolog of GI Number: 47076870 NR Desc: type 2 metallothionein
  misc_feature: Homolog of GI Number: 747906 NR Desc: metallothionein

SEQ ID NO: 3297 - DNA, 673 bp, Triticum aestivum
  misc_feature: Ceres CLONE ID no. 735722
  misc_feature: Ceres CDNA ID no. 25891370
  CDS (44)..(538): REFERENCED BY SEQ ID NO: 3298
tttttagggtttacactgaggaggcacaccttcaggagcagtcatggttctcaaaaccgagctgtgccgattcagcggtgccaagatctacccagggaaaggcatcagatttgttcgtggtgattctcaggttttcctgtttgctaactcaaaatgtaagaggtatttccacaacaggttgaagccgtcaaagctcacgtggactgcaatgtaccgaaagcagcataagaaggatattgctcaagaagctgtgaagaagagaagacgtgctaccaaaaaaccttactctaggtctattgttggtgctactttagaagttatccagaaaaagagaaccgagaagccagaagttcgagatgcagctagggaagcacagcttcgtgaaattaaggagaggatcaagaaaactaaggatgacaagaaagctaagaaagcagaagttgcagctaagtcccaaaaatcacaagggaaaggaagtatttcgaagggtgccatgcccaaaggtcccaaacttggtgggggaggtgggaaacgctgagcttttaagttttgttcttatttttggctacaatttaaatagagctgttttgaaacttctgtactgatattttatttgcatgattaatatgttttattaaaaaacccatgtttggagctaaaaaaaaaaaaaaaa

SEQ ID NO: 3298 - protein, 164 aa, Triticum aestivum; identical to SEQ ID NO: 2236
  misc_feature: Ceres CLONE ID no. 735722
  misc_feature: Ceres CDNA ID no. 25891370
  misc_feature (3)..(73): Pfam Name: Ribosomal_L24e PFAM Desc: Ribosomal protein L24e
  misc_feature: Homolog of GI Number: 2961300 NR Desc: ribosomal protein L24
  misc_feature: Homolog of GI Number: 10180025 NR Desc: 60S ribosomal protein L24
  misc_feature: Homolog of GI Number: 21553461 NR Desc: 60S ribosomal protein L24
  misc_feature: Homolog of GI Number: 1154859 NR Desc: L24 ribosomal protein
  misc_feature: Homolog of GI Number: 56785063 NR Desc: putative 60S ribosomal protein L24
  misc_feature: Homolog of GI Number: 50931851 NR Desc: putative 60S ribosomal protein L24
  misc_feature: Homolog of GI Number: 34900364 NR Desc: putative 60S ribosomal protein L24
  misc_feature: Homolog of GI Number: 25295112 NR Desc: 60S ribosomal protein L24
  misc_feature: Homolog of GI Number: 82400154 NR Desc: ribosomal protein L24
  misc_feature: Homolog of GI Number: 30102870 NR Desc: At3g53020

SEQ ID NO: 3299 - DNA, 1361 bp, Triticum aestivum
  misc_feature: Ceres CLONE ID no. 735894
  misc_feature: Ceres CDNA ID no. 40351249
  CDS (133)..(1095): REFERENCED BY SEQ ID NO: 3300
gcacgctttcccctcctccaagctttcccccaccggcctcccccgtctcctgcccccacccattcgccgctgaccccccttccagaaccttccagaagcgaacgagagagcccgcaggggcggcgcaggggcatggcgatggcgacgcacacgggggtcgccgcctccaaggtcctcatcctcgtcggcgcaggcctgacgggatcgatcgtgctccggaatggccgcttgtcggatgtattggcggagctccaggagctcatgaagggcgtaaatcaaggagaaggctcgagcgcctatgacatggctcttatccaagctcagattcggcatttagcccaagaagtcagagatttaactttgtcaaagcccattaccatattgagtggcaaatcggactcgggaggcagtttatcgtcctacatactgccagcagctgcagttggagcattaggttattgctatatgtggtgtaagggatggtccttgtcagatgtcatgtttgtcacaaaacgcaatatggccagtgctgtcgacagcatgtcgaagcaattggagcaagtttcatcagcactagcagcaaccaaaagacatttaacaaaacgccttgagaatttggatggcaaaatggacgaacaagtggaagtctccaaacaaatccggaatgaggtcactgatgttaaaactgacctgtcccaaattggctttgatgttgaagcaattcaacagatggtagctggactggaagagaagattgagttgcttgacaataaacaggatgcggctaatgctggtatatggtatctctgccgaatggcaggaggtataaaagagggaataaatgccaagtttttccaagaagcggatgaaaaactcaagctcttagaccttgctcaaactgaaaagaagccagtgaagggtctcgaattgtttctggagagcaccaaggaggtaaaggcactcgactccaagccaaagaccatcatgcagaacgacgtcaagaaaccgacgaaaacgttcgacgtgcccataaaaagcgctgcggtgcacaggtcaaacaggttcttaattcgtaaagaaggcctcgcgctgtgattgacgcggatcgcctcgtggtgtacattgcgttcttggttgctttgtttgatagaaaaaatatagaagaagaataacctgcatcccatgtggtgattttccaggatagacaggttgatacgtctgaaggcaatttgtattcgtttctttgtatttttgcgtcatttcatgtttggtctgaagttgttcgcttgtaaacaagtgacataaaggaataaataattaaaacacgtttcgcattcttacatcctaaaaaaaaaaaaaaa

SEQ ID NO: 3300 - protein, 318 aa, Triticum aestivum
  misc_feature: Ceres CLONE ID no. 735894
  misc_feature: Ceres CDNA ID no. 40351249
MATHTGVAASKVLILVGAGLTGSIVLRNGRLSDVLAELQELMKGVNQGEGSSAYDMALIQAQIRHLAQEVRDLTLSKPITILSGKSDSGGSLSSYILPAAAVGALGYCYMWCKGWSLSDVMFVTKRNMASAVDSMSKQLEQVSSALAATKRHLTKRLENLDGKMDEQVEVSKQIRNEVTDVKTDLSQIGFDVEAIQQMVAGLEEKIELLDNKQDAANAGIWYLCRMAGGIKEGINAKFFQEADEKLKLLDLAQTEKKPVKGLELFLESTKEVKALDSKPKTIMQNDVKKPTKTFDVPIKSAAVHRSNRFLIRKEGLAL

SEQ ID NO: 3301 - DNA, 889 bp, Triticum aestivum
  misc_feature: Ceres CLONE ID no. 735955
  misc_feature: Ceres CDNA ID no. 40351250
  CDS (63)..(767): REFERENCED BY SEQ ID NO: 3302
acaaaaacgaagtactactacaagggaagaaaaacttagctactaaggaaggatcaaagagaatggctcaagcaatggcatcaatggctggcttgcgtggttcctctcaggctgtgttggaaggtagccttcaggtgagtggctccacacgcttgaatgtggggagtggaagcagggtggcctcagtcacacgtgcagggttcacagttagagcacaacaacaacaagtgagtggtgaggtacaaagcagccgtagggcagtgctttcacttgttgctgctggtttggccactggctcttttgttcaagctgtgcttgctgatgccaaatctatcaaagttggaccacctcccccaccttctggtggattgcctggaacgttgaactcagatgaagcaagagaccttcagctgccattgaaagataggttcttccttcaaccattgtctcctactgaggctgcacaaagggcaaaggaatcagccaaggagattgttggtgttaagaagttgattgaaaagaaggcttggccatatgttcagaatgatctgcgtctcagggctgagtatttgcgctttgatctcaacactgtcattgctggaaagcctaaggatgagaagaaatcactcaaggaactcactggcaagctcttccaggatatcagcaatctggatcatgcagcaaaaattaagagcagcccagaagcagagaagtactatgctgctactgtatcttctctgaacgatgtccttgccaaacttggttaatgtgattaatttcttgctttcttgtgtaagctttgtgcatcattttctcagacactttgttgactgatattttaagaaaatcaaatgatgagggaaaattttctataaaaaaaaaaaaaaaa

SEQ ID NO: 3302 - protein, 234 aa, Triticum aestivum
  misc_feature: Ceres CLONE ID no. 735955
  misc_feature: Ceres CDNA ID no. 40351250
  misc_feature (30)..(234): Pfam Name: PsbQ PFAM Desc: Oxygen evolving enhancer protein 3
MAQAMASMAGLRGSSQAVLEGSLQVSGSTRLNVGSGSRVASVTRAGFTVRAQQQQVSGEVQSSRRAVLSLVAAGLATGSFVQAVLADAKSIKVGPPPPPSGGLPGTLNSDEARDLQLPLKDRFFLQPLSPTEAAQRAKESAKEIVGVKKLIEKKAWPYVQNDLRLRAEYLRFDLNTVIAGKPKDEKKSLKELTGKLFQDISNLDHAAKIKSSPEAEKYYAATVSSLNDVLAKLG

SEQ ID NO: 3303 - DNA, 1179 bp, Triticum aestivum
  misc_feature: Ceres CLONE ID no. 735988
  misc_feature: Ceres CDNA ID no. 40351251
  CDS (41)..(913): REFERENCED BY SEQ ID NO: 3304
tttcatatcatatcttggaaaacccacaggcacgctgagcatggaacacagaaccctagaactcaacctggcttcagcaaaggatctcaaagacttgaatatattctcaaagatggatgtatatgctgtgctttcactctccggcgatcaaaagaccaagactcccgtccacagaaacggcggcaccaacccaacatggaattttccggtcaagttcacttttgatgaatcggtggcgcggcagaaccgtttggccctcgaaatcaagatccgctccgagcgcgccctcgccaccgataaggacatcggccaggtccacgttcctctcatggaactcctcaagcaacctggcgacggtaaatccttccagcacgttagttaccaggtcagaaaaccctccggcaaacccaagggagccctcaatttctcctacaaatttggcgatgaattcgcagccccagccaaggtatcagcacccgcacctacctcgccttctcacaaggtggaccccgtcacggcttatcctgctcccgcggtgggctccacttcttctgccgcgtatcccgccatgtatcctccgccgccgccgccacaatatgcctatcctccgccgcctcaacccgctcacggatacggatacgctccacaacatggatacggttacgcgccacaagcggcttatgggtacgcgccacaagcggcttatgggtacgcgccacaacccgggtacggttacgctcctcctcctcctgctgctgcagcagttcaaagaccggggaagaacaatttgggaatgggattgggtgcggggttgcttggaggagccttgggtggacttctaattggggacatgatttctgatgccggttcttacgacgctggttttggagatttcggtggatttgatttttaaatctcttgttagttttctttgtttgggggtagttttttatgttcaaatgtgaacttaaattagaatatgttttttgcagtagatactgttttgttacttctagtttcttgtccggtgtatagatgtggtgtgtggatttgtggaagctacttctttatgtaaattttcaagtttggttacgtaatgtatgcttcacgacaactctctactttttcttttctaattactccaaagtttgatttctgtggccaaaaaaaaaaaaaaaa

SEQ ID NO: 3304 - protein, 290 aa, Triticum aestivum
  misc_feature: Ceres CLONE ID no. 735988
  misc_feature: Ceres CDNA ID no. 40351251
  misc_feature (6)..(93): Pfam Name: C2 PFAM Desc: C2 domain
MEHRTLELNLASAKDLKDLNIFSKMDVYAVLSLSGDQKTKTPVHRNGGTNPTWNFPVKFTFDESVARQNRLALEIKIRSERALATDKDIGQVHVPLMELLKQPGDGKSFQHVSYQVRKPSGKPKGALNFSYKFGDEFAAPAKVSAPAPTSPSHKVDPVTAYPAPAVGSTSSAAYPAMYPPPPPPQYAYPPPPQPAHGYGYAPQHGYGYAPQAAYGYAPQAAYGYAPQPGYGYAPPPPAAAAVQRPGKNNLGMGLGAGLLGGALGGLLIGDMISDAGSYDAGFGDFGGFDF

SEQ ID NO: 3305 - DNA, 694 bp, Triticum aestivum
  misc_feature: Ceres CLONE ID no. 736033
  misc_feature: Ceres CDNA ID no. 25891371
  CDS (84)..(515): REFERENCED BY SEQ ID NO: 3306
acaacttcacccactcttcattctatcaattccaatcaccaattcaaaacccttcttcccttggaacaaattgagagatcgtgatggcaccaaaggcggagaagaagcccgcagaggagaagaagtccacggtgggagacaaggctccggcggagaagaagccaaaggccggaaagaagcttccgaaggagggaggcgccggcggagaagggaagaagaagaagaggaacaagaagagcgtggagacatacaagatctacatcttcaaggttctgaagcaggttcaccctgacattggtatctcaagcaaggccatgggaatcatgaacagcttcatcaacgacatcttcgagaagcttgcccaggaatcttctagacttgcccgctacaacaagaaacccaccatcacttcgagggaaattcagaccgcggtcaggcttgtgctgcccggtgaattggctaagcacgccgtctctgagggtaccaaggccgtcaccaagtttactagctcttaaactgttgtttatgggcttgttgcacgcccaagtctgttctatgtatctggacacctatgttcagattttaatcaattgtaggggtggtgatatagtatagtgtagcatattgttggtacggtacattgaattgctgttgagaattaatacatttgagattctcaaaaaaaaaaaaaaaa

SEQ ID NO: 3306 - protein, 143 aa, Triticum aestivum
  misc_feature: Ceres CLONE ID no. 736033
  misc_feature: Ceres CDNA ID no. 25891371
  misc_feature: No seed is being produced by the plant
  misc_feature: The plant flowers significantly late compared to wild-type.
  misc_feature: Useful for biocontainment applications
  misc_feature: Useful for making plants with modulated flowering time
  misc_feature (50)..(122): Pfam Name: Histone PFAM Desc: Core histone H2A/H2B/H3/H4
  misc_feature: Homolog of GI Number: 2558962 NR Desc: histone H2B1
  misc_feature: Homolog of GI Number: 82400146 NR Desc: histone H2B
  misc_feature: Homolog of GI Number: 21536602 NR Desc: histone H2B
  misc_feature: Homolog of GI Number: 30102580 NR Desc: At3g45980
  misc_feature: Homolog of GI Number: 21554180 NR Desc: histone H2B
  misc_feature: Homolog of GI Number: 21553526 NR Desc: putative histone H2B
  misc_feature: Homolog of GI Number: 3021485 NR Desc: histone H2B
  misc_feature: Homolog of GI Number: 3021483 NR Desc: histone H2B
  misc_feature: Homolog of GI Number: 1848210 NR Desc: histone H2B1
  misc_feature: Homolog of GI Number: 21617908 NR Desc: histone H2B
MAPKAEKKPAEEKKSTVGDKAPAEKKPKAGKKLPKEGGAGGEGKKKKRNKKSVETYKIYIFKVLKQVHPDIGISSKAMGIMNSFINDIFEKLAQESSRLARYNKKPTITSREIQTAVRLVLPGELAKHAVSEGTKAVTKFTSS

SEQ ID NO: 3307 - DNA, 1897 bp, Triticum aestivum
  misc_feature: Ceres CLONE ID no. 736115
  misc_feature: Ceres CDNA ID no. 40041310
  CDS (57)..(1490): REFERENCED BY SEQ ID NO: 3308
gctgtttcattttggcaggaaaatctgtcgaactcgaaccctaaccaggcggcgccatggaccagttcctcgtcgcggcgccgccttccgccgacgagggccccgaagcgccacgaccgccgcctcggaggtggcaccggtggagccgtatcgccgtggagctggacggccacatcgacgccaggtttcgacatcgggaatcccgccgtctcctcgattcccttgccgagattaggaccttcgaacacaagtactacacgcatggcgaggaacggtgcacgacatatgtgaatcgcatgattaatgcttcaacatttgctgggtgttaccattcagctagggagggggtttcggcaatggaattcgataaaaagggaatatacctcgcatcagtgacaaactcaggatgtttaacagtgcatgactttgagaccttatactgctccttgtatggcccattatgtcgtataccagatgactcatcaaactatgtgctccatatatcaaactcaatgcctctatgtgctgtccgatggaatccaggaaatcaagacgagattgtttgctcatctagccaaactgacaaagttttactgtttgacattgggtacgtctcatctgctccgactgaagttttacagaaagggatgaccaaatttcatggtttctgctcggaatcccggaagggtttgactgatctagcttttactccagacgacaagtcacggctatttgcttctggacttgatggtgcagtctacatgtgggacaggcggctaagtaagacacactgtgttgagcttacagcactcctagaatctcagtttaccagtgtcaagctaaatatggataatcggacagtgtttggtgcaactagaaatgggaccattcatgtttgggatacacgtggagggagggcatcagctgcttttcaaagtcataatgaggttcaacctttgtcatcagtgaagatatcaacgttgttgggaaaaattgcatcgctgaaggaacaatcaaacattgtttcaagtgaaattctgtcgatagactttaaccctagttgctcatatcagttagccttccatcttgatgatgggtggtctggagtcctgaatgtcaacactttcagtgttagtcatctgcactgccctcctcctgcttggttggagggcgtggactctgtgttgcataagcggaaagccacctggctgtcgacatcttcaatttatgcagtcggatcttcctccaataatggaatatatgcactggattttcatccagatacaagctccacatgccatgtggactacaatgaggaaacaaaaggctccgaggaaaatcaacctgcagaaaacaagtttattcccttatccaaaagggtgctttcctgtgcagcccatccactcagtcatgacataatttgtggtaccgagttctcgtcgttgctcatggtatcacaaaagtatgagaccgtcagagatccagagtagggcccgagcacatcaggagcttcctccaagcacaagcaatatcctcgatcgattgcggcattattatctcatggacgccctgcacataagaaggatgtgtgcagcatgggactttgttgaatttggctggcaggtcgctttagctggggaagctgtgtggttggtcacaagattcagcttgcggccagaagaccaatggacatggtcgttgcacttgatctttcaagtgttggccttcaaggcatgcttatgggggcgaggaggattgttcacttgtaattactgtttcatctttagccgtccgatccgatggtttttagaaagtgctgtcatctgtatatgccgtgctctgtacatgaactgtttggaatcagtttgatttgtgttgtgtaaaaaaaaaaaaaaaa

SEQ ID NO: 3308 - protein, 477 aa, Triticum aestivum
  misc_feature: Ceres CLONE ID no. 736115
  misc_feature: Ceres CDNA ID no. 40041310
  misc_feature (200)..(238): Pfam Name: WD40 PFAM Desc: WD domain
  misc_feature: Homolog of GI Number: 56236070 NR Desc: At5g12920
MDQFLVAAPPSADEGPEAPRPPPRRWHRWSRIAVELDGHIDARFRHRESRRLLDSLAEIRTFEHKYYTHGEERCTTYVNRMINASTFAGCYHSAREGVSAMEFDKKGIYLASVTNSGCLTVHDFETLYCSLYGPLCRIPDDSSNYVLHISNSMPLCAVRWNPGNQDEIVCSSSQTDKVLLFDIGYVSSAPTEVLQKGMTKFHGFCSESRKGLTDLAFTPDDKSRLFASGLDGAVYMWDRRLSKTHCVELTALLESQFTSVKLNMDNRTVFGATRNGTIHVWDTRGGRASAAFQSHNEVQPLSSVKISTLLGKIASLKEQSNIVSSEILSIDFNPSCSYQLAFHLDDGWSGVLNVNTFSVSHLHCPPPAWLEGVDSVLHKRKATWLSTSSIYAVGSSSNNGIYALDFHPDTSSTCHVDYNEETKGSEENQPAENKFIPLSKRVLSCAAHPLSHDIICGTEFSSLLMVSQKYETVRDPE

SEQ ID NO: 3309 - DNA, 532 bp, Triticum aestivum
  misc_feature: Ceres CLONE ID no. 736176
  misc_feature: Ceres CDNA ID no. 40351252
  CDS (38)..(472): REFERENCED BY SEQ ID NO: 3310
aaccatggcctcatgaagacaacactttctcagtgccatgaagaagaggccagagctccaacaacaccaagactttgaagttctgaaagctgttgcacaggcatggtacagccactccggcacttgcaagcccatgagcgaatttgaagctcacagaagaaacttcagaggcaagccttcaaggtttaagcttgaagcattgaacaagccacaagcttcttcttctagttctagggacacttctacttactgggattttcagcagtcactttgggactcctatgagcttgtcacagtgtccagaaggattgagactgggttaactttggataacccttttgatgaattgtgtggttcccctccaatccaacaaaagcgcaagcctgagagtaagaatagcctcaggaacctgttcaatcttatgtcttctaggagatttaatgcccccaaaaatattccacaccaaaaatgatacatgacttttatttccttttaatataacacccactttgatttaaaaaaaaaaaaaaaa

SEQ ID NO: 3310 - protein, 144 aa, Triticum aestivum
  misc_feature: Ceres CLONE ID no. 736176
  misc_feature: Ceres CDNA ID no. 40351252
MKKRPELQQHQDFEVLKAVAQAWYSHSGTCKPMSEFEAHRRNFRGKPSRFKLEALNKPQASSSSSRDTSTYWDFQQSLWDSYELVTVSRRIETGLTLDNPFDELCGSPPIQQKRKPESKNSLRNLFNLMSSRRFNAPKNIPHQK

SEQ ID NO: 3311 - DNA, 580 bp, Triticum aestivum
  misc_feature: Ceres CLONE ID no. 736231
  misc_feature: Ceres CDNA ID no. 40351253
  CDS (107)..(376): REFERENCED BY SEQ ID NO: 3312
atttttctgtcactacccactcctttctctgtctccatcgtttcgcattgcacaagcactctctctttcccttaccctttttcaggtttcaacgctccaactatccatggcaaaccgctggctcagacccgaggtgtatccactgttcgctgcggttggtgctgctgttgggatctgtggattccaactggttcgtaatatctgcatcaaccctgaagtcagggtgaacaaggagggaaggaaggcaggagttttggagaactttgctgagggagagaagtatgccgagcacttcctgaggaagtatgtgcgcaacagaactccggagattatgccctccatcaacagcttcttcgctgacacaagtcgcaactaagttgctttgaataaacaaaggttaatgtgagatattaattctattgtggttacaaacagattttatcatgcatttgtaaaactaaatttggttgttgctttctctagccgtacagtgggtttgctgtggttgagaataataatactgattttaatgcattaatgatggctgctgtttcaatgcccactaaaaaaaaaaaaaaaa

SEQ ID NO: 3312 - protein, 89 aa, Triticum aestivum
  misc_feature: Ceres CLONE ID no. 736231
  misc_feature: Ceres CDNA ID no. 40351253
  misc_feature (2)..(88): Pfam Name: B12D PFAM Desc: B12D protein
MANRWLRPEVYPLFAAVGAAVGICGFQLVRNICINPEVRVNKEGRKAGVLENFAEGEKYAEHFLRKYVRNRTPEIMPSINSFFADTSRN

SEQ ID NO: 3313 - DNA, 878 bp, Triticum aestivum
  misc_feature: Ceres CLONE ID no. 736527
  misc_feature: Ceres CDNA ID no. 25891161
  CDS (36)..(650): REFERENCED BY SEQ ID NO: 3314
ctagttcttcgctactgcgactgcgcttcagcacaatgggtgcctacaagtatgtttcggagctatggcgcaagaagcagtctgatgttatgagattcttgcagcgggtgaggtgctgggagtatcgccagcaaccttctattgtccgtttgacaaggtctactcgcccagataaggctcgtcgcttgggtttcaaggctaagcagggttacgtgatttaccgtgttcgcgtacgaaggggtggccgtaagagaccagttccaaagggtattgtttatggtaagcccaccaaccaaggtgttactcaactgaaatttcaacgcagcaagaggtctgttgccgaggagagagccggaaggaagttgggtggcctcagggttctcaattcatactgggtgaatgaggactccacttacaaatattttgaggtcattctggtggatgttgcccacactgctgtaagaaatgatccaagaatcaactggctctgcaatccagtccataaacacagggaactgcgtggcctcacttctgctgggaaaagcaataggggtttacgtggcagaggacatctctaccacaaaaatcgtccatcacgcagggcaacctggaagagaaacaataccctctcccttcgtcgctaccgttgattttgttgcagttatcgtatgttgcttcattttctgagtatttggaggaaaatcgtcagttttggatccctgaatcatgccttttttccccgataatgtctttagtactaaaacagcagagattaatgatgtaagttttttactatgtgccgggattgtttttatttattttgttcgacttttttcgttgtggcaaatctcgtgctatgattaaaaaaaaaaaaaaaa

SEQ ID NO: 3314 - protein, 204 aa, Triticum aestivum
  misc_feature: Ceres CLONE ID no. 736527
  misc_feature: Ceres CDNA ID no. 25891161
  misc_feature (2)..(193): Pfam Name: Ribosomal_L15e PFAM Desc: Ribosomal L15
  misc_feature: Homolog of GI Number: 23505795 NR Desc: At4g16720/dl4385c
  misc_feature: Homolog of GI Number: 21689875 NR Desc: putative 60S ribosomal protein L15
  misc_feature: Homolog of GI Number: 7268491 NR Desc: ribosomal protein
  misc_feature: Homolog of GI Number: 34896990 NR Desc: ribosomal protein L15
  misc_feature: Homolog of GI Number: 14585879 NR Desc: ribosomal protein L15
  misc_feature: Homolog of GI Number: 48596903 NR Desc: ribosomal protein
  misc_feature: Homolog of GI Number: 2982318 NR Desc: probable 60S ribosomal protein L15
  misc_feature: Homolog of GI Number: 3608479 NR Desc: ribosomal protein L15
  misc_feature: Homolog of GI Number: 2982249 NR Desc: probable 60S ribosomal protein L15
  misc_feature: Homolog of GI Number: 50878349 NR Desc: putative 60s ribosomal protein L15
  misc_feature: Useful for decreasing plant size
  misc_feature: Useful for making plants with increased biomass
  misc_feature: Useful for making shorter plants
  misc_feature: Useful for sterility
  misc_feature: Useful for sterility
MGAYKYVSELWRKKQSDVMRFLQRVRCWEYRQQPSIVRLTRSTRPDKARRLGFKAKQGYVIYRVRVRRGGRKRPVPKGIVYGKPTNQGVTQLKFQRSKRSVAEERAGRKLGGLRVLNSYWVNEDSTYKYFEVILVDVAHTAVRNDPRINWLCNPVHKHRELRGLTSAGKSNRGLRGRGHLYHKNRPSRRATWKRNNTLSLRRYR

SEQ ID NO: 3315 - DNA, 731 bp, Triticum aestivum
  misc_feature: Ceres CLONE ID no. 736917
  misc_feature: Ceres CDNA ID no. 40351254
  CDS (67)..(552): REFERENCED BY SEQ ID NO: 3316
gtttaggttttcttagtcagacttaccccttgctaccaacactgagcttaaccgagcttcgcaaagatgaatcgggaaaagttaatgaagatggccggttcggttagaactggaggaaagggtactgtgagaagaaagaagaaggctgtccacaagacaacaaccacagatgacaaaaggcttcagagcaccctgaagagaataggggtgaatgccatccctgctattgaagaggtcaatatctttaaggatgacgtagttatccagtttctaaatcccaaagttcaagcatccattgctgctaatacttgggttgtcagtggttcaccgcaaacaaagaagttgcaggatatactccctagcattatccaccaattaggaccagataacttggaaaacctgaagaagctagccgagcaattccagaagcaggctcctgaaggggccgctggttcaaccacagctcaagaggagaatgatgacgacgtcccagagcttgttccaggccaggattttgagacagctgctgaggagaccaaggctgcttcttagattgtgccatcgctaaatatctcctgtgttttaattttttcttcttcttgattttccattttaagtatttcaggtgtttggttctcctgtcatatactttaaacagttcaaatactctattaaatctgctttccttcatctaactaggtattcagtttttgataaaaaaaaaaaaaaaa

SEQ ID NO: 3316 - protein, 161 aa, Triticum aestivum
  misc_feature: Ceres CLONE ID no. 736917
  misc_feature: Ceres CDNA ID no. 40351254
  misc_feature: The plant is abnormally large.
  misc_feature: Useful for making plants with modulated growth and phenotype characteristics
  misc_feature: The sequence is a functional homolog of  SEQ ID NO 1614 in the  11/479,226 US patent application
  misc_feature: The sequence is a functional homolog of  SEQ ID NO 1617 in the  11/479,226 US patent application
  misc_feature: The sequence is a functional homolog of  SEQ ID NO 784 in the  10/412,699 US patent application
  misc_feature: The sequence is a functional homolog of  SEQ ID NO 786 in the  10/412,699 US patent application
  misc_feature: Useful for making plants with modulated biomass
  misc_feature (35)..(92): Pfam Name: NAC PFAM Desc: NAC domain
MNREKLMKMAGSVRTGGKGTVRRKKKAVHKTTTTDDKRLQSTLKRIGVNAIPAIEEVNIFKDDVVIQFLNPKVQASIAANTWVVSGSPQTKKLQDILPSIIHQLGPDNLENLKKLAEQFQKQAPEGAAGSTTAQEENDDDVPELVPGQDFETAAEETKAAS

SEQ ID NO: 3317 - DNA, 635 bp, Triticum aestivum
  misc_feature: Ceres CLONE ID no. 736982
  misc_feature: Ceres CDNA ID no. 40351255
  CDS (139)..(390): REFERENCED BY SEQ ID NO: 3318
taaacctctccttcgtcttgcgttcactccaccttcgctttgcttagctaattaaacacagctagcagcacggcggagagcccgctcggttctctagcatctccggtgaagcaagcaagcaaacaagagtagagagtgatggcgtcccctccccgcatggccgccgcgcccgccatcctcctcctcttcctgctcctactcgtcgccacagagatggggacgacgaagacggcggaggcccggacgtgcgagtcgcagagccacaagttcaagggcgcctgcttcagcgacaccaactgcgccagcgtgtgccgcaccgagaacttcccccgcggccagtgcaacacgcaccacgtcgagcgcaagtgctactgcgagcgggactgctgagctaattccgtcagcggatggatgcttgttcgtgtgttaggatgaccagaaataaaagttgtgttgcctcttcatctgcatgcatgcgtgtatttaggtgaagatcggtccgggatgcatgtggcttctctgtgttgtgtttcaatgtgttgtgttggattcagttagtgttggcttatccagaaatatgagagggagggatgcctgagctctctcagcgattagagccaaaaaaaaaaaaaaaa

SEQ ID NO: 3318 - protein, 83 aa, Triticum aestivum
  misc_feature: Ceres CLONE ID no. 736982
  misc_feature: Ceres CDNA ID no. 40351255
  misc_feature (35)..(83): Pfam Name: Gamma PFAM Desc: Gamma
MASPPRMAAAPAILLLFLLLLVATEMGTTKTAEARTCESQSHKFKGACFSDTNCASVCRTENFPRGQCNTHHVERKCYCERDC

SEQ ID NO: 3319 - DNA, 1122 bp, Triticum aestivum
  misc_feature: Ceres CLONE ID no. 738100
  misc_feature: Ceres CDNA ID no. 36703458
  CDS (126)..(809): REFERENCED BY SEQ ID NO: 3320
actcccgtggactccctcgcgccctccctcctcctgtcgtgtcctcccacacccccgcgcggtggtcgccggaagcagcgccccacagtcggacaatcgtcagatccgccgccgccgacgccacgatgaacgacaccgatgtctccaagcagatccagcagatggtgcggttcatccgccaggaggccgaggagaaggctggcgagatctccgtctccgctgaggaggaattcaacattgagaagctgcaacttgttgaagctgagaaaaagaagatcaggcaagaatatgagcggaaagagaagcaggttgatgttcggaagaaaattgagtactctatgcagctgaatgcttctcgcatcaaagtgcttcaggcccaggatgacctggttaataaaatgaaagaggatgcaatgaaggaactcctgaatatcagcagcaaccaccatgaatacaagaatctgttaaaagaactcgttgttcagggcctgcttcggttgaaagagccagctgtactgctccgctgccgcaaagaagatcaccataatgtggaatctgtactgcattcagcaaagaatgagtatgcatcaaaagcagatgtccatgagcccgagatactagttgaccacagtgtctacctgccaccttctccgagccatggcgatgagcacggccagatttgccatggaggtgttgtgctggcttctcgagatggaaagattgtgtttgagaatacagttgatgcaaggcttgaagttgttttccgcaagaaattgccagagatccggaagcttcttgttgcggcataatgcgcacttgtattttggtgatggtacagctgtttctatgtaaaatggctgctggtttgacccccagcaggtgcaacgaactccgcccggttttgcgaacattgattgtttaaagtattccatcctcttatgtaaacactacctatttgttcattatcgtcgccgagcacaaactatttgcacgaactttgctctgaggaataataaataaagcaccgtcggattgtgttaaaaaaaaaaaaaaaaaaaaaaaaaaaaaaaaaaaaaaaaaaaaaaaaaaaaaaaaaaaaaaaaaccaaaaaaaaaaaaaaaa

SEQ ID NO: 3320 - protein, 227 aa, Triticum aestivum
  misc_feature: Ceres CLONE ID no. 738100
  misc_feature: Ceres CDNA ID no. 36703458
  misc_feature (16)..(225): Pfam Name: vATP PFAM Desc: ATP synthase
  misc_feature: Homolog of GI Number: 82502214 NR Desc: vacuolar proton ATPase subunit E
  misc_feature: Homolog of GI Number: 4099148 NR Desc: YLP
  misc_feature: Homolog of GI Number: 4099150 NR Desc: YLP
  misc_feature: Homolog of GI Number: 34912000 NR Desc: putative YLP
  misc_feature: Homolog of GI Number: 5733660 NR Desc: vacuolar V
  misc_feature: Homolog of GI Number: 12585474 NR Desc: Vacuolar ATP synthase subunit E
  misc_feature: Homolog of GI Number: 1263911 NR Desc: vacuolar H
  misc_feature: Homolog of GI Number: 1143509 NR Desc: V
  misc_feature: Homolog of GI Number: 2267583 NR Desc: vacuolar H+
  misc_feature: Homolog of GI Number: 29290712 NR Desc: vacuolar ATPase subunit E
MNDTDVSKQIQQMVRFIRQEAEEKAGEISVSAEEEFNIEKLQLVEAEKKKIRQEYERKEKQVDVRKKIEYSMQLNASRIKVLQAQDDLVNKMKEDAMKELLNISSNHHEYKNLLKELVVQGLLRLKEPAVLLRCRKEDHHNVESVLHSAKNEYASKADVHEPEILVDHSVYLPPSPSHGDEHGQICHGGVVLASRDGKIVFENTVDARLEVVFRKKLPEIRKLLVAA

SEQ ID NO: 3321 - DNA, 639 bp, Triticum aestivum
  misc_feature: Ceres CLONE ID no. 738428
  misc_feature: Ceres CDNA ID no. 40351256
  CDS (151)..(438): REFERENCED BY SEQ ID NO: 3322
cactcacaaaacaatataacttaattgccttaaggaacgttcgagaccacagaggtttctctagtcttcttctgtggagagcttgttttctcttgttcattcatctcacttccaattaaggaacaagctttccaccaatttgaatcaccaatggctcgctctttctccaacctcaaggttctctctgctcttgtcgccgacggattctccaacactctcaccaggcgtgggtacgcagtagcgacacaaagcgcaacaagaggaggagcagcctccatcagcggcaagtcaggggaagacaaggtactaggaggaggtgctgaaaaggtttcgtgggtcccagaccctgtcactggttactacaaaccggagaacatcaaagagattgatgttgctgagctgagagccacggttttgggcaaaaaattcaaccactaggctctacttaatttcaataattaacctttttggtctcacgtgaatatgttatatgatatatgaagttcacagaaccttcggggattattcagcatggggtttttttcttgtatttctctcttgagaatttggactagcatatgaccaaattaatgtttactagtgtgattggatctcccgttgagaaatcaaaaaaaaaaa

SEQ ID NO: 3322 - protein, 95 aa, Triticum aestivum
  misc_feature: Ceres CLONE ID no. 738428
  misc_feature: Ceres CDNA ID no. 40351256
  misc_feature (1)..(90): Pfam Name: LEA_3 PFAM Desc: Late embryogenesis abundant protein
MARSFSNLKVLSALVADGFSNTLTRRGYAVATQSATRGGAASISGKSGEDKVLGGGAEKVSWVPDPVTGYYKPENIKEIDVAELRATVLGKKFNH

SEQ ID NO: 3323 - DNA, 1792 bp, Triticum aestivum
  misc_feature: Ceres CLONE ID no. 738586
  misc_feature: Ceres CDNA ID no. 25892833
  CDS (113)..(1666): REFERENCED BY SEQ ID NO: 3324
agaaccccactccccgataccagtcgcggtcagcataccccgcccgcccgccgaggaagaggcattgtgaggccgggcacggcggcggcaaggagcagccacggcgccaggaatgaaggggggcggcggcggcggcggcggcaaggagtccgccaccggctccttcctccgcttcctcctcctgctcctcctccccctcaccgccctctacttcttctacacgctccacctcctcctcgcctccgccgcctcctcgtccaccgcgtcctgcccgccggaccccaccgcggtctcctcccgcgtctccaccaaccgcaccgctgcggcggtggccgacagtaaggccgcccccgcggcgtccgcggcgacgacgctgcagcacgtggtgttcggcatcgcggcctcgtcgcggttctgggacaagcgcaaggagtacatcaaggtgtggtggcgcccgcgcggcgccatgcgcggctacgtctggctggaccgcgaggtgcgggagtccaacatgtcgacggcgcggacggggctcccggccatcaagatctcctccgacacctccgccttcccctacacgcaccggcgcggccaccgctccgccatccgcatctcccgcatcgtctccgagaccttccgcctcggcctccccggcgtgcgctggttcgtcatgggcgacgacgacaccgtcttcttcccggacaacctgctcaccgtcctcaacaagttcgaccaccgccagccctactacatcggctccctctccgagagccacctgcagaacatctacttctcctacgggatggcgtacggcggcggcggcttcgccatcagcaggccgctggcggaggcgctcgcgcggattcaggacggctgcatcagccgctacccggcgctctacggcagcgacgaccggatccaggcgtgcatggcggagctgggggtgccgctcaccaagcacccggggttccaccagtacgacgtgtacggggacctgctgggcctcctggcggcgcacccggtggcgccgatcgtgacgctgcaccacctggacgtggtgcagccgctgttccccaacgcgcccgcgcggccggcggcggtgcggaggctgttcagcgggcccgtgaggctggacccggcggggataatgcagcagtccatctgctacgacggggcgaaccggtggacggtgtcggtggcgtgggggttcgccgtgctggtgtcgaggggggtgacctcgccgcgggagatggagatgccggcgcggacgttcctcaactggtaccggcgcgccgactacacggcgtacgccttcaacacgcggcccctggcgcgcacgccgtgccacaagccggccgtgtactacctgtcgtcggcgcgcagcgcggaggccgcccgcggcggggagacaacggtgacgcggtacgagcggtggcgccccgcgaacgagacgcggcccgcgtgccgttggaacatcaccgacccggacgcgcatctcgaccacatcgtcgtgctcaagaggcccgaccccgggatatgggaccggtcgccgaggaggaactgctgtagggtgctgtcgtcgcccaaggtggggaaggaggggaagaagacgatgaccatcgacgtgggcgtgtgcagggacggcgagttcagccaagtagtctaggtctagcctagcctctgttaggagaacactgtaggacgatacaatattatttttttctctcttcttgtattcttgctggaaggtataacaaacgagagcctcgttcgggcaaaaaaaaaaaaaaaa

SEQ ID NO: 3324 - protein, 517 aa, Triticum aestivum
  misc_feature: Ceres CLONE ID no. 738586
  misc_feature: Ceres CDNA ID no. 25892833
  misc_feature: Homolog of GI Number: 15529153 NR Desc: AT4g23490/F16G20_190
  misc_feature: Homolog of GI Number: 25090374 NR Desc: At4g23490/F16G20_190
  misc_feature: Homolog of GI Number: 50928181 NR Desc: OSJNBa0011J08.14
  misc_feature: Homolog of GI Number: 15223433 NR Desc: fringe
  misc_feature: Homolog of GI Number: 50253142 NR Desc: fringe
  misc_feature: Homolog of GI Number: 30683185 NR Desc: fringe
  misc_feature: Homolog of GI Number: 54291328 NR Desc: fringe
  misc_feature: Homolog of GI Number: 56283929 NR Desc: CG3047
  misc_feature: Homolog of GI Number: 5821151 NR Desc: RNA binding protein
  misc_feature: Homolog of GI Number: 6634015 NR Desc: KIAA0324 protein
MKGGGGGGGGKESATGSFLRFLLLLLLPLTALYFFYTLHLLLASAASSSTASCPPDPTAVSSRVSTNRTAAAVADSKAAPAASAATTLQHVVFGIAASSRFWDKRKEYIKVWWRPRGAMRGYVWLDREVRESNMSTARTGLPAIKISSDTSAFPYTHRRGHRSAIRISRIVSETFRLGLPGVRWFVMGDDDTVFFPDNLLTVLNKFDHRQPYYIGSLSESHLQNIYFSYGMAYGGGGFAISRPLAEALARIQDGCISRYPALYGSDDRIQACMAELGVPLTKHPGFHQYDVYGDLLGLLAAHPVAPIVTLHHLDVVQPLFPNAPARPAAVRRLFSGPVRLDPAGIMQQSICYDGANRWTVSVAWGFAVLVSRGVTSPREMEMPARTFLNWYRRADYTAYAFNTRPLARTPCHKPAVYYLSSARSAEAARGGETTVTRYERWRPANETRPACRWNITDPDAHLDHIVVLKRPDPGIWDRSPRRNCCRVLSSPKVGKEGKKTMTIDVGVCRDGEFSQVV

SEQ ID NO: 3325 - DNA, 748 bp, Triticum aestivum
  misc_feature: Ceres CLONE ID no. 738621
  misc_feature: Ceres CDNA ID no. 25445776
  CDS (40)..(531): REFERENCED BY SEQ ID NO: 3326
ctaaaaccctagctccaccacccacctaaacccgccaccatgggcaggggcaagttcaagggcaagccaaccggccgccgcaacttctccaccccggaggagatcgcttctggaacttcagggcgtccacgctcatttaagaagaatgtagctgaagcagaagaggaagaggaagaggtagaagaatctgaagaggaagaatccgaagacgacggtgaagagaagaaacataaaggaaccgaaggtgttattcaaattgaaaatccaaacctggtgaaagcaaagaatataaaagccaaagaagctgatcttggaaagacaactgaactctcgaggcgtgagagagaggagattgagaaacaaaaatctcatgagcgctatatgaagcttcaggagcaaggcaaaacagaacaggcgaagaaagatttggaacgtcttgctttaataaggcagcaaagagcagatgctgcaaagaaacgtgaagaggagaaagctgctaaagaacagaggaagactgaagcgcgcaaataactgcgaaggttgtggaggcatgagctaagctgagttgtgttgtctggatatttatttctatgcatcctagtatatttaaaccgggtctctgttccatcatctacatttccataaaaacagtgcattgacaagtgtaaagtagtcctgtcggcgtggcttgctgtaaacttgagcttggcagggtacacatttagtgagaccaaaaaaaaaaaaaaaa

SEQ ID NO: 3326 - protein, 163 aa, Triticum aestivum
  misc_feature: Ceres CLONE ID no. 738621
  misc_feature: Ceres CDNA ID no. 25445776
  misc_feature: Homolog of GI Number: 57899606 NR Desc: putative 28 kDa heat
  misc_feature: Homolog of GI Number: 34909600 NR Desc: P0435B05.20
  misc_feature: Homolog of GI Number: 41055582 NR Desc: similar to PDGFA associated protein 1
  misc_feature: Homolog of GI Number: 82899800 NR Desc:  PDGFA associated protein 1
  misc_feature: Homolog of GI Number: 12018258 NR Desc: PDGFA associated protein 1
  misc_feature: Homolog of GI Number: 73958089 NR Desc:  similar to PDGFA associated protein 1
  misc_feature: Homolog of GI Number: 30584165 NR Desc: Homo sapiens PDGFA associated protein 1
  misc_feature: Homolog of GI Number: 7657441 NR Desc: PDGFA associated protein 1
  misc_feature: Homolog of GI Number: 55628996 NR Desc:  similar to 28 kDa heat
MGRGKFKGKPTGRRNFSTPEEIASGTSGRPRSFKKNVAEAEEEEEEVEESEEEESEDDGEEKKHKGTEGVIQIENPNLVKAKNIKAKEADLGKTTELSRREREEIEKQKSHERYMKLQEQGKTEQAKKDLERLALIRQQRADAAKKREEEKAAKEQRKTEARK

SEQ ID NO: 3327 - DNA, 907 bp, Triticum aestivum
  misc_feature: Ceres CLONE ID no. 738845
  misc_feature: Ceres CDNA ID no. 40351257
  CDS (119)..(712): REFERENCED BY SEQ ID NO: 3328
aaatacggcccatcttacttctagatccaacccaaaagcgcagcgccttcgaccaggccgagttgggacggtccacgacacacacacgatcttctccatcgacggcgcgccggcggcgatggcggcgcggaagctcatcttcggcctcacagcagcaaggcgagccagttctcgggcccctgtactcctccgggcctcacccctcctggaagcctccacttctgcctcccacaccaccgccgccgcgacgaagccgtcaggtggatcgccgtgggcgctgctcttctcctctagggtcttctcgtcgacccctccggctcaacagtccgccggagatgtgcccgccccatccgcggtggaccacaagttgataatgccagaggataagttccataaattagcagatgatacaatacatgatttgcttgaaaaacttgaggaatatggtgattctcagcagatggatggcttcgacatagattatgggaatcaagttctaacattgaggctaggcgatttggggacctatgttgtaaacaagcaaacgccaaacagacaaatctggctatcttcacctgtgagtgggcctgctagatttgactgggatgcagcaacagacagttggatttataggcggactggagtaaatctcatgcgacttctagagaaggagatcggtgagctctgtggaactccagtagacctttcataaagggataggaaaatgccacatagctaagtccaatggggcatacaacatttcgagggagtaaacgagatgatgtctttcagtatgttgatcctgccaagtgaaccaacagagttgttgtactgcacatttttgcaccatatgctcgtatgcgttgcctaataagaggtctggttttcgacaaaaaaaaaaaaaaaa

SEQ ID NO: 3328 - protein, 197 aa, Triticum aestivum
  misc_feature: Ceres CLONE ID no. 738845
  misc_feature: Ceres CDNA ID no. 40351257
  misc_feature (86)..(197): Pfam Name: Frataxin_Cyay PFAM Desc: Frataxin
MAARKLIFGLTAARRASSRAPVLLRASPLLEASTSASHTTAAATKPSGGSPWALLFSSRVFSSTPPAQQSAGDVPAPSAVDHKLIMPEDKFHKLADDTIHDLLEKLEEYGDSQQMDGFDIDYGNQVLTLRLGDLGTYVVNKQTPNRQIWLSSPVSGPARFDWDAATDSWIYRRTGVNLMRLLEKEIGELCGTPVDLS

SEQ ID NO: 3329 - DNA, 565 bp, Triticum aestivum
  misc_feature: Ceres CLONE ID no. 739046
  misc_feature: Ceres CDNA ID no. 40351258
  CDS (69)..(380): REFERENCED BY SEQ ID NO: 3330
accaccaccgccgcaacacacacgcaaacacagggaagccaatctcgccggagagagacgcgtcgacaatgtccggccgcggcaagggagggaaggggctgggcaagggcggcgccaagcgccaccggaaggtgctgcgggacaacatccagggcatcaccaagccggcgatccgccgtctggctcgccggggcggcgtgaagcgcatctcgggtctcatctacgaggagacccggggcgtgctcaagatcttcctcgagaacgtcatccgcgacgccgtgacctacaccgagcacgcccgccgcaagaccgtcaccgccatggacgtcgtctacgcactcaagcgccagggacgcaccctctacggattcggcggctagccaggccaatcgagctcccagcaccagagtagtaccagtagccagctatggttgtgtagtgttcatgcgcttcggtgtaacggccgcatctcgctgctgtatgtccaagccttgattgttgtttggatctagttctgggatggagttgaaattgaagtggtttgccctcaaaaaaaaaaaaaaaa

SEQ ID NO: 3330 - protein, 103 aa, Triticum aestivum; identical to SEQ ID NO: 8
  misc_feature: Ceres CLONE ID no. 739046
  misc_feature: Ceres CDNA ID no. 40351258
  misc_feature (66)..(92): Pfam Name: TAF PFAM Desc: TATA box binding protein associated factor

SEQ ID NO: 3331 - DNA, 1717 bp, Triticum aestivum
  misc_feature: Ceres CLONE ID no. 739379
  misc_feature: Ceres CDNA ID no. 24766192
  CDS (315)..(1382): REFERENCED BY SEQ ID NO: 3332
atataaaagcccctgtctccgtctccggttagcaggagagagagagagaggagagaggacgggtggaggccaagaacgcagcacgactgcacagcaccagctgccgaccgaccgcgggcggagctgaccccccgacccgatcagatccctcgccgcccgccccctcagatctccccgcgcgcgcccctcccagatccagctccgagcacttggattttcaacaaagaggtcctgccggcggtggtccgcgtctggaagctcgtcggctgctgcttcttgcttccagtgctctgtggcgaaggcgaccggcggagatggggctggctggggagaagttccagctggggacggtgggggcgctcagcctctccgtcgtctcctcggtctccattgtcatctgcaacaaggcgctcatgagcgccctcggcttcatcttcgccaccacgttgacaagctggcatctcttggtgacattctgttcactccatgtggcattatgcatgaagctctttgagcacaaaccttttgacgcgaggaccgtcatggggttcggagtgctcaacggcatctcgattgggcttctcaatctgagtctgggtttcaactctgttggtttctatcagatgacaaagctggccattattccctgcactgttatattggagactcttttcttcaggaagaagttcagtcgctacatccagctctcccttagtgtgctcctttttggtgttggagttgcaactgtgactgatctgcagctcaatgctatgggatctgtgctgtctttactggcaatcgtcacaacctgtattgctcaaattatgaccaatacaattcaaaagaagttcaaagtatcttcaactcagctgctgtaccaatcatgcccataccaagcattgaccctgttcattgttggtccattcctcgatgggtttctgactaacaaaaatgtctttgcttttgcatacacacctcaagttctgttcttcatcgtgctgtcgtgtctgatatcagtctcggtgaacttcagcactttccttgtgattgggaagacatctcctgtaacttaccaagtccttggccatctaaagacatgcttggttcttgccttcggctatgtcttgctgcatgatccgtttagctggagaaatatacttggaatcctgattgcagtggttgggatgggactatattcatacttctgcacccgtgaagctccaaagcccactgaagcctctccacaagtcactcaggtgaaagaaggtgaatcagaccctttgatcgcagactccttgaacgccgccgagaacggggccgctgcagccaccgacgagcctctgaaggtccccatgtggagctccaagtacgcacgggcatgaacgctcctgccccgacctctgaaggtgcccatgtggagctccaagcgctcgcgggcatgaacgccgcttcggaccttggttcatggtattatatacataattattcagtttagtaggcagatagtagggctggaaggaagccaggccagccctgagtgtaatgaacgttccttgttccatttttgggcctttttttctttccccccttttttttccttctgttttggcttaccatgcatgcctgtggtgctgttgtaaaagtggatctcacaccaaatgactccaaatggcagatctacctttgttgaagctaagatacaaaaaaaaaaaaaaaa

SEQ ID NO: 3332 - protein, 355 aa, Triticum aestivum
  misc_feature: Ceres CLONE ID no. 739379
  misc_feature: Ceres CDNA ID no. 24766192
  misc_feature (195)..(296): Pfam Name: DUF6 PFAM Desc: Integral membrane protein DUF6
  misc_feature: Homolog of GI Number: 30984584 NR Desc: At2g30460
  misc_feature: Homolog of GI Number: 13699188 NR Desc: putative glucose
  misc_feature: Homolog of GI Number: 50910741 NR Desc: phosphate translocator
  misc_feature: Homolog of GI Number: 13384378 NR Desc: putative phosphate translocator
  misc_feature: Homolog of GI Number: 42570326 NR Desc: transporter
  misc_feature: Homolog of GI Number: 27808610 NR Desc: At5g57100
  misc_feature: Homolog of GI Number: 50728312 NR Desc:  similar to SLC35E3 protein
  misc_feature: Homolog of GI Number: 50912291 NR Desc: glucose
  misc_feature: Homolog of GI Number: 55243240 NR Desc: ENSANGP00000017305
  misc_feature: Homolog of GI Number: 54643607 NR Desc: GA13121
  misc_feature: Useful for making bigger plants
MGLAGEKFQLGTVGALSLSVVSSVSIVICNKALMSALGFIFATTLTSWHLLVTFCSLHVALCMKLFEHKPFDARTVMGFGVLNGISIGLLNLSLGFNSVGFYQMTKLAIIPCTVILETLFFRKKFSRYIQLSLSVLLFGVGVATVTDLQLNAMGSVLSLLAIVTTCIAQIMTNTIQKKFKVSSTQLLYQSCPYQALTLFIVGPFLDGFLTNKNVFAFAYTPQVLFFIVLSCLISVSVNFSTFLVIGKTSPVTYQVLGHLKTCLVLAFGYVLLHDPFSWRNILGILIAVVGMGLYSYFCTREAPKPTEASPQVTQVKEGESDPLIADSLNAAENGAAAATDEPLKVPMWSSKYARA

SEQ ID NO: 3333 - DNA, 913 bp, Triticum aestivum
  misc_feature: Ceres CLONE ID no. 740106
  misc_feature: Ceres CDNA ID no. 24766843
  CDS (48)..(737): REFERENCED BY SEQ ID NO: 3334
acaagaacacttaagctccactacaacaagggagaggagagaacacgatggccacttcatcagtcctcctccctgtgctcctcctggtggccgtcgccggcgcggaggcggcgaccttcacggtgatcaacaagtgccagtacacggtgtgggcggcggcggtgccggccggcgggggcaggaagctggacgcggggcagacgtggagcatagacgtgccggcgggcacgacgagcgggcgggtgtgggcgcgcacggggtgcagcttcgacggcgccggcaacgggcggtgccagacgggggactgcggcgggaagctgcagtgcacgcagtacgggcaggcgcccaacacgctggcggagttcgggctgaacaagtacatgggccaggacttcttcgacatctccctcatcgacgggttcaacgtgcccatgtcgttcgtgccagcacccggcacctccgggtgccccaagggcgggccgcggtgcccgagggtgatcacgccgcagtgccccagcgagctgcgggccgccggagggtgcaacaacgcgtgcacggtgttcaaggaggaccggtactgctgcacagggtcggcggccaacaactgcgggccgacggactactcgaggttcttcaaggggcagtgctccgacgcctacagctaccccaaggacgacgccaccagcatcttcacctgccccggcggcaccaactaccaggtcatcttctgcccatgagtggccatgaaagggtctcgagcacatagacaagaataagtctatgtctatccgttcttatatatcaaaataagtgcaactggatgcatacattcgtacgcacatgtaagccggaaatggatgtattcgatcgacgtgcgtaataaagtcgtgcatgaacaaaaaaaaaaaaaaaa

SEQ ID NO: 3334 - protein, 229 aa, Triticum aestivum
  misc_feature: Ceres CLONE ID no. 740106
  misc_feature: Ceres CDNA ID no. 24766843
  misc_feature (28)..(229): Pfam Name: Thaumatin PFAM Desc: Thaumatin family
  misc_feature: Homolog of GI Number: 14164983 NR Desc: thaumatin
  misc_feature: Homolog of GI Number: 50917481 NR Desc: putative pathogenesis
  misc_feature: Homolog of GI Number: 50917505 NR Desc: putative antifungal zeamatin
  misc_feature: Homolog of GI Number: 2062389 NR Desc: pathogenesis
  misc_feature: Homolog of GI Number: 7442171 NR Desc: thaumatin
  misc_feature: Homolog of GI Number: 75993867 NR Desc: zeamatin
  misc_feature: Homolog of GI Number: 75993849 NR Desc: zeamatin
  misc_feature: Homolog of GI Number: 75993883 NR Desc: zeamatin
  misc_feature: Homolog of GI Number: 75993873 NR Desc: zeamatin
  misc_feature: Homolog of GI Number: 82661 NR Desc: 22K antifungal protein
  misc_feature: Useful for delaying senescence
  misc_feature: Useful for making taller plants and plants with longer inflorescences
  misc_feature: Utility: Seed Bleaching Useful for making low fiber seeds with increased digestability
MATSSVLLPVLLLVAVAGAEAATFTVINKCQYTVWAAAVPAGGGRKLDAGQTWSIDVPAGTTSGRVWARTGCSFDGAGNGRCQTGDCGGKLQCTQYGQAPNTLAEFGLNKYMGQDFFDISLIDGFNVPMSFVPAPGTSGCPKGGPRCPRVITPQCPSELRAAGGCNNACTVFKEDRYCCTGSAANNCGPTDYSRFFKGQCSDAYSYPKDDATSIFTCPGGTNYQVIFCP

SEQ ID NO: 3335 - DNA, 640 bp, Triticum aestivum
  misc_feature: Ceres CLONE ID no. 740536
  misc_feature: Ceres CDNA ID no. 25891366
  CDS (1)..(351): REFERENCED BY SEQ ID NO: 3336
aaggtggttgtggaagaagagatggaggaagcaaagggagtagtgaagcacgtgctcctagctaagttcaaggacgacgtcactccagagcggattgaagagctcatcaaggactatgccaatctggtcaatctcatcccacccatgaagtcattccattggggcaaggatgtaagtgctgaaaacctgcatcaaggcttcactcatgtctttgaatcaacctttgagagtccagaaggcgttgcagagtatgtagctcatcctgcccatgttgaatatgcaaatttgttcctttcctgcttggagaaagtcattgtgattgactataagcctaccgttgttaagctttgattggagaagtaaagcctcgttcactgctagtgttcttataaaaataaactttgttttctgtctaagcaatttctgtatacactacgatgctcctcccccgtcatatattgagggttattctctcttgtcttgattttgacaattctaaaaaccttattgatataggactatgtactattgaatcactccaatgtttaaaaatcaagagtcagttacttatagttttacctaaataagttcaaaacgatcaatctggattgttggcttgcaattaaaaaaaaaaaaaaaa

SEQ ID NO: 3336 - protein, 109 aa, Triticum aestivum
  misc_feature: Ceres CLONE ID no. 740536
  misc_feature: Ceres CDNA ID no. 25891366
  misc_feature (8)..(104): Pfam Name: Dabb PFAM Desc: Stress responsive A/B Barrel Domain
  misc_feature: Homolog of GI Number: 34810575 NR Desc: Chain B
  misc_feature: Homolog of GI Number: 21554999 NR Desc: pop3 peptide
  misc_feature: Homolog of GI Number: 39654614 NR Desc: Chain A
  misc_feature: Homolog of GI Number: 50901690 NR Desc: B1108H10.8
  misc_feature: Homolog of GI Number: 33087079 NR Desc: stress
  misc_feature: Homolog of GI Number: 169459 NR Desc: pop3 peptide
  misc_feature: Homolog of GI Number: 13445204 NR Desc: stable protein 1
  misc_feature: Homolog of GI Number: 34914680 NR Desc: B1075D06.14
MEEAKGVVKHVLLAKFKDDVTPERIEELIKDYANLVNLIPPMKSFHWGKDVSAENLHQGFTHVFESTFESPEGVAEYVAHPAHVEYANLFLSCLEKVIVIDYKPTVVKL

SEQ ID NO: 3337 - DNA, 835 bp, Triticum aestivum
  misc_feature: Ceres CLONE ID no. 740692
  misc_feature: Ceres CDNA ID no. 40351259
  CDS (99)..(539): REFERENCED BY SEQ ID NO: 3338
aatctggtagttcttctgggtagggcttgtgaaagagtcttacagagaagagtgagtgtgtgtgataataattgggatcaactaatcaatcaatttgaatggcatcatccaattcggctcagctagaagggaacaaacccgcaaagagaaaacccgtgttcaccaaagtggatcagctcaaacctggaaccaacggtcacacgttggtggctaaggtcttgtcctccgacaccgtcgtacacaaaccgcgaccctcttccgcccacaacctcaaacccactgtcatcgccgagtgcctcatcggcgacgacaccggcaccatcgtcttcaccgctcgcaacgaacaagttgatatgatgaaggctggagctacagtaattattcgcaatgcaaagattgacatgttcaagggatcaatgaggatggctgttgacaaatggggccgtgttgaggtaactgatcctgcagattttgaagttaaagaggataacaacctatctctggttgaatatgaattggtgaacgtggttgaagaataatcccatagaagagtgcaaaaatagctttatgatttgtttatggtgcaatggataatccctaaaggtaaaacttaactggtaatggatggttggtatacattctcactttaattagcctgtatttcccctttaacatgcttgacattttgagttaagttgatgtcacttgaacagcctttgtgtcaagcgatcaatatctgctattatcttcatcagcaactgtattcaatgatcttaagaaaagtataatattttgttaatataattatccttatcaccgaaaaaaaaaaaaaaaa

SEQ ID NO: 3338 - protein, 146 aa, Triticum aestivum
  misc_feature: Ceres CLONE ID no. 740692
  misc_feature: Ceres CDNA ID no. 40351259
MASSNSAQLEGNKPAKRKPVFTKVDQLKPGTNGHTLVAKVLSSDTVVHKPRPSSAHNLKPTVIAECLIGDDTGTIVFTARNEQVDMMKAGATVIIRNAKIDMFKGSMRMAVDKWGRVEVTDPADFEVKEDNNLSLVEYELVNVVEE

SEQ ID NO: 3339 - DNA, 563 bp, Triticum aestivum
  misc_feature: Ceres CLONE ID no. 740786
  misc_feature: Ceres CDNA ID no. 40351260
  CDS (73)..(405): REFERENCED BY SEQ ID NO: 3340
tagactggtctctcttctacgacgcacgcagcagcatcagcttctactcgtgtaatctctgcgtgggctacaatggattccggtgtccaaggttgcatcttagccactttaattctccacgacgaggaaatcccagtcaccgctgagaagatcaacgctctgttgaaggcttctaatgtctccgccgagtcttactggcccagcctcttcgccaagctcgcccagaataagaacatcgaagacctcattttgaacgccggcggtggtggggccgccgttgcagttgccgctcccgccggcggtggtggtggtgccgctgctgcagccgcacccgccgccgaggaaaagaaggaagaagtgaaggaagaaagtgacgatgacatgggtttcggcttgtttgattagatctttttatatagttgtagccagattttgagtctttgaattgaaatcttgttttgttctatataatttttattgaagggattcttagccaatctactatcataattgttgaattttggtggttttttaatatatttgtgccaaaaaaaaaaaaaaaa

SEQ ID NO: 3340 - protein, 110 aa, Triticum aestivum
  misc_feature: Ceres CLONE ID no. 740786
  misc_feature: Ceres CDNA ID no. 40351260
  misc_feature (21)..(109): Pfam Name: Ribosomal_60s PFAM Desc: 60s Acidic ribosomal protein
MDSGVQGCILATLILHDEEIPVTAEKINALLKASNVSAESYWPSLFAKLAQNKNIEDLILNAGGGGAAVAVAAPAGGGGGAAAAAAPAAEEKKEEVKEESDDDMGFGLFD

SEQ ID NO: 3341 - DNA, 586 bp, Triticum aestivum
  misc_feature: Ceres CLONE ID no. 740898
  misc_feature: Ceres CDNA ID no. 40351261
  CDS (56)..(364): REFERENCED BY SEQ ID NO: 3342
attgtttcttaccccttcaaagcaaatacagaaaaaaagagtcaagcggcgagcaatggcgacatcgctggtgcgatcgggttttcttcgaagcgccctaagaggaagcgctcgtggctcccaggttccgaagcgaaactttgcttcctctggtcatcacgatgatgcatatgagacggccaaatgggagaagattacatatctaggcattgttagttgcactggtttagccgtttataatctatcaaagggccacccacacttcaaagaacctcctgcttacccatatttgcatatccgcaataaggaattcccctggggtcccgatggactatttgaaacgaagcaccatgaagagcattagtggtttaatgaaggtatttgtggcactggtgggcattcgttttgtcaatgttcaacgaatagtgataatgatgattattgtgatttttgaaatgtgatctagaacttgcacttggcaacgttagtttgtcatgtttttatctcatgttcgtttgtatggttgaaacaaaataaatttgtcaaacaatatgatgcttctttttatgcaaaaaaaaaaaaaaaa

SEQ ID NO: 3342 - protein, 102 aa, Triticum aestivum
  misc_feature: Ceres CLONE ID no. 740898
  misc_feature: Ceres CDNA ID no. 40351261
  misc_feature (30)..(101): Pfam Name: COX6A PFAM Desc: Cytochrome c oxidase subunit VIa
MATSLVRSGFLRSALRGSARGSQVPKRNFASSGHHDDAYETAKWEKITYLGIVSCTGLAVYNLSKGHPHFKEPPAYPYLHIRNKEFPWGPDGLFETKHHEEH

SEQ ID NO: 3343 - DNA, 788 bp, Triticum aestivum
  misc_feature: Ceres CLONE ID no. 740901
  misc_feature: Ceres CDNA ID no. 40351262
  CDS (17)..(541): REFERENCED BY SEQ ID NO: 3344
attttttgatttgagaatggcatcagcgtgtctgaaattgagaaatttgagcagaggaggaggagcatttaggtgtgggcgttattcgaagttgatacatgcagagagagagagagaagaagaagaagaggaggtgccgagttctagaatctctaggccgctctctgaaatactgaaagagctgaacaagaaagtaccggactccctcgtcaaaacccgcctccagaaagatcaagatgcctcccccatcagattcattccctggcatgttgtcaatcgcattttgaacttacacgctcctgagtggtctggtgaggttcggaatatcacctattccgccgatgccaagtctgtctccgttgtctaccgagttaccctttatgggactgatgctgagatatttagggaatcaactggtactgcttcagtagaagacacaagttatggagatcctgtacagaaggcagaagcaatggcttttcgtagagcttgtgcacgctttggactggggctccacctttatcatgaagatgcatcataattaaccagcagttctgcttctcagcgtcaatgttttgatgatggccatcgttttcttttttgcctatagttatgatcatttgtgatcatattgcaacactagaagggaaatattttgttgtaacctgatggagacctactaagcttcaatcactgtatgtaaggtttgccatattttttatcctttgaacttctccagttatctgccatgcaattgggagaatttatgtccaaaaaaaaaaaaaaaa

SEQ ID NO: 3344 - protein, 174 aa, Triticum aestivum
  misc_feature: Ceres CLONE ID no. 740901
  misc_feature: Ceres CDNA ID no. 40351262
MASACLKLRNLSRGGGAFRCGRYSKLIHAEREREEEEEEVPSSRISRPLSEILKELNKKVPDSLVKTRLQKDQDASPIRFIPWHVVNRILNLHAPEWSGEVRNITYSADAKSVSVVYRVTLYGTDAEIFRESTGTASVEDTSYGDPVQKAEAMAFRRACARFGLGLHLYHEDAS

SEQ ID NO: 3345 - DNA, 668 bp, Triticum aestivum
  misc_feature: Ceres CLONE ID no. 740934
  misc_feature: Ceres CDNA ID no. 40351263
  CDS (59)..(466): REFERENCED BY SEQ ID NO: 3346
tagcagcagaacagagagagcaaaaccctagagcatccatcacaagcagaggaagaagatggtgaagttcctgaagcctaacaaggcagtgatcgtcctgcagggccgctacgccgggcgcaaggcggtgatcgtgaggaccttcgacgagggaaccagggagcgcccctacggccactgcctcgtcgccggaataaagaagtacccaagcaaggtcatcaagaaggactccgcgaagaagaccgcgaagaaatctagggttaaggccttcgtgaagctcgtgaactaccagcacctcatgcccacgcgctacacgctcgacgtggatctaaaggacgctgttacccccgatgttctagccaccaaggacaagaaggttaccgctctcaaggagaccaagaagcgcctcgaggagaggttcaagaccggcaagaataggtggttcttcaccaaactcagattctgatttcgaaagcgtgaggttttatttattagggttttcggaatgttgccttttaatatattgtatccgtgttttgcaaatcttatcaaaactattattctgctcttagatttgttatcgtcgccgacttttgttaattaatatttctgccttttaatttacgggggaaatgaatgcgaacatattttgaaaaaaaaaaaaaaaa

SEQ ID NO: 3346 - protein, 135 aa, Triticum aestivum
  misc_feature: Ceres CLONE ID no. 740934
  misc_feature: Ceres CDNA ID no. 40351263
  misc_feature (5)..(40): Pfam Name: KOW PFAM Desc: KOW motif
  misc_feature (52)..(135): Pfam Name: Ribosomal_L27e PFAM Desc: Ribosomal L27e protein family
MVKFLKPNKAVIVLQGRYAGRKAVIVRTFDEGTRERPYGHCLVAGIKKYPSKVIKKDSAKKTAKKSRVKAFVKLVNYQHLMPTRYTLDVDLKDAVTPDVLATKDKKVTALKETKKRLEERFKTGKNRWFFTKLRF

SEQ ID NO: 3347 - DNA, 685 bp, Triticum aestivum
  misc_feature: Ceres CLONE ID no. 741097
  misc_feature: Ceres CDNA ID no. 40351264
  CDS (81)..(473): REFERENCED BY SEQ ID NO: 3348
aacactttggtttggctgtagctcagagctcgctctcctcgccgtttctctcatcgctagtttcaagtctccttgtgacaatggtgagggttagtgtgttgaatgatgctctgaagagcatgtacaacgccgagaaacgggggaagcgccaagtcatgattaggccgtcctcgaaggtcataataaaattcctcttggtgatgcagaagcatgggtacattggtgagttcgagtatgttgatgaccacagggctgggaaaatcgtggttgaattgaatggcaggctgaataagtgtggggttataagccctcgctttgatgtcggtgtcaaagagattgaaggttggactgcaagactgcttccctcaagacagtttggttatattgtcttgacaacctctgctggtatcatggatcatgaagaggctaggagaaagaatgttggtggtaaagtgttgggtttcttctactaggctagctttttgtttgaggttcgctctgatgaagtttgagattctcattggttttgatggaccatgtgctagtttgttgctagcgccagaagttttatagagaggaagagttttaattattttttttcgcgcattttatttgtgaaaacgacttggtcattctaatctttttttcttcaacactgttttttctcataaaaaaaaaaaaaaaa

SEQ ID NO: 3348 - protein, 130 aa, Triticum aestivum; identical to SEQ ID NO: 1762
  misc_feature: Ceres CLONE ID no. 741097
  misc_feature: Ceres CDNA ID no. 40351264
  misc_feature (5)..(130): Pfam Name: Ribosomal_S8 PFAM Desc: Ribosomal protein S8

SEQ ID NO: 3349 - DNA, 552 bp, Triticum aestivum
  misc_feature: Ceres CLONE ID no. 741352
  misc_feature: Ceres CDNA ID no. 40351265
  CDS (60)..(269): REFERENCED BY SEQ ID NO: 3350
attttacatcacatttcgttgcgcctctgttctctgtcactgctgcgtctctcgtaaccatgcctaagcaaatccacgagattaaggacttccttctcactgctagaaggaaggacgcaaggtcggtgaagatcaagaggagcagagatgtggttaagttcaaggtcagatgctcgaagtacctctacacactttgtgtgtttgacccagagaaagctgataaattgaagcaatctcttcctccaggtttgagtgttcaagacctgtaaaggtacagggcgagagaccaagaagaagcaattcattgattcttctgaacttcgtttctctgtagttgaaacttgagattcttttcagtttcttttatttttagatcattgctaggacatggttgttttcatctgttttggaaaatgatacttgaatttatgtctaatggattattctagcgctgtggaactatatacatgaatttattgtatgttttaattttaattggtgttttcagtcaggctacaagcctacaattatcaaataaaaaaaaaaaaaaaa

SEQ ID NO: 3350 - protein, 69 aa, Triticum aestivum; identical to SEQ ID NO: 2786
  misc_feature: Ceres CLONE ID no. 741352
  misc_feature: Ceres CDNA ID no. 40351265
  misc_feature (2)..(69): Pfam Name: Ribosomal_L38e PFAM Desc: Ribosomal L38e protein family

SEQ ID NO: 3351 - DNA, 763 bp, Triticum aestivum
  misc_feature: Ceres CLONE ID no. 741358
  misc_feature: Ceres CDNA ID no. 40351266
  CDS (158)..(604): REFERENCED BY SEQ ID NO: 3352
aatgaccaatcacaattctctgtgaactttctagaatctcgttcttcctttgccttctccttcttcttcaaccctttttctttctctttctttcgcactttcattctctaaaaaaatctaagtccctttggtcttcatcttctgttctgatccaggtatggcttctaaacgcatcttgaaggagctcaaggatttgcagaaggatcctcctacctcatgcagtgcaggccctgtggctgaggacatgtttcactggcaagccacaatcatgggacctgctgatagcccatatgcaggtggtgttttcctagtttcaattcattttcctcctgactatcccttcaagccaccaaaggttgcttttcggactaaggtgttccacccaaacatcaacagcaatggcagtatatgtcttgacattctcaaggagcaatggagcccagccctaaccatttccaaggtccttttgtcaatttgctcattgttgacggatcccaaccctgatgatccactcgtaccagagattgcacacatgtacaagactgacagggccaagtatgaggctacggcccgcagctggacccagaagtatgccatgggatgaccatatagagctgtttttcaatgaagcagcaaaatcataatttatgtaaaagaacaaaagatattttgaatgaatttgaatgctttattttatattagtggaactccacagtggtaagaagagacctggtttgccaatttgtgaaaaaaaaaaaaaaaa

SEQ ID NO: 3352 - protein, 148 aa, Triticum aestivum
  misc_feature: Ceres CLONE ID no. 741358
  misc_feature: Ceres CDNA ID no. 40351266
  misc_feature: The plant produces a reduced number of seeds.
  misc_feature: Useful for biocontainment applications
  misc_feature (5)..(142): Pfam Name: UQ_con PFAM Desc: Ubiquitin
MASKRILKELKDLQKDPPTSCSAGPVAEDMFHWQATIMGPADSPYAGGVFLVSIHFPPDYPFKPPKVAFRTKVFHPNINSNGSICLDILKEQWSPALTISKVLLSICSLLTDPNPDDPLVPEIAHMYKTDRAKYEATARSWTQKYAMG

SEQ ID NO: 3353 - DNA, 543 bp, Triticum aestivum
  misc_feature: Ceres CLONE ID no. 741421
  misc_feature: Ceres CDNA ID no. 25891364
  CDS (107)..(301): REFERENCED BY SEQ ID NO: 3354
acgttttcatactttgcagcatccattcttgttctcttctttctttcgatcagggtttcccctcgtctccgggctcgtttcgttctcgaataatcgatctacgataatgactcgcggtagccagagggatcgtgatcgcgaaagggctcaggctagaactggtgctaaaggcaagcagaaagatgatggattgacccctgaacagcgcagggaaagagatgcaaaggcgctgcaggagaaggccgcaaagaaagcggcacagggtgcaggagggaataatgcagctggaagcaaaaaataggcaataattcaatgagtagtttgagtttgccgtttgttgattgtggacatggaatttgtggaaattttatgttgcattattcatggagtatgatgtgtttattaatgtaacttgcgacggaagaacaaataagttgtgcttctttgaaagatgttgtcgctgggggcagaatcaataacttgtatctttgtttggaataatagtatttggcaattatattgtgttgaaaaaaaaaaaaaaaa

SEQ ID NO: 3354 - protein, 64 aa, Triticum aestivum; identical to SEQ ID NO: 3280
  misc_feature: Ceres CLONE ID no. 741421
  misc_feature: Ceres CDNA ID no. 25891364
  misc_feature (1)..(57): Pfam Name: 4F5 PFAM Desc: 4F5 protein family
  misc_feature: Homolog of GI Number: 15229580 NR Desc: four F5 family protein / 4F5 family protein

SEQ ID NO: 3355 - DNA, 709 bp, Triticum aestivum
  misc_feature: Ceres CLONE ID no. 741457
  misc_feature: Ceres CDNA ID no. 40351267
  CDS (78)..(497): REFERENCED BY SEQ ID NO: 3356
acttgagacacaaactcacacactttgtactctccgtccttccttcttcgatccagatctctctccttctccctcaaatggcttcccttctgcaatgttccatgcccctcgtctctctttccaatcgagctctggtacccggtaccaggatctccaacccaagttcagtttccctttcaattaagggaagaagtttcccatccgttacattgcagcccagagggcgtcggtttcagcttagatgtgcggcaaaaccagagacagtgaagaaggtgtgtgacatagtcaagaagcaattggcactgccagatgaatcagctgttactggagagtctaaatttgctgcgcttggagctgattctcttgacacggttgagattgtgatgggacttgaggaggaatttggtattaccgtggaagaagaaagtgcccagagtatcaccaccgttcaagacgctgctgatatgatcgataagcttcttgaaaccaaggcttaaactagtaaaaaggacaagcatgtccattttagagttttttgctatgtcgacggaaggggtttttaatctttatctttggtattacaacttgattgtctaagtaactgctagttcttttctggattgtattgcgattactataataatagttttaagaactcagtcattttgtttccgttgaatgaaattgattgccaaaaacaaaaaaaaaa

SEQ ID NO: 3356 - protein, 139 aa, Triticum aestivum
  misc_feature: Ceres CLONE ID no. 741457
  misc_feature: Ceres CDNA ID no. 40351267
  misc_feature (64)..(131): Pfam Name: PP PFAM Desc: Phosphopantetheine attachment site
MASLLQCSMPLVSLSNRALVPGTRISNPSSVSLSIKGRSFPSVTLQPRGRRFQLRCAAKPETVKKVCDIVKKQLALPDESAVTGESKFAALGADSLDTVEIVMGLEEEFGITVEEESAQSITTVQDAADMIDKLLETKA

SEQ ID NO: 3357 - DNA, 526 bp, Triticum aestivum
  misc_feature: Ceres CLONE ID no. 741590
  misc_feature: Ceres CDNA ID no. 40351268
  CDS (60)..(377): REFERENCED BY SEQ ID NO: 3358
ttttcgcggcgcacagcagaactctgcttcttcggattccgatcgcacgcgccgtcaccatggtgaacgttccgaaaacaaagaagacatactgcaagagtaaggagtgcaggaagcacacgctgcacaaggttacccaatacaagaagggtaaggatagcattgctgcccaaggaaaacgccgttatgatcgcaaacaatccggttatggtggacaaactaagcccgtcttccacaagaaggctaaaaccaccaagaagattgttctgaggttgcaatgccagggttgcaagcatgtctcccaacacgctattaagaggtgcaagcactttgagattggtggtgacaagaagggcaagggaacatcactcttctagtttgagaattaggatttagagctttatgtttcagcaatgttggaatgttttgtttctctctggattttttctgctagttatattttattattttgcaacaccttgttattgagaaattaaaactattttgcccaaaaaaaaaaaaaaaa

SEQ ID NO: 3358 - protein, 105 aa, Triticum aestivum
  misc_feature: Ceres CLONE ID no. 741590
  misc_feature: Ceres CDNA ID no. 40351268
  misc_feature (19)..(95): Pfam Name: Ribosomal_L44 PFAM Desc: Ribosomal protein L44
MVNVPKTKKTYCKSKECRKHTLHKVTQYKKGKDSIAAQGKRRYDRKQSGYGGQTKPVFHKKAKTTKKIVLRLQCQGCKHVSQHAIKRCKHFEIGGDKKGKGTSLF

SEQ ID NO: 3359 - DNA, 1624 bp, Triticum aestivum
  misc_feature: Ceres CLONE ID no. 741689
  misc_feature: Ceres CDNA ID no. 29191877
  CDS (91)..(1083): REFERENCED BY SEQ ID NO: 3360
aaaaccccaacccaaatcaatcgcttccgttacgaattcccccaaatccatccccaacccggtcccgtcggatccatcgccgccgccgccatgtcgtcgtcgcagccgcagcagcgctactactgccaccagtgcgaccgcgccgtcgccatcgccgcccccgcctcccgcgacgacgaggtcttctgcccgctctgcgccggggggttcgtcgaggagctcctcgacgacgaggacccccctcaccacatgccgccgcagtcccccttcttccccctcgccagcttcctcgacctccgcaaccccagcgacctcgccggggtcctcggcccgccatccccctccgcgccccgcgccgcctcctccgccgccaacccaaacaaccagttcgacgtcaccgacttcctccacggccacctcggcggcctcctctcgggcggcgccaccatccagatcgtcctcgagggctcctccttccccggcggattcgcctccttccaagggggccccgtccccggcggggtcagcctcggcgactacttcatgggatccggcctcgagcagctcatccagcagctcgccgagaacgaccccagccgctacggcaccccgcccgccgccaaggccgccgtcgccgccctccccgacgtcgccgtctctgccgacatgatggccgccgacgggggcgcccagtgcgccgtctgtatggacgacttcctcctcggcgccgccgccaagcagctcccctgcaaccacgtcttccacaaggactgcatcctgccgtggctcgacctccacagctcctgccctgtctgccgccacgagctgcccaccgatgaccctgactatgagaaccaccagcgccaggccgctgcccctgctgctgcggcggcgcctgcgtcccctggcggtggcccttcgcctagggtcatggagaggaggttcaggatctccctgccgtggcctctcagggctgcttttggcgcgcagcaggcagagagcagtgaccaggacgctgctggctctggtgactacaacaacgatccgaatgcgagcggtcgctcgtatgatgatctcgactgaagcgcctgcaaggaagaggggaacagggggataaggaggggcaacggactggcgggaaagagaatctgaatgcaaggaagagaagacaagaagaagaagaaggaagacttatgttgttgttgttgatctgaattgaattggaagcttttttggtgatgaagagtggcgccgtccgtctattgatctccgttgcctcgtctcccctcccctcccctcccctctttgcctgtcatggttgtagaaagagaagagagaaaaagaaagtagagatgatattctttggttgcctggtctggtctggtctggttggtgggttgacttgactgaatataccttcttgtgggaaggaagaagctccctccttcctaacttccttgtctgtgttattagtagaattgtgtgtctgtgtcgttgatcgatcttcctttctctcttgtgggatgggaagaaagaaagaaagaagaaagggaaccctagcgatcctcctatatagacatacataatgtgttatagtatgtttaaacgaaaaaaaaaaaaaaaa

SEQ ID NO: 3360 - protein, 330 aa, Triticum aestivum
  misc_feature: Ceres CLONE ID no. 741689
  misc_feature: Ceres CDNA ID no. 29191877
  misc_feature (202)..(242): Pfam Name: zf PFAM Desc: Zinc finger
  misc_feature: Homolog of GI Number: 55296745 NR Desc: putative ring finger protein 126 isoform 1
  misc_feature: Homolog of GI Number: 23308365 NR Desc: At3g19950/MPN9_19
  misc_feature: Homolog of GI Number: 31432769 NR Desc: putative zinc finger protein
  misc_feature: Homolog of GI Number: 188864 NR Desc: mucin
  misc_feature: Homolog of GI Number: 12018147 NR Desc: vegetative cell wall protein gp1
  misc_feature: Homolog of GI Number: 186396 NR Desc: mucin
  misc_feature: Homolog of GI Number: 4505285 NR Desc: mucin 2
  misc_feature: Homolog of GI Number: 38454178 NR Desc: At3g13430
  misc_feature: Homolog of GI Number: 60678627 NR Desc: plus agglutinin
  misc_feature: Homolog of GI Number: 41400381 NR Desc: minus agglutinin
MSSSQPQQRYYCHQCDRAVAIAAPASRDDEVFCPLCAGGFVEELLDDEDPPHHMPPQSPFFPLASFLDLRNPSDLAGVLGPPSPSAPRAASSAANPNNQFDVTDFLHGHLGGLLSGGATIQIVLEGSSFPGGFASFQGGPVPGGVSLGDYFMGSGLEQLIQQLAENDPSRYGTPPAAKAAVAALPDVAVSADMMAADGGAQCAVCMDDFLLGAAAKQLPCNHVFHKDCILPWLDLHSSCPVCRHELPTDDPDYENHQRQAAAPAAAAAPASPGGGPSPRVMERRFRISLPWPLRAAFGAQQAESSDQDAAGSGDYNNDPNASGRSYDDLD

SEQ ID NO: 3361 - DNA, 967 bp, Triticum aestivum
  misc_feature: Ceres CLONE ID no. 741745
  misc_feature: Ceres CDNA ID no. 36701305
  CDS (47)..(793): REFERENCED BY SEQ ID NO: 3362
aaatacaaacgaagcgagaggcgttctatatattattgaattgacaatgaggcctgctcttgctttgcttcctcttctatttgctttcttgttagctgccactacagaatcaagaaaagatacaggggaatattggaaaatgatcatgaaagatcaggaaatgccagaaggacttcaaggtcttgtttcatttcaatctgaaaataaccctaagactcaagagcagcttggtaaaggttccaaaaaccattgtgaagagtctctagttacaaatacacaagttaatagtgacttcgaacccataccaagtgttaccaaatatgatgatttggaattcaagtcaagcattatcaagaacgatgattttgaatcgagaccaagtgttaccaagcatgatgattttgaactcaagtcaagcgttaccaagaacaatgattttgaaccgagaccaagtgttacaaagtatgataactttgaacccagaccaagtgttaccaaatatgatgattttgaactcaggtcaagcgttaccgagaatgatgattttgaaccgagaccaaatattagtaagtatgatgactttgaactcaggtcaagcgttaccgagaatgatgattttgaatcaagaccaagtgttaccaaatatgatgatttagaactcaaatcaagcattaccaaaagcgatgattttgaaccgagaccaaatattagcaagtatgatgactttgcatccaggtcaaataccaagtacgattctgaacctaaagcaagtgctaccaagtatagtgattaaatgaaaatcaagtaattgtataatacagtcgaagaaaatcgtgctccatatcaatgtatcctatgaataaatagggtgtgaagtattatagattttgaataacttcggctatgttgggctaaaagttggaaaaataaaaatatatatttgctttaattaaaaaaaaaaaaaaaa

SEQ ID NO: 3362 - protein, 248 aa, Triticum aestivum
  misc_feature: Ceres CLONE ID no. 741745
  misc_feature: Ceres CDNA ID no. 36701305
  misc_feature (174)..(190): Pfam Name: IBR PFAM Desc: IBR domain
  misc_feature: Homolog of GI Number: 1279224 NR Desc: specific tissue protein 1
  misc_feature: Homolog of GI Number: 48426429 NR Desc: specific tissue protein 2
  misc_feature: Homolog of GI Number: 295831 NR Desc: S2 protein
  misc_feature: Homolog of GI Number: 295829 NR Desc: P4 protein
  misc_feature: Homolog of GI Number: 100067 NR Desc: shoot
  misc_feature: Homolog of GI Number: 23508790 NR Desc: Zinc finger transcription factor
MRPALALLPLLFAFLLAATTESRKDTGEYWKMIMKDQEMPEGLQGLVSFQSENNPKTQEQLGKGSKNHCEESLVTNTQVNSDFEPIPSVTKYDDLEFKSSIIKNDDFESRPSVTKHDDFELKSSVTKNNDFEPRPSVTKYDNFEPRPSVTKYDDFELRSSVTENDDFEPRPNISKYDDFELRSSVTENDDFESRPSVTKYDDLELKSSITKSDDFEPRPNISKYDDFASRSNTKYDSEPKASATKYSD

SEQ ID NO: 3363 - DNA, 1238 bp, Triticum aestivum
  misc_feature: Ceres CLONE ID no. 742023
  misc_feature: Ceres CDNA ID no. 40351269
  CDS (243)..(944): REFERENCED BY SEQ ID NO: 3364
attcaccacttcatctctcctccctctttctcttccctctatatatacgcacccccacccagttcttgcttcctctctctcttccaccacctccatctcctaatcacaagccatcttgcatacacggagagagaaagagaagccaagagatcagcagctgctcgagtagctcgcgtggaggtgtccaaggtgggagacccaagcacgggctagctagccgaccagctgctccgccggagccgatggctggcgccgacgtcgacgtcgggacggagctcaggctcgggctgcccgggggcggcgccgaggcggccaaggccgggaagaggggctatgaggacaccattgacttgaagctcacgctgcccaccggcggcatgcaggaagactctgccggcaagccggagccagccgccgacaaggccaagaggcccgctgaggccgcggccgccgaccccgagaagccacctgctcccaaggcacaggccgtgggttggccaccagtccggtcgtaccgcaggaacgccatgaccgtccagtcggtgaagatcaagaaggaggaggagaccgagaagcagcagcctgctgctgccgctgctgctggtgccaacggctccaactttgtcaaggtgagcatggacggcgcgccctacctgcgcaaggtggatctcaagatgtacaacacctacaaggacctctccattgctctgcagaagatgttcagcaccttcaccgcaactgggaatgaggggaagatggttgaggcagtgaacggttcagatgttgttactacttacgaagacaaggatggagactggatgcttgttggagacgtcccatgggagatgtttgttgcttcatgcaaacgcttgaggatcatgaaggggtccgaagccatcggtcttgcaccaagggccaaggacaagtacaagaacaagagctaaagatggggcagtaagaggaagactatgatgccacaaggatggtgttcttgcagtgtgctatggtttcttagatatataatgttttcaattattagctggattaaaagaagggagagttgccatgtttaatttgttggtggaccagaagcaataatctatctgtagttagctgttcgtgctatgtcgtcttgtaacttgtgctggttcatgatctggagaaatagtaacagcgcttatttcggttctttctaaaaaaaaaaaaaaaaaaaaaaaaaaaccaaaaaaaaaaaaaaa

SEQ ID NO: 3364 - protein, 233 aa, Triticum aestivum
  misc_feature: Ceres CLONE ID no. 742023
  misc_feature: Ceres CDNA ID no. 40351269
  misc_feature: Useful for making plants with modulated growth and phenotype characteristics
  misc_feature: The sequence is a functional homolog of  SEQ ID NO 739 in the  10/374,780 US patent application
  misc_feature (10)..(225): Pfam Name: AUX_IAA PFAM Desc: AUX/IAA family
MAGADVDVGTELRLGLPGGGAEAAKAGKRGYEDTIDLKLTLPTGGMQEDSAGKPEPAADKAKRPAEAAAADPEKPPAPKAQAVGWPPVRSYRRNAMTVQSVKIKKEEETEKQQPAAAAAAGANGSNFVKVSMDGAPYLRKVDLKMYNTYKDLSIALQKMFSTFTATGNEGKMVEAVNGSDVVTTYEDKDGDWMLVGDVPWEMFVASCKRLRIMKGSEAIGLAPRAKDKYKNKS

SEQ ID NO: 3365 - DNA, 774 bp, Triticum aestivum
  misc_feature: Ceres CLONE ID no. 742485
  misc_feature: Ceres CDNA ID no. 40351270
  CDS (250)..(564): REFERENCED BY SEQ ID NO: 3366
catttggctctcccctaatttttcttgtaaaaaaacctcaagctcagcataccactaacccttgtaaatattactatcttgcagtgcgatccatactttgatcaggttggctgcaagcatcctggatgtgaacctgcttatcctacacctgtgtgtgaaaagaaatgcaaggtgcagaaccaagtttgggaggaaaagaaacatttcagcatcaatgcataccaagtaaactctgatccacatgacatcatggcagaggtctacaataatggccctgtagaagttgctttcacagtttatgaggacttcgcacactacaagtcaggagtgtacaagcacatcaccggtggagtcatgggaggtcacgccgtcaagttgattggttggggaactagtgatgctggcgaggattactggcttcttgcaaatcagtggaacagaggctggggcgatgacgggtacttcaagatcataaggggcaagaatgaatgtggcatcgaagaagatgttactgccggtatgccctcgacaaagaacatcgccggtagcgccttcgcaatttaaagtttgagctgccccttctcctctgatgctgttggaattagctatttgcctttcaagtttaagcgggcagattagcattgatggtaccaggaatctgtattctgtgcactagctattaatgtgtccgttaatggtaataaaacaattattatcaaggcatctatgagtgacaaacaattatccatttcaattggaaaaaaaaaaaaaaaa

SEQ ID NO: 3366 - protein, 104 aa, Triticum aestivum
  misc_feature: Ceres CLONE ID no. 742485
  misc_feature: Ceres CDNA ID no. 40351270
  misc_feature (1)..(91): Pfam Name: Peptidase_C1 PFAM Desc: Papain family cysteine protease
MAEVYNNGPVEVAFTVYEDFAHYKSGVYKHITGGVMGGHAVKLIGWGTSDAGEDYWLLANQWNRGWGDDGYFKIIRGKNECGIEEDVTAGMPSTKNIAGSAFAI

SEQ ID NO: 3367 - DNA, 677 bp, Triticum aestivum
  misc_feature: Ceres CLONE ID no. 743292
  misc_feature: Ceres CDNA ID no. 40351271
  CDS (74)..(505): REFERENCED BY SEQ ID NO: 3368
ttttttttcgcctacgcactgcggagagagaaattgagtttccgagataaccagttttctctttgattcatcaatggcaactgcgaggaccgtgaaggatgtttcgcctcacgatttcgtgaaggcttatgcttcccacctcaagcgttccggcaagatggagcttcctgagtggaccgatattgtaaaaacagcaaaatttaaggagttggctccatatgatcctgactggtactacattagggctgcctcaatggcaagaaagatctatttgagaggtggtcttggtgttggtgctttccagaggatctatggtggaagcaaaagaaatggaagccgtcccccacatttctgcaagagcagcggtgcaattgccagacacattctgcaacagttgcaaaacatgagcattgttgagattgatacaaaaggaggtaggaaaatcacttctagtggtcgaagggatcttgaccaagttgctgggcggattgtggttgctgcctgatcgaacatctctttgagaactgatgatgcattctaggatttatgtttgcttattagtagatggcatcaaggaaaaattaagtattgtttgctgagaattttacaatttgtatttttgttaaatgtttaacctttattctagtttggagttttggtcaaaaaaaaaaaaaaaa

SEQ ID NO: 3368 - protein, 143 aa, Triticum aestivum
  misc_feature: Ceres CLONE ID no. 743292
  misc_feature: Ceres CDNA ID no. 40351271
  misc_feature (5)..(142): Pfam Name: Ribosomal_S19e PFAM Desc: Ribosomal protein S19e
MATARTVKDVSPHDFVKAYASHLKRSGKMELPEWTDIVKTAKFKELAPYDPDWYYIRAASMARKIYLRGGLGVGAFQRIYGGSKRNGSRPPHFCKSSGAIARHILQQLQNMSIVEIDTKGGRKITSSGRRDLDQVAGRIVVAA

SEQ ID NO: 3369 - DNA, 828 bp, Triticum aestivum
  misc_feature: Ceres CLONE ID no. 743348
  misc_feature: Ceres CDNA ID no. 40351272
  CDS (48)..(596): REFERENCED BY SEQ ID NO: 3370
gaactcccacaattcttcttcgtctggagctgcgatcctctgcttcgatggccaccgtgcaactccaatccctaacccttgttcgctcctccgcactcccttccgccaccttctcccctccgatcgccctctccggccgccggaactccgccgcgctgccgcgctacgcctgcctccgactccgacccgccgccgagacctgttttccgactcgcgccgccttgagaaccgctcctcgcggcggaggcgtcaagtgcgaggcaggagacaccgccgttgaagtggctcctattactgatgcaaattggcaatcacttgtgcttgaatctgagtctccagtattggttgaattctgggctccatggtgtggtccctgccgtatgatacatccgataattgatgagctggcaaaggaatatgttggtaggcttaagtgctacaaactcaatactgatgaaagcccttcaaccgctactcggtacgggatccgaagtatcccaactgtcattattttcaagaatggtgagaagaaagatacagttattggagctgtgcccaagacaacattgacctcaagcatagaaaaattcttgtgaggtggtaagcaaaggcttcagctggaagtaaagctatttttctcgttagcttcctctcatctaagccaaatatctcaagtttgggtgatttgtttcttaaataaccatttatggtcctgtataattatggatcaaccatattttctgtgctgtttacataatcgtagttgttgcgtaaagttgctatctattatagtacgatttaaaattccgtttaaaaaaaaaaaaaaaa

SEQ ID NO: 3370 - protein, 182 aa, Triticum aestivum
  misc_feature: Ceres CLONE ID no. 743348
  misc_feature: Ceres CDNA ID no. 40351272
  misc_feature (78)..(182): Pfam Name: Thioredoxin PFAM Desc: Thioredoxin
MATVQLQSLTLVRSSALPSATFSPPIALSGRRNSAALPRYACLRLRPAAETCFPTRAALRTAPRGGGVKCEAGDTAVEVAPITDANWQSLVLESESPVLVEFWAPWCGPCRMIHPIIDELAKEYVGRLKCYKLNTDESPSTATRYGIRSIPTVIIFKNGEKKDTVIGAVPKTTLTSSIEKFL

SEQ ID NO: 3371 - DNA, 709 bp, Triticum aestivum
  misc_feature: Ceres CLONE ID no. 743355
  misc_feature: Ceres CDNA ID no. 40351273
  CDS (67)..(552): REFERENCED BY SEQ ID NO: 3372
gtttaggttttcttagtcagacttaccccttgctaccaacactgagcttaaccgagcttcgcaaagatgaatcgggaaaagttaatgaagatggccggttcggttagaactggaggaaagggtactgtgagaagaaagaagaaggctgtccacaagacaacaaccacagatgacaaaaggcttcagagcaccctgaagagaataggggtgaatgccatccctgctattgaagaggtcaatatctttaaggatgacgtagttatccagtttctaaatcccaaagttcaagcatccattgctgctaatacttgggttgtcagtggttcaccgcaaacaaagaagttgcaggatatactccctagcattatccaccaattaggaccagataacttggaaaacctgaagaagctagccgagcaattccagaagcaggctcctgaaggggccgctggttcaaccacagctcaagaggagaatgatgacgacgtcccagagcttgttccaggccaggattttgagacagctgctgaggagaccaaggctgcttcttagattgtgccatcgctaaatatctcctgtgttttaattttttcttcttcttgattttccattttaagtatttcaggtgtttggttctcctgtcatatactttaaacagttcaaatactctattaaatctgctttccttcatccaaaaaaaaaaaaaaaa

SEQ ID NO: 3372 - protein, 161 aa, Triticum aestivum; identical to SEQ ID NO: 3316
  misc_feature: Ceres CLONE ID no. 743355
  misc_feature: Ceres CDNA ID no. 40351273
  misc_feature: The plant is abnormally large.
  misc_feature: Useful for making plants with modulated growth and phenotype characteristics
  misc_feature: The sequence is a functional homolog of  SEQ ID NO 1614 in the  11/479,226 US patent application
  misc_feature: The sequence is a functional homolog of  SEQ ID NO 1617 in the  11/479,226 US patent application
  misc_feature: The sequence is a functional homolog of  SEQ ID NO 784 in the  10/412,699 US patent application
  misc_feature: The sequence is a functional homolog of  SEQ ID NO 786 in the  10/412,699 US patent application
  misc_feature: Useful for making plants with modulated biomass
  misc_feature (35)..(92): Pfam Name: NAC PFAM Desc: NAC domain

SEQ ID NO: 3373 - DNA, 639 bp, Triticum aestivum
  misc_feature: Ceres CLONE ID no. 743445
  misc_feature: Ceres CDNA ID no. 40351274
  CDS (76)..(387): REFERENCED BY SEQ ID NO: 3374
cagaaaacgcagttctcaccatttccctctcgattgtgagacttgttgttgttaactgaacttttctgagcaagaatgtctgggcgtggaaagggaggcaagggtttgggaaagggaggagcgaaacgacaccgtaaggtgctgcgcgataacattcagggaatcaccaagcccgcgattcggcgtttggctcgtaggggtggcgtgaagcgtatcagtggtctcatctacgaagagacacgtggcgtgctcaagatctttttggagaacgtgattcgtgacgccgttacctacactgagcatgctaggagaaagaccgttacggcaatggacgtggtttatgctctcaagagacagggaaggaccctctacggatttgggggctaggtttttttattttattgttaggttcttttgttttggaggctaatctggatttgagaaacccttgctgttatggatatagtaaaaagaaatggcaaggattgggtgtgggaagttgccggtggtgttgcagtaacttgtaatgcagtctttagctgttattgctggcaagtttgtaattgaatcactatatgttgctaatgttagaatcttggtattagtattaaaaaaaaaaaaaaaaaaaaaaaaaaaaaa

SEQ ID NO: 3374 - protein, 103 aa, Triticum aestivum; identical to SEQ ID NO: 8
  misc_feature: Ceres CLONE ID no. 743445
  misc_feature: Ceres CDNA ID no. 40351274
  misc_feature (66)..(92): Pfam Name: TAF PFAM Desc: TATA box binding protein associated factor

SEQ ID NO: 3375 - DNA, 565 bp, Triticum aestivum
  misc_feature: Ceres CLONE ID no. 743460
  misc_feature: Ceres CDNA ID no. 40351275
  CDS (23)..(424): REFERENCED BY SEQ ID NO: 3376
atctcaagccacttcagagaaaatggcggtacctctgctctcgaagaagatcgtgaagaagagggtgaagaagttcaagaggcctcagagtgacaggaaaatttccgtcaagacaaactggcgtagaccaaagggtatagattcccgtgttaggagaaagttcaagggatgcactttgatgccaaacatcggttatggttcagacaagaagacccgccactatctccctaatggttttaagaaatttgttgttcacaatgtgaaggacttggaactgctcatgatgcacaacaggacttactgtgctgagattgctcacaatatatccacaagaaagagaaaagatatagttgagagagctgcgcaacttgatgttgttgtgacaaacaaaacagccagattacgcagccaggaggatgaatagtctaaatgacggagtcacttatttgtagtgatcctagtgacactcttgacaatggattttgatctttttttcattcttctataaattgtagcttgataaacgattaatgtggttttttttccctcaaagaaaaaaaaaaaa

SEQ ID NO: 3376 - protein, 133 aa, Triticum aestivum; identical to SEQ ID NO: 2596
  misc_feature: Ceres CLONE ID no. 743460
  misc_feature: Ceres CDNA ID no. 40351275
  misc_feature (14)..(123): Pfam Name: Ribosomal_L32e PFAM Desc: Ribosomal protein L32

SEQ ID NO: 3377 - DNA, 830 bp, Triticum aestivum
  misc_feature: Ceres CLONE ID no. 743464
  misc_feature: Ceres CDNA ID no. 36699844
  CDS (84)..(494): REFERENCED BY SEQ ID NO: 3378
acaccttcgaattttcttttccttcactttcccgagaaaaaaaaaaccctctttcactttcttgactacggtctcacttcgacatggctcgaactaagcaaactgctcgcaagtccaccggcggcaaggcgccacgtaagcagttggcgaccaaggccgcccggaagtccgctcccgcgaccggaggagtgaagaagccccaccgcttcaggccgggaaccgtggcgctgagggaaatcagaaagtatcagaagagcaccgagcttctcatcaggaagcttccgtttcagagactcgtgagggaaatcgcgcaggacttcaagaccgatttgcgttttcagagtagcgccgtttctgcgcttcaggaagctgctgaggcctacctcgttgggttgttcgaggacactaacctttgcgcgattcatgcaaagagggttaccattatgcctaaggatattcagcttgctcgcaggatcagaggcgagagggcttaggttggttagggttctgatttgaaggaggcgagacggcttagaaaaagaatcatctatctatgtgtttatgtgggcatgtgaaacgtgaatctgtttgcttttgtaattatctcgtgtttcttagacaagttaattaaaatgctatgttggttctcggagaaaattgttgttgagtcttaaagaacttgatctcggagaaattaaatctatcctaaaactcaagagattgtgtgccttttatgtttaacaatacagtatttgagaagagagtatttatgcttcttttaaagcctactaaataaatgtgagataattttattaaaaaaaaaaaaaaaa

SEQ ID NO: 3378 - protein, 136 aa, Triticum aestivum; identical to SEQ ID NO: 588
  misc_feature: Ceres CLONE ID no. 743464
  misc_feature: Ceres CDNA ID no. 36699844
  misc_feature (58)..(134): Pfam Name: Histone PFAM Desc: Core histone H2A/H2B/H3/H4
  misc_feature: Homolog of GI Number: 59799581 NR Desc: Histone H3
  misc_feature: Homolog of GI Number: 166384 NR Desc: histone H3
  misc_feature: Homolog of GI Number: 57098927 NR Desc:  similar to histone protein Hist2h3c1
  misc_feature: Homolog of GI Number: 72093532 NR Desc:  similar to H3 histone
  misc_feature: Homolog of GI Number: 1362108 NR Desc: histone H3 homolog
  misc_feature: Homolog of GI Number: 76612873 NR Desc:  similar to H3 histone
  misc_feature: Homolog of GI Number: 76612880 NR Desc:  similar to H3 histone
  misc_feature: Homolog of GI Number: 76732189 NR Desc:  similar to H3 histone
  misc_feature: Homolog of GI Number: 30061401 NR Desc: H3 histone
  misc_feature: Homolog of GI Number: 55775689 NR Desc: histone 3

SEQ ID NO: 3379 - DNA, 825 bp, Triticum aestivum
  misc_feature: Ceres CLONE ID no. 743596
  misc_feature: Ceres CDNA ID no. 40351276
  CDS (1)..(648): REFERENCED BY SEQ ID NO: 3380
atattctattttttggtggaccgcattcaccttcttctccttctaacccaacctgtttctccgacaatcacattcaacgcttctgtcatggaagaagttaatgtcgtggaaactaaggatggaactgtctcagtagctgctgcgtttgctggtcaccaggaagccgtgcaggatagagaccacaaatttttaagcaaagctgttgaagaagcatataaaggggtagattgtaaagatggaggcccttttggtgccgttatagttcataatgatgaaatagttgctagttgtcacaatatggttctgtgtaacacagacccaactgctcatgctgaggtgacagcaataagagaggcttgcaagaagcttaagcagatagaacttgctgattgtgaaatatatgcttcttgtgaaccttgccccatgtgctttggtgcaatccacctttctcgaattaagaggttggtttatggagcgaaggccgaggcagcaattgctattgggtttgatgatttcattgccgatgcattgcgaggtactggattctatcagaaagcaacattggaaattaagagagctgatggtaatgaggccatcattgctgaagaggtttttgagaaaacaaaggaaaaattccaaatgtattagatctgtgattcttttaatatctgatggcaactggccattcaggattattgccttcatttaaattattgaaactgttgatagtggattgaactcatttgagtacaacaaattatatgctacaatttggtttacatcagataatgactatcccattgtcaatcaaaaaaaaaaaaaaaa

SEQ ID NO: 3380 - protein, 186 aa, Triticum aestivum
  misc_feature: Ceres CLONE ID no. 743596
  misc_feature: Ceres CDNA ID no. 40351276
  misc_feature (29)..(130): Pfam Name: dCMP_cyt_deam PFAM Desc: Cytidine and deoxycytidylate deaminase zinc
MEEVNVVETKDGTVSVAAAFAGHQEAVQDRDHKFLSKAVEEAYKGVDCKDGGPFGAVIVHNDEIVASCHNMVLCNTDPTAHAEVTAIREACKKLKQIELADCEIYASCEPCPMCFGAIHLSRIKRLVYGAKAEAAIAIGFDDFIADALRGTGFYQKATLEIKRADGNEAIIAEEVFEKTKEKFQMY

SEQ ID NO: 3381 - DNA, 652 bp, Triticum aestivum
  misc_feature: Ceres CLONE ID no. 743624
  misc_feature: Ceres CDNA ID no. 25891363
  CDS (54)..(374): REFERENCED BY SEQ ID NO: 3382
actctgtcaaactacgcaaacgcaaagggtttctttcccatcattagaaggtcatggacacgtcaaatcctgctgtatttgtaaatgctcagttgattcccaactttatagggaagaaagtaagaacagtggttcaggtgagccaatgtgatggtggggttgccacagcaaaatccacagatgactgtcaattaaccataaaagggttgccacaagtccctcttatgaactatattgaggtcattggcattgctgaaagtaacaactctattgatgccgaaatatggactgactttggcagcacatttgacaccttctcttacaatcagttgtgccaactagccaatggtgaatttaagggtctgtttctctagggacatcaaggatgctgggccagcaattagatggggtttgttagaagttactgctttttatactaaagcacgtgtttacatgtaaatgtaggaactatgtttttgagtatatggtatccgcagaggagcagggcacatgtgctctgtaggaactgttccattatctctgatgttagctaggttgagtttggcttatgtctgcatctggttccatcgtcttcaattatactcccgtgaatgaaatgaggtattaatttcatataaaaaaaaaaaaaaaa

SEQ ID NO: 3382 - protein, 106 aa, Triticum aestivum
  misc_feature: Ceres CLONE ID no. 743624
  misc_feature: Ceres CDNA ID no. 25891363
MDTSNPAVFVNAQLIPNFIGKKVRTVVQVSQCDGGVATAKSTDDCQLTIKGLPQVPLMNYIEVIGIAESNNSIDAEIWTDFGSTFDTFSYNQLCQLANGEFKGLFL

SEQ ID NO: 3383 - DNA, 679 bp, Glycine max
  misc_feature: Ceres CLONE ID no. 743935
  misc_feature: Ceres CDNA ID no. 40351277
  CDS (67)..(474): REFERENCED BY SEQ ID NO: 3384
tcctatcatcacttctcaaatctcgaaccctctcgttcgtgccgatcactaggtcacacttcatcaatggcgggtagaggcaaaaccctaggatccagcgccgctaagaaggccacctcaaggagcagcaaagccggcctccaattccccgtcggtcgtatcgccaggttcctcaaggccggaaagtacgccgagcgcgtcggcgccggagcccccgtctacctcgccgccgttctcgaatatctcgctgctgaggttttggaattggctggaaacgctgcgagagataacaagaagactcgaattgttccacgccacatccaattggcggtgaggaacgacgaagagttgagcaagcttctaggagatgttaccattgctaacggcggtgttatgcctaacattcacaaccttcttcttcccaagaaggctgggggctcatccaagggtgctgctgctgacgatgactcttaaatagggattcactgttcacaaagttcttgaatttagattctatgtttgctctcttttttttttcctttttatttgtagttatgataattgtgccctttgtagtagtagttaggttttcagtcagatgtgtttaaagaatgctcttacgcatcaagaaaggttgttcaaaatttaaattattttaatgtcaaaaaaaaaaaaaaaa

SEQ ID NO: 3384 - protein, 135 aa, Glycine max; identical to SEQ ID NO: 2346
  misc_feature: Ceres CLONE ID no. 743935
  misc_feature: Ceres CDNA ID no. 40351277
  misc_feature (25)..(89): Pfam Name: CBFD_NFYB_HMF PFAM Desc: Histone

SEQ ID NO: 3385 - DNA, 589 bp, Glycine max
  misc_feature: Ceres CLONE ID no. 743962
  misc_feature: Ceres CDNA ID no. 36706180
  CDS (58)..(366): REFERENCED BY SEQ ID NO: 3386
ctattgtttcttaccccttcaaagcaaatacagaaaaaaagagtcaagcggcgagcaatggcgacatcgctggtgcgatcgggttttcttcgaagcgccctaagaggaagcgctcgtggctcccaggttccgaagcgaaactttgcttcctctggtcatcacgatgatgcatatgagacggccaaatgggagaagattacatatctaggcattgttagttgcactggtttagccgtttataatctatcaaagggccacccacacttcaaagaacctcctgcttacccatatttgcatatccgcaataaggaattcccctggggtcccgatggactatttgaaacgaagcaccatgaagagcattagtggtttaatgaaggtatttgtggcactggtgggcattcgttttgtcaatgttcaacgaatagtgataatgatgattattgtgatttttgaaatgtgatctagaacttgcacttggcaacgttagtttgtcatgtttttatctcatgttcgtttgtatggttgaaacaaaataaatttgtcaaacaatatgatgcttctttttatgccaaaaaaaaaaaaaaaa

SEQ ID NO: 3386 - protein, 102 aa, Glycine max; identical to SEQ ID NO: 3342
  misc_feature: Ceres CLONE ID no. 743962
  misc_feature: Ceres CDNA ID no. 36706180
  misc_feature (30)..(101): Pfam Name: COX6A PFAM Desc: Cytochrome c oxidase subunit VIa
  misc_feature: Homolog of GI Number: 31745230 NR Desc: putative  cytochrome c oxidase subunit VIa precursor

SEQ ID NO: 3387 - DNA, 455 bp, Glycine max
  misc_feature: Ceres CLONE ID no. 743967
  misc_feature: Ceres CDNA ID no. 25891358
  CDS (81)..(275): REFERENCED BY SEQ ID NO: 3388
gcccgaactccttcgacgaccgtcttccccaatcgcctgcgtctctctctgaattgacaagcttaaagacaaagtcttaaatggctggtccaaggattgcccatgctaccttgaaaggtccgagtgtggttaaggagataataattggaataacacttggcttagctgctggtagcgtgtggaagatgcaccactggaatgaacagaggaaaaccaggaccttctacgatttactggaaaagggtgagatcagtgttgttgcagaggaacagtgaaaatgttcttgttttgttgcctatgctctccatttataggctttttttcccatgctatattcaattggctcttcaactgtaaatgagccaacttactattagattgaaaagaataagtttcttacactgattgagtactatgttggcttggaaaagtttcatgcaaaaaaaaaaaaaaaa

SEQ ID NO: 3388 - protein, 64 aa, Glycine max
  misc_feature: Ceres CLONE ID no. 743967
  misc_feature: Ceres CDNA ID no. 25891358
  misc_feature (2)..(63): Pfam Name: COX5C PFAM Desc: Cytochrome c oxidase subunit Vc
  misc_feature: Homolog of GI Number: 7340711 NR Desc: cytochrome c oxidase subunit 5c
  misc_feature: Homolog of GI Number: 48428177 NR Desc: Cytochrome c oxidase polypeptide Vc
  misc_feature: Homolog of GI Number: 1070356 NR Desc: cytochrome c oxidase
  misc_feature: Homolog of GI Number: 2275216 NR Desc: putative cytochrome c oxidase Vc subunit
  misc_feature: Homolog of GI Number: 21593916 NR Desc: cytochrome c oxidase subunit
  misc_feature: Homolog of GI Number: 18409602 NR Desc: cytochrome c oxidase subunit 5c
  misc_feature: Homolog of GI Number: 18409600 NR Desc: cytochrome c oxidase subunit 5c
  misc_feature: Homolog of GI Number: 10178149 NR Desc: cytochrome c oxidase Vc subunit
  misc_feature: Homolog of GI Number: 4105786 NR Desc: PGPS/D8
MAGPRIAHATLKGPSVVKEIIIGITLGLAAGSVWKMHHWNEQRKTRTFYDLLEKGEISVVAEEQ

SEQ ID NO: 3389 - DNA, 603 bp, Glycine max
  misc_feature: Ceres CLONE ID no. 744035
  misc_feature: Ceres CDNA ID no. 40351278
  CDS (93)..(332): REFERENCED BY SEQ ID NO: 3390
gttctagtgtatgtgattgttgtgactcgttcttcttcgtcgttatcttcttcttttgttgtttgtgtgtttgttttttctctcacctgaaaatgtcttgctgcggtggtaactgtggttgcggaagcgcctgcaagtgcggcaacggctgcggaggctgcaagatgtacccaaacttgagctacaccgagtcaaccaccaccgagaccttggtcatgggagtggcaccagttaaggctcaattcgagagtgctgaaatgggtgttcccgctgagaacgatggctgcaaatgtggagctaactgcacctgcaacccctgcacttgcaagtgaggtgttggagagctaaagcttcaagcagaaatggcccttagaaataatgataaaaactatatgtagtttcaaaacttcaaaattatgtagtatgtattatgttgcactctggtgttttgtgtctaaacaaacacccttagaataaagtggtcatttcttgcccttgagcaagttcaagtgttttggacttgtgatgggtgtgttaaggtcatggttgcctttttttatatatatatatatatataaatgtttggtaaaaaaaaaaaaaaaa

SEQ ID NO: 3390 - protein, 79 aa, Glycine max
  misc_feature: Ceres CLONE ID no. 744035
  misc_feature: Ceres CDNA ID no. 40351278
  misc_feature (1)..(78): Pfam Name: Metallothio_2 PFAM Desc: Metallothionein
MSCCGGNCGCGSACKCGNGCGGCKMYPNLSYTESTTTETLVMGVAPVKAQFESAEMGVPAENDGCKCGANCTCNPCTCK

SEQ ID NO: 3391 - DNA, 545 bp, Glycine max
  misc_feature: Ceres CLONE ID no. 744066
  misc_feature: Ceres CDNA ID no. 40351279
  CDS (64)..(342): REFERENCED BY SEQ ID NO: 3392
agtgtctgctgccttccattcgttcacctcctcaacctctgcagcgccttcgatccagaaaacatgactaagagaacaaagaaggctggcattgttggaaaatacggtacccgttatggcgccagtctgcgtaagcagattaagaagatggaagttagtcaacacagcaagtttttctgtgaattttgtggaaagtatgctgtgaagaggaaagctgtgggaatatggggatgcaaggactgtggtaaagtgaaagctggcggtgcttacactttgaataccgcaagtgccgtgactgtacggagcaccatcaggaggttgagggagcaaactgagagttaagcttttttgtttatgctatcaattactattagactttgcatgaagtgcctagtttgtattcactgaactgcactggttgtattcaaagtaaactccttaagtttaattttgagatgactcttttaattttaattgtttggaactttgtcggggtgattttgcttcatagtttcattttattgtttgcaaaaaaaaaaaaaaaa

SEQ ID NO: 3392 - protein, 92 aa, Glycine max
  misc_feature: Ceres CLONE ID no. 744066
  misc_feature: Ceres CDNA ID no. 40351279
  misc_feature: null
  misc_feature: Useful for making plants with modulated cold sensitivity
  misc_feature (2)..(91): Pfam Name: Ribosomal_L37ae PFAM Desc: Ribosomal L37ae protein family
MTKRTKKAGIVGKYGTRYGASLRKQIKKMEVSQHSKFFCEFCGKYAVKRKAVGIWGCKDCGKVKAGGAYTLNTASAVTVRSTIRRLREQTES

SEQ ID NO: 3393 - DNA, 699 bp, Glycine max
  misc_feature: Ceres CLONE ID no. 744140
  misc_feature: Ceres CDNA ID no. 40351280
  CDS (68)..(478): REFERENCED BY SEQ ID NO: 3394
attccagcaaagcgcaaagcattctccactacgattcgctcttccagaagcttccagaaaactccagatggcgcgtacaaagcaaacagcccgtaagtcgaccggcggcaaggctccccggaagcagctggcgactaaggccgcccgcaagtctgctccggcgaccggcggagtgaagaagccacacaggttcaggccaggaaccgtggccctgagggagatcaggaagtaccagaagagcacggagcttctgatccgaaagcttccgtttcagcgtttggttcgtgaaatcgctcaggacttcaaaacggatctgaggttccagagcagcgccgtttcggcgctccaggaagccgctgaggcttacttggttggtctctttgaagacactaacctttgtgctattcacgctaagagggttaccattatgcccaaggatattcaactcgccagaagaatcaggggcgagagggcttagttaaataattcactttggtttggggtttaagtgtctttgttttaacgccttgtgtgtgaatctagatcgttgagcagttgctgattagatttcttgtaatgatggtcttatatatgtaatcaagtatttgtctcttaggtatatggttgtttgcctgttagttgtatcacttgatcaattaaatcagatgaaatggttcataaataaaaaaaaaaaaaaaa

SEQ ID NO: 3394 - protein, 136 aa, Glycine max; identical to SEQ ID NO: 588
  misc_feature: Ceres CLONE ID no. 744140
  misc_feature: Ceres CDNA ID no. 40351280
  misc_feature (58)..(134): Pfam Name: Histone PFAM Desc: Core histone H2A/H2B/H3/H4

SEQ ID NO: 3395 - DNA, 656 bp, Glycine max
  misc_feature: Ceres CLONE ID no. 744175
  misc_feature: Ceres CDNA ID no. 40351281
  CDS (28)..(495): REFERENCED BY SEQ ID NO: 3396
gtctgagagaaaccctagctagccacaatgcagatattcgtgaaaaccctaacggggaagacgataaccctagaggtagagtcatcggacacaatcgacaatgtgaaggcgaagatccaggacaaggagggcatcccgccggaccagcagcgcctgatcttcgccggtaagcagctggaggacggccgcaccctcgccgactacaacatccagaaggagtccacgcttcacctcgtcctccgcctccgcggcggcgccaagaagcgcaagaagaagacctacaccaagcccaagaagatcaagcacaagcacaagaaagtcaagctcgccctcctccagttctacaaggtcgacgactccggcaaggtccagaggctccgcaaggaatgccccaacgccgagtgcggcgccgggactttcatggccaaccacttcgatcgccactattgcggcaagtgtggtttgacctatgtttaccagaaggctgaggcttagggttacatttcgttttttctagtttctggattttggaattttattattagtataatactctgtttttttgtctgtattttggtcgcatattattatgactgcctgaatgttctgccttttcataatttagtttcaatgttttatgaaaaaaaaaaaaaaaa

SEQ ID NO: 3396 - protein, 155 aa, Glycine max
  misc_feature: Ceres CLONE ID no. 744175
  misc_feature: Ceres CDNA ID no. 40351281
  misc_feature (1)..(74): Pfam Name: ubiquitin PFAM Desc: Ubiquitin family
  misc_feature (101)..(147): Pfam Name: Ribosomal_S27 PFAM Desc: Ribosomal protein S27a
MQIFVKTLTGKTITLEVESSDTIDNVKAKIQDKEGIPPDQQRLIFAGKQLEDGRTLADYNIQKESTLHLVLRLRGGAKKRKKKTYTKPKKIKHKHKKVKLALLQFYKVDDSGKVQRLRKECPNAECGAGTFMANHFDRHYCGKCGLTYVYQKAEA

SEQ ID NO: 3397 - DNA, 651 bp, Glycine max
  misc_feature: Ceres CLONE ID no. 744197
  misc_feature: Ceres CDNA ID no. 25891359
  CDS (3)..(392): REFERENCED BY SEQ ID NO: 3398
attccacattcgaagaaataaactcacccactaagcactacacaaatcacacagagttgcaagagaaagataaaagaagatggcgactcttgattccgacgtgcctatggttcccgccggcgagccctcgagcagcgccggtccttcttccaagaagcccaagcgcttcgagatcaagaagtggaacgccgtcgctctctgggcttgggacatcgttgtcgataactgtgctatctgccggaaccacatcatggatctctgcatcgagtgccaagccaaccaggctagcgccactagcgaggaatgcactgtggcttggggagtttgtaaccatgcttttcacttccattgcatcagtcgatggctcaagactcgtcaagtttgtcctctagataacagtgagtgggagtttcagaaatatggccactagaattatgatgtggttgagctcctcggacatttggaccatctatcctagattttgaatatttactgttctatctgttattttcgtttgcttgtgtactgaatttattatgttcaagaaatcagcttgtctgatggaatttgatatacgccgtggtaacatgtaaagttttactttaatgttttatgtatttcatatgcttcctttcaaaaaaaaaaaaaaaa

SEQ ID NO: 3398 - protein, 116 aa, Glycine max
  misc_feature: Ceres CLONE ID no. 744197
  misc_feature: Ceres CDNA ID no. 25891359
  misc_feature (83)..(104): Pfam Name: zf PFAM Desc: Zinc finger
  misc_feature: Homolog of GI Number: 83701143 NR Desc: RING
  misc_feature: Homolog of GI Number: 21592528 NR Desc: ring
  misc_feature: Homolog of GI Number: 31747517 NR Desc: ring box protein
  misc_feature: Homolog of GI Number: 55769719 NR Desc: putative ring
  misc_feature: Homolog of GI Number: 47087614 NR Desc: putative ring
  misc_feature: Homolog of GI Number: 50911983 NR Desc: putative RING box protein 1
  misc_feature: Homolog of GI Number: 7543891 NR Desc: ring
  misc_feature: Homolog of GI Number: 62652791 NR Desc:  similar to RBX1 protein
  misc_feature: Homolog of GI Number: 72018809 NR Desc:  similar to RING
  misc_feature: Homolog of GI Number: 48095046 NR Desc: similar to ENSANGP00000010437
MATLDSDVPMVPAGEPSSSAGPSSKKPKRFEIKKWNAVALWAWDIVVDNCAICRNHIMDLCIECQANQASATSEECTVAWGVCNHAFHFHCISRWLKTRQVCPLDNSEWEFQKYGH

SEQ ID NO: 3399 - DNA, 468 bp, Glycine max
  misc_feature: Ceres CLONE ID no. 744201
  misc_feature: Ceres CDNA ID no. 40351282
  CDS (1)..(171): REFERENCED BY SEQ ID NO: 3400
cttcgttcggagtcgttaccttccatttgttcctctcttccgctcgtaactgcgccgacaactcttgatcgtaatggcaccgccaccaggaccttattctggcaccagcaccctagctttggtcgctcgagcttccgctttctccttcggccttgtttatggaagcattaagctcaagtaccttaaggcaaaagccaaatctcatcagaaagctcaggagaaggctcatcattgaaagcaatgagagatccccggtgctattatctgtccatggatggagtagaatactgaaataattcattacaaggaactgtaccatgttttctccctttttttttttctggtttaagctttggataatcttgaagcattgagtttagtgcactgaaaatgttcaatatcttgccttgttttaataatgaataccatgtcttcttttgagttccatgtttaaaaaaaaaaaaaaaa

SEQ ID NO: 3400 - protein, 53 aa, Glycine max
  misc_feature: Ceres CLONE ID no. 744201
  misc_feature: Ceres CDNA ID no. 40351282
  misc_feature: null
  misc_feature: Useful for making plants with altered cell wall content and/or composition
MAPPPGPYSGTSTLALVARASAFSFGLVYGSIKLKYLKAKAKSHQKAQEKAHH

SEQ ID NO: 3401 - DNA, 856 bp, Glycine max
  misc_feature: Ceres CLONE ID no. 744325
  misc_feature: Ceres CDNA ID no. 40351283
  CDS (99)..(671): REFERENCED BY SEQ ID NO: 3402
acacctctctctctctctcagaatttctatctatctcttgtttcaatttcaacaacggttactcctttttcgttttgagtttcaatcaagccatcatcatgtctaccgcatcgcaacccaaggccaagaaaacggcgtcgtccaagaagcccctctcccaccctcccttcgccgtgatgatagcagaggcgattgcgagtctgaaagagagaaccggttcgagccaatacgcgataaccaaatacatcgaagggaagcacaaggagttgcctgcaacctacaagaagcttgtcctcgttcatctcaagaaatctgttgctgctggcaagcttgttaaggtgaaaaactcctttaagctcgcaccgactaagcctgctccggttaaggccgctgctcccaaaaagccaaccaaagctgccactaagcccgcttccaagcccaaagctgctactcctaagaaaaaggctgttgccaagcccaaggccaaagctgcggccacgactgccaagcccaagtctaagcccgctaaggtcgcggccaagaaggtcgctgctaagccagctaagaagaagacacccgtaaaggccgtgaagaagcccaagagtgtcgtgaagaaacctaagagcgtgaaatcaccagcgaagaagactaaggctaaggctaagaagtgatgatttggattggggtttggttttggtttggcgttatagttttatgcattccgggttcattcgtagtagtataggtgaatatatttttagaagagtattgatgtaaattcctttttctagaaattcaacaagtgttcttgtttgcattgaatacaatttcgttttctttaaaaaaaaaaaaaaaa

SEQ ID NO: 3402 - protein, 190 aa, Glycine max
  misc_feature: Ceres CLONE ID no. 744325
  misc_feature: Ceres CDNA ID no. 40351283
  misc_feature (20)..(89): Pfam Name: Linker_histone PFAM Desc: linker histone H1 and H5 family
MSTASQPKAKKTASSKKPLSHPPFAVMIAEAIASLKERTGSSQYAITKYIEGKHKELPATYKKLVLVHLKKSVAAGKLVKVKNSFKLAPTKPAPVKAAAPKKPTKAATKPASKPKAATPKKKAVAKPKAKAAATTAKPKSKPAKVAAKKVAAKPAKKKTPVKAVKKPKSVVKKPKSVKSPAKKTKAKAKK

SEQ ID NO: 3403 - DNA, 529 bp, Glycine max
  misc_feature: Ceres CLONE ID no. 744334
  misc_feature: Ceres CDNA ID no. 36706181
  CDS (100)..(366): REFERENCED BY SEQ ID NO: 3404
attttcaggcagtcttttggggtttaaccgtgtacctctcacttcttctacgaccatcatcttccttccttccttcaatcgttctaactcttagcagccatggcgagcaccaaagttcagagggttatgactcagcccattaacttgattttcaggtttcttcagagcaaagcacgcattcagatttggctatttgagcaaaaggatttgaggattgaaggccgaatcattggttttgatgaatacatgaatttggttcttgatgatgctgaagaagtgaacatcaagaagaagagcagaaaaacattagggaggatccttcttaaaggagataacataactttaatgatgaacacggggaaatgatgaacactccttgacagttgtaaactatgttcctatcaaacaagaaggcataattatctttcccttgggtttgtattcatctaacaaactctcaaaccggaagctgatgattttatgattaaggaagtatagtaccaatattacaacaaaaaaaaaaaaaaaa

SEQ ID NO: 3404 - protein, 88 aa, Glycine max
  misc_feature: Ceres CLONE ID no. 744334
  misc_feature: Ceres CDNA ID no. 36706181
  misc_feature (19)..(85): Pfam Name: LSM PFAM Desc: LSM domain
  misc_feature: Homolog of GI Number: 50904957 NR Desc: putative small nuclear ribonucleoprotein polypeptide E
  misc_feature: Homolog of GI Number: 21592486 NR Desc: putative small nuclear ribonucleoprotein E
  misc_feature: Homolog of GI Number: 21593343 NR Desc: small nuclear ribonucleoprotein homolog
  misc_feature: Homolog of GI Number: 7269933 NR Desc: small nuclear ribonucleoprotein homolog
  misc_feature: Homolog of GI Number: 50603823 NR Desc: MGC89991 protein
  misc_feature: Homolog of GI Number: 55242718 NR Desc: ENSANGP00000022836
  misc_feature: Homolog of GI Number: 49256559 NR Desc: MGC82471 protein
  misc_feature: Homolog of GI Number: 72111474 NR Desc:  similar to small nuclear ribonucleoprotein E isoform 2
  misc_feature: Homolog of GI Number: 62654502 NR Desc:  similar to small nuclear ribonucleoprotein E
  misc_feature: Homolog of GI Number: 56078667 NR Desc: Small nuclear ribonucleoprotein E
MASTKVQRVMTQPINLIFRFLQSKARIQIWLFEQKDLRIEGRIIGFDEYMNLVLDDAEEVNIKKKSRKTLGRILLKGDNITLMMNTGK

SEQ ID NO: 3405 - DNA, 584 bp, Glycine max
  misc_feature: Ceres CLONE ID no. 744456
  misc_feature: Ceres CDNA ID no. 25891360
  CDS (60)..(434): REFERENCED BY SEQ ID NO: 3406
agggttttcaccgtattttattcccttttccaattacttaagatatttgaagagggaaaatgagtcgaggaggtgcagcagcagcgaagggaaagaagaagggtgctacattcaccattgactgtgcaaagccagtagaagacaagatcatggacattgcttctctcgagaagtttcttcaagagaggatcaaggttggtggcaaagctggtgctcttggtgactctgttaccgttacacgtgagaagactaagattattctcacctctgactgtaacttttccaaacggtatttgaagtacttgacgaagaagtacttgaagaaacacaatgtgcgagactggctcagagtgattgcttcaaacaaggatagaagtgtttacgaactgaggtacttcaacattgctgagaatgagggagaggaagaagattagttgtctgatagccttatttgcttaagtgttttgtttacccttttcctatacctagcttcctttttggcaaatattgcttgagatacgatgctttgttttgatcggttgcaatttaacggttttgatcatttaagaaaaaaaaaaaaaaaa

SEQ ID NO: 3406 - protein, 124 aa, Glycine max
  misc_feature: Ceres CLONE ID no. 744456
  misc_feature: Ceres CDNA ID no. 25891360
  misc_feature (9)..(124): Pfam Name: Ribosomal_L22e PFAM Desc: Ribosomal L22e protein family
  misc_feature: Homolog of GI Number: 6714454 NR Desc: putative 60S ribosomal protein  L22
  misc_feature: Homolog of GI Number: 12642842 NR Desc: putative 60S ribosomal protein L22
  misc_feature: Homolog of GI Number: 50939919 NR Desc: putative 60S ribosomal protein L22
  misc_feature: Homolog of GI Number: 42733478 NR Desc: BRI1
  misc_feature: Homolog of GI Number: 6056419 NR Desc: 60S ribosomal protein  L22
  misc_feature: Homolog of GI Number: 85392 NR Desc: development
  misc_feature: Homolog of GI Number: 72012073 NR Desc:  similar to 60S ribosomal protein L22
  misc_feature: Homolog of GI Number: 73956651 NR Desc:  similar to 60S ribosomal protein L22
  misc_feature: Homolog of GI Number: 57086899 NR Desc:  similar to ribosomal protein L22
MSRGGAAAAKGKKKGATFTIDCAKPVEDKIMDIASLEKFLQERIKVGGKAGALGDSVTVTREKTKIILTSDCNFSKRYLKYLTKKYLKKHNVRDWLRVIASNKDRSVYELRYFNIAENEGEEED

SEQ ID NO: 3407 - DNA, 597 bp, Glycine max
  misc_feature: Ceres CLONE ID no. 744457
  misc_feature: Ceres CDNA ID no. 25891361
  CDS (78)..(419): REFERENCED BY SEQ ID NO: 3408
aattcacttgcggctgcagcagagaagcactcatcattcttcgtttgtctaagatccgccttctctgaattgtaaaaatgtcgctcggagaaactgcttgttcatacgcagctctcatccttcatgaagatggaatcagtgtaactgccgacaagatcagcaccttgttggaaactgcaaaggttcaagtagatacctattggccaaccttatttgctaaacttgctgagaagaaaaatcttggcgatttgatagccaatgcagcaggcggtggtgcaccagttgctgttgcagctgcccctgttgctgcctcaggtggtggtggtgctgctgctgccgccccagctgctgaggagaaaaagaaggaggaacctgaagaagagagtgatgatgatatgggatttggcttgttcgattagggacattctcaatatgatttggttaaattttgtggttctttacctttaagtttactttatggatattgtaggttttatttttgtgctggttatttatatctgtataagacttgattttgtagttttatgaacttcggaatgtgggtttatgtccatttgagcaaaaaaaaaaaaaaaa

SEQ ID NO: 3408 - protein, 113 aa, Glycine max
  misc_feature: Ceres CLONE ID no. 744457
  misc_feature: Ceres CDNA ID no. 25891361
  misc_feature (21)..(112): Pfam Name: Ribosomal_60s PFAM Desc: 60s Acidic ribosomal protein
  misc_feature: Homolog of GI Number: 78191426 NR Desc: acidic ribosomal protein P1a
  misc_feature: Homolog of GI Number: 20465333 NR Desc: putative 60S acidic ribosomal protein P1
  misc_feature: Homolog of GI Number: 21553441 NR Desc: 60S acidic ribosomal protein P1
  misc_feature: Homolog of GI Number: 20258887 NR Desc: putative acidic ribosomal protein
  misc_feature: Homolog of GI Number: 21592477 NR Desc: acidic ribosomal protein
  misc_feature: Homolog of GI Number: 21554797 NR Desc: acidic ribosomal protein p1
  misc_feature: Homolog of GI Number: 2431769 NR Desc: acidic ribosomal protein P1a
  misc_feature: Homolog of GI Number: 7440758 NR Desc: acidic ribosomal protein P1
  misc_feature: Homolog of GI Number: 50940517 NR Desc: putative acidic ribosomal protein P1a
  misc_feature: Homolog of GI Number: 38382736 NR Desc: MGC68562 protein
MSLGETACSYAALILHEDGISVTADKISTLLETAKVQVDTYWPTLFAKLAEKKNLGDLIANAAGGGAPVAVAAAPVAASGGGGAAAAAPAAEEKKKEEPEEESDDDMGFGLFD

SEQ ID NO: 3409 - DNA, 756 bp, Glycine max
  misc_feature: Ceres CLONE ID no. 744515
  misc_feature: Ceres CDNA ID no. 40351284
  CDS (54)..(449): REFERENCED BY SEQ ID NO: 3410
aaaccaaagtaagtgttctaagagtgagcaacttcaaaacaccatagtgagaaatgacttccaagggtgcaattctcttgtgtctcaatgttctcttcttcactgtggttagttccacatatgttccatgcaacccaccccccaaaactcccaaacacccacctgtcccaaagccaccttccccaaagcaagtttcttgccccaaggacactgttaagtttggtgtgtgtgctgatgtgttaggtttgattaacgtgcaactagggaagccaccaaaaaccccatgctgcagcctcattcagggtcttgctgatcttgaagctgcagtgtgcctttgcactgctctcaaggctaatgtgttgggcatcaacctcaatgttccagtgaacttgagcttgcttctcaactactgtggaaagggtgttcccaagggattcgtctgctactaaatcaacacttctaatgtgtagtttcttaatgttaagtatgtcttaaggttctatattttgctatattcgtcattcatcaatctatgaactttgttgttttgtttttccgtctggcacgtgccatttatagccaacgaacatttcgttcgcaattggttattattattattattattattgtgatggttgaaacttgaaagtcttctcgtggtctttcttgtagcctccctcacactactccttttgtattctaagtgaaaatttatactaataaaaattctacatttaagcaaaaaaaaaaaaaaaa

SEQ ID NO: 3410 - protein, 131 aa, Glycine max
  misc_feature: Ceres CLONE ID no. 744515
  misc_feature: Ceres CDNA ID no. 40351284
  misc_feature (49)..(130): Pfam Name: Tryp_alpha_amyl PFAM Desc: Protease inhibitor/seed storage/LTP family
MTSKGAILLCLNVLFFTVVSSTYVPCNPPPKTPKHPPVPKPPSPKQVSCPKDTVKFGVCADVLGLINVQLGKPPKTPCCSLIQGLADLEAAVCLCTALKANVLGINLNVPVNLSLLLNYCGKGVPKGFVCY

SEQ ID NO: 3411 - DNA, 554 bp, Glycine max
  misc_feature: Ceres CLONE ID no. 744550
  misc_feature: Ceres CDNA ID no. 40351285
  CDS (65)..(343): REFERENCED BY SEQ ID NO: 3412
cagtgtgtgctactttccattcgttcaccgccccaatctctgcagcgccttcgatctagaaaacatgactaagagaacaaagaaggctggcattgttggaaaatacggtacccgttatggtgccagtctgcgaaagcagattaagaagatggaagttagtcagcacagcaaatttttctgtgaattttgtgggaagtatgctgtgaagaggaaagctgtaggaatatggggatgcaaggactgtggtaaagtgaaagcaggcggtgcttatactttgaataccgcaagtgctgtgacggtacggagcaccatcaggaggttgagggagcaaactgagagttgagctttttgttgatgttatcaattactattagactttgcgtgatatgcctagtttgtgttcactgaactgcattggttgtattcaaagtaaactccttaaagtttaattttgagatgactcttttaattttagttgtttggaactctttgtcagagtgattttgcttcatagttttattttattgttttcaattccaaaaaaaaaaaaaaaa

SEQ ID NO: 3412 - protein, 92 aa, Glycine max; identical to SEQ ID NO: 3392
  misc_feature: Ceres CLONE ID no. 744550
  misc_feature: Ceres CDNA ID no. 40351285
  misc_feature: null
  misc_feature: Useful for making plants with modulated cold sensitivity
  misc_feature (2)..(91): Pfam Name: Ribosomal_L37ae PFAM Desc: Ribosomal L37ae protein family

SEQ ID NO: 3413 - DNA, 502 bp, Glycine max
  misc_feature: Ceres CLONE ID no. 744554
  misc_feature: Ceres CDNA ID no. 25891362
  CDS (3)..(395): REFERENCED BY SEQ ID NO: 3414
agacgggtatctcttctacgacgcaagcagcttctagttgtgtaatttctgcgtgggctgcaatggattccggtgtccagggttgcatcttagccactttaattctccacgacgaggaaattccagtcaccgctgagaagatcaacgctctgttgaaggcctctaatgtctccgccgagtcatactggcccagcctcttcgccaagctcgcccagaataagaacatcgaagacctcattttgaacgccggtggtggtggtggtgccgccgctgccgttgccgctcccgccgccggtggtggtgctgccgctgcagccgcacccgccgccgaggaaaagaaggaagaagtgaaggaagaaagtgacgatgacatgggtttcggcttgtttgattaggtcttttttatatagttgtagccagattttgagtctttgaattgaaaacttgttttgttctataaaatttttattgaagagattcttagccaaaaaaaaaaaaaaaa

SEQ ID NO: 3414 - protein, 110 aa, Glycine max
  misc_feature: Ceres CLONE ID no. 744554
  misc_feature: Ceres CDNA ID no. 25891362
  misc_feature (21)..(109): Pfam Name: Ribosomal_60s PFAM Desc: 60s Acidic ribosomal protein
  misc_feature: Homolog of GI Number: 78191426 NR Desc: acidic ribosomal protein P1a
  misc_feature: Homolog of GI Number: 50940517 NR Desc: putative acidic ribosomal protein P1a
  misc_feature: Homolog of GI Number: 2431769 NR Desc: acidic ribosomal protein P1a
  misc_feature: Homolog of GI Number: 7440758 NR Desc: acidic ribosomal protein P1
  misc_feature: Homolog of GI Number: 57471718 NR Desc: ribosomal protein P1
  misc_feature: Homolog of GI Number: 21553441 NR Desc: 60S acidic ribosomal protein P1
  misc_feature: Homolog of GI Number: 20465333 NR Desc: putative 60S acidic ribosomal protein P1
  misc_feature: Homolog of GI Number: 20258887 NR Desc: putative acidic ribosomal protein
  misc_feature: Homolog of GI Number: 21592477 NR Desc: acidic ribosomal protein
  misc_feature: Homolog of GI Number: 21554797 NR Desc: acidic ribosomal protein p1
MDSGVQGCILATLILHDEEIPVTAEKINALLKASNVSAESYWPSLFAKLAQNKNIEDLILNAGGGGGAAAAVAAPAAGGGAAAAAAPAAEEKKEEVKEESDDDMGFGLFD

SEQ ID NO: 3415 - DNA, 660 bp, Glycine max
  misc_feature: Ceres CLONE ID no. 744556
  misc_feature: Ceres CDNA ID no. 25891120
  CDS (50)..(496): REFERENCED BY SEQ ID NO: 3416
atcactctcacgcttctgattattcctcttcccattctagggttcccaaatggacgctggcggaaagatcaagaagggcgccggaggaagaaagggcggcggccctaagaagaagccggtttcaaggtccgtcaaggccggtctccaattccccgtcggaagaattggccgttatttgaagaaaggaaggtacgcccagcgtgtcggtaccggtgctcccgtttacttggccgcagttctcgagtacctagctgctgaggtgcttgagttggctgggaatgctgcacgtgacaacaagaagaacaggattattccgagacatgtgctgttggctgtaaggaacgatgaggagttggggaaattgcttgctggtgtcaccattgctcatggtggtgttcttccaaacattaaccctgttttgctacctaagaagactcaggttgctaaggaaccaaaatctccatccaaggctaccaagtctccaaagaaagcttagatgtttttattttattttaatatatgtatatcagtgtttagatgctttttatgtaaaagaaaatagtatctgttggaaacactgtaattcttatcgtcttgcatgtaggagtttgctaaataatgaaaatatcttattattttgggtcaaaaaaaaaaaaaaaa

SEQ ID NO: 3416 - protein, 148 aa, Glycine max
  misc_feature: Ceres CLONE ID no. 744556
  misc_feature: Ceres CDNA ID no. 25891120
  misc_feature (26)..(101): Pfam Name: Histone PFAM Desc: Core histone H2A/H2B/H3/H4
  misc_feature: Homolog of GI Number: 7649159 NR Desc: histone H2A
  misc_feature: Homolog of GI Number: 47026912 NR Desc: histone H2A
  misc_feature: Homolog of GI Number: 47026919 NR Desc: histone H2A
  misc_feature: Homolog of GI Number: 34914498 NR Desc: putative histone H2A
  misc_feature: Homolog of GI Number: 729669 NR Desc: Histone H2A
  misc_feature: Homolog of GI Number: 122006 NR Desc: Histone H2A
  misc_feature: Homolog of GI Number: 50931693 NR Desc: putative histone H2A
  misc_feature: Homolog of GI Number: 729671 NR Desc: Histone H2A
  misc_feature: Homolog of GI Number: 61826353 NR Desc:  similar to Histone H2A.x
  misc_feature: Homolog of GI Number: 62653580 NR Desc:  similar to Histone H2A.x
MDAGGKIKKGAGGRKGGGPKKKPVSRSVKAGLQFPVGRIGRYLKKGRYAQRVGTGAPVYLAAVLEYLAAEVLELAGNAARDNKKNRIIPRHVLLAVRNDEELGKLLAGVTIAHGGVLPNINPVLLPKKTQVAKEPKSPSKATKSPKKA

SEQ ID NO: 3417 - DNA, 733 bp, Glycine max
  misc_feature: Ceres CLONE ID no. 744558
  misc_feature: Ceres CDNA ID no. 40351286
  CDS (93)..(482): REFERENCED BY SEQ ID NO: 3418
atcgaaaaaagactcatagtccatcacccagcaagaaaaaagaaaatcgaagaggaagagcaaggacacaacacaaagaagcaaaagaagacatggcgttgcagtggctgattctcacttacgtggtcgcagctgaggctgccgtggccattctgctaacccttcccacgcccaaactcctaagggaccgtttcgcctctctcgtttccctcattcttcaacccgcgcttttcattgtcccctttgcggggttccaactccttgatatatactggaaaaatgagcatcggttgatgtgtacctctgaagtttgtactgctgcggagagagatcgatatgagaaatctatatacaaagctcagaggaatgtaatactgtgtgttacagcatgtcttctctactggtctatcagccgcatttgcaagtatcagaaggaaatccagagtctggaggaaggggagaagagaatcaagtcccactagattcttttagtcatgattagtggaggatatccttgaggctactttagttgagtctagtatggacatgccaacatgatgtaccaaattatacagtgtgatatactcatgtgattcagttttatattttcaaattccaatttttctttgttatgctgtttggacgtgctcttgacttctatcttgtttaatggcttttagcctatatcagtgaaatattttttcttttaacttctacaaaaaaaaaaaaaaaa

SEQ ID NO: 3418 - protein, 129 aa, Glycine max
  misc_feature: Ceres CLONE ID no. 744558
  misc_feature: Ceres CDNA ID no. 40351286
MALQWLILTYVVAAEAAVAILLTLPTPKLLRDRFASLVSLILQPALFIVPFAGFQLLDIYWKNEHRLMCTSEVCTAAERDRYEKSIYKAQRNVILCVTACLLYWSISRICKYQKEIQSLEEGEKRIKSH

SEQ ID NO: 3419 - DNA, 740 bp, Glycine max
  misc_feature: Ceres CLONE ID no. 744651
  misc_feature: Ceres CDNA ID no. 40351287
  CDS (71)..(466): REFERENCED BY SEQ ID NO: 3420
aatcccaagctcacacacactaaaccaaagtaagaggtatagtgttctaagagtgagcaacttgtgagaaatggcttccaaggctgcacttctcttgtgtctcaatgttctctttttcactgtggttagttccacatatgtgccatgtaatccaccccccaaaactcccaaacacccacctgtcccaaagccaccatccccaaagcaagcaagctgccccaaagacactattaagttcggtgtgtgtgctgatgtgttaggtttgattaatgtgcaacttgggaagccaccaaagaccccatgctgcaacctaattcagggtcttgctgatcttgaagctgcagtgtgcctttgcactgctctcaaggctaatgtgttgggcatcaacctcaatgttccagtgaacttgagcttgcttctaaactactgtggaaagggtgttcccaagggattcgtctgctattaaatcaaacacttataatgtgtagcttcctattgctatattcgtcattcatcattattctgtgtatttcagtatttgtgcccggcacgtgccaattagccaacgaacatttcgttcatacttggttactattactgttgtgatgcgctgaaactttaaaggcttcttggtcttccttgtcgcagcctcactaaagtcgtttgtattctaagtgaaatttctactaataaataatctacattatttaagctatgattaaacaaaaaaaaaaaaaaaa

SEQ ID NO: 3420 - protein, 131 aa, Glycine max
  misc_feature: Ceres CLONE ID no. 744651
  misc_feature: Ceres CDNA ID no. 40351287
  misc_feature (49)..(130): Pfam Name: Tryp_alpha_amyl PFAM Desc: Protease inhibitor/seed storage/LTP family
MASKAALLLCLNVLFFTVVSSTYVPCNPPPKTPKHPPVPKPPSPKQASCPKDTIKFGVCADVLGLINVQLGKPPKTPCCNLIQGLADLEAAVCLCTALKANVLGINLNVPVNLSLLLNYCGKGVPKGFVCY

SEQ ID NO: 3421 - DNA, 1357 bp, Glycine max
  misc_feature: Ceres CLONE ID no. 744683
  misc_feature: Ceres CDNA ID no. 40351288
  CDS (83)..(1099): REFERENCED BY SEQ ID NO: 3422
acacaccgtttgttctattcttaactcaacttctgctacccactctcttcttccaagtccaaccacgcttttctctacagtcatgggcaaggtcaagatcggaatcaacggatttggaagaattggccgtttggttgccagagtcgctctgcaaagagacgatgtggagctcgttgccgttaacgaccctttcattaccaccgattacatgacatacatgtttaaatacgacagtgttcacggacactggaagcatcacgatgtcaccgttaaggacgagaagacccttctcttcggtgacaagccagtcactgtttttggacacaggaaccctgaagagatcccatgggggtcaactggagctgatatcattgttgagtccaccggagttttcaccgataaggacaaggccgccgcacatttgaagggtggtgcgaagaaggttattatttctgcccccagtaaggatgcccccatgtttgttgttggtgttaacgagcacgagtacaagccagagcttgatattatttccaatgctagctgcacaaccaactgccttgctccacttgctaaggttattaatgacaggtttggcattgttgagggtttgatgaccactgttcattccatcactgccacccagaagactgttgatgggccatcagccaaagactggagaggtggaagagctgcttcatttaacatcattcctagcagcactggagctgccaaggctgttggaaaagtccttcctgctttgaacggaaaattgactggtatggcattccgtgttcccaccgtggatgtctctgttgttgacctcacagtgaggctggagaaggaagcctcctacgatgaaattaaaaatgctatcaaggaggaatcagagggcaagttgaagggaattcttggttacactgaagatgatgtggtctccaccgactttgtgggcgatagcagatcaagtatttttgatgcaaaggctggaattgcattgaataagaactttgtgaagcttgtctcttggtatgacaacgagtggggatacagctcacgtgtcattgacctgcttgtattcgttgccaagaagtctttttaaggttgtactgaaaaaaaagtagcttgtctagacattatgtgctggtgtctagctgcgatttagtgtcttcttgctcgggcagaaatgagaagtatgaataaatcggtttcgggaaccggtgttgttaccctgttaggagcattaagcttttttttgttgtctcttctgtgtaggggatggagtttttggattattatatacttgctgatgtactcggctctttgttgattctgattgcagacaaaaaaaaaaaaaaaa

SEQ ID NO: 3422 - protein, 338 aa, Glycine max
  misc_feature: Ceres CLONE ID no. 744683
  misc_feature: Ceres CDNA ID no. 40351288
  misc_feature (159)..(316): Pfam Name: Gp_dh_C PFAM Desc: Glyceraldehyde 3
  misc_feature (4)..(36): Pfam Name: GFO_IDH_MocA PFAM Desc: Oxidoreductase family
MGKVKIGINGFGRIGRLVARVALQRDDVELVAVNDPFITTDYMTYMFKYDSVHGHWKHHDVTVKDEKTLLFGDKPVTVFGHRNPEEIPWGSTGADIIVESTGVFTDKDKAAAHLKGGAKKVIISAPSKDAPMFVVGVNEHEYKPELDIISNASCTTNCLAPLAKVINDRFGIVEGLMTTVHSITATQKTVDGPSAKDWRGGRAASFNIIPSSTGAAKAVGKVLPALNGKLTGMAFRVPTVDVSVVDLTVRLEKEASYDEIKNAIKEESEGKLKGILGYTEDDVVSTDFVGDSRSSIFDAKAGIALNKNFVKLVSWYDNEWGYSSRVIDLLVFVAKKSF

SEQ ID NO: 3423 - DNA, 946 bp, Glycine max
  misc_feature: Ceres CLONE ID no. 744688
  misc_feature: Ceres CDNA ID no. 25891027
  CDS (72)..(746): REFERENCED BY SEQ ID NO: 3424
actgaatctaaaaaccttcccttctcttctcacccccacactcccatctcacacacccctcgcatccaacaatgtctctcaccattccctccaacctctccaagcccgccgccctccgccccaaactaagcccaaagctaaggtccgccgccacaaccaccatcgtctgcagcaccaccaacaacaacaacaacaacaacgtgtcctccgacctgaaggcgttctccgccgcgctggccctctcctccatcctcctctccgcccctctccccgccggcgccgacatctcggggctcaccccatgcaaggagtcgaagcagttcgcgaagcgtgagaagcagtcgataaagaagctggagtcgtcgctgaagctctacgaggcgggcagcgcccccgcactggccattaaggcgagcgtggagaagacgaagaggaggttcgacaactacgcgaagcaggggttgctgtgcggcggcgatgggttgccgcacctgatcgtgagcggagaccagaggcactggggtgagttcatcacacccggaatactattcctgtacatctcgggatggatcggctgggtgggtcggagctacctgattgcgatcagggacgagaagaaacccaccatgaaggagatcatcatcgatgttcctctggcttctcgcttgctcttcaggggtttcagctggcccgttgctgcctacagagaactcatcaacggcgacctcattgccaaggatgtctagataagagagggtggatggctacattggaggaaagcctggagaatttgtatgtggatgggatctttacgcgctctttttgtaattactttttttataaatggtacatgatatgatgtaatctaatgcatgtgaaccacaatcaacctcatcttccaattcaattaatgtaagaagagttcttgccaaaaaaaaaaaaaaaa

SEQ ID NO: 3424 - protein, 224 aa, Glycine max
  misc_feature: Ceres CLONE ID no. 744688
  misc_feature: Ceres CDNA ID no. 25891027
  misc_feature (50)..(224): Pfam Name: PSI_PsaF PFAM Desc: Photosystem I reaction centre subunit III
  misc_feature: Homolog of GI Number: 8954295 NR Desc: photosystem I reaction center subunit III
  misc_feature: Homolog of GI Number: 30013659 NR Desc: putative photosystem I subunit III precursor
  misc_feature: Homolog of GI Number: 21593588 NR Desc: photosystem I subunit III precursor
  misc_feature: Homolog of GI Number: 23397082 NR Desc: putative photosystem I reaction centre subunit III precursor
  misc_feature: Homolog of GI Number: 1172664 NR Desc: Photosystem I reaction centre subunit III
  misc_feature: Homolog of GI Number: 15450361 NR Desc: At1g31330/T19E23_1
  misc_feature: Homolog of GI Number: 21303 NR Desc: PSI subunit IV preprotein
  misc_feature: Homolog of GI Number: 1076728 NR Desc: photosystem
  misc_feature: Homolog of GI Number: 3885892 NR Desc: photosystem
  misc_feature: Homolog of GI Number: 34897038 NR Desc: photosystem
MSLTIPSNLSKPAALRPKLSPKLRSAATTTIVCSTTNNNNNNNVSSDLKAFSAALALSSILLSAPLPAGADISGLTPCKESKQFAKREKQSIKKLESSLKLYEAGSAPALAIKASVEKTKRRFDNYAKQGLLCGGDGLPHLIVSGDQRHWGEFITPGILFLYISGWIGWVGRSYLIAIRDEKKPTMKEIIIDVPLASRLLFRGFSWPVAAYRELINGDLIAKDV

SEQ ID NO: 3425 - DNA, 854 bp, Glycine max
  misc_feature: Ceres CLONE ID no. 744690
  misc_feature: Ceres CDNA ID no. 36582107
  CDS (20)..(592): REFERENCED BY SEQ ID NO: 3426
acacttactagtagtaagcatggagtcctcaaagatctatgcttacctcttcctctgcatgatctttctctcttccgccactcccattctcggttgtggctactgtggcaaaccccccaaaaagcacaagcctggtaaaacaccaaagacacccaaaacacccgttgttaagccaccagtcaccatccctcccattaatgttcctcccgttgttcttccaccaatagtgaagcccccaggtattctccctccaattccaattattaacccaccaaccacaccagggaagggagggaacactccatgcccaccaccaaagtctcctgcgcaggctacgtgccccattgacacgctcaaacttggtgcctgtgtggatcttcttggagggttggttcacattggtttgggtgaccctgttgcgaaccagtgctgccccgtgcttcaagggcttgttgaggttgaagctgcggtgtgtctttgcaccactcttaaactgaagcttctcaacctcaacatttatgtcccacttgcccttcagctccttgtgacttgtggcaagtctcctcctcctggttacacgtgctccctctaaactaggtggaaaggattgaggaatatatggtcaaaatcgacatgagaggatgtcgagccacactatctctcttctcttctgattggaactgctgttgtttgttttgctattatttgtaaaaccatttgtttttaattgagatcgttgcatgtatggtttaatataatcttaggcaagtagcagcaaagatgcttctctgtgacatgttcaattattaatttatatgaattgcgctttaatttgttgaaaaaaaaaaaaaaaa

SEQ ID NO: 3426 - protein, 190 aa, Glycine max
  misc_feature: Ceres CLONE ID no. 744690
  misc_feature: Ceres CDNA ID no. 36582107
  misc_feature (107)..(188): Pfam Name: Tryp_alpha_amyl PFAM Desc: Protease inhibitor/seed storage/LTP family
  misc_feature: Homolog of GI Number: 296443 NR Desc: ADR11
  misc_feature: Homolog of GI Number: 48375046 NR Desc: putative proline
  misc_feature: Homolog of GI Number: 1531756 NR Desc: proline
  misc_feature: Homolog of GI Number: 51535472 NR Desc: putative cell wall protein
  misc_feature: Homolog of GI Number: 17154773 NR Desc: extensin
  misc_feature: Homolog of GI Number: 19310693 NR Desc: putative proline
  misc_feature: Homolog of GI Number: 3818416 NR Desc: proline
  misc_feature: Homolog of GI Number: 1155068 NR Desc: cell wall
  misc_feature: Homolog of GI Number: 4206763 NR Desc: cell wall
  misc_feature: Homolog of GI Number: 2578444 NR Desc: ptxA
MESSKIYAYLFLCMIFLSSATPILGCGYCGKPPKKHKPGKTPKTPKTPVVKPPVTIPPINVPPVVLPPIVKPPGILPPIPIINPPTTPGKGGNTPCPPPKSPAQATCPIDTLKLGACVDLLGGLVHIGLGDPVANQCCPVLQGLVEVEAAVCLCTTLKLKLLNLNIYVPLALQLLVTCGKSPPPGYTCSL

SEQ ID NO: 3427 - DNA, 972 bp, Glycine max
  misc_feature: Ceres CLONE ID no. 744716
  misc_feature: Ceres CDNA ID no. 40351289
  CDS (80)..(646): REFERENCED BY SEQ ID NO: 3428
ccaatttacgatcacaatctcaaacacctcaacttcatttctctgctccaaagtctcaatcttttatccaaaaactcaaatgggcatggccacaatcacaatgggaggaaaccacaattcctccatcactccacgccactacaacacccacaaggtgttccttttctgcaactacattctcttgggtgcagcttctagctgcatcttcctcaccctctctctgcgcctcattccctctctctgcggcttcttcttcatccttcttcaggtctttacgattgcgggcgcggtctccgggtgcgccgccgtggggactaacaggtggtactctgcacacatggtggccactgttctaacggctatctttcagggttctgtttcggtgttggtgtttacgaggaccggcgattttctgggtcaattgaagtcttatgttagggaggaggatggtgctgtgattctcaaattggctggtggactcaccattttgatcttttgcttggagtgggtggttttgacacttgcatttttcttgaagtattatgcctgtgttgaggggaatagtggggctgttgtgcctgtgaggagtgggaaggtgcagcaggatgaggacttgaaggattggccttggccttttcaagtttgattcttgtgatgacaagaagaaacacaagaataacaatgacatgttccttttgaagttgttgcagctgttttgatgataatctttcaaatatgttgattcgttggagaattggatgcttttttctcctgatagagatatatgtgtgtgtgtttgtgttggctatcatcattatgtaattagttgtgtgtgtgtagttattctttagattcatcttatttgttgttggattattattacttcacatatcatctccttcttgttaagcaagaagttcagttactatataatggtatcagtttggagtaactttaaaaaaaaaaaaaaaa

SEQ ID NO: 3428 - protein, 181 aa, Glycine max
  misc_feature: Ceres CLONE ID no. 744716
  misc_feature: Ceres CDNA ID no. 40351289
MGGNHNSSITPRHYNTHKVFLFCNYILLGAASSCIFLTLSLRLIPSLCGFFFILLQVFTIAGAVSGCAAVGTNRWYSAHMVATVLTAIFQGSVSVLVFTRTGDFLGQLKSYVREEDGAVILKLAGGLTILIFCLEWVVLTLAFFLKYYACVEGNSGAVVPVRSGKVQQDEDLKDWPWPFQV

SEQ ID NO: 3429 - DNA, 738 bp, Glycine max
  misc_feature: Ceres CLONE ID no. 744783
  misc_feature: Ceres CDNA ID no. 25891028
  CDS (105)..(497): REFERENCED BY SEQ ID NO: 3430
acatagtgtgttaagcctcgccgactcggttgctatcagcgagtgagagtgagtgagtggttctcttgcagcaacaaggtttagtgacaccaaacagactggaaatgggtcgtggggtcagtgctggtggtggacagagttccttggattatctctttggcagtggggtacctgccagcagtgcaaatggtgctcgcactcaaaatgcaagtgctccttcaccaccggttgataagcaaagtccagcaccagcagcagcagcagcacctgcacctgcagcagcagcagcaccagcacctgcaccagcaccagcaccagcaccagctgataagcaaattccagctggaattcctggaagtctcaaaaacaattaccatcgcgctgatgggcaaaactgtggcaactttctcactgatcggccatctaccaaggttcatgctgccccgggtggtggatcttccttgcattacctctttggtggtcctccagggaactgattcatacctaccatgtgatgtatcatgtgtaaaatggatagtgttgcattgtgtttagaccagtggactttgtttcttgttcaattgaatctcttgacaatgttggtgtggcttgatggccaaactaagctgattcataggtttgttgttctgtgttattgtgtgggtttcgattaatgaaatttactgtgcgaatgagctaaagtggctcataaatgttctctcaaaaaaaaaaaaaaaa

SEQ ID NO: 3430 - protein, 130 aa, Glycine max
  misc_feature: Ceres CLONE ID no. 744783
  misc_feature: Ceres CDNA ID no. 25891028
  misc_feature: Homolog of GI Number: 2765837 NR Desc: NAP16kDa protein
  misc_feature: Homolog of GI Number: 21280823 NR Desc: putative nitrilase
  misc_feature: Homolog of GI Number: 28827480 NR Desc: putative nitrilase associated protein
  misc_feature: Homolog of GI Number: 21592782 NR Desc: nitrilase associated protein
  misc_feature: Homolog of GI Number: 21592628 NR Desc: putative nitrilase
  misc_feature: Homolog of GI Number: 7800652 NR Desc: PspA
  misc_feature: Homolog of GI Number: 10945166 NR Desc: TapA protein
  misc_feature: Homolog of GI Number: 992946 NR Desc: p57KIP2
  misc_feature: Homolog of GI Number: 38099663 NR Desc: predicted protein
  misc_feature: Homolog of GI Number: 4557441 NR Desc: cyclin
MGRGVSAGGGQSSLDYLFGSGVPASSANGARTQNASAPSPPVDKQSPAPAAAAAPAPAAAAAPAPAPAPAPAPADKQIPAGIPGSLKNNYHRADGQNCGNFLTDRPSTKVHAAPGGGSSLHYLFGGPPGN

SEQ ID NO: 3431 - DNA, 565 bp, Glycine max
  misc_feature: Ceres CLONE ID no. 744803
  misc_feature: Ceres CDNA ID no. 40351290
  CDS (34)..(351): REFERENCED BY SEQ ID NO: 3432
atatactgtgcttccgccttgatctccgcagcaatggtgaacgttccgaagacaaagaagacctactgcaagagcaaggagtgcaggaagcacacgctccacaaggtcacccaatacaagaagggcaaggacagcatcgccgctcagggaaaacgccgttatgaccgcaaacagtccggttacggtggccagactaagcctgttttccacaaaaaggccaaaaccaccaagaaaattgtgttgaggctccagtgtcagggatgcaagcatgtctcgcagcacgctatcaagaggtgcaagcattttgagatcggtggtgacaagaagggaaaaggaacctctctgttctagatggaatattagaatttgccatttcacacactctctctacctctctcagtttttattgtcatcttcggcttttgattttgcagaaatgttttgtgtttgaggatattagaatttgcaatttcgttttgtttaagcactgattatagtattaattactagtttctcttcctttccttcaagtgttgcaattttctaacgaaaaaaaaaaaaaaaa

SEQ ID NO: 3432 - protein, 105 aa, Glycine max; identical to SEQ ID NO: 3358
  misc_feature: Ceres CLONE ID no. 744803
  misc_feature: Ceres CDNA ID no. 40351290
  misc_feature (19)..(95): Pfam Name: Ribosomal_L44 PFAM Desc: Ribosomal protein L44

SEQ ID NO: 3433 - DNA, 541 bp, Glycine max
  misc_feature: Ceres CLONE ID no. 744818
  misc_feature: Ceres CDNA ID no. 40351291
  CDS (78)..(317): REFERENCED BY SEQ ID NO: 3434
gtgattgtttgttgttgtaactcgttcttcttcttttgttgttctgtgtttgtgtttgttttttctctcacctgaaaatgtcttgctgcggtggtaactgtggttgcggaagctcctgcaagtgcggcaacggctgcggaggctgcaagatgtacccagacttgagctacactgagtcaaccaccaccgagaccttggtcatgggagtggcacctgttaaggctcaatttgagggtgctgaaatgggtgtgcccgctgagaacgatggctgcaaatgtggaccaaactgctcctgcaacccctgcacttgcaagtgaggtgttgggagagcaagcttcaagcagagatagcccttaattaggaataatgataaactattaatgtgtagctaaaaacttatgtattatgtctgtgatggttttcgtgcactctggtgttttgtgttaaacaaacatccttagaataaagtggtcatgtcttgcctttcagcaagttcaagtgttttggacttgtgatgggtgtgttaaaaaaaaaaaaaaaa

SEQ ID NO: 3434 - protein, 79 aa, Glycine max
  misc_feature: Ceres CLONE ID no. 744818
  misc_feature: Ceres CDNA ID no. 40351291
  misc_feature (1)..(78): Pfam Name: Metallothio_2 PFAM Desc: Metallothionein
MSCCGGNCGCGSSCKCGNGCGGCKMYPDLSYTESTTTETLVMGVAPVKAQFEGAEMGVPAENDGCKCGPNCSCNPCTCK

SEQ ID NO: 3435 - DNA, 693 bp, Glycine max
  misc_feature: Ceres CLONE ID no. 744819
  misc_feature: Ceres CDNA ID no. 40351292
  CDS (79)..(558): REFERENCED BY SEQ ID NO: 3436
gagagaagttattagggtttttgagtgcggcggtccaaacactcttctctgcagcttttgcctacaactcccttcaccatggctgaacaaaccgagaaagcttttctgaagcaaccaaaagtgtttctcagcacaaagaagactgggaagggaaagagacctggaaaaggtgggaaccgcttttggaagtccattgggcttggatttaagactcccagggaagccatcgaaggaacctatattgacaagaagtgccccttcactggcaatgtttccatccgtggccgtatcttggctggaacatgtcacagtgctaagatgaacaggactattattgttagaaggaattatctccattttatcaagaagtaccagaggtacgagaagaggcactcaaatattcctgctcatatatcacctgccttccgtgtgaaggaaggggatcacgttattattggtcaatgcaggcctctctctaagacagtgaggttcaatgtcttgaaagtgatcccagctggatcttctagtggtgcaaagaaggcttttactggaatgtgagcttcgatttccagtttttattgaagaaaaatgttaccttgttatttagtagatctgatttcttttctggaaggtgacatattaaaaccttatcaattttggattttctttgaggtttcaaaaaaaaaaaaaaaa

SEQ ID NO: 3436 - protein, 159 aa, Glycine max
  misc_feature: Ceres CLONE ID no. 744819
  misc_feature: Ceres CDNA ID no. 40351292
  misc_feature (74)..(143): Pfam Name: Ribosomal_S17 PFAM Desc: Ribosomal protein S17
MAEQTEKAFLKQPKVFLSTKKTGKGKRPGKGGNRFWKSIGLGFKTPREAIEGTYIDKKCPFTGNVSIRGRILAGTCHSAKMNRTIIVRRNYLHFIKKYQRYEKRHSNIPAHISPAFRVKEGDHVIIGQCRPLSKTVRFNVLKVIPAGSSSGAKKAFTGM

SEQ ID NO: 3437 - DNA, 461 bp, Glycine max
  misc_feature: Ceres CLONE ID no. 744835
  misc_feature: Ceres CDNA ID no. 40351293
  CDS (1)..(276): REFERENCED BY SEQ ID NO: 3438
catattgaaaaggcgcccaagcaagtttgttctttcgccgccgtcgctcacaactcgcaaaccacaatgcctaagcagatccacgagattaaggatttccttctgacggcacggaggaaggatgcgaggtcggtgaaaatcaagaggagcagggatgtcgttaagtttaaggttcgatgctccaagtatttgtacacgctttgtgtctttgatcctgagaaagccgataaattgaagcaatctcttcctcccggtttgagtgttcaagacctgtagaggtgctgagtgcggcagcgtgcgtttgtttatctttttgttgcctcatgctctagattttgtggcttgcttttatattttggtaattgttatgaggatatgcttgttttttatttgctatgaaaatgcgaaagttttattttgagcacaatttaattgaattgcccacaaaaaaaaaaaaaaaa

SEQ ID NO: 3438 - protein, 69 aa, Glycine max; identical to SEQ ID NO: 2786
  misc_feature: Ceres CLONE ID no. 744835
  misc_feature: Ceres CDNA ID no. 40351293
  misc_feature (2)..(69): Pfam Name: Ribosomal_L38e PFAM Desc: Ribosomal L38e protein family

SEQ ID NO: 3439 - DNA, 543 bp, Glycine max
  misc_feature: Ceres CLONE ID no. 744876
  misc_feature: Ceres CDNA ID no. 40351294
  CDS (123)..(296): REFERENCED BY SEQ ID NO: 3440
aaaaaggcagtagtagtgttactttccaatttgaattgttccattttcatttctttcgcaaaagttgcaactacttcctcagaaaaaaagtttctaagttaaggaaatccagagagacaaaaatggccggtgacggtgcagctacatgcatagacatcctccttgccatcattctccctcctcttggagtctttctcaaatatggctgccaggtggagttctggatttgtttggtgctgaccctttttggttatatacctggaattatctatgctgtctatgctatcaccaagtgatcaccctttaactttgtgtggacaataaacaaatgtcatgggcgtttctgtctttcaactcagatattagtgtttctttaatatatcgccaatgttgtcatattcttatgttctgtttttaaaaccccttttgttctatcttaagcgagagtggagtgtgtagcttactagcttgtgtatgtagtctctagatttggtaattgatttgaaatacacaatttcatttgtaccaaaaaaaaaaaaaaaa

SEQ ID NO: 3440 - protein, 57 aa, Glycine max
  misc_feature: Ceres CLONE ID no. 744876
  misc_feature: Ceres CDNA ID no. 40351294
  misc_feature (7)..(57): Pfam Name: UPF0057 PFAM Desc: Uncharacterized protein family UPF0057
MAGDGAATCIDILLAIILPPLGVFLKYGCQVEFWICLVLTLFGYIPGIIYAVYAITK

SEQ ID NO: 3441 - DNA, 557 bp, Glycine max
  misc_feature: Ceres CLONE ID no. 744985
  misc_feature: Ceres CDNA ID no. 40351295
  CDS (61)..(420): REFERENCED BY SEQ ID NO: 3442
ataaacttcaagcgagcaaacaaacaactagcaagggaagaaagaaactacagaaaagaaatggcttccacttctgcagtttcaatggctatgccagtaacttatgctagccagaagagggtggtgcctagctcggatgcattcttcaagccactgcctctacggtcttccaaggcagtgacagcatcaaaactcaatggaaggtttcaagtgagggcctccatgaaggagaaagttgtgacggggctcaccgcagctgcattgacagcttcaatgatggttcctgatgtggctgaggctgccgttacaccttctctcaagaacttcttgctcagcatcgcggcaggtggagttgttgttgttgccattattggtgctgtgatcggtgtttccaatttcgatcccgtcaagcgtagctgatggagttctgaggcactgtgttttatttatttttttgttacctcttatcatgatatgtatctttaatgtaatgttcttcagaaatgaagtgaaccctctgatgtgtgtactaaaaaaaaagaaaaaaaaaaaaaaaa

SEQ ID NO: 3442 - protein, 119 aa, Glycine max; identical to SEQ ID NO: 1716
  misc_feature: Ceres CLONE ID no. 744985
  misc_feature: Ceres CDNA ID no. 40351295
  misc_feature (82)..(119): Pfam Name: PsbX PFAM Desc: Photosystem II reaction centre X protein

SEQ ID NO: 3443 - DNA, 647 bp, Glycine max
  misc_feature: Ceres CLONE ID no. 745003
  misc_feature: Ceres CDNA ID no. 40351296
  CDS (2)..(325): REFERENCED BY SEQ ID NO: 3444
actcactgccccgaaccaaactcaaaaccctaacaaaccaaaaacagttgctgccatattcaccaatggctttctccaaggcaatgtttctcgccgccgtaatgtcggtgctcgtcgccgtcatctccgccgccgaagctccagctccgagccctacgtctcccgccgccgccgtttcgccgtccttcgtcgccggtgttctcgccgccggagccgctcttgcgttcggatctgctctgcggatctgaacgtagctcatggattttctcgtttacatgcgtggatttttagtagaagcggagatttgagcagcattagtatataactctctctctctctctccctccctctctctctatatatattgatattgctatgtagagattattactacatatgttgatttctggatctatattgcgtttatggtttgagtagtattattgtgagatcattgtttctagtacataattgatttctttatattcagattcgtgcttagtttttgttttagcttgatttctttgttttactttttgctttctttttctaaaattatcttgtggagtttgctgtgaatgctgcttaaatttttgtcgcgatgaatttggtttgacgtagattggaaccgaaaaaaaaaaaaaaaa

SEQ ID NO: 3444 - protein, 60 aa, Glycine max
  misc_feature: Ceres CLONE ID no. 745003
  misc_feature: Ceres CDNA ID no. 40351296
MAFSKAMFLAAVMSVLVAVISAAEAPAPSPTSPAAAVSPSFVAGVLAAGAALAFGSALRI

SEQ ID NO: 3445 - DNA, 1213 bp, Glycine max
  misc_feature: Ceres CLONE ID no. 745484
  misc_feature: Ceres CDNA ID no. 36706179
  CDS (163)..(915): REFERENCED BY SEQ ID NO: 3446
atgatgtgttctagcaattttcctgtgtcgtatcatcaaagcgacggattggtgggggtggcgccttcggccattggcacgtacacctcctaaaaacgacaactcgtttccacggcttggtattttagcaggcaaaacgcaaggacctgggcgagtggcgaaatggcagttccagcagagaggaaccacaaccatttctcagttttgatcgtactctttcttttcctcgtccacaatgctctctgcattaggttcccggatcggatcgcccaacccgccctcgacccgctcgaccaacaccgcctgcgggtcgccgtcttcgccctcggaagcttctggagatccgaagcggtgttcggttgtttaccgggcgttgttcgcaccaccgtcggctacgccggcggatccaagtccaaccccgaataccgaagcctcggtgaccacgccgagtccgttaaggttgagtatgatccgcagctgattagctttagggaactcctggatgtcttttggtcaagtcacgatcctaggcaagtgtatggccaaggtcctgatgtgggtagtcagtacagatctattatttttgttaatggaaccgaagaatcaagaatggctgctgtcagcaaagaacaggaacaaaccctgtcaagaagcagcattgtgactacacaaattctgcaacttggaacattttaccctgcagagccagagcaccagaaatttgaactcaagcaaaataccatccttcttcagttaattgggaaccttccggcagaggagcttgagaggtctagcctggcaacgaaattgaatggatatgttgcagagctttgccctccaaatatccaaaagcaaattgatgccaagatcaacaatattattaaaaagggttggccaattttgagagatttgtagttggcctcgtgggaagttactcagattgtcaacttgtcatttttcaactaacctgcttcgtttcagtacctataggttttattcaatagcttgtatcagttgccgggcttgatttaacgattgtgttgtaattattgtacttgtaaagtcttgagtctccctgtcatccttcaaaaaagaaaccctttgattttttttatttattttttgttttcattcatttaccttttttatttatgaggacaacagagaacctttattattattttattactattattcaaaaaaaaaaaaaaaa

SEQ ID NO: 3446 - protein, 250 aa, Glycine max
  misc_feature: Ceres CLONE ID no. 745484
  misc_feature: Ceres CDNA ID no. 36706179
  misc_feature (49)..(201): Pfam Name: PMSR PFAM Desc: Peptide methionine sulfoxide reductase
  misc_feature: Homolog of GI Number: 4406815 NR Desc: putative peptide methionine sulfoxide reductase
  misc_feature: Homolog of GI Number: 55296461 NR Desc: putative methionine sulfoxide reductase
  misc_feature: Homolog of GI Number: 42570819 NR Desc: peptide methionine sulfoxide reductase family protein
  misc_feature: Homolog of GI Number: 46409088 NR Desc: RH74182p
  misc_feature: Homolog of GI Number: 24664627 NR Desc: CG7266
  misc_feature: Homolog of GI Number: 7937 NR Desc: Eip28/29
  misc_feature: Homolog of GI Number: 84941 NR Desc: ecdysone
  misc_feature: Homolog of GI Number: 45553131 NR Desc: CG7266
  misc_feature: Homolog of GI Number: 33089114 NR Desc: methionine sulfoxide reductase
  misc_feature: Homolog of GI Number: 55234261 NR Desc: ENSANGP00000011685
MAVPAERNHNHFSVLIVLFLFLVHNALCIRFPDRIAQPALDPLDQHRLRVAVFALGSFWRSEAVFGCLPGVVRTTVGYAGGSKSNPEYRSLGDHAESVKVEYDPQLISFRELLDVFWSSHDPRQVYGQGPDVGSQYRSIIFVNGTEESRMAAVSKEQEQTLSRSSIVTTQILQLGTFYPAEPEHQKFELKQNTILLQLIGNLPAEELERSSLATKLNGYVAELCPPNIQKQIDAKINNIIKKGWPILRDL

SEQ ID NO: 3447 - DNA, 689 bp, Glycine max
  misc_feature: Ceres CLONE ID no. 745621
  misc_feature: Ceres CDNA ID no. 40351297
  CDS (9)..(584): REFERENCED BY SEQ ID NO: 3448
atgccacaatggttgtccctcttaggcactttcttgttttctctctcaccctcatatccatcatcttccacacccatggagcgttctctgagcaatcaataatcaagttacccacagaccaaccaagggtagagaaactgacccacttgcattttttctaccacgacatcttagagggcaagaacatcacggtggtgaaaatcatcgagccatcagcgagcgaggttcgtgaagcaactgggtttggaaccactttcatgatggacaatgttttgaccgagggtccagagctgagctcgaagcacgttgggagggctcaggggctgtttggcttggcctctttggaggaccgtggaatggtgatgctcattaacttggctttcagtgagggtgagtatgctggcagcactctcagcatgcttgggaggaaccctgttcaggacactgttagggaaatgcccattgttggaggcacgggcgtgttcaggtttgccaagggctatgccattgccaagagtctttgggaaatttctgacaatgagcattttgtggtggagtatcatgtcactgtttctcatccttagatcttatatgtcttttgttaagagtaataaattttaggcttaaatatcttcaagatggtatgataaatgaataaattttattgagttttaaaaaaaaaaaaaaaa

SEQ ID NO: 3448 - protein, 191 aa, Glycine max
  misc_feature: Ceres CLONE ID no. 745621
  misc_feature: Ceres CDNA ID no. 40351297
  misc_feature (17)..(190): Pfam Name: Dirigent PFAM Desc: Dirigent
MVVPLRHFLVFSLTLISIIFHTHGAFSEQSIIKLPTDQPRVEKLTHLHFFYHDILEGKNITVVKIIEPSASEVREATGFGTTFMMDNVLTEGPELSSKHVGRAQGLFGLASLEDRGMVMLINLAFSEGEYAGSTLSMLGRNPVQDTVREMPIVGGTGVFRFAKGYAIAKSLWEISDNEHFVVEYHVTVSHP

SEQ ID NO: 3449 - DNA, 1018 bp, Glycine max
  misc_feature: Ceres CLONE ID no. 745632
  misc_feature: Ceres CDNA ID no. 40351298
  CDS (31)..(879): REFERENCED BY SEQ ID NO: 3450
attatatttgagttcaaacaaatcaaagccatggccacctccaacttctctattgttctctccgtctccctagccttctttttggtgctacttaccaaggcacactcgaccgataccgtttctttcaccttcaacaagttcaacccagtccaaccaaacattatgctccaaaaagatgctagtatttcatcctctggggtgttacaactcaccaaagttggcagcaacggcgtgcccacctcgggatctctcggtcgtgccctttacgctgccccaatccagatttgggacagcgaaaccggcaaagtagccagctgggctacatcctttaaattcaacattttcgcacccaacaaatcaaactcagctgacgggcttgccttcttcttggcacccgtcgggtctcagccccaatccgacgatggatttcttggtcttttcaacagtcccttaaaggacaagtctctccaaaccgtggcgattgagttcgatactttctcgaacaaaaaatgggatcctgcaaaccgacacatcggcattgacgtgaactcgatcaagtccgtcaaaacggcatcgtgggggttgtccaatggacaagtggcggagattctcgttacctataatgccgccacgagcctcttggttgcttctctgatccacccttcaaagaaaacaagttacatcctctctgacacagtgaacttgaagagtaatcttcccgaatgggtgagcgttgggttctctgccaccaccgggttgcatgaaggctccgttgaaacccatgatgtgatttcttggtcttttgcttccaagttgtcagatggtagcagcaatgatgctttggatcttccaagctttgtgctcaatgaggccatctaacttcaaacatcgtagttaaatgtgacaaaagaaaaatgtaataacgccctagcttgctagaggctggtgctactaataatgtttgtcacaaaaattatataataataggtgttttactccgccaaaaaaaaaaaaaaaa

SEQ ID NO: 3450 - protein, 282 aa, Glycine max
  misc_feature: Ceres CLONE ID no. 745632
  misc_feature: Ceres CDNA ID no. 40351298
  misc_feature (218)..(267): Pfam Name: Lectin_legA PFAM Desc: Legume lectins alpha domain
  misc_feature (27)..(211): Pfam Name: Lectin_legB PFAM Desc: Legume lectins beta domain
MATSNFSIVLSVSLAFFLVLLTKAHSTDTVSFTFNKFNPVQPNIMLQKDASISSSGVLQLTKVGSNGVPTSGSLGRALYAAPIQIWDSETGKVASWATSFKFNIFAPNKSNSADGLAFFLAPVGSQPQSDDGFLGLFNSPLKDKSLQTVAIEFDTFSNKKWDPANRHIGIDVNSIKSVKTASWGLSNGQVAEILVTYNAATSLLVASLIHPSKKTSYILSDTVNLKSNLPEWVSVGFSATTGLHEGSVETHDVISWSFASKLSDGSSNDALDLPSFVLNEAI

SEQ ID NO: 3451 - DNA, 1028 bp, Glycine max
  misc_feature: Ceres CLONE ID no. 745638
  misc_feature: Ceres CDNA ID no. 40351299
  CDS (55)..(720): REFERENCED BY SEQ ID NO: 3452
agttctactctccgctctaaattctctgtctctctctctctctctcgatcaatcatggctttgcccaatcagcaaaccgtcgattaccctagtttcaaactcgtcatcgtcggtgacggtggtacaggaaagacaacgttcgtgaaaaggcatcttaccggtgaatttgagaagaaatacgaaccgaccattggagtggaggttcacccattggatttcttcacaaactgtggaaagattcgcttctactgttgggatactgccggacaagagaagtttggtggcctcagggatggatattatatccatgggcaatgcgccattatcatgtttgatgttactgcccgactaacttacaaaaatgtccctacctggcatcgggatctttgccgggtctgtgagaacatcccaattgttctttgcggtaacaaggttgatgtgaagaacaggcaagtgaaggcaaagcaggttactttccacaggaagaagaatttacagtactatgagatttcagctaaaagcaactacaattttgagaagcctttcctgtatttggccagaaaacttgcaggtgatcctaacttgcactttgtggagtctccagcattggctccaccagaagttctaattgatttagctgcacagcaacaacatgaggccgagcttcttgcagctgctagtcagccccttcctgacgatgatgatgaatcttttgagtaaaattatgccttttgagtcgtgctactgcttatgctacagtatgtattttggggggtgtaatgttgacagttttggatgccggatttgagtgtcagaaatttaatcattttgctttaatcttaaaaaaatctcccaatagtttgacatatccttgtagccaagggctgtagtacgtgcttttgtgttatttggctctcttgaagagacagcggggctaggctgtgcccaagtgctattttgattctcgagtttggtgcgtccaaaaagaaatgatatgattatattggtttaaaaaaaaaaaaaaaaaa

SEQ ID NO: 3452 - protein, 221 aa, Glycine max
  misc_feature: Ceres CLONE ID no. 745638
  misc_feature: Ceres CDNA ID no. 40351299
  misc_feature (15)..(173): Pfam Name: Ras PFAM Desc: Ras family
MALPNQQTVDYPSFKLVIVGDGGTGKTTFVKRHLTGEFEKKYEPTIGVEVHPLDFFTNCGKIRFYCWDTAGQEKFGGLRDGYYIHGQCAIIMFDVTARLTYKNVPTWHRDLCRVCENIPIVLCGNKVDVKNRQVKAKQVTFHRKKNLQYYEISAKSNYNFEKPFLYLARKLAGDPNLHFVESPALAPPEVLIDLAAQQQHEAELLAAASQPLPDDDDESFE

SEQ ID NO: 3453 - DNA, 671 bp, Glycine max
  misc_feature: Ceres CLONE ID no. 745639
  misc_feature: Ceres CDNA ID no. 40351300
  CDS (39)..(542): REFERENCED BY SEQ ID NO: 3454
attccacacacaagaagactcctcaatcatccatagacatggccaccgtcacttctgcagcagtttctattccctcattcactggcctcaaggcaagcgcaggcaaagtgagtgccgccgcagttaaagtctcagctccccaagccacaaggttctgcggcatcaaggcttccctcaaagacgttggagtcgctgttgtggccactgctgcgagcgcagttctagctagcaacgccatggccattgaagtgttactgggcactgatgacgggtctctggttttctctcccaactctttctccgtggcccctggggaaaagatcgtgttcaagaacaacgcaggtttcccccacaacgttgtgttcgacgaggacgagattcctagcggcgtggatgcagggaaaatctccatgagcgaagaagaccttctcaatgcggctggtgagacttacagcgttactttggatgccaagggaacctacagtttctactgttcgcctcaccaaggagctggtatggtgggaaaagtcaccgttaattaattatatattgtctcctacgtctaagttctcatatgcttgttttcctagaagagcctaattcatctttcttgttagggcctatgggatgaatcaacaatataatgcctttgtgtaaaaaaaaaaaaaaaa

SEQ ID NO: 3454 - protein, 167 aa, Glycine max
  misc_feature: Ceres CLONE ID no. 745639
  misc_feature: Ceres CDNA ID no. 40351300
  misc_feature (69)..(167): Pfam Name: Copper PFAM Desc: Copper binding proteins
MATVTSAAVSIPSFTGLKASAGKVSAAAVKVSAPQATRFCGIKASLKDVGVAVVATAASAVLASNAMAIEVLLGTDDGSLVFSPNSFSVAPGEKIVFKNNAGFPHNVVFDEDEIPSGVDAGKISMSEEDLLNAAGETYSVTLDAKGTYSFYCSPHQGAGMVGKVTVN

SEQ ID NO: 3455 - DNA, 687 bp, Glycine max
  misc_feature: Ceres CLONE ID no. 745738
  misc_feature: Ceres CDNA ID no. 40351301
  CDS (1)..(564): REFERENCED BY SEQ ID NO: 3456
atctcatctgcaattacccaccatctcctccatatcctccggcgaaacccagccccagtccaccccaccgtccgcatccatggcgcccaaggccgagaagaagccggcggcgaagaagcccgcggaggaggagcccgcggcggagaaggccgagaagactcccgccgggaagaagcccaaggccgagaagcggctgccggcggggaagtcggccgccaaggagggcggcgacaagaagggcaagaagaaggccaagaagagcgtggagacgtacaagatctacatcttcaaggtgctgaagcaggtgcaccccgacatcggcatctcctccaaggccatgtccatcatgaactccttcatcaacgacatcttcgagaagctcgccggcgaggccgccaagctggcgcggtacaacaagaagccaaccatcacgtcccgggagatccagacctccgtccgcctcgtcctccccggcgagctcgccaagcacgccgtctccgagggcaccaaggctgtcaccaagttcacctcctcttaggctgttcgtcttcctgtgtctcgtagttagctgttcgggtgtgtttgtggccgtgttatcctgtaagaatcgcaccgcgatgtttctgtatctcgagaaatggtaatggtgcctgcctcaatgttcagtacgcaaaaaaaaaaaaaaaa

SEQ ID NO: 3456 - protein, 152 aa, Glycine max
  misc_feature: Ceres CLONE ID no. 745738
  misc_feature: Ceres CDNA ID no. 40351301
  misc_feature: No seed is being produced by the plant
  misc_feature: The plant flowers significantly late compared to wild-type.
  misc_feature: Useful for biocontainment applications
  misc_feature: Useful for making plants with modulated flowering time
  misc_feature (59)..(131): Pfam Name: Histone PFAM Desc: Core histone H2A/H2B/H3/H4
MAPKAEKKPAAKKPAEEEPAAEKAEKTPAGKKPKAEKRLPAGKSAAKEGGDKKGKKKAKKSVETYKIYIFKVLKQVHPDIGISSKAMSIMNSFINDIFEKLAGEAAKLARYNKKPTITSREIQTSVRLVLPGELAKHAVSEGTKAVTKFTSS

SEQ ID NO: 3457 - DNA, 1178 bp, Glycine max
  misc_feature: Ceres CLONE ID no. 745833
  misc_feature: Ceres CDNA ID no. 40351302
  CDS (134)..(883): REFERENCED BY SEQ ID NO: 3458
aacactagcgtgtttcgtcttcttcgtctttactcttttcttcaccgaagcgaaaaagaaaaggcttgacttgagagaaatagagcttcgaatcgaaactcagaattagaaaaaaacacaaatcacaatcacaatggcaaggtacgaccgagcaatcaccgttttctcccccgacggccacctcttccaggtcgagtatgccctcgaagccgtccgcaagggcaacgccgccgtcggcgtccgcggcaccgacaacgtcgtcctcggcgtcgagaagaaatccaccgccaagctccaagactccaggtcggtgaggaagattgtgaatctggacaaccacattgcgctggcatgcgcggggctgaaggccgacgcacgtgtgctcataaacagggcacgtgtggagtgccagagccacaggctcaccgtggaggatcccgtcacggttgagtacataacgcggtacattgctgggctccagcagaagtacacgcagagcggcggcgtgcgaccctttgggctttcgactctcattgtcgggtttgatccctacactggctcgccctccttgtaccagacggatccctctggcaccttctcggcgtggaaggcgaacgccaccgggaggaactcgaattcgattagggagttcctcgagaagaactataaggacacctctggccaggagactgtcaagttggctattcgcgcattgcttgaagttgtggagagcggaggcaagaacatagaagttgctgtgatgactaaggagcatggtctgcatcaactggaggaagctgaaattgatgccatcgttgctgagattgaagcagagaaagcagctgctgaggctgctaagaaagcccctcctaaggagacataattttctgttttgtgttacgcggggcattgttcttgctacgtgttggctgtactcactgaagctaaaattgatgccattgtgtctaaagattgaaacagagaaaacggctgccgaggctgcaaagaataccctttctaaggagacatgattttattttacttctgtttagctcgtgaattgttcttgctagatgttggcctaacttaaaacaactgctttattgtttttgggtactgtcatatagtgtttggtcaaattaattgcatgtcattattattcaaaaaaaaaaaaaaaa

SEQ ID NO: 3458 - protein, 249 aa, Glycine max
  misc_feature: Ceres CLONE ID no. 745833
  misc_feature: Ceres CDNA ID no. 40351302
  misc_feature (27)..(210): Pfam Name: Proteasome PFAM Desc: Proteasome A
MARYDRAITVFSPDGHLFQVEYALEAVRKGNAAVGVRGTDNVVLGVEKKSTAKLQDSRSVRKIVNLDNHIALACAGLKADARVLINRARVECQSHRLTVEDPVTVEYITRYIAGLQQKYTQSGGVRPFGLSTLIVGFDPYTGSPSLYQTDPSGTFSAWKANATGRNSNSIREFLEKNYKDTSGQETVKLAIRALLEVVESGGKNIEVAVMTKEHGLHQLEEAEIDAIVAEIEAEKAAAEAAKKAPPKET

SEQ ID NO: 3459 - DNA, 509 bp, Glycine max
  misc_feature: Ceres CLONE ID no. 745846
  misc_feature: Ceres CDNA ID no. 40351303
  CDS (155)..(313): REFERENCED BY SEQ ID NO: 3460
actcatacaatagagaccagcttttgcttctttgtgaacatggagatgaggaaatcatgtggcttcttcttgttgctcctcctccttgtctttgcttcccaggtggtggtgcagacggagggaagagtgtgtgagtcacaaagccacgggttccatggtttgtgtaatagagaccacaactgtgctttggtctgcaggaacgaaggtttctccggtggcaggtgcaaaggcttccgccgccgctgcttttgcaccaggatttgttgagatctcatcaaacactactcttgccatgcaaattaataaatcatagctaggccaaataaattgcatctactctttatccatttgggagctagctaccacaaccaactcatacttggtcattggattgcttccctttggcttctgcctttgcttatctctctacctctacgtcttgttcagggtttatgtttcgtaatgattaatgaatgctgtttaattaaaaaacaaaaaaaaaaaaaaaa

SEQ ID NO: 3460 - protein, 75 aa, Glycine max
  misc_feature: Ceres CLONE ID no. 745846
  misc_feature: Ceres CDNA ID no. 40351303
  misc_feature (48)..(72): Pfam Name: Defensin_2 PFAM Desc: Arthropod defensin
MEMRKSCGFFLLLLLLVFASQVVVQTEGRVCESQSHGFHGLCNRDHNCALVCRNEGFSGGRCKGFRRRCFCTRIC

SEQ ID NO: 3461 - DNA, 1523 bp, Glycine max
  misc_feature: Ceres CLONE ID no. 745862
  misc_feature: Ceres CDNA ID no. 25891061
  CDS (84)..(1160): REFERENCED BY SEQ ID NO: 3462
acttgttcactttcttccaacctctcaagtccaacctacccctttttcttctcccaccaacttcaccgtcttcttcctcgatcatgtctcacttcaagggcaagtaccatgatgagcttattgtcaatgctgcttacattggcactcctggaaagggtattcttgctgctgatgagtcaacagggacaattggcaagcgtttggccagcatcagtgtagagaatgttgaatccaacaggcgtgctcttagggagctgcttttcaccgctcccggtgctcttaaatatctcagtggtgtcatcctctttgaggaaactctctaccagagcacagctgcaggcaagccctttgtggaagtcttgaaggaggctggtgttcttcctggcatcaaggttgacaagggcacagttgagcttgctggcactaatggagaaaccaccactcagggtctagatggccttggtcagcgttgcgccaagtactatgaagccggtgcacgttttgccaagtggcgtgctgtgctgaagattggtcccaacgagccatctgagctggctatccatgagaatgcctatggcttggccagatacgctgtcatatgccaggagaatggcctggttcccattgttgagcctgagatccttgttgatggatctcatgacattcacaagtgtgctgccgtcaccgagcgtgtccttgcagcatgctacaaggctttgaatgatcaccacgtccttcttgagggtaccctattgaagccaaacatggtcacccccggatccaattctgctaaggtttcccctcaggtggttgcggagcacactgttagagcccttcagagaaccgtgcctgctgcagttcctgctatcgttttcttgtctggtgggcagagtgaggaggaggcatccgttaacctcaatgccattaaccaggtcaatggaaagaagccatggtcactctctttctcctttggaagggcacttcaacagagcacccttaaggcatggagtggaaaagaggagaatgtgaagaaggctcaggaagcccttttggtaagagccaaggctaactcagaggcaactctgggaacctacaagggtaactcaaagcttgctgatggtgcctcagagagcctccatgttgaggactacaagtactgatcaatctaagtgcgggtaggaatcggtattttatgggtacaaccgaattttcttgttaatgagtattgtgcttcgactcttcccagaataataatcgtttggaattttgctttttgtttttcctagtgttccttcatatcaattttagtaattcggtgtattggtcaaacctgtgcaaacaggggaggggatgtaactttgttttcttgatagacaccaccaccttgctgttaacgaggctttgtgtttattttgcaattatctttctttgtgttttcatatttatatgtatgtgatattttctctaaattatttgttacaaaattttagataaacgttgctgataagtttcctaaaaaaaaa

SEQ ID NO: 3462 - protein, 358 aa, Glycine max
  misc_feature: Ceres CLONE ID no. 745862
  misc_feature: Ceres CDNA ID no. 25891061
  misc_feature: null
  misc_feature: Useful for making plants with modulated phosphate use efficiency
  misc_feature (11)..(358): Pfam Name: Glycolytic PFAM Desc: Fructose
  misc_feature: Homolog of GI Number: 10645188 NR Desc: cytosolic aldolase
  misc_feature: Homolog of GI Number: 3021338 NR Desc: cytosolic fructose
  misc_feature: Homolog of GI Number: 21592946 NR Desc: fructose bisphosphate aldolase
  misc_feature: Homolog of GI Number: 927505 NR Desc: fructose
  misc_feature: Homolog of GI Number: 10800924 NR Desc: fructose
  misc_feature: Homolog of GI Number: 18414312 NR Desc: fructose
  misc_feature: Homolog of GI Number: 21553388 NR Desc: fructose
  misc_feature: Homolog of GI Number: 20260022 NR Desc: fructose
  misc_feature: Homolog of GI Number: 7340654 NR Desc: fructose
  misc_feature: Homolog of GI Number: 17104659 NR Desc: putative fructose bisphosphate aldolase
  misc_feature: Useful for making ornamental plants with modified leaves
  misc_feature: Useful for making plants with increased biomass
  misc_feature: Useful for sterility
  misc_feature: Useful for sterility
MSHFKGKYHDELIVNAAYIGTPGKGILAADESTGTIGKRLASISVENVESNRRALRELLFTAPGALKYLSGVILFEETLYQSTAAGKPFVEVLKEAGVLPGIKVDKGTVELAGTNGETTTQGLDGLGQRCAKYYEAGARFAKWRAVLKIGPNEPSELAIHENAYGLARYAVICQENGLVPIVEPEILVDGSHDIHKCAAVTERVLAACYKALNDHHVLLEGTLLKPNMVTPGSNSAKVSPQVVAEHTVRALQRTVPAAVPAIVFLSGGQSEEEASVNLNAINQVNGKKPWSLSFSFGRALQQSTLKAWSGKEENVKKAQEALLVRAKANSEATLGTYKGNSKLADGASESLHVEDYKY

SEQ ID NO: 3463 - DNA, 704 bp, Glycine max
  misc_feature: Ceres CLONE ID no. 746049
  misc_feature: Ceres CDNA ID no. 40351304
  CDS (70)..(495): REFERENCED BY SEQ ID NO: 3464
gctgtatacctctgttctctctccccctccccgattcgttttgcccctttcgttgccctaatttcaaccatgcctcgccgtagctccggtggaagatctgcccgtcctgctcctcgtgcagcacctcgtcctgctccagttcaccatgctcctcctccagcccctgctcagagcggtggcggatctatgcttggtggcattggttcaaccatagctcaaggtatggcttttggcactggaagtgcagtggcacacagggctgtggatgctgtcatgggtcctcgtaccattcaacatgaagcagtagtcacggaggctgctgctgctgcccctgcacccactgcaaatacttttggtggcgatgcatgcaatgttcatacaaaggcattccaggattgcctgaacagctatggcagtgaccttagcaagtgccagttttacatggatatgcttgcagaatgcaggaagaactctggagcctcgttgagtgtgtaactgctacatttgtctgtttgggagtttgcatcagtgccctgtgtctcctatggttagaactgttaatgtggctaggaattgcattttaataaaataccatttgtccgatgatgcatacaaactgatacaaaattagtttcaaaattgtaactttattatttgatacttataaattggttacgtatttggtctgaaaaaaaaaaaaaaaa

SEQ ID NO: 3464 - protein, 141 aa, Glycine max
  misc_feature: Ceres CLONE ID no. 746049
  misc_feature: Ceres CDNA ID no. 40351304
  misc_feature (91)..(134): Pfam Name: CHCH PFAM Desc: CHCH domain
MPRRSSGGRSARPAPRAAPRPAPVHHAPPPAPAQSGGGSMLGGIGSTIAQGMAFGTGSAVAHRAVDAVMGPRTIQHEAVVTEAAAAAPAPTANTFGGDACNVHTKAFQDCLNSYGSDLSKCQFYMDMLAECRKNSGASLSV

SEQ ID NO: 3465 - DNA, 631 bp, Glycine max
  misc_feature: Ceres CLONE ID no. 746052
  misc_feature: Ceres CDNA ID no. 36706266
  CDS (68)..(496): REFERENCED BY SEQ ID NO: 3466
agggttttgcgctgttgttgctgctcatcctccgtaacctccgagctctgcaccgaagaacgaagccatggggaagacacatggaatgggatctgctcgcaagctcaagtcccaccgcaggaggcaaaggtgggctgacaagtcatacaagaaatcacatcttggaaatgaatggaagaaaccttttgctggttcatcccatgccaagggaattgtccttgaaaagataggtattgaggctaagcagcccaactctgccattcgtaagtgtgccagggttcaacttatcaagaatgggaagaagattgccgcttttgtccctaatgacggttgcttgaactacattgaagagaatgacgaagtcttgattgctggatttggacgaaaaggtcatgctgtgggagatattcctggtgtcaggtttaaggtcgtgaaggtctctggtgtctctcttttggctctcttcaaggagaagaaggagaagccaaggtcttaaatttgtggagtacttgtgtttgttttcaatagtttctctcaagtattatgaattttgtttttaggtgaacgggttttatgaacaattttctatcttttctagttattttactgaacttcaaaaaaaaaaaaaaaa

SEQ ID NO: 3466 - protein, 142 aa, Glycine max
  misc_feature: Ceres CLONE ID no. 746052
  misc_feature: Ceres CDNA ID no. 36706266
  misc_feature (9)..(141): Pfam Name: Ribosomal_S12 PFAM Desc: Ribosomal protein S12
  misc_feature: Homolog of GI Number: 62287478 NR Desc: 40S ribosomal protein S23
  misc_feature: Homolog of GI Number: 1362041 NR Desc: ribosomal protein S23.e
  misc_feature: Homolog of GI Number: 50919443 NR Desc: 40S ribosomal protein S23
  misc_feature: Homolog of GI Number: 21536723 NR Desc: putative 40S ribosomal protein S23
  misc_feature: Homolog of GI Number: 6682246 NR Desc: putative 40S ribosomal protein S23
  misc_feature: Homolog of GI Number: 11121260 NR Desc: 40S ribosomal protein S23
  misc_feature: Homolog of GI Number: 30025641 NR Desc: 40S ribosomal protein S23
  misc_feature: Homolog of GI Number: 58395907 NR Desc: ENSANGP00000012229
  misc_feature: Homolog of GI Number: 69608480 NR Desc: ribosomal protein S23e
MGKTHGMGSARKLKSHRRRQRWADKSYKKSHLGNEWKKPFAGSSHAKGIVLEKIGIEAKQPNSAIRKCARVQLIKNGKKIAAFVPNDGCLNYIEENDEVLIAGFGRKGHAVGDIPGVRFKVVKVSGVSLLALFKEKKEKPRS

SEQ ID NO: 3467 - DNA, 538 bp, Glycine max
  misc_feature: Ceres CLONE ID no. 746059
  misc_feature: Ceres CDNA ID no. 36581846
  CDS (46)..(333): REFERENCED BY SEQ ID NO: 3468
atagatagctccttcaattagggtttttgtgatctgcaagctacgatgggtaagggaacggggagtttcggtaagagaaggaacaagacccacaccctctgtgtgaggtgtggccgccgcagtttccacctccagaagagtcgttgcgccgcgtgcgctttccccgctgcgcgcaccaggaaatataactggagcgtgaaggccattaggagaaagaccaccggaactggaaggatgaggtacttgcgtaacgtgccccgtagatttaagagtggcttcagagacggtaccgaagctgcacccaggaagagaggagctgctgcctctacctaagctttgaataatagcaatttttgctgggtcagtgaattatataggatttaatgtttctatgttgatgccgagctctttggaacacgtttctttctgtcgttttaatttcatttaatatgtagtggctttgtatttcgacgtgaggattgcaaggaatttttgttttttcaacgagggtttttgacatccaaaaaaaaaaaaaaaa

SEQ ID NO: 3468 - protein, 95 aa, Glycine max
  misc_feature: Ceres CLONE ID no. 746059
  misc_feature: Ceres CDNA ID no. 36581846
  misc_feature (2)..(55): Pfam Name: Ribosomal_L37e PFAM Desc: Ribosomal protein L37e
  misc_feature: Homolog of GI Number: 44662866 NR Desc: ribosomal protein L37
  misc_feature: Homolog of GI Number: 50915832 NR Desc: putative ribosomal protein L37
  misc_feature: Homolog of GI Number: 50904689 NR Desc: putative 60S ribosomal protein L37
  misc_feature: Homolog of GI Number: 21553481 NR Desc: putative ribosomal protein
  misc_feature: Homolog of GI Number: 21280805 NR Desc: putative 60S ribosomal protein L37
  misc_feature: Homolog of GI Number: 21537060 NR Desc: putative 60s ribosomal protein L37
  misc_feature: Homolog of GI Number: 24642107 NR Desc: CG9091
  misc_feature: Homolog of GI Number: 38048279 NR Desc: similar to Drosophila melanogaster CG9091
  misc_feature: Homolog of GI Number: 49256539 NR Desc: MGC82973 protein
  misc_feature: Homolog of GI Number: 62548130 NR Desc: ribosomal protein L37
MGKGTGSFGKRRNKTHTLCVRCGRRSFHLQKSRCAACAFPAARTRKYNWSVKAIRRKTTGTGRMRYLRNVPRRFKSGFRDGTEAAPRKRGAAAST

SEQ ID NO: 3469 - DNA, 770 bp, Glycine max
  misc_feature: Ceres CLONE ID no. 746087
  misc_feature: Ceres CDNA ID no. 40351305
  CDS (3)..(611): REFERENCED BY SEQ ID NO: 3470
atatcgcgtatagtgtggtagcagcagctgagcttgtttccgtcgccgcttcacccaccgtagcaaccatgatcattcccgagaagaaccgtaaagagatctgcaaatacctcttccaagagggagtttgctttgcgaagaaggacttcaatctggcaaagcacccagagattgatgtgccgaatctgcaggtgataaagctgatgcagagcttcaaatccagagagtatgtgagggagacatttgcgtggatgcactattactggttcctcaccaacgatggaattgagttcctcaggacatacctcaaccttccttccgaaattgtccctgccactctcaagaagcaggccaagcccgcgggaagaccattcggtggcccacccggtgatcgccccaggggcccacctcgctttgacggagagaggagattcggtggtgaccgtgatggataccgtggaggtccacgcggacctggtggtgatttcggtgacaagggtggagctcctgctgactacaggccttcttttgggggtggtcctggtggaaggcctggttttggtcgtggttccggtggttatggtgcaccaactagttcaaacattccttaaatataatgttatgtgctctaatttttgcagttttggctgtcattggagttaatagtagttgttcccctctcccaatagttgctcatctgacaatttacttactcggttatttatgcaatgaatattttgaattgagtgtttctgctaaaaaaaaaaaaa

SEQ ID NO: 3470 - protein, 180 aa, Glycine max; identical to SEQ ID NO: 3198
  misc_feature: Ceres CLONE ID no. 746087
  misc_feature: Ceres CDNA ID no. 40351305
  misc_feature (3)..(98): Pfam Name: S10_plectin PFAM Desc: Plectin/S10 domain

SEQ ID NO: 3471 - DNA, 884 bp, Glycine max
  misc_feature: Ceres CLONE ID no. 746095
  misc_feature: Ceres CDNA ID no. 25891716
  CDS (95)..(718): REFERENCED BY SEQ ID NO: 3472
atggataattctctgcaaagtgtatcatatcatagcacaccattctatcgcttcacacagagtgagatatagaatcactgaagagcttccttcaatggcggtttcttctctctctgttactcctctttcgctctcaaattcttccccctctctatcttccaagccaaagtttccatctttgtgttttctctctggcaacaacaccacattgagggtaacatgcccaaaacctctgcactcatccactgttgttcatgttgctaccgaagcgttggattcatcccctgatcccttggacccacctccagaaacccttgatgatgactctgacgccaccacctttgaggttggtgacttggggactcctagcacttcagcaattagcattggtggcgatgcagatacaatggcaccaaagcagaagattagaatcaagcttaggtcttactgggtgcccttgatagaggattcctgcaagcagatattagatgctgcaaggactaccaacgcgaaaacaatgggacccgtgccattaccaaccaagaagcgaatctactgtgttcttaaatccccgcacgtacataaggatgcccggttccatttcgagatcagaactcaccagcgtctcattgatattctatatcctacagctcaaacaatagattctctgatgcaacttgatcttcctgctggtgttgatgtggaggtcaagctgtagagatatttgcttttcaggttgctaactgtcttgaatttgagtgaggttcaacttgttatcaatagccaaaatatattggcagatatcatgtgtttcactgcctaaacttgatttctaagaacaatgctaaaagtccttttgtttgcttccaaaaaaaaaaaaaaaa

SEQ ID NO: 3472 - protein, 207 aa, Glycine max
  misc_feature: Ceres CLONE ID no. 746095
  misc_feature: Ceres CDNA ID no. 25891716
  misc_feature (110)..(205): Pfam Name: Ribosomal_S10 PFAM Desc: Ribosomal protein S10p/S20e
  misc_feature: Homolog of GI Number: 7578929 NR Desc: plastid ribosomal protein S10 precursor
  misc_feature: Homolog of GI Number: 56693625 NR Desc: 30S ribosomal protein S10
  misc_feature: Homolog of GI Number: 1276752 NR Desc: 30S ribosomal protein S10
  misc_feature: Homolog of GI Number: 23125142 NR Desc: COG0051: Ribosomal protein S10
  misc_feature: Homolog of GI Number: 16330912 NR Desc: 30S ribosomal protein S10
  misc_feature: Homolog of GI Number: 406274 NR Desc: ribosomal protein S10
  misc_feature: Homolog of GI Number: 17231828 NR Desc: 30S ribosomal protein S10
  misc_feature: Homolog of GI Number: 45526836 NR Desc: COG0051: Ribosomal protein S10
  misc_feature: Homolog of GI Number: 67921719 NR Desc: Ribosomal protein S10
  misc_feature: Useful for making bigger plants
  misc_feature: Useful for making ornamental plants with modified flowers
  misc_feature: Useful for making plants with altered leaf shape eg curled leaves
  misc_feature: Useful for making plants with increased biomass
  misc_feature: Useful for making plants with increased biomass and foliage
  misc_feature: Useful for sterility
MAVSSLSVTPLSLSNSSPSLSSKPKFPSLCFLSGNNTTLRVTCPKPLHSSTVVHVATEALDSSPDPLDPPPETLDDDSDATTFEVGDLGTPSTSAISIGGDADTMAPKQKIRIKLRSYWVPLIEDSCKQILDAARTTNAKTMGPVPLPTKKRIYCVLKSPHVHKDARFHFEIRTHQRLIDILYPTAQTIDSLMQLDLPAGVDVEVKL

SEQ ID NO: 3473 - DNA, 680 bp, Glycine max
  misc_feature: Ceres CLONE ID no. 746148
  misc_feature: Ceres CDNA ID no. 36705551
  CDS (58)..(459): REFERENCED BY SEQ ID NO: 3474
atacaactactctattctaccacatctgagtctctgtccgaagccacttgagagaaaatggcggtgcctctgctctcaaagaagatcgtgaagaagagggtaaagaagttcaagaggcctcagagtgacaggaaaatttccgtcaagactaactggcgcagaccaaagggtatcgattctcgtgttaggagaaagttcaagggatgcactttgatgccaaacattggttatggttcagacaagaagacccgccactatctccctaatggtttcaagaaatttgttgttcacaatgtgaaggatttggaactgctcatgatgcacaacaggacttactgtgctgagattgcccacaatatatccacaagaaagagaaaagatatagtcgagagagccgcgcagcttgatgttgttgtgacaaacaaaacggccagattacgcagccaggaggatgaatagtctaaatgactgaaaaagtcacttatctgtagtgattctgtagttcaatatcgaagttgcagtttaattttaaattgaattttgcttcagtgtattttgcttcagtgtattttgcttattgggaaccaggtttttgatgtgcctctttcatgtaagtcgtatcttgatttgtttttaggaacaaaaatatacgaaaccttaatcgaaaaaaaaaaaaaaaa

SEQ ID NO: 3474 - protein, 133 aa, Glycine max; identical to SEQ ID NO: 2596
  misc_feature: Ceres CLONE ID no. 746148
  misc_feature: Ceres CDNA ID no. 36705551
  misc_feature (14)..(123): Pfam Name: Ribosomal_L32e PFAM Desc: Ribosomal protein L32
  misc_feature: Homolog of GI Number: 13899057 NR Desc: ribosomal protein L32
  misc_feature: Homolog of GI Number: 76057835 NR Desc: ribosomal L32
  misc_feature: Homolog of GI Number: 40287540 NR Desc: ly200 protein
  misc_feature: Homolog of GI Number: 71534997 NR Desc: ribosomal protein L32
  misc_feature: Homolog of GI Number: 77745481 NR Desc: ly200
  misc_feature: Homolog of GI Number: 50947773 NR Desc: putative ribosomal protein L32
  misc_feature: Homolog of GI Number: 23198054 NR Desc: ribosomal protein L32
  misc_feature: Homolog of GI Number: 21555143 NR Desc: ribosomal protein L32
  misc_feature: Homolog of GI Number: 10177580 NR Desc: ribosomal protein L32
  misc_feature: Homolog of GI Number: 50754636 NR Desc:  similar to 60S ribosomal protein L32

SEQ ID NO: 3475 - DNA, 709 bp, Glycine max
  misc_feature: Ceres CLONE ID no. 746150
  misc_feature: Ceres CDNA ID no. 25891168
  CDS (47)..(541): REFERENCED BY SEQ ID NO: 3476
aggtttttagggtttacactgaggaggcacaccttcaggagcagtcatggttctcaaaaccgagctgtgccgattcagcggtgccaagatctacccagggaaaggcatcagatttgttcgtggtgattctcaggttttcctgtttgctaactcaaaatgtaagaggtatttccacaacaggttgaagccgtcaaagctcacgtggactgcaatgtaccgaaagcagcataagaaggatattgctcaagaagctgtgaagaagagaagacgtgctaccaaaaaaccttactctaggtctattgttggtgctactttagaagttatccagaaaaagagaaccgagaagccagaagttcgagatgcagctagggaagcacagcttcgtgaaattaaggagaggatcaagaaaactaaggatgacaagaaagctaagaaagcagaagttgcagctaagtcccaaaaatcacaagggaaaggaagtatttcgaagggtgccatgcccaaaggtcccaaacttggtgggggaggtgggaaacgctgagcttttaagttttgttcttatttttggctacaatttaaatagagctgttttgaaacttctgtactgatattttatttgcatgattaatatgttttattaaaaaacccatgtttggagcttctgaagttaccttttattgaattaattctgccaaaaaaaaaaaaaaaa

SEQ ID NO: 3476 - protein, 164 aa, Glycine max; identical to SEQ ID NO: 2236
  misc_feature: Ceres CLONE ID no. 746150
  misc_feature: Ceres CDNA ID no. 25891168
  misc_feature (3)..(73): Pfam Name: Ribosomal_L24e PFAM Desc: Ribosomal protein L24e
  misc_feature: Homolog of GI Number: 2961300 NR Desc: ribosomal protein L24
  misc_feature: Homolog of GI Number: 10180025 NR Desc: 60S ribosomal protein L24
  misc_feature: Homolog of GI Number: 21553461 NR Desc: 60S ribosomal protein L24
  misc_feature: Homolog of GI Number: 1154859 NR Desc: L24 ribosomal protein
  misc_feature: Homolog of GI Number: 56785063 NR Desc: putative 60S ribosomal protein L24
  misc_feature: Homolog of GI Number: 50931851 NR Desc: putative 60S ribosomal protein L24
  misc_feature: Homolog of GI Number: 34900364 NR Desc: putative 60S ribosomal protein L24
  misc_feature: Homolog of GI Number: 25295112 NR Desc: 60S ribosomal protein L24
  misc_feature: Homolog of GI Number: 82400154 NR Desc: ribosomal protein L24
  misc_feature: Homolog of GI Number: 30102870 NR Desc: At3g53020

SEQ ID NO: 3477 - DNA, 758 bp, Glycine max
  misc_feature: Ceres CLONE ID no. 746169
  misc_feature: Ceres CDNA ID no. 40351306
  CDS (89)..(544): REFERENCED BY SEQ ID NO: 3478
acccaaacacggttctaacatatctcattccaatttcgcccctcgccggaaaaagaaaacctcaccgcaacgttcgattcagtttccgatggcgccagcgctgaacctcgccgccggaggaattccgctgagtttctcttcctccgtcgaccgctccgccagctttccacggcggtcctcggtccgcgccgtcgcggctgaggcggtggatacgcagcggccggcggcgagcctttacgaggtgctgcgagtcgagcgagacgcatcgccgacggagatcaagtcggcgtaccggagcctcgcgaagctctaccatcccgatgcggcggtgcagaggtcaccggagactgacggcgacggagacttcattcagctccgaaacgcgtacgagacgctgtcggatccgtcggcgagggcgatgtacgataggacgctggcggcggcgcacggcggaagacaccgccggttttctacttcgcttagtcggaaccactcgtcggcgttttacacgacgcgaaggtgggaaacggaccaatgctggtagaggaattagcaaagaaaaatgtggatttgttaacaagaaagaggaatcgccgaatcggtgaaaacgatgtcaaaaagagtgatgagaatcggaaattactaacttagatggatagagcaaacaaagagagagagagagagaggatgaagaagcaaattttgcttctctttttgtgagaatgtaaatgattttttttttaaaaaaaaaaaaaaaa

SEQ ID NO: 3478 - protein, 151 aa, Glycine max
  misc_feature: Ceres CLONE ID no. 746169
  misc_feature: Ceres CDNA ID no. 40351306
  misc_feature (48)..(116): Pfam Name: DnaJ PFAM Desc: DnaJ domain
MAPALNLAAGGIPLSFSSSVDRSASFPRRSSVRAVAAEAVDTQRPAASLYEVLRVERDASPTEIKSAYRSLAKLYHPDAAVQRSPETDGDGDFIQLRNAYETLSDPSARAMYDRTLAAAHGGRHRRFSTSLSRNHSSAFYTTRRWETDQCW

SEQ ID NO: 3479 - DNA, 700 bp, Glycine max
  misc_feature: Ceres CLONE ID no. 746180
  misc_feature: Ceres CDNA ID no. 36705552
  CDS (3)..(227): REFERENCED BY SEQ ID NO: 3480
atggcagtggtgcgggtgtgcctgcgcctcccttttcggcggacacttcgttcttctgcttcgtccaccgcatccctatgcttcaagctctctctctcatctcatataattatcgagatacatgttcgcacctgacccaccttccattttcagatcactgttacaacaatatctattctatggtctgttggagggtgcccgccacctgtttgacacaatggctgtgacggatatcgaaactcatttttataatactcgtcattaaggatgaatatgatgggacatacatcaggtcgtgaactaaagaacatgagagtcatttgccttaaagaaaaaaaggtgtgatcttgggtggtgtaggtaagtcattttgctgattgaagtctaaaaggtttcctacgtcaactatctatgccaaacagaagaaaaacaagcaagggacaagttgtccctagtttctgctttctccttggtggagcttttttttcccttctgctttagttctttctccttgggttgttcctaatggcagtggctctttcccgtttgtcgtgtttttcatagttctttgcaaataaatttgcatacatttgttggatttgtatatttataaatgatttagtatcgacagatatctggagtttggctttgaatttatcaaattaagatactttttgttatgataaaaaaaaaaaaaaaa

SEQ ID NO: 3480 - protein, 49 aa, Glycine max
  misc_feature: Ceres CLONE ID no. 746180
  misc_feature: Ceres CDNA ID no. 36705552
MLQALSLISYNYRDTCSHLTHLPFSDHCYNNIYSMVCWRVPATCLTQWL

SEQ ID NO: 3481 - DNA, 649 bp, Glycine max
  misc_feature: Ceres CLONE ID no. 746220
  misc_feature: Ceres CDNA ID no. 36705553
  CDS (67)..(336): REFERENCED BY SEQ ID NO: 3482
aatttccattaggcagagcaaagtaatcgcaaaatctagggtttgttcgttcgctcgttcgcaacaatggcgctgaggagattctacaacgagatcaaggggaagagggtgagcgaggtccctgagcacgtgaagccgatgctgtccctgagctacatcaagaaagcgattcagagaggcttcgacaattaccatgccaagtacattgaaaccagttcccctgatcccatcttccatgtctgctacggcggcatgatcttctcctacctcgtcgctctcccccacgagcgccgccacctcctccacgcccaggagcacgctcagcagcatcactgattccatccaccttcaggatcctggttgaattggaggtggttggcttgcttgatctttgttttaaaatctgaaaaatcaaggcagaaagatactgtcagcttctgtgtatttcatcatttggatgataaaataagttctatttgatacaattctcaattttcttgcagttaaatgtttaattgaatgtgtgaaaaatgagcatacttttttatttggttctgtcttttaggtcctcttgatgtggtgatgtaattttgcaactgttcaaattatgggataggtttcatatctcaaacgaaaaaaaaaaaaaaaa

SEQ ID NO: 3482 - protein, 89 aa, Glycine max
  misc_feature: Ceres CLONE ID no. 746220
  misc_feature: Ceres CDNA ID no. 36705553
  misc_feature: Homolog of GI Number: 30841448 NR Desc: fiber protein Fb15
  misc_feature: Homolog of GI Number: 42565482 NR Desc: fiber protein
  misc_feature: Homolog of GI Number: 50251207 NR Desc: putative fiber protein Fb15
MALRRFYNEIKGKRVSEVPEHVKPMLSLSYIKKAIQRGFDNYHAKYIETSSPDPIFHVCYGGMIFSYLVALPHERRHLLHAQEHAQQHH

SEQ ID NO: 3483 - DNA, 667 bp, Glycine max
  misc_feature: Ceres CLONE ID no. 746308
  misc_feature: Ceres CDNA ID no. 25891169
  CDS (93)..(464): REFERENCED BY SEQ ID NO: 3484
accaccccttttaggtcttcttctaatcctccctctctctaactttcacacgcagcggcttcttcttccgttttcctgaatcggtgtgaacaatggcgacgtacgctgcgatgaaacccaccaagccagggttggaggagtcccaggaacagatccataagataaggatcaccctttcttccaagcacgtcaaaaacctcgagaaggtttgtgcggacttggttcgtggtgcaaaggacaagcgcctcagggttaagggacctgttaggatgcccactaaggttcttcacatcactaccaggaagtccccctgtggtgaaggtaccaacacatgggatagatttgaacttcgtgtccacaagagagtgattgacctctacagttccccagatgtggttaagcagattacctctatcacaatcgaacctggtgtggaagttgaggtgaccattgcagatgcttgatctatatccaaattttaactgttatggtttcctagtttttcgtctcctcttattctgtattttataagttttgattgcgggaccgagttgaattgttttcttttgttttacggttgtagacggttgatgaatacctgagaaatgtcatttttatatattctagaatcctacatatatttgttttgacaaaaaaaaaaaaaaaa

SEQ ID NO: 3484 - protein, 123 aa, Glycine max
  misc_feature: Ceres CLONE ID no. 746308
  misc_feature: Ceres CDNA ID no. 25891169
  misc_feature: The plant flowers significantly late compared to wild-type.
  misc_feature: The plant is abnormally large.
  misc_feature: null
  misc_feature: Useful for making plants with modulated biomass
  misc_feature: Useful for making plants with modulated flowering time
  misc_feature: Useful for making plants with modulated phosphate use efficiency
  misc_feature (23)..(118): Pfam Name: Ribosomal_S10 PFAM Desc: Ribosomal protein S10p/S20e
  misc_feature: Homolog of GI Number: 21281054 NR Desc: putative 40S ribsomomal protein
  misc_feature: Homolog of GI Number: 21617905 NR Desc: 40S ribosomal protein S20
  misc_feature: Homolog of GI Number: 23198348 NR Desc: 40S ribosomal protein S20
  misc_feature: Homolog of GI Number: 31430421 NR Desc: putative ribosomal protein S10p/S20e
  misc_feature: Homolog of GI Number: 55775376 NR Desc: 40S subunit ribosomal protein
  misc_feature: Homolog of GI Number: 50933555 NR Desc: 40S ribosomal protein S20
  misc_feature: Homolog of GI Number: 54208698 NR Desc: ribosomal protein S10p/S20e
  misc_feature: Homolog of GI Number: 14716982 NR Desc: putative 40S ribosomal protein 20S protein
  misc_feature: Homolog of GI Number: 22203726 NR Desc: ribosomal protein S20
  misc_feature: Homolog of GI Number: 50801483 NR Desc:  similar to putative 40S ribosomal protein 20S protein
  misc_feature: Useful for making shorter plants
  misc_feature: Useful for sterility
  misc_feature: Useful for sterility
MATYAAMKPTKPGLEESQEQIHKIRITLSSKHVKNLEKVCADLVRGAKDKRLRVKGPVRMPTKVLHITTRKSPCGEGTNTWDRFELRVHKRVIDLYSSPDVVKQITSITIEPGVEVEVTIADA

SEQ ID NO: 3485 - DNA, 525 bp, Glycine max
  misc_feature: Ceres CLONE ID no. 746401
  misc_feature: Ceres CDNA ID no. 40351307
  CDS (95)..(334): REFERENCED BY SEQ ID NO: 3486
tcgttctagtgtatgtgattgttgtgactcgttcttcttcgtcgttatcttcttcttttgttgtttgtgtgtttgttttttctctcacctgaaaatgtcttgctgcggtggtaactgtggttgcggaagcgcctgcaagtgcggcaacggctgcggaggctgcaagatgtacccagacttgagctacaccgagtcaaccaccaccgagaccttggtcatgggagtggcaccagttaaggctcaattcgagagtgctgaaatgggtgttcccgctgagaacgatggctgcaaatgtggagctaactgcacctgcaacccctgcacttgcaagtgaggtgttggagagctaaagcttcaagcagaaatggcccttagaaataatgataaaaactatatgtagtttcaaaacttcaaaattatgtagtatgtattatgttgcactctggtgttttgtgtctaaacaaacacccttagaataaagtggtcatttcttgcccttgagcaagttcaaaaaaaaaaaaaaaa

SEQ ID NO: 3486 - protein, 79 aa, Glycine max; identical to SEQ ID NO: 1962
  misc_feature: Ceres CLONE ID no. 746401
  misc_feature: Ceres CDNA ID no. 40351307
  misc_feature (1)..(78): Pfam Name: Metallothio_2 PFAM Desc: Metallothionein

SEQ ID NO: 3487 - DNA, 635 bp, Glycine max
  misc_feature: Ceres CLONE ID no. 746419
  misc_feature: Ceres CDNA ID no. 40351308
  CDS (22)..(486): REFERENCED BY SEQ ID NO: 3488
gaaagcacgtagattagagccatgataaaggaattcaacacccaaaccgaggttagtgtgagattggaagccctctgggcagttctgtccaaggatttcgtcaccgtagctccaaaggtactccccaatattgtgaaggatgtgcaagtgattgaaggtgatggaggggttggtacaatcctcatctttaattttttgtctgatgtgtccccaagttaccaaagggagaagatcacagagtttgatgaaatttcacatgaaattgggctgcaagtgattgaaggaggttatctgagtcaaggattgtcatactacaagacaacttttcagttatctgcaataggagaggataagactttggtcaacgtgaaaatttcttatgaccatgaatccgagatagaagaaagggtcaaacctacgaagacatcagagtcaactttattatatcttaggcgtctagaaacatatctgtccaatggcgcttgaagaaaaatgtagtatttataaaaatagtatattatatatgttttattttatattttaaatagaataatgtatggatgcttttactatttcccaataaatatttagaaataaaaataaatatactattatccttaaaaaaaaaaaaaaaa

SEQ ID NO: 3488 - protein, 154 aa, Glycine max
  misc_feature: Ceres CLONE ID no. 746419
  misc_feature: Ceres CDNA ID no. 40351308
  misc_feature (1)..(153): Pfam Name: Bet_v_I PFAM Desc: Pathogenesis
MIKEFNTQTEVSVRLEALWAVLSKDFVTVAPKVLPNIVKDVQVIEGDGGVGTILIFNFLSDVSPSYQREKITEFDEISHEIGLQVIEGGYLSQGLSYYKTTFQLSAIGEDKTLVNVKISYDHESEIEERVKPTKTSESTLLYLRRLETYLSNGA

SEQ ID NO: 3489 - DNA, 706 bp, Glycine max
  misc_feature: Ceres CLONE ID no. 746476
  misc_feature: Ceres CDNA ID no. 36705554
  CDS (59)..(400): REFERENCED BY SEQ ID NO: 3490
accaaaaacaaaacacaagccaagtgaaagtgagaaaaaataaaaatcaaagagcataatgtcagggatcattcacaagattggggagacccttcatgtgggagggcacaagaaggaggaggagcataagggtgagcaccatgctggagaatacaaaggggagcaccatggtgaacacagtagtgagtacaaaggagagcatcatggtgaacacaaagctggagagtaccatggtgagcacaagccagagcacaaagaggggttcctagacaaagtcaaggacaagatccatggtgagggcggcgccgccgagggcgagaagaagaagaaggagaagaagaagaaggagcatggccatgagcatggccatgacagcagcagcagcagtgacagtgattaaactgctgcatcacctatatatttaaaaggtttatgggaccatagtagcgagggctgtgccttaatttctctctctctctctctctctctctctctctctctctctttttcctttttccctatcttgtgatctatttatgagtgagaaaaacaaaagtgagaaattgtgcgtgtatctggttgctaattcgagtgctattagtctgtggtttggttggtttgtaaccccgctacttgggttatgtttgattgtatattatcctagagaaataaaaattttaaattatcagtaaaaaaaaaaaaaaaa

SEQ ID NO: 3490 - protein, 113 aa, Glycine max
  misc_feature: Ceres CLONE ID no. 746476
  misc_feature: Ceres CDNA ID no. 36705554
  misc_feature (2)..(113): Pfam Name: Dehydrin PFAM Desc: Dehydrin
  misc_feature: Homolog of GI Number: 14994231 NR Desc: drought
  misc_feature: Homolog of GI Number: 7446584 NR Desc: cold stress protein SRC1
  misc_feature: Homolog of GI Number: 2947081 NR Desc: Peaci11.8
  misc_feature: Homolog of GI Number: 9857292 NR Desc: CPRD86
  misc_feature: Homolog of GI Number: 6969496 NR Desc: cold acclimation responsive protein BudCAR5
  misc_feature: Homolog of GI Number: 6969498 NR Desc: cold acclimation responsive protein BudCAR6
  misc_feature: Homolog of GI Number: 463274 NR Desc: CAS15
  misc_feature: Homolog of GI Number: 3293557 NR Desc: cold acclimation responsive protein CAR1
  misc_feature: Homolog of GI Number: 6911243 NR Desc: cold acclimation responsive protein BudCAR3
  misc_feature: Homolog of GI Number: 46562298 NR Desc: cold
MSGIIHKIGETLHVGGHKKEEEHKGEHHAGEYKGEHHGEHSSEYKGEHHGEHKAGEYHGEHKPEHKEGFLDKVKDKIHGEGGAAEGEKKKKEKKKKEHGHEHGHDSSSSSDSD

SEQ ID NO: 3491 - DNA, 477 bp, Triticum aestivum
  misc_feature: Ceres CLONE ID no. 746477
  misc_feature: Ceres CDNA ID no. 25891170
  CDS (1)..(324): REFERENCED BY SEQ ID NO: 3492
attaccattcacaatgagttattacaaccagcagcaaccgccggtcggagttccgccgccgcaaggttatccgccggaggggtacggaaaggagggatatccaccgccgggatacccgccagcgggatacccaccgccgggatatccgccacaacaaggctatcctccgccgccctacccggcgcaggggtatcctccgccctacgctcctcaatacgctcagcctccgccccgtcaacaaaattcaactggccctggttgtttggaaggctgtttggctgctctctgctgctgctgtctattggatgcgtgcttctgagatgagatgacaaattcaaattggaattagacggaatcaactcaataaaatttgtttctacttctctatttcctttgctttatcttgccccttgttgactttttatttttaataataatactatgaaactattgttgcttccaaaaaaaaaaaaaaaa

SEQ ID NO: 3492 - protein, 101 aa, Triticum aestivum
  misc_feature: Ceres CLONE ID no. 746477
  misc_feature: Ceres CDNA ID no. 25891170
  misc_feature: Homolog of GI Number: 50938779 NR Desc: adhesive/proline
  misc_feature: Homolog of GI Number: 42565788 NR Desc: proline
  misc_feature: Homolog of GI Number: 21618167 NR Desc: adhesive/proline
  misc_feature: Homolog of GI Number: 41529812 NR Desc: PGYRP protein
  misc_feature: Homolog of GI Number: 3337330 NR Desc: rhodopsin
  misc_feature: Homolog of GI Number: 2290717 NR Desc: rhodopsin
  misc_feature: Homolog of GI Number: 45511081 NR Desc: rhodopsin
  misc_feature: Homolog of GI Number: 45511087 NR Desc: rhodopsin
MSYYNQQQPPVGVPPPQGYPPEGYGKEGYPPPGYPPAGYPPPGYPPQQGYPPPPYPAQGYPPPYAPQYAQPPPRQQNSTGPGCLEGCLAALCCCCLLDACF

SEQ ID NO: 3493 - DNA, 976 bp, Triticum aestivum
  misc_feature: Ceres CLONE ID no. 746727
  misc_feature: Ceres CDNA ID no. 40351309
  CDS (348)..(770): REFERENCED BY SEQ ID NO: 3494
acaccttcattcgttcctctttctttcttccaactctataaatatcaatcaaaattcccctccacactcattctcccatcgttttccctttctctctctcattctcttctccatcgcgcgtaagaaacacattttagttgctactaatgggaactgttgaagctgcaaacaaggatgcaaatggaagtctcctagagaaaaatccttcagttgtttttgtgttaggtggcccaggaagtggaaagggtacccaatgtgcaaatattgtccaaaattttgggtatactcatctcagcgctggtgatcttctgcgagcagaaatcaaatctggttctgaaaatggtacaatgattcagaatatgattaaagaaggaaaaattgttccctctgaggtaacaattaagctcttacaaaaagcaatgcaggaaagtggcaatgacaaatttcttattgatggttttccccgcaatgaggaaaaccgggcagcatttgagaaagtgacaggaatagagccagcatttgtcttattttttgattgccctgaggaagagatggagaggcgacttcttagtaggaaccagggtagagaagatgacaatattgaaacaataaggaagcggtttaaggttttcttggagtctagtcttcccgtgattaattattatgatgcaaagggaaaagttcgcaagattgatgctgcaagacctatcgaagaggtatttgagacagtcaaagcaatttttggtccaaagaatgacaaggctgattgagcatgttcatcttgactccatggtggaaatttagaggtcatatcagtattggtggcttgttctattgtgtcacattttgttattatagtatagaaaatcgtagtttatacctgagggttttacctctgtattctaatgttatatcttgttgactcattcattgatattgcaataaagattttcgtgtgtgaaaaaaaaaaaaaaaa

SEQ ID NO: 3494 - protein, 207 aa, Triticum aestivum
  misc_feature: Ceres CLONE ID no. 746727
  misc_feature: Ceres CDNA ID no. 40351309
  misc_feature (25)..(178): Pfam Name: ADK PFAM Desc: Adenylate kinase
MGTVEAANKDANGSLLEKNPSVVFVLGGPGSGKGTQCANIVQNFGYTHLSAGDLLRAEIKSGSENGTMIQNMIKEGKIVPSEVTIKLLQKAMQESGNDKFLIDGFPRNEENRAAFEKVTGIEPAFVLFFDCPEEEMERRLLSRNQGREDDNIETIRKRFKVFLESSLPVINYYDAKGKVRKIDAARPIEEVFETVKAIFGPKNDKAD

SEQ ID NO: 3495 - DNA, 639 bp, Triticum aestivum
  misc_feature: Ceres CLONE ID no. 747911
  misc_feature: Ceres CDNA ID no. 40351310
  CDS (69)..(488): REFERENCED BY SEQ ID NO: 3496
ccttaacctctctgctgcgtttgcttctcctccacccatccacaaacgaacacacactttgattgagaatggggcgtgttcgcacaaagacagtgaagaagtcctcgcggcaagtgatcgagaggtactactctcgcatgacgctggacttccacacgaacaagaaggttctggaagaggtggccatcattccctccaagaggctccgcaacaagatcgcgggattctccacccacctcatgaagcggatccagaagggtcccgtacgtggaatctccctcaagctgcaggaggaggagcgcgagcgccgcatggacttcgtccccgatgtctccgccatcagaaccgaccagatcgaggtcgacaaggagacgctcgacatgctcgccgccctcggaatgtccgaggttcccggggttgttcaggtggatcctgttgctgtccaggcaccgctcggcttcggccgcggcgccggaaggaggtactagttgccgcctttgagagttttggccgtgttgtttactagagcactaatttgttatgcgttgaagtttggttttacattagttttggattgttggactcgttaaagttgttaatggaatttgttttgttttgcttataaaaaaaaaaaaaaaa

SEQ ID NO: 3496 - protein, 139 aa, Triticum aestivum
  misc_feature: Ceres CLONE ID no. 747911
  misc_feature: Ceres CDNA ID no. 40351310
  misc_feature (2)..(122): Pfam Name: Ribosomal_S17e PFAM Desc: Ribosomal S17
MGRVRTKTVKKSSRQVIERYYSRMTLDFHTNKKVLEEVAIIPSKRLRNKIAGFSTHLMKRIQKGPVRGISLKLQEEERERRMDFVPDVSAIRTDQIEVDKETLDMLAALGMSEVPGVVQVDPVAVQAPLGFGRGAGRRY

SEQ ID NO: 3497 - DNA, 1224 bp, Triticum aestivum
  misc_feature: Ceres CLONE ID no. 747951
  misc_feature: Ceres CDNA ID no. 24766193
  CDS (147)..(965): REFERENCED BY SEQ ID NO: 3498
aaaaaaaaaaaccaaaggccagacccagaccagaccgctcacgccgcaccgcacgcgctgcacgggcacccaacacaagcccttctccgatcgtgctcgctcgccgccggtactagtctagtagagcagcggggaggagctccgagatgagggcgccgcggaggccgatggcggtggtgctcagctgggtgcggaggcagccgcccaaggtcaaggccttcctcgccgtcgtcgcgggcatgaccgcgctcgtcttcatccgcttcatcgtccacgaccacgacaacctcttcgtcgccgccgaggccgcgcacgcgctcggcatcgccgtgctcatctacaagctcaccaaggagaagacctgcgctggactttcactcaagtctcaggatttgacagcattgttcctggccgttaggttgtattgcagctttgttatggagtatgacatccatacaatactggattcagctacactagtagctactctttttgtcatttacatgattcggttcagactgaggtcaacttatatgctggacaaggacaattttgcattgtactacgtggttgtaccatgttgtgtgctggcatttattgctcatccttcaacatcacatatcatgatcaataggatctgctgggccttctgtgtttacttggaagctgtttcagtgctgccccagttgcgcttgatgcagaatacaaagattgttgaaccattcacagctcattatgtgtttgcgttgggtgtggcaaggttccttagctgtgcacactgggtccttcaggtcttggatactcgtggcagattattgactgctctgggctatggcttttggccatcgatggtgctcctctctgaaatcgtccagacgttcatccttgcagatttctgctactactatgtgaagagtcttgctggcggacaactagtgctgcgacttccttctggggtggtgtaaaatctggtgcacaactcatttgttcggtgctgtgtcttactgttgaacagtggctctgcttctggcgcccaaccttctctcttctcatgtgggatggattcaagagtcttgtttgccttttctttttccagttataaactgtttggtgaaaattgtaccggagactgttggtcgtgaagcttaggctgttgagaatactatctatagctgactatttatccagactagttttcaaaaaaaaagaaaaaaaaaaaaaaaa

SEQ ID NO: 3498 - protein, 272 aa, Triticum aestivum
  misc_feature: Ceres CLONE ID no. 747951
  misc_feature: Ceres CDNA ID no. 24766193
  misc_feature (241)..(258): Pfam Name: ER_lumen_recept PFAM Desc: ER lumen protein retaining receptor
  misc_feature: Homolog of GI Number: 50725803 NR Desc: ER lumen protein
  misc_feature: Homolog of GI Number: 28950707 NR Desc: At1g75760
  misc_feature: Homolog of GI Number: 9369358 NR Desc: F10A5.5
  misc_feature: Homolog of GI Number: 15223724 NR Desc: ER lumen protein retaining receptor family protein
  misc_feature: Homolog of GI Number: 21554272 NR Desc: putative ER lumen protein retaining receptor
  misc_feature: Homolog of GI Number: 13430654 NR Desc: putative ER lumen protein retaining receptor
  misc_feature: Homolog of GI Number: 20197720 NR Desc: putative ER lumen protein retaining receptor
  misc_feature: Homolog of GI Number: 21537286 NR Desc: putative ER lumen protein retaining receptor
  misc_feature: Homolog of GI Number: 77745477 NR Desc: ER lumen retaining receptor family
  misc_feature: Homolog of GI Number: 61563734 NR Desc: KDEL receptor 3
  misc_feature: Utility: MSX Useful for making plants tolerant to low nitrogen
MRAPRRPMAVVLSWVRRQPPKVKAFLAVVAGMTALVFIRFIVHDHDNLFVAAEAAHALGIAVLIYKLTKEKTCAGLSLKSQDLTALFLAVRLYCSFVMEYDIHTILDSATLVATLFVIYMIRFRLRSTYMLDKDNFALYYVVVPCCVLAFIAHPSTSHIMINRICWAFCVYLEAVSVLPQLRLMQNTKIVEPFTAHYVFALGVARFLSCAHWVLQVLDTRGRLLTALGYGFWPSMVLLSEIVQTFILADFCYYYVKSLAGGQLVLRLPSGVV

SEQ ID NO: 3499 - DNA, 789 bp, Triticum aestivum
  misc_feature: Ceres CLONE ID no. 748120
  misc_feature: Ceres CDNA ID no. 40351311
  CDS (54)..(632): REFERENCED BY SEQ ID NO: 3500
gatttgagaggatcgtgagagggacggtagcagagattccgtgagttgcaaaaatgaaaacaattctttctgcagagaccatgaacatcccggacggcgtgagcgtcaaggttaatgccaaggtcatcgaagttgagggcccccgcggaaaattggtgcgagacttcaagcacttgaatctcgattttcagctcatcactgacgaaaacggtaaaaggaagctgaaggtggaggcctggttcggttctcggaaaacatccgccgccattcgcaccgccctgagccacgtggagaatctgatcaccggcgtcaccaagggctaccgctacaaaatgaggttcgtttatgcccattttcccatcaacgcaagcatcggcaacgacaacaagtctattgagatcagaaatttccttggcgaaaagaaggtgagaaaagtggaccttcttaacggtgtttccgttgttcgatctgaaaaagttaaagatgaattgattttggatgggaacgacattgaacttgtttctaggtcctgtgctctcattaaccagaaatgccatgttaaaaagaaggatatcaggaaatttctcgatggcatttatgttagtgagaagggaacaatactggaagagtagatgttgaaaacaacaagcaccttgattgtttagtttgggttgcttttttgttaactgtttgagattggattttacaattttgtgttgtcaaacttttccttttgcgaatattttttattagtatagtctgtgtttgttttcaaaaaaaaaaaaaaaa

SEQ ID NO: 3500 - protein, 192 aa, Triticum aestivum
  misc_feature: Ceres CLONE ID no. 748120
  misc_feature: Ceres CDNA ID no. 40351311
  misc_feature (12)..(89): Pfam Name: Ribosomal_L6 PFAM Desc: Ribosomal protein L6
MKTILSAETMNIPDGVSVKVNAKVIEVEGPRGKLVRDFKHLNLDFQLITDENGKRKLKVEAWFGSRKTSAAIRTALSHVENLITGVTKGYRYKMRFVYAHFPINASIGNDNKSIEIRNFLGEKKVRKVDLLNGVSVVRSEKVKDELILDGNDIELVSRSCALINQKCHVKKKDIRKFLDGIYVSEKGTILEE

SEQ ID NO: 3501 - DNA, 1517 bp, Triticum aestivum
  misc_feature: Ceres CLONE ID no. 748167
  misc_feature: Ceres CDNA ID no. 24766194
  CDS (158)..(1267): REFERENCED BY SEQ ID NO: 3502
cacccccacccgcatcctcctccctccccccaagctgcaattcacctccgaattcggtcgcccatggcaccgcggctgctctgatcctacccacctaccccctccccctcccctcccctcccctcccagctgctctcccttcccctctcgtttgaaaatggcaatgctggtggatcctccgaatggcatgggaaaccaagggaagcactattactcaatgtggcaaaccttgtttgagattgacaccaagtatgtgcctatcaaacccataggccgaggagcttatggaatagtttgctcatccataaaccgtgagacaaacgagaaagtagcgataaagaagatacataatgtattcgacaaccgtgtggatgcactaaggaccttgcgggagctgaaactcctccggcatctccgccatgagaatgttatttctttgaaggatataatgatgcctgtacaaaggaggagctttaaggatgtgtacttggtttatgagctcatggatacagacctgcatcagataatcaaatcgcctcaggggctttccaacgaccactgccaatattttctttttcagttgcttcgaggactgaaatacctccattcagcagagatactccacagagacctaaaacctgggaacctactggtgaatgcaaactgtgatctgaagatatgcgattttggtcttgcacgtacaaacagtagtaaaggccagtttatgactgaatatgtcgtcacccgctggtatagggctcctgagttgctgctttgctgcgacaactacggcacttccattgatgtttggtctgttggctgcatctttgctgagctacttggccgcaagcctattttccccgggacagagtgcctaaatcagctaaaactgatagtcaatgttcttggcacgatgagcgagtctgacctggagttcatcgacaacccaaaggcccgcagatatatcaagaccctcccctacactcctggtgttccacttgcaagtatgtacccacatgcacaccctctggccatcgatctattacagaagatgctcatcttcgaccctaccaaaagggtcagtgttacccaggcccttgagcacccttacatgtctcctctgtatgacccaagtgcaaaccctcccgcgcaagtgcccatcgatctcgacatagatgagaacatcagctcagagatgatcagggaaatgatgtggcaggagatgcttcactaccaccctgaagccgccacggcagtaaacatgtgacgacgatcttgcagtgccctgggaagaacccggcaggctcactccttttttcctcgaaaagactactgcgattatcgcacctattaagtaaccacgacgtgcagtgtggagaggtatctccgtgtaaatatgcagtgcgataagaaccgcatatggatagttcttgttatggaccactttggtgtatgtatactgttgtgttgttgtataagctcatgaaagaactgttgaagcaaaaaaaaaaaaaaaa

SEQ ID NO: 3502 - protein, 369 aa, Triticum aestivum
  misc_feature: Ceres CLONE ID no. 748167
  misc_feature: Ceres CDNA ID no. 24766194
  misc_feature (32)..(319): Pfam Name: Pkinase PFAM Desc: Protein kinase domain
  misc_feature: Homolog of GI Number: 11869994 NR Desc: MAP kinase 2
  misc_feature: Homolog of GI Number: 50905349 NR Desc: MAP kinase MAPK2
  misc_feature: Homolog of GI Number: 603871 NR Desc: MAP/ERK kinase 1
  misc_feature: Homolog of GI Number: 6491800 NR Desc: MAPK4 protein
  misc_feature: Homolog of GI Number: 406751 NR Desc: NTF3
  misc_feature: Homolog of GI Number: 51587352 NR Desc: putative MAP kinase
  misc_feature: Homolog of GI Number: 45725015 NR Desc: putative mitogen
  misc_feature: Homolog of GI Number: 23197708 NR Desc: putative mitogen
  misc_feature: Homolog of GI Number: 24412848 NR Desc: putative mitogen
  misc_feature: Homolog of GI Number: 11275338 NR Desc: mitogen
  misc_feature: Useful for delaying flowering time
  misc_feature: Useful for increasing chlorophyll and photosynthetic capacity
  misc_feature: Useful for making bigger plants
  misc_feature: Useful for making ornamental plants with modified leaves
  misc_feature: Useful for making plants with increased biomass and foliage
  misc_feature: Useful for making plants with increased biomass and foliage
  misc_feature: Useful for making shorter plants
MAMLVDPPNGMGNQGKHYYSMWQTLFEIDTKYVPIKPIGRGAYGIVCSSINRETNEKVAIKKIHNVFDNRVDALRTLRELKLLRHLRHENVISLKDIMMPVQRRSFKDVYLVYELMDTDLHQIIKSPQGLSNDHCQYFLFQLLRGLKYLHSAEILHRDLKPGNLLVNANCDLKICDFGLARTNSSKGQFMTEYVVTRWYRAPELLLCCDNYGTSIDVWSVGCIFAELLGRKPIFPGTECLNQLKLIVNVLGTMSESDLEFIDNPKARRYIKTLPYTPGVPLASMYPHAHPLAIDLLQKMLIFDPTKRVSVTQALEHPYMSPLYDPSANPPAQVPIDLDIDENISSEMIREMMWQEMLHYHPEAATAVNM

SEQ ID NO: 3503 - DNA, 643 bp, Triticum aestivum
  misc_feature: Ceres CLONE ID no. 748406
  misc_feature: Ceres CDNA ID no. 40351312
  CDS (29)..(412): REFERENCED BY SEQ ID NO: 3504
aattcgggttaagattgaaagcgtgagaatgccggtgaagaagtattactgcgattactgcgacaagctattccaagacacaccagcagatcggaaacgacacgttcagggcattcaacaccaccaagccaaagctcgctggtacgattccttcaaacaacaacaaatccctccgattcccaatcgacccctttgctttcacttcgtcaacacgggattttgccgctacggcgactcttgcaaatatctccatcccgttcccaacaacaatgtccagcagccgccaatcgtaaccacaccgtcgccttcaccagggagtgtggtaggagtgtcattcggcaatcttcccccctccctgcagcctccgcctgacggcgtatatctccaccttccctttctcgactggggatagatttgtaattctacccacttctcataactgcatctccgtgtctgtgttctgttcaatcatttcttaatttaaccttttagttcttctaattttcattgtgtggctggattctagtgatttcttatgacctagctccaccgtattatttggagttttcttatatctacccaacgcttaacttatgattaaatccaaaatctatcttattgtaatacaaaaaaaaaaaaaaaa

SEQ ID NO: 3504 - protein, 127 aa, Triticum aestivum
  misc_feature: Ceres CLONE ID no. 748406
  misc_feature: Ceres CDNA ID no. 40351312
  misc_feature (3)..(39): Pfam Name: zf PFAM Desc: U1 zinc finger
  misc_feature (51)..(77): Pfam Name: zf PFAM Desc: Zinc finger C
MPVKKYYCDYCDKLFQDTPADRKRHVQGIQHHQAKARWYDSFKQQQIPPIPNRPLCFHFVNTGFCRYGDSCKYLHPVPNNNVQQPPIVTTPSPSPGSVVGVSFGNLPPSLQPPPDGVYLHLPFLDWG

SEQ ID NO: 3505 - DNA, 791 bp, Triticum aestivum
  misc_feature: Ceres CLONE ID no. 748469
  misc_feature: Ceres CDNA ID no. 40351313
  CDS (49)..(585): REFERENCED BY SEQ ID NO: 3506
atctggcagcagaagaacaagtagttgagaactaagaaggagaagcaaatggcttcctcaatgatctcttccccagctgttaccactgtcaaccgtgccggtgccggcatggttgctccattcactggcctcaagtccatggctggcttccccaccaggaagaccaacaatgacattacctccattgctagcaacggtggaagagtgcaatgcatgcaggtgtggccaccagttggcaagaagaagtttgagactctttcctacctgccagaccttgatgatgcacaattggcaaaggaagtagaataccttcttaggaagggatggattccttgcttggaattcgagttggagcacggtttcgtgtaccgtgagcacaacaggtcaccaggatactacgatggacgctactggaccatgtggaagctgcctatgtttggttgcactgatgcttctcaggtgttgaaggagcttcaagaggctaagactgcataccccaacggcttcatccgtatcatcggattcgacaacgttcgccaagtgcagtgcatcagcttcatcgcctacaagcccccaggcttctaagtgtgaaaaatttgcaaagcatttgtagccgccaccccactttgtttgtttgtacttaaactacattcccatttgtttttgctttttgagatttcatcatcctgtatttttggtttctgttttcggacttcaatggaaattaatggatgagaactaatgaataagctattgtgttgtgttgctttgtttcaaaaaaaaaaaaaaaa

SEQ ID NO: 3506 - protein, 178 aa, Triticum aestivum
  misc_feature: Ceres CLONE ID no. 748469
  misc_feature: Ceres CDNA ID no. 40351313
  misc_feature (56)..(175): Pfam Name: RuBisCO_small PFAM Desc: Ribulose bisphosphate carboxylase
MASSMISSPAVTTVNRAGAGMVAPFTGLKSMAGFPTRKTNNDITSIASNGGRVQCMQVWPPVGKKKFETLSYLPDLDDAQLAKEVEYLLRKGWIPCLEFELEHGFVYREHNRSPGYYDGRYWTMWKLPMFGCTDASQVLKELQEAKTAYPNGFIRIIGFDNVRQVQCISFIAYKPPGF

SEQ ID NO: 3507 - DNA, 1306 bp, Triticum aestivum
  misc_feature: Ceres CLONE ID no. 748589
  misc_feature: Ceres CDNA ID no. 25892834
  CDS (420)..(1214): REFERENCED BY SEQ ID NO: 3508
aaaaaaccagactcgaccgactggttgtctggagcgagagagtatcttccctcccccgattccaaatcaatccccattccccagcctagctgaaggcggcggcagcaagcgattccaggcccggctccggcggccggctctccctcggtccctctcatccggccggacctctcggcctctctctctcctgccctcggcctccggcactcccctccgcgcatccggccctctcggcttctcctccgcctccggcctccccggctccccctgcagacgcccagcgccctccaccaagtcagtagtgggtggaagtgaagtggagcgctgagcagtaatcggacatttggaggcaaaaaagctcaaccggccggcgaggcgaaatcttgacgcccaccaactcccaacaaccggtcgaggccatggcggcggcgcagaagccggcgaagcggctcggcggcatggcagaggcgctcgccatcgccggggacctcggcttcccggcccctcccacgcaggaagatcagaacacctcggacaaaagtgatgacctggtgcgggtgttaagggagctgacggtcgtgcagcggaacattgccaatttgcaagttgagctacaaggcagaaaggatgataaaaacattgctcatttgactcatgttagtgaaatggagaagaagtgtgaatcgttggccagaattactgctattttgaaagatgttattcaaaacaaggaccgcattattgcccgtctgcagcaaccttactcgcttgactgcattcctgttgaagctgaataccagaaacaattctcggagctacttctgaaagcggcaagtgattatggggcattgacagcatcagttggagatttccagtggagtcaaaacttcagagagtcgcctgctgtatggggtgaaatgctacgaccgatacctgctgcgcttgcatcctgcacccggttcttcgaggccatgtctgcgatgagggaatccttttctactcttcaaacactacgcgttggtcattcttctctgtcaatgaccccaggtggctccattgatgatttgaagttcttgacgcctcctcagaggagagagggctcgatgctcaatacctggaagcaagtggacgacgcaaaccctgaaagtgatgaactcgacaatatcaaccagaggaggctgtcatggccatcctccattaacagggacctgtagatcacagctcaccaagctaatactcagctatttgcattctgtataaaaaataggatcgccgaggcttgtcttcaagaaaaaaaaaaaaaaaa

SEQ ID NO: 3508 - protein, 264 aa, Triticum aestivum
  misc_feature: Ceres CLONE ID no. 748589
  misc_feature: Ceres CDNA ID no. 25892834
MAAAQKPAKRLGGMAEALAIAGDLGFPAPPTQEDQNTSDKSDDLVRVLRELTVVQRNIANLQVELQGRKDDKNIAHLTHVSEMEKKCESLARITAILKDVIQNKDRIIARLQQPYSLDCIPVEAEYQKQFSELLLKAASDYGALTASVGDFQWSQNFRESPAVWGEMLRPIPAALASCTRFFEAMSAMRESFSTLQTLRVGHSSLSMTPGGSIDDLKFLTPPQRREGSMLNTWKQVDDANPESDELDNINQRRLSWPSSINRDL

SEQ ID NO: 3509 - DNA, 762 bp, Triticum aestivum
  misc_feature: Ceres CLONE ID no. 748639
  misc_feature: Ceres CDNA ID no. 40351314
  CDS (60)..(455): REFERENCED BY SEQ ID NO: 3510
tacaccaaaccaaagtaagtgttctaagagtgagcaacttcaaaacaccatagtgagaaatgacttccaagggtgcaattctcttgtgtctcaatgttctcttcttcactgtggttagttccacatatgttccatgcaacccaccccccaaaactcccaaacacccacctgtcccaaagccaccttccccaaagcaagtttcttgccccaaggacactgttaagtttggtgtgtgtgctgatgtgttaggtttgattaacgtgcaactagggaagccaccaaaaaccccatgctgcagcctcattcagggtcttgctgatcttgaagctgcagtgtgcctttgcactgctctcaaggctaatgtgttgggcatcaacctcaatgttccagtgaacttgagcttgcttctcaactactgtggaaagggtgttcccaagggattcgtctgctactaaatcaacacttctaatgtgtagtttcttaatgttaagtatgtcttaaggttctatattttgctatattcgtcattcatcaatctatgaactttgttgttttgtttttccgtctggcacgtgccatttatagccaacgaacatttcgttcgcaattggttattattattattattattattgtgatggttgaaacttgaaagtcttctcgtggtctttcttgtagcctccctcacactactccttttgtattctaagtgaaaatttatactaataaaaattctacatttaagcaaaaaaaaaaaaaaaa

SEQ ID NO: 3510 - protein, 131 aa, Triticum aestivum; identical to SEQ ID NO: 3410
  misc_feature: Ceres CLONE ID no. 748639
  misc_feature: Ceres CDNA ID no. 40351314
  misc_feature (49)..(130): Pfam Name: Tryp_alpha_amyl PFAM Desc: Protease inhibitor/seed storage/LTP family

SEQ ID NO: 3511 - DNA, 732 bp, Triticum aestivum
  misc_feature: Ceres CLONE ID no. 748642
  misc_feature: Ceres CDNA ID no. 40351315
  CDS (100)..(507): REFERENCED BY SEQ ID NO: 3512
atatataacttcttctaggtgtccggaaatcgttcctatcatcacttctcaaatctcgaaccctctcgttcgtgccgatcactaggtcacacttcatcaatggcgggtagaggcaaaaccctaggatccagcgccgctaagaaggccacctcaaggagcagcaaagccggcctccaattccccgtcggtcgtatcgccaggttcctcaaggccggaaagtacgccgagcgcgtcggcgccggagcccccgtctacctcgccgccgttctcgaatatctcgctgctgaggttttggaattggctggaaacgctgcgagagataacaagaagactcgaattgttccacgccacatccaattggcggtgaggaacgacgaagagttgagcaagcttctaggagatgttaccattgctaacggcggtgttatgcctaacattcacaaccttcttcttcccaagaaggctgggggctcatccaagggtgctgctgctgacgatgactcttaaatagggattcactgttcacaaagttcttgaatttagattctatgtttgctctctttttttttcctttttatttgtagttatgataattgtgccctttgtagtagtagttaggttttcagtcagatgtgtttaaagaatgctcttacgcatcaagaaaggttgttcaaaatttaaattattttaatgtcacctttgagtcttgatctagcaaaaaaaaaaaaaaaa

SEQ ID NO: 3512 - protein, 135 aa, Triticum aestivum; identical to SEQ ID NO: 2346
  misc_feature: Ceres CLONE ID no. 748642
  misc_feature: Ceres CDNA ID no. 40351315
  misc_feature (25)..(89): Pfam Name: CBFD_NFYB_HMF PFAM Desc: Histone

SEQ ID NO: 3513 - DNA, 1323 bp, Triticum aestivum
  misc_feature: Ceres CLONE ID no. 748921
  misc_feature: Ceres CDNA ID no. 40351316
  CDS (19)..(1134): REFERENCED BY SEQ ID NO: 3514
atttttccgatagaagccatggataggcttctatcttcttgttcttcttcccttaacaccaatctcaagcccttttctcttctccctcgatttgactccgtcagattcaaccctttctcatcaacgcgctgttccttcacctcaatttcatccaagcatgaaaccccacctccattatcgtcttctcctccaaaaaccctaccacccctttccccctctccactcattcattttcatgcctccgtgcccccatcccaacccctcactccgaataatttccaaaatccaaaggcaataacagctcgaacgtttgcaatactctcttctcttgttttgctcttaatccaaccagcttttgctccggcagcttttgccacgtttcaaaatgctgccaagactggtggccctgctgctgccgcagttggtggaaaactaatccgcactgagcttctaactagtgcttggactggtttctttgctggctgcttgcacacactgtcagggcctgaccaccttgcagctttggctccattgtcaattggccgaacccgaatggagagtgctgctgttggagccctttggggttgtggccatgatgccggtcaagttatctttggcttaatatttttgctcttaaaagatcgacttcacattgaaattatccgaacttggggcacccgagtggttggccttaccctgctagtaattggtgctatgggaattaaggaagcttcagaagtgcctaccccgtgtgttgccttagaaaatggtgaatgtgatgtcagtgtctatgaatcacgcgatagtaatcctgttgtaggaaagaagaagattggttttgctacttttgccactggaatagttcacggactgcaaccagatgcattgatgatggtgttgcctgcccttgctctaccctcacgcttggctggtgctgcatttctcatcatgttcttacttggaactgttgttgcaatggggagctatacggtatttatcggttcatgtagcgaggcactaaaagatagagtacctagaataactgagaaactcacttgggcttcttctcttattgcaatagccctcggatttgccatcatcattagccagttttttgggtttagcctgtattagtaaactttattcagccagggaccttttttatgaacatcgttttggtgtctagaaaaaagtagggacgttagagagaaatttgattgtttggagcaaggtcattatttatgcaagattttgattgtctattatttgactacgtttgtgaatgtatatatcgggtaggttcaattaaaaaaaaaaaaaaaa

SEQ ID NO: 3514 - protein, 371 aa, Triticum aestivum
  misc_feature: Ceres CLONE ID no. 748921
  misc_feature: Ceres CDNA ID no. 40351316
  misc_feature (144)..(242): Pfam Name: NicO PFAM Desc: High
MDRLLSSCSSSLNTNLKPFSLLPRFDSVRFNPFSSTRCSFTSISSKHETPPPLSSSPPKTLPPLSPSPLIHFHASVPPSQPLTPNNFQNPKAITARTFAILSSLVLLLIQPAFAPAAFATFQNAAKTGGPAAAAVGGKLIRTELLTSAWTGFFAGCLHTLSGPDHLAALAPLSIGRTRMESAAVGALWGCGHDAGQVIFGLIFLLLKDRLHIEIIRTWGTRVVGLTLLVIGAMGIKEASEVPTPCVALENGECDVSVYESRDSNPVVGKKKIGFATFATGIVHGLQPDALMMVLPALALPSRLAGAAFLIMFLLGTVVAMGSYTVFIGSCSEALKDRVPRITEKLTWASSLIAIALGFAIIISQFFGFSLY

SEQ ID NO: 3515 - DNA, 1805 bp, Triticum aestivum
  misc_feature: Ceres CLONE ID no. 749048
  misc_feature: Ceres CDNA ID no. 36517633
  CDS (219)..(1559): REFERENCED BY SEQ ID NO: 3516
atcgacgatccatcccgtgtgcggccgcccacaccagtttcctcgtccccacaagcagcggcacggctaaaaacggggggacgcttccctttcatctcgcgactataaaaaagaacgggcggccctgcctaaagccccctctcctcgccttctccgccctccgctccattcgtttcgatctatttcggcttcttcctctccaagctacagccccggccatggcggcgacgatccagtccgtgaaggcccgccagatcttcgacagccgcggcaaccccaccgtcgaggttgatgtgtgctgctcagatggaaccttcgccagggccgctgttcccagcggtgcatcaactggtgtttatgaagctttggaactgagagacggtggatctgactacttgggaaagggtgtttccaaggctgttgacaatgtgaacttgattatcgcaccagctttgattggcaaggaccctacagctcaaactgagctcgacaactttatggttcagcagcttgatggaaccaaaaacgaatggggttggtgcaagcagaagcttggtgctaatgcaatcctggctgtgtcactagctatttgcaaagctggagccagcatcaagaagattccgctgtaccagcacattgccaaccttgctggcaacaagcaattggttttgcctgttcctgcattcaatgtcatcaatggtggatcccatgctggaaacaagcttgctatgcaggagttcatgatccttcctactggagctgcctcattcaaggaggcaatgaagatgggcgttgaagtgtaccacaacttgaagtctgttatcaagaagaagtacgggcaagatgccaccaatgttggagatgaaggtggttttgctcctaacattcaggagaataaggagggccttgagctcttgaagactgcaattgaaaaggctggatacaccggcaaggttgtcattggaatggatgttgctgcttcagagttctacaatgacaaggacaaaacatatgacctcaacttcaaggaagagaacaacgatggttcccagaagatatctggagatagcctgaagaatgtatacaagtcattcgtgagtgagtaccccattgtgtcgattgaggacccatttgaccaggatgactgggtgcactatgctaagatgactgaagaatgtggagagcaagttcagattgttggtgatgaccttctagtcaccaacccaaccagagttgcgaaggcaatcaaggagaagtcatgcaatgctcttctgctgaaggttaaccaaattggatccgtcactgaaagtatcgaggccgtgaagatgtcgaaacatgctggctggggtgtgatgaccagtcacaggagtggtgagactgaggacacattcattgctgatttggctgttggtttgtccacgggtcagatcaagactggggctccctgccgctcagagcggcttgccaagtacaaccagcttctgaggatcgaggaagagctgggcgctgccgctgtgtatgccggcctcaagttccgcgcaccggtggagccatactagatgggacctgcatccgagacatgatcactctgcacttgtttttgtgaaagtgggcgtgtcttaacttgtggaatgaactatggttgaagctcttaggactagtcgagcaataatgtaccgcatgttgctgtgaacgggacggatatgtacctacgtgctccaaacttgctccaattttggtctttgtggtgagcgagcaagcacgcctgattaccttttggatctctagcaaaaaaaaaaaaaaaa

SEQ ID NO: 3516 - protein, 446 aa, Triticum aestivum
  misc_feature: Ceres CLONE ID no. 749048
  misc_feature: Ceres CDNA ID no. 36517633
  misc_feature (148)..(443): Pfam Name: Enolase_C PFAM Desc: Enolase
  misc_feature (4)..(140): Pfam Name: Enolase_N PFAM Desc: Enolase
  misc_feature: Homolog of GI Number: 533474 NR Desc: 2
  misc_feature: Homolog of GI Number: 24580920 NR Desc: CG17654
  misc_feature: Homolog of GI Number: 780372 NR Desc: enolase
  misc_feature: Homolog of GI Number: 42521309 NR Desc: enolase
  misc_feature: Homolog of GI Number: 19281 NR Desc: enolase
  misc_feature: Homolog of GI Number: 33113259 NR Desc: enolase
  misc_feature: Homolog of GI Number: 78707886 NR Desc: enolase
  misc_feature: Homolog of GI Number: 78707887 NR Desc: enolase
MAATIQSVKARQIFDSRGNPTVEVDVCCSDGTFARAAVPSGASTGVYEALELRDGGSDYLGKGVSKAVDNVNLIIAPALIGKDPTAQTELDNFMVQQLDGTKNEWGWCKQKLGANAILAVSLAICKAGASIKKIPLYQHIANLAGNKQLVLPVPAFNVINGGSHAGNKLAMQEFMILPTGAASFKEAMKMGVEVYHNLKSVIKKKYGQDATNVGDEGGFAPNIQENKEGLELLKTAIEKAGYTGKVVIGMDVAASEFYNDKDKTYDLNFKEENNDGSQKISGDSLKNVYKSFVSEYPIVSIEDPFDQDDWVHYAKMTEECGEQVQIVGDDLLVTNPTRVAKAIKEKSCNALLLKVNQIGSVTESIEAVKMSKHAGWGVMTSHRSGETEDTFIADLAVGLSTGQIKTGAPCRSERLAKYNQLLRIEEELGAAAVYAGLKFRAPVEPY

SEQ ID NO: 3517 - DNA, 899 bp, Triticum aestivum
  misc_feature: Ceres CLONE ID no. 749118
  misc_feature: Ceres CDNA ID no. 25891240
  CDS (194)..(670): REFERENCED BY SEQ ID NO: 3518
acagttcgggccttagcccctctcgtcgacagcgtcgtcctctcaggcgcaggcgcagccggacttcgattacctgttcaagctcctcctcatcggcgactccggcgtcggcaagagcagtctcctcctccgattcacatccgactcattcgaggacctatccccaaccatcggcgtggacttcaaggtgaagatggttaacattgccggcaagaagctcaagctcgccgtctgggacaccgctggacaggaacggtttaggaccttgaccagctcttactacagaggggcacaagggatcatcatgggtatgtacgatgttactcgccgagaaacattcaccaatctctctgacatatgggccaaggaaattgacctgtattcgaccaaccaggactgtataaagatgcttgtcggaaacaaagtggacaaggaaagtgagagggctgtcaccaagaaggaaggcattgactttgccagggagtatgggtgtttatttctggaatgcagtgcgaaaaccaaagtgaacgtggagcagtgctttgaggagcttgtgctcaagatattggacacgccgagcctgttggcggatgcatcctctggggcgaagaagaacatcttcaagcagaaggcgccagaggctgatgctgcggcgagcggctgctgttgatttcattcacgcatgctaatcccggacatctatctatgatctatcttagtggaggatggatgacaacgtttgttggagaaagtgatgatatctaggcagcttgtttgtttctgccggttttatttcgcttttgtgttgctgtatatgaatcagtcagtcggtcggtcgctcaatgctcctcatgttgaagttgaatctgaaaacaaaacacacaaaaaaaaaaaaaaaa

SEQ ID NO: 3518 - protein, 158 aa, Triticum aestivum
  misc_feature: Ceres CLONE ID no. 749118
  misc_feature: Ceres CDNA ID no. 25891240
  misc_feature: null
  misc_feature: Useful for making plants with altered Lignin content
  misc_feature (1)..(126): Pfam Name: Ras PFAM Desc: Ras family
  misc_feature: Homolog of GI Number: 1370174 NR Desc: RAB1Y
  misc_feature: Homolog of GI Number: 17104731 NR Desc: putative GTP
  misc_feature: Homolog of GI Number: 8778652 NR Desc: F9C16.3
  misc_feature: Homolog of GI Number: 1370172 NR Desc: RAB1X
  misc_feature: Homolog of GI Number: 50919703 NR Desc: Putative GTP
  misc_feature: Homolog of GI Number: 31432458 NR Desc: putative GTP
  misc_feature: Homolog of GI Number: 6681328 NR Desc: putative Ras
  misc_feature: Homolog of GI Number: 549810 NR Desc: GTP
  misc_feature: Homolog of GI Number: 62859745 NR Desc: RAB18
  misc_feature: Homolog of GI Number: 37360618 NR Desc: mKIAA3012 protein
  misc_feature: Useful for increasing chlorophyll and photosynthetic capacity
MVNIAGKKLKLAVWDTAGQERFRTLTSSYYRGAQGIIMGMYDVTRRETFTNLSDIWAKEIDLYSTNQDCIKMLVGNKVDKESERAVTKKEGIDFAREYGCLFLECSAKTKVNVEQCFEELVLKILDTPSLLADASSGAKKNIFKQKAPEADAAASGCC

SEQ ID NO: 3519 - DNA, 1112 bp, Triticum aestivum
  misc_feature: Ceres CLONE ID no. 749301
  misc_feature: Ceres CDNA ID no. 40351317
  CDS (35)..(853): REFERENCED BY SEQ ID NO: 3520
acaaatctttcgctaacactcattaattgcaagaatggcacttcgttgcttggtgatgtccctttctgttctcttcactcttggtcttgcgagagaaagccatgccagagacgaagatttttggcatgctgtttggccaaacactcccattccaagttcattgcgagatcttctaaagcctggccctgcaagtgttgaaatcgatgatcaccctatgcaaattgaagaaacacagtacccgaaaaccttcttctataaagaagaccttcatccaggcaaaacaatgaaagtacaattcagcaagcctccctttcaacaaccatggggtgttggtacatggttaaaggaaattaaagacactactaaagaaggatatagttttgaagagctatgcatcaagaaagaagccattgagggagaagagaagttttgtgcaaaatccttgggaacagtaattggttttgccatttcaaagctgggaaagaacattcaagtactttcaagttcctttgtcaataagcaagaccaatacactgtggaaggagtgcagaatcttggagacaaagcagtgatgtgtcataggctaaatttcagaactgcagtattttactgccatgaagtccgtgaaacaacagctttcatggttccattggtggctggtgatggaaccaaaactcaggcacttgctatttgccactcaaatacttctggaatgaatcatcaaatgcttcatcaacttatgggagttgatcctggaactaaccctgtttgccatttccttggaagcaaggccattttatgggtacccaatttatctgtggacactgcctatcagaccaacattgttgcttaattagtccatgcatcttgagcaccatgagaatgagattgtgtataaaataaattatcatgtgctgtgtgttgtgcaagtactaccttctctagctagattgctagagctagaatttcaacctacctatgtgtactgataagatctgcttccctacttaaagagagcatcatcctgtgatcagtgtgcttcgtattctctctctctatatatatatggtaaaaagtggttatctcaaaaaaaaagaaaaaaaaaaaaaaaa

SEQ ID NO: 3520 - protein, 272 aa, Triticum aestivum
  misc_feature: Ceres CLONE ID no. 749301
  misc_feature: Ceres CDNA ID no. 40351317
  misc_feature (70)..(259): Pfam Name: BURP PFAM Desc: BURP domain
MALRCLVMSLSVLFTLGLARESHARDEDFWHAVWPNTPIPSSLRDLLKPGPASVEIDDHPMQIEETQYPKTFFYKEDLHPGKTMKVQFSKPPFQQPWGVGTWLKEIKDTTKEGYSFEELCIKKEAIEGEEKFCAKSLGTVIGFAISKLGKNIQVLSSSFVNKQDQYTVEGVQNLGDKAVMCHRLNFRTAVFYCHEVRETTAFMVPLVAGDGTKTQALAICHSNTSGMNHQMLHQLMGVDPGTNPVCHFLGSKAILWVPNLSVDTAYQTNIVA

SEQ ID NO: 3521 - DNA, 747 bp, Triticum aestivum
  misc_feature: Ceres CLONE ID no. 749307
  misc_feature: Ceres CDNA ID no. 25891146
  CDS (54)..(500): REFERENCED BY SEQ ID NO: 3522
gtagtgttctaatcattttggctttcctcttctacaattctaaaatcacgcaaatggcatccaagagaatactgaaggagctcaaggacttacagagagatccaccaacttcatgcagtgcaggacctgtgggtgaggacatgttccattggcaagcaaccatcattggtccaaatgacagtccctatgctggtggtgttttccttgtgaccatccatttccctcccgattatcccttcaaacctcccaaggttgcattcaggaccaaggttttccatcccaacattaacagcaatggcaatatttgcctggacatactcaaagaacaatggagtcctgctctcaccatatccaaggtgctgctctctatatgttctttgctaacggatccaaatcctgatgaccctttggtgcctgaaattgctcatatgtgcaagaccgacaaagtcaagtatgagtccactgctagaagctggacccagaagtatgccatgggctaaaactcgatctctgccctcttgtcccctccaatacgttttggaattgtctctttttgctcttcaaaaaccttcccttttatagtattatatattaatatgtagatatgaccatgaagtttgggcatattattgaacaacttgcatacatatgagaattgttctcaaaggctttacctttgtgattcgagcttgctctatatgaataaatgctactctcatttagagcttttcaaaaaaaaaaaaaaaa

SEQ ID NO: 3522 - protein, 148 aa, Triticum aestivum
  misc_feature: Ceres CLONE ID no. 749307
  misc_feature: Ceres CDNA ID no. 25891146
  misc_feature: The plant produces a reduced number of seeds.
  misc_feature: Useful for biocontainment applications
  misc_feature (5)..(142): Pfam Name: UQ_con PFAM Desc: Ubiquitin
  misc_feature: Homolog of GI Number: 5762457 NR Desc: ubiquitin
  misc_feature: Homolog of GI Number: 11762186 NR Desc: AT4g27960
  misc_feature: Homolog of GI Number: 18417097 NR Desc: ubiquitin
  misc_feature: Homolog of GI Number: 77416935 NR Desc: ubiquitin
  misc_feature: Homolog of GI Number: 456568 NR Desc: ubiquitin conjugating enzyme
  misc_feature: Homolog of GI Number: 40287554 NR Desc: ubiquitin
  misc_feature: Homolog of GI Number: 66354428 NR Desc: ubiquitinating enzyme
  misc_feature: Homolog of GI Number: 66354464 NR Desc: ubiquitinating enzyme
  misc_feature: Homolog of GI Number: 50904839 NR Desc: ubiquitin
  misc_feature: Homolog of GI Number: 23297139 NR Desc: E2 ubiquitin
MASKRILKELKDLQRDPPTSCSAGPVGEDMFHWQATIIGPNDSPYAGGVFLVTIHFPPDYPFKPPKVAFRTKVFHPNINSNGNICLDILKEQWSPALTISKVLLSICSLLTDPNPDDPLVPEIAHMCKTDKVKYESTARSWTQKYAMG

SEQ ID NO: 3523 - DNA, 1020 bp, Triticum aestivum
  misc_feature: Ceres CLONE ID no. 749419
  misc_feature: Ceres CDNA ID no. 24766195
  CDS (63)..(878): REFERENCED BY SEQ ID NO: 3524
atgcacagtcacctcgtaagcaagcagctgctacagcctcaacaatcaaaccttgattcgacatggcgaagtcgcccatggcgatcttggctctcgggctagcagcactagtcctatccggcgccgggctggtggccgcgcagaactgcggctgccagccgaacgagtgctgcagcaagtacggttattgcgggaccgatgccagctactgcggacaagattgtcggtcgggcccgtgcacggcgagcggcggcgggagcggcgatcccgtggagagcgtcgtcaccgacgcgttctttgacgggatcaagtcccaggccgccgacgggtgccccgggaagagcttttacacgcgccagtttttcctggacggcgcccaggcgaaccccgacttcggcaaaggcagcaccagcgacgacggcaagagggagatagccgccttcttcgcccacttcacccacgagaccggacacatgtgctccatcgaggagaacgaaggggcgagcaaggattactgcgacgagacgaacacgcaatggccgtgtaccccggggaaggcgtactacgggcgcgggccgctgcagctgtcgtggaactacaactacggggcggccggggagagcaccgggttcgacgggctcaacagcccggagacggtggcgcaggaccaggcgctaacgttcaaggcggcgttctggttctggatgaccaacgtgcaccaggccgtgcccagtgggttcggcgcgacgaccagggcaatcaacggtgacgtggagtgcgacggcaagaagccagacttggtgagcgcgcgggcgggctactacacggactactgccagcagttcggcgtcgacccagggaacaacctcacttgctaggtgcttggttctgaattgatcgacgcgcaaaaacctttctggcgatgctcctactgctctacctccctgtgtattctgggatatctatatatcctgtatacgtaataaatttacatctctgtattcaaaaaaaaaaaaaaaa

SEQ ID NO: 3524 - protein, 271 aa, Triticum aestivum
  misc_feature: Ceres CLONE ID no. 749419
  misc_feature: Ceres CDNA ID no. 24766195
  misc_feature (27)..(59): Pfam Name: Chitin_bind_1 PFAM Desc: Chitin recognition protein
  misc_feature (73)..(271): Pfam Name: Glyco_hydro_19 PFAM Desc: Chitinase class I
  misc_feature: Homolog of GI Number: 4741848 NR Desc: chitinase IV precursor
  misc_feature: Homolog of GI Number: 4741842 NR Desc: chitinase II precursor
  misc_feature: Homolog of GI Number: 48093316 NR Desc: chitinase
  misc_feature: Homolog of GI Number: 48093320 NR Desc: chitinase
  misc_feature: Homolog of GI Number: 48093324 NR Desc: chitinase
  misc_feature: Homolog of GI Number: 48093342 NR Desc: chitinase
  misc_feature: Homolog of GI Number: 48093346 NR Desc: chitinase
  misc_feature: Homolog of GI Number: 48093322 NR Desc: chitinase
  misc_feature: Homolog of GI Number: 38371990 NR Desc: chitinase
  misc_feature: Homolog of GI Number: 481896 NR Desc: chitinase
MAKSPMAILALGLAALVLSGAGLVAAQNCGCQPNECCSKYGYCGTDASYCGQDCRSGPCTASGGGSGDPVESVVTDAFFDGIKSQAADGCPGKSFYTRQFFLDGAQANPDFGKGSTSDDGKREIAAFFAHFTHETGHMCSIEENEGASKDYCDETNTQWPCTPGKAYYGRGPLQLSWNYNYGAAGESTGFDGLNSPETVAQDQALTFKAAFWFWMTNVHQAVPSGFGATTRAINGDVECDGKKPDLVSARAGYYTDYCQQFGVDPGNNLTC

SEQ ID NO: 3525 - DNA, 1193 bp, Triticum aestivum
  misc_feature: Ceres CLONE ID no. 749439
  misc_feature: Ceres CDNA ID no. 25446983
  CDS (141)..(818): REFERENCED BY SEQ ID NO: 3526
atactcccaccatctccaccaccaccaccaccatcctctttctcccacccacctttaagccgccccatcccccgctgcgctgagtcacttcctcacgccacccgccgactgattgctcgatcgaggtgcggtgcgcggccatgatctctataggcgggtcctcctcgtcctcctcctccgccgccgcagcgggggtccggatgggcggggccaagcggcgggggaaaccgggcggggccgccgcgccgggggccgcgggcccgccgcagaccaggtggcggagcggcacgcaggagcggatctacggccggcgcctgctggacgcgctccgggccacgcggtcgggcgccgcctcgtccccgcagccgcgcgccgtcaaggccgccgccgactcggcgctggcgctcacggcgcgcgggcagtcgcgctggagccgcgccatcctgctggccggcgccgcgtcctgccgccgccgcgtgctcgtcaaggccggcgggaagatccgccgccaccgccgcccgcaggcgcgcgccgccgccgcggcgtccaaggccgcggccgccgcttccgccagcgaaccgccgttgctcaaggagaagaaggtgaaggaccggctccgcgtgctgggccggctcgtccccgggtgccggaagctgcaggcccccgacctgctcgaggagacggccgactacgtggccgcgctggagatgcaggtcaaggccatgcgcgcgctcgccgacgcgctcgcggcggcccagctgtcctcgcctcccccgccggccgccgccgccgccgacgaggccgagatggagaggtgagggtctgagcctcgcctcgcctccgagagggagattgatgacacgatggctcggggaaataaggcgattgattactggatggatggacggatggattgttaccgcgagagggggtcctgggattccaggagggtattgtgattccgatgatgatgattgctgctgctgctgctgctgctgatttgtaaattcttgatgctactacttgtataagtaatgctgctctgctcctctcctgtgttcttgaaatgttcttcctcctcctgaaacaagacggggggattcctgtgcctgtctgtctcctgcggattggattggattggaattggattatgcttttgtttggctgtgccacggtgaaaaaaaaaaaaaaaa

SEQ ID NO: 3526 - protein, 225 aa, Triticum aestivum
  misc_feature: Ceres CLONE ID no. 749439
  misc_feature: Ceres CDNA ID no. 25446983
  misc_feature: Homolog of GI Number: 34904544 NR Desc: B1066G12.17
  misc_feature: Homolog of GI Number: 66778264 NR Desc: LigA
  misc_feature: Homolog of GI Number: 34898122 NR Desc: bHLH protein
  misc_feature: Homolog of GI Number: 71367849 NR Desc: similar to Methylase involved in ubiquinone/menaquinone biosynthesis
  misc_feature: Homolog of GI Number: 15145793 NR Desc: basic proline
  misc_feature: Homolog of GI Number: 6523547 NR Desc: hydroxyproline
  misc_feature: Homolog of GI Number: 67987371 NR Desc: Aldehyde dehydrogenase
  misc_feature: Homolog of GI Number: 15145797 NR Desc: basic proline
MISIGGSSSSSSSAAAAGVRMGGAKRRGKPGGAAAPGAAGPPQTRWRSGTQERIYGRRLLDALRATRSGAASSPQPRAVKAAADSALALTARGQSRWSRAILLAGAASCRRRVLVKAGGKIRRHRRPQARAAAAASKAAAAASASEPPLLKEKKVKDRLRVLGRLVPGCRKLQAPDLLEETADYVAALEMQVKAMRALADALAAAQLSSPPPPAAAAADEAEMER

SEQ ID NO: 3527 - DNA, 995 bp, Triticum aestivum
  misc_feature: Ceres CLONE ID no. 749573
  misc_feature: Ceres CDNA ID no. 40351318
  CDS (123)..(761): REFERENCED BY SEQ ID NO: 3528
accattcgattacaacgtcttctggttctttgaagaagaacccttctctttgcgcgtgtcccgttctcttctccaatcctcctccatccccactgtgtgatctgatcctaaatcctatagccatgactaccatggaggttaagctatggaatgacaagcgcgagagagaaatgtatgacaactttggggagctttatgccattatcaaagccactgagaggcttgagaaggcctatgttagagatataatctcaccccaggaatatgagttagagtgccagaagctcatagctcatttcaaaaccttagcttccacccttaaagacaccgtgcctagcattgagcgatttgcagatacttacaagatggagtgcccagcggcgattaaccgtcttgtggtttccggtgttcctgctacggtggagcatcgtgcgactgtggctgcctctgcttccacctcggctgctattgtggccgagtgcgtgcagaattttattacttctatggattctttgaaacttaacatggtggctgtggatcaggtgcacccgttgctctcggacctttatgcttcactcaataagttgactatcctgccacctgattttgaggggaaaacaaaaatgaaggagtggattgcgaggttatccaagatgggtgcagctgatgagttgactgaacaacaggcgcggcagcttcactttgatcttgagtcttcttacaattcctttatggcagccctgcccaatgctggtacatgactgagtggccagtgcttgtacattaaatcagaatttccttttttttcatgtttttttttctttggatactaatctgatgattggaaaggaattttctatttggtcacagctcatacatttttaatgctggatcctggatatttacaaatgatggctatgtgctgatcattgaagctttattttatattgtgaatgtgctttcagctttggttttcttcaaaaaaaaaaaaaaaa

SEQ ID NO: 3528 - protein, 209 aa, Triticum aestivum
  misc_feature: Ceres CLONE ID no. 749573
  misc_feature: Ceres CDNA ID no. 40351318
  misc_feature (18)..(205): Pfam Name: VPS28 PFAM Desc: VPS28 protein
MEVKLWNDKREREMYDNFGELYAIIKATERLEKAYVRDIISPQEYELECQKLIAHFKTLASTLKDTVPSIERFADTYKMECPAAINRLVVSGVPATVEHRATVAASASTSAAIVAECVQNFITSMDSLKLNMVAVDQVHPLLSDLYASLNKLTILPPDFEGKTKMKEWIARLSKMGAADELTEQQARQLHFDLESSYNSFMAALPNAGT

SEQ ID NO: 3529 - DNA, 602 bp, Triticum aestivum; identical to SEQ ID NO: 3295
  misc_feature: Ceres CLONE ID no. 749618
  misc_feature: Ceres CDNA ID no. 36699990
  CDS (93)..(332): REFERENCED BY SEQ ID NO: 3530

SEQ ID NO: 3530 - protein, 79 aa, Triticum aestivum; identical to SEQ ID NO: 1962
  misc_feature: Ceres CLONE ID no. 749618
  misc_feature: Ceres CDNA ID no. 36699990
  misc_feature (1)..(78): Pfam Name: Metallothio_2 PFAM Desc: Metallothionein
  misc_feature: Homolog of GI Number: 47076854 NR Desc: type 2 metallothionein
  misc_feature: Homolog of GI Number: 541943 NR Desc: metallothionein
  misc_feature: Homolog of GI Number: 47076858 NR Desc: type 2 metallothionein
  misc_feature: Homolog of GI Number: 47076850 NR Desc: type 2 metallothionein
  misc_feature: Homolog of GI Number: 71040685 NR Desc: metallothionein
  misc_feature: Homolog of GI Number: 2815246 NR Desc: class I type 2 metallothionein
  misc_feature: Homolog of GI Number: 71040683 NR Desc: type 2 metallothionein
  misc_feature: Homolog of GI Number: 74476676 NR Desc: type 2 metallothionein
  misc_feature: Homolog of GI Number: 47076870 NR Desc: type 2 metallothionein
  misc_feature: Homolog of GI Number: 747906 NR Desc: metallothionein

SEQ ID NO: 3531 - DNA, 1143 bp, Triticum aestivum
  misc_feature: Ceres CLONE ID no. 750382
  misc_feature: Ceres CDNA ID no. 24767120
  CDS (160)..(885): REFERENCED BY SEQ ID NO: 3532
cttttttttagacactccccaagggctggcccaagaagcgtaagcgctgacgaggagttctcccccaatcccccgttctcccccgccctacacgttctcgctccccttgccgccgccagctcctcccctttcgccggagctccttcgccggcagtagagatggtgaaaggcgcagtccgctatgagcctggaccggcatttcaggagagtggagagcagggcaagcttgaaataccagcatctggctccacagaattttggctaatacagtggcctctaaaccatgtaaatgcttctgattttattggtaaagaagcttctcttaagcttaatgacgatggaaacttgggaaatttggagagttcttcggggaaatcatatgaactcgttagctttgctgctcaacaaccagatgctactgtcttcattccatcaggatctgaaatgaaagccgtggggaagatttcacgcagagtttgcttggttcgttaccctgaacctgaagaattggagaaagagaaaccaagttttgggagtcttacacctggcagtaggagatctgcaggttcttctcggaagactatgtctcggttcagtggcttctcgaagaaccgtagcagccaaggatcagcattgtccctgggtcaggagaagcgtagcagccaaggatcagcattgtcccagggtgaacagagcgcggagccgacgcccaaacacaagcagaagagaagggacgaaagcagcttggggggccactcaaacgtggccgccaagtcctcggaaggatcccaggctcgtggcgcaggaagcaacacaacctctgagatgccgcagacgcccgtcgagaaatccaagaagaagaagagagttaggattgaagagtagcaacaagtggcaagcagcagtgccatgagtcaccctagcttggagaagagatgataattttccctgaacgatcagcagttgcttctcctcttgtatgtgtcaagacagttattgcttgttcctcgatcggtagtcctgcgtttgttggccttgtgtgttgcaggttcatgatctctgcggccacaatacaatcgtgaaagttagtcgtggtgaatgaaagctgtggaggcaaatttcgtgacaaaaaaaaaaaaaaaa

SEQ ID NO: 3532 - protein, 241 aa, Triticum aestivum
  misc_feature: Ceres CLONE ID no. 750382
  misc_feature: Ceres CDNA ID no. 24767120
MVKGAVRYEPGPAFQESGEQGKLEIPASGSTEFWLIQWPLNHVNASDFIGKEASLKLNDDGNLGNLESSSGKSYELVSFAAQQPDATVFIPSGSEMKAVGKISRRVCLVRYPEPEELEKEKPSFGSLTPGSRRSAGSSRKTMSRFSGFSKNRSSQGSALSLGQEKRSSQGSALSQGEQSAEPTPKHKQKRRDESSLGGHSNVAAKSSEGSQARGAGSNTTSEMPQTPVEKSKKKKRVRIEE

SEQ ID NO: 3533 - DNA, 826 bp, Triticum aestivum
  misc_feature: Ceres CLONE ID no. 750516
  misc_feature: Ceres CDNA ID no. 24766634
  CDS (163)..(447): REFERENCED BY SEQ ID NO: 3534
cctttttacctcgcctgcccctccccgtccctctttatatacggcccgccctcgttcgcccacaccaccaataaagcccaccaagcctcaaacgcccacgttggagcagcagcagcaccagcaccgagccggagcccaccagccgtccgataaacagatccgatggctctcgctctctccggctccgctgctgcccgcgcgctcgcccagcggctggccccggccaccaggggctacgcggcggcggcctcctccggggcgatgaggcgcggcgccgcggcggccgcggacgggaaggcggccagggaggccgagaaggccgcggccgacgcctcgtgggtgcccgaccccgtcaccggccactaccgccccgccaaccgcgccgtcggcgccgaccccgccgacctccgcgccgcgcacctcgggcagacctacgcacgggcttgaaggccacgctcgacgaccctcctggccccgccatggaaggaaaactgctatgctacgtaaaaggggaagccaggcggggctcgttcgccgagcgcagcgccgcgggcggctggtgtcgctggcgcggcttaacgacgcatcaatcatcatcgtcgatcctatactacggaggagatgcggcctggatgtttggctgtttcccattgtgtgtgtgtgcgcgtgcgtgcgtgcgtccgggcttggatgccctgctatagtgttcatgtgctcagatcagatgtatttctcgtcgagcagggcttgtaccttttacttttacagctaagtattaataacgaaagaatctagcgttttcttttcctgaaaaaaaaaaaaaaaa

SEQ ID NO: 3534 - protein, 94 aa, Triticum aestivum
  misc_feature: Ceres CLONE ID no. 750516
  misc_feature: Ceres CDNA ID no. 24766634
  misc_feature (1)..(88): Pfam Name: LEA_3 PFAM Desc: Late embryogenesis abundant protein
  misc_feature: Homolog of GI Number: 19347607 NR Desc: Ramy1
  misc_feature: Homolog of GI Number: 7489602 NR Desc: zinc inducible protein homolog
  misc_feature: Homolog of GI Number: 7489606 NR Desc: zinc
  misc_feature: Homolog of GI Number: 488731 NR Desc: chitinase
  misc_feature: Homolog of GI Number: 100753 NR Desc: hydroxyproline
  misc_feature: Homolog of GI Number: 21627 NR Desc: hydroxyproline
  misc_feature: Homolog of GI Number: 91210 NR Desc: proline
  misc_feature: Homolog of GI Number: 27375632 NR Desc: blr0521
  misc_feature: Homolog of GI Number: 6523547 NR Desc: hydroxyproline
  misc_feature: Homolog of GI Number: 21219450 NR Desc: putative secreted proline
MALALSGSAAARALAQRLAPATRGYAAAASSGAMRRGAAAAADGKAAREAEKAAADASWVPDPVTGHYRPANRAVGADPADLRAAHLGQTYARA

SEQ ID NO: 3535 - DNA, 539 bp, Triticum aestivum
  misc_feature: Ceres CLONE ID no. 751180
  misc_feature: Ceres CDNA ID no. 25891147
  CDS (104)..(271): REFERENCED BY SEQ ID NO: 3536
accacccactactagttttgtgcatttgcctcctcgatcttctcaagtctctttaatttctcaaaggaaagaaaagaaaccaaattttattttcagagaaaaaatggaggcattgaagatgaagcttttctttgttgtcatggccatgttgatcatggcagcatcagctgcagattcaccagctccaagtcctacatcggatgctaccaccttgttcgtgccaacagcggttgcttcactcgttgctcttgcttttgggcttctcttctgagtttgtcaacaatgaagcaagcaactaattgtattgtatgggattcattgtgttttcatcatttttatgattcatattactttgtgacacattcatttcccactgtacttttttgtttgttatgtttatattatgggctttaatttgaatttgatgatgtaatattaatgtcatttgtttggtttcatgaatttgttcatgatgcccttcttcttttggttagattattgagcactcttcttattctttatgaaaaaaaaaaaaaaaa

SEQ ID NO: 3536 - protein, 55 aa, Triticum aestivum
  misc_feature: Ceres CLONE ID no. 751180
  misc_feature: Ceres CDNA ID no. 25891147
MEALKMKLFFVVMAMLIMAASAADSPAPSPTSDATTLFVPTAVASLVALAFGLLF

SEQ ID NO: 3537 - DNA, 1261 bp, Triticum aestivum
  misc_feature: Ceres CLONE ID no. 751214
  misc_feature: Ceres CDNA ID no. 40041311
  CDS (75)..(926): REFERENCED BY SEQ ID NO: 3538
atccagtactgccaggcacccagtgagcacagctcgtcgagcgagccaccgtcaccttgggccttgccgggacaatggagccagcggcggcgacgatgctctcacgaccgcgagtgttgcccattctgctggccgtgttcgcgctgctcgcggcggccgtgacggtgggcgcgcgcgggggcgcggagagggcgccgacgctggtgttcatcctggcggggcagtccaacatgggcggccggggcggcgccacggtcggcaaccgctgggacggcgtggtgccgcccgagtgcgcgccgtccccgcggacgctgcgcctctccccgtccctccgctgggaggaggcccgcgagccgctgcacgccggcgtggacgccggcaacgtggtgggcgtgggccccgggatgccgttcgcgcacgcgctgctccgctccccggcctgcccgcgcggcgccgttgtgggcctcgtcccctgcgcgcagggcggcacccccatcgccaactggtcccgcggcaccgagatgtacgagcgcatggtgacccgcgcccgcgtcgccggcgccgggacggggaggaggattgcggcgctgctgtggttccagggggaggccgacaccctgcggcgcgaggacgcgctggcgtacgccggcaggatggaggcgtttgtgcgggacgtccgccgcgacctcgccttgcccaacctcctcgtcatccaggttgggatcgcgacggcgcagtggcaggggaataagcaggggaagtggctggacctggtgcggaagcagcagagggcggtgcgggtggcgaacctcaagtacgtggacgccatggggctccccctcgccaacgacatcacgcacctcaccacccaggcccaggtccggctcggcaagatgcttgccgacgcgtacatcgccacgctctgatgataatccagtacgcaatcagtcagtgtgtgtgcctgcctgcctgattagtatcattgattgattccacggaagagttgatttggtgatgattaattagttgttgacaagagatgaatagatctgctttggtgacgaggagtcaggctccaacgagctcagatcattgttgccattagttgttatcggcattgtaggaacaactgtaacagtctcatcaccagtacgacatacattgccgttttgcggagggaaaatccttggccattgtgatgtttattatctacctggaagtgaaaagaagccttgtttcagcagcaaaaaaaaaaaaaaaa

SEQ ID NO: 3538 - protein, 283 aa, Triticum aestivum
  misc_feature: Ceres CLONE ID no. 751214
  misc_feature: Ceres CDNA ID no. 40041311
  misc_feature: Homolog of GI Number: 50921295 NR Desc: OSJNBa0027H06.16
  misc_feature: Homolog of GI Number: 75766303 NR Desc: Chain D
  misc_feature: Homolog of GI Number: 58532036 NR Desc: OSJNBa0009K15.9
  misc_feature: Homolog of GI Number: 7270372 NR Desc: receptor protein kinase
  misc_feature: Homolog of GI Number: 66778899 NR Desc: UvrD/REP helicase
  misc_feature: Homolog of GI Number: 66778264 NR Desc: LigA
  misc_feature: Homolog of GI Number: 66778368 NR Desc: Cytochrome c biogenesis protein
  misc_feature: Homolog of GI Number: 67157549 NR Desc: ABC transporter
  misc_feature: Homolog of GI Number: 67986517 NR Desc: Flavin
MEPAAATMLSRPRVLPILLAVFALLAAAVTVGARGGAERAPTLVFILAGQSNMGGRGGATVGNRWDGVVPPECAPSPRTLRLSPSLRWEEAREPLHAGVDAGNVVGVGPGMPFAHALLRSPACPRGAVVGLVPCAQGGTPIANWSRGTEMYERMVTRARVAGAGTGRRIAALLWFQGEADTLRREDALAYAGRMEAFVRDVRRDLALPNLLVIQVGIATAQWQGNKQGKWLDLVRKQQRAVRVANLKYVDAMGLPLANDITHLTTQAQVRLGKMLADAYIATL

SEQ ID NO: 3539 - DNA, 728 bp, Triticum aestivum
  misc_feature: Ceres CLONE ID no. 751235
  misc_feature: Ceres CDNA ID no. 40041312
  CDS (98)..(439): REFERENCED BY SEQ ID NO: 3540
atcagcatcaggcaatcacagagcaccacgagcaatcgcataccaaaacctacgtccgcttacggtttccgtttagctagctcccaggcagcgagcaatggcttccggtcagcaggagaggtcggagctggaccgcatggcccgcgagggggagaccgtcgtccccggcggcaccggtgggaagagcctcgaggcgcaggagcacctcgccgacgggcgcagccgcggcggggagactcggaaggagcagctcggggaggaggggtaccgcgagatggggcacaagggcggggagactcgcaaggagcagctcggggaggaggggtaccgcgagatggggcgcaagggcgggctgagcaccatggaggagtctggtggcgagcgcgccgccagggagggcatcgagatcgatgagtccaagttcaagaccaagtcctaagtaatgtaggtcaagatgtcccagtgtctagctgagtagctagctagtagtgagcaagctgtctgctcatgtttgtagtaatgaataatgtaggtcaaggtcaggtcttgacatgacgagagcacgcatgtaggcgatcgcatgtactgtgatcatgtgtgcgttaggtgtcttagcttgtagtagtgaccatgtgttcttcaggtgtcctagcttgtagtaggtgtcgttgtggcccgtgagtcagcttgctaatgtatttgagtcgttgtcaaaaaaaaaaaaaaaa

SEQ ID NO: 3540 - protein, 113 aa, Triticum aestivum
  misc_feature: Ceres CLONE ID no. 751235
  misc_feature: Ceres CDNA ID no. 40041312
  misc_feature (62)..(113): Pfam Name: LEA_5 PFAM Desc: Small hydrophilic plant seed protein
  misc_feature: Homolog of GI Number: 33151040 NR Desc: Em protein
  misc_feature: Homolog of GI Number: 1754977 NR Desc: Em protein
  misc_feature: Homolog of GI Number: 289199 NR Desc: late embryogenic abundant protein
  misc_feature: Homolog of GI Number: 18499 NR Desc: late embryogenesis abundant protein
  misc_feature: Homolog of GI Number: 444336 NR Desc: water stress
  misc_feature: Homolog of GI Number: 57506544 NR Desc: Em
  misc_feature: Homolog of GI Number: 3641278 NR Desc: late embryogenic abundant protein
  misc_feature: Homolog of GI Number: 1141782 NR Desc: EM protein
  misc_feature: Homolog of GI Number: 19017 NR Desc: LEA B19.4
  misc_feature: Homolog of GI Number: 168467 NR Desc: late embryogenesis abundant protein
MASGQQERSELDRMAREGETVVPGGTGGKSLEAQEHLADGRSRGGETRKEQLGEEGYREMGHKGGETRKEQLGEEGYREMGRKGGLSTMEESGGERAAREGIEIDESKFKTKS

SEQ ID NO: 3541 - DNA, 755 bp, Triticum aestivum
  misc_feature: Ceres CLONE ID no. 751493
  misc_feature: Ceres CDNA ID no. 40351319
  CDS (113)..(472): REFERENCED BY SEQ ID NO: 3542
gaactgtgaagtgtatttggtcactgacctatcttggtagagatttgaagtttaaaccttcaaattaatcaaaccattttaatttgcctatagattctgagtcactgctgctatggcgctacgcgtacttcttgtgttggggatgttgctgatgttgtgccttgttaaggtttcatctgatccaaagatagaagaagaaatactggaagcagaagaagaactgcagtttcccgataacgagccacttatcgtgagagacgcgaacagaaggctaatgcaagatatggattgtggtgggttgtgcaagacgaggtgcagtgcacattcgaggcccaacttgtgcactagggcgtgtggcacgtgctgtgtgaggtgcaagtgtgtcccacctggtacatctggaaatagggaactatgtggaacctgctacactgatatgaccacccatggcaacaagaccaagtgcccttagagaaacaaaaagcttcattagattggccaatttgtgcttcgttcattatgcatcaaagtttaagtgtactactatgtggggtgcaattctgtttactatagcgatggatttgtgtgcactactatggctatattaattgactgttagtgtttttatttagggtgtgcctgtatgattgatgtgatgagctagtcatgtaaactttgtgcctttgtttgcgttaatataaaatgtagtacatcactgtacctttttatttcccacttcaaaaaaaaaaaaaaaa

SEQ ID NO: 3542 - protein, 62 aa, Triticum aestivum
  misc_feature: Ceres CLONE ID no. 751493
  misc_feature: Ceres CDNA ID no. 40351319
  misc_feature (1)..(62): Pfam Name: GASA PFAM Desc: Gibberellin regulated protein
MDCGGLCKTRCSAHSRPNLCTRACGTCCVRCKCVPPGTSGNRELCGTCYTDMTTHGNKTKCP

SEQ ID NO: 3543 - DNA, 828 bp, Triticum aestivum
  misc_feature: Ceres CLONE ID no. 751890
  misc_feature: Ceres CDNA ID no. 40041313
  CDS (78)..(602): REFERENCED BY SEQ ID NO: 3544
atcatccgctccaaagccaacacagcagcagcagcatcagtcagtaaccagctcgggaagcagacagagcggcagcaatggggagcaagagatcgccgcgcgcgccggccgtggtggtggtagtggtgctgctgctgttcgtcctcatgccggacgaggcggacgcccaggtgttctgccggtcccagttcaacctggccaacgaggcctgcagcctgcggacctaccccggcgccaacccggcggtgccaccgcggcggccactgttgctcaacgcgtcctcgtccgccagcggctacgagctgcaggcggccggcgacgagcacagcgccagcggcggccatggcggcgagcacgggagcagccacggcagcgagcacgggggcagccacgtgaggcgccgccacgggcaccagcaccacgtagggggcgcggacccgtacgacacggcgtgctgccggcgcctcatgggcatcgacaacgcctgcatctgccaggccatgtccttcctcccgcagttcatgagcagggtcaagcactccatcaagctcaccccggtccccggctgcgacatctccttcgagtgcgccggcgtctactgaccacgccccgccccgccccttcccacagttccattttactgaaaacgtagcagcctctgcaccagcaattttccattttctggtctagtttaacaattctgggatttatttacattatatagttctgttctggatgcttttttctccctctcatgactagtagggacctttttttttccataatgattaatagtgaacttggcattctccaaaaaaaaaaaaaaaa

SEQ ID NO: 3544 - protein, 174 aa, Triticum aestivum
  misc_feature: Ceres CLONE ID no. 751890
  misc_feature: Ceres CDNA ID no. 40041313
  misc_feature: Homolog of GI Number: 67987177 NR Desc: 4Fe
  misc_feature: Homolog of GI Number: 461955 NR Desc: Prespore protein DP87 precursor
  misc_feature: Homolog of GI Number: 60467798 NR Desc: spore coat protein SP75
  misc_feature: Homolog of GI Number: 76261874 NR Desc: Putative Ig
MGSKRSPRAPAVVVVVVLLLFVLMPDEADAQVFCRSQFNLANEACSLRTYPGANPAVPPRRPLLLNASSSASGYELQAAGDEHSASGGHGGEHGSSHGSEHGGSHVRRRHGHQHHVGGADPYDTACCRRLMGIDNACICQAMSFLPQFMSRVKHSIKLTPVPGCDISFECAGVY

SEQ ID NO: 3545 - DNA, 630 bp, Triticum aestivum
  misc_feature: Ceres CLONE ID no. 752125
  misc_feature: Ceres CDNA ID no. 40351320
  CDS (56)..(226): REFERENCED BY SEQ ID NO: 3546
agaagaactcgcctcttccctaacaaagcgacgaggttgccgctgggccgacgcgatgtgggatccgtcgcttcgctcggtacgtcaccacactcgcccaacaaaagcccgcgagagcgagaggagaagggcgggaaccaggcgcaggaagggggaggagaagggcgggaaccagacgcgggaaggggagaagggaaggcgtgaatcaggggaaggggcgaagtagagtagaaggccgcgctccctcgtcctcagcccgtcgtcgacgccgtcttgcctgatctgaggcgcgaactagaggagaagccggagcaccctcatcctcagcccgccgtcggcgtcgtcctgctcgatctgatctgggtttgttctccctgtaatgtatgagattacttcttcccccatctcttactgttctcatggccagatgatttttggttcaataaactaggctagggtttgctgtttctggagatttgtggtgatacgatcagtagctatgttccaagaacggtattgatttccctatgctgcgattcaggctcaatctatgtggatcgggttgtaatgctcccatgtcttttctcttaagcaatgtctctggatgcatgtttaaaaaaaaaaaaaaaa

SEQ ID NO: 3546 - protein, 56 aa, Triticum aestivum
  misc_feature: Ceres CLONE ID no. 752125
  misc_feature: Ceres CDNA ID no. 40351320
MWDPSLRSVRHHTRPTKARESERRRAGTRRRKGEEKGGNQTREGEKGRRESGEGAK

SEQ ID NO: 3547 - DNA, 527 bp, Triticum aestivum
  misc_feature: Ceres CLONE ID no. 752415
  misc_feature: Ceres CDNA ID no. 40351321
  CDS (61)..(378): REFERENCED BY SEQ ID NO: 3548
attttcgcggcgcacagcagaactctgcttcttcggattccgatcgcacgcgccgtcaccatggtgaacgttccgaaaacaaagaagacatactgcaagagtaaggagtgcaggaagcacacgctgcacaaggttacccaatacaagaagggtaaggatagcattgctgcccaaggaaaacgccgttatgatcgcaaacaatccggttatggtggacaaactaagcccgtcttccacaagaaggctaaaaccaccaagaagattgttctgaggttgcaatgccagggttgcaagcatgtctcccaacacgctattaagaggtgcaagcactttgagattggtggtgacaagaagggcaagggaacatcactcttctagtttgagaattaggatttagagctttatgtttcagcaatgttggaatgttttgtttctctctggattttttctgctagttatattttattattttgcaacaccttgttattgagaaattaaaactattttgcacaaaaaaaaaaaaaaaa

SEQ ID NO: 3548 - protein, 105 aa, Triticum aestivum; identical to SEQ ID NO: 3358
  misc_feature: Ceres CLONE ID no. 752415
  misc_feature: Ceres CDNA ID no. 40351321
  misc_feature (19)..(95): Pfam Name: Ribosomal_L44 PFAM Desc: Ribosomal protein L44

SEQ ID NO: 3549 - DNA, 606 bp, Triticum aestivum
  misc_feature: Ceres CLONE ID no. 752733
  misc_feature: Ceres CDNA ID no. 40351322
  CDS (99)..(302): REFERENCED BY SEQ ID NO: 3550
actgcatcaaaacaaaacaaaagggttttctattcgattcgacccatacttcttcaaatcgccatctcatcctttctcaccaaccaattacaaagactatggcgagcgcgggcaagtttccaagtccgactcccccatcgataatagaagtgaagaagccgccgccggcgaccataatctctggaccctctggaccctctggaacctctggagccttatacaactatgctgggaatgggaatagcaagacccaaactaagaatggaaaccttcttggcaaccgtcttggcaatgaaaagtgacaacaatcagaacaagaaaaagactttcaagtgaaaactcactcacttacttgcttcttggacagacagtttcatttcaatagctttggtgaatagtacatacatgatgatgctctagtaaaagtgttttgcttgtttcttaaattactattacagtattatgctttggtttttctttctagtacaaaaatgaattgcggtgtgtgaatttgtgaaataagaataaacgaattcgttttgtcgaaggtttgtgattgaataatgggtttgttgattgagttcgtaacgaaaaaaaaaaaaaaaa

SEQ ID NO: 3550 - protein, 67 aa, Triticum aestivum
  misc_feature: Ceres CLONE ID no. 752733
  misc_feature: Ceres CDNA ID no. 40351322
MASAGKFPSPTPPSIIEVKKPPPATIISGPSGPSGTSGALYNYAGNGNSKTQTKNGNLLGNRLGNEK

SEQ ID NO: 3551 - DNA, 589 bp, Triticum aestivum
  misc_feature: Ceres CLONE ID no. 752744
  misc_feature: Ceres CDNA ID no. 40351323
  CDS (53)..(328): REFERENCED BY SEQ ID NO: 3552
ttttttcattgggtgctgatcggaacaaacagggaatagaagagaggagaagatgggtttcataatggaatttgcggagaacttggtattaaagttgatggaagatccgaaggaaagggatcggaggttcagggagcacgtttatagagtgaaggacaggtgcgagaagacgaaggagatgtggagctaccctatgcgaccctatgggttttggacattcgaacgccacaattctcagcttgcttgggatgcacagattagccaagtggccgggaggagggacccttatgatgatctcctccaacatttctctaccccacctaagtgagtgttgctgaacttgccacaagcattatcggtgaaaaggatgaatttgtcgtaatttccccttgtaatatcctgtcttgttgcatgttgcagagattacaactggattgtgctgttatttcaaaaataaaggttccatataactatgctgttacagaagaattttttcctctccagaatttacattcttgcacaactgcacttcctggcaattattctgctttatcaaaaaaaaaaaaaaaaaagaaaaaaaaaaaaaaaa

SEQ ID NO: 3552 - protein, 91 aa, Triticum aestivum
  misc_feature: Ceres CLONE ID no. 752744
  misc_feature: Ceres CDNA ID no. 40351323
MGFIMEFAENLVLKLMEDPKERDRRFREHVYRVKDRCEKTKEMWSYPMRPYGFWTFERHNSQLAWDAQISQVAGRRDPYDDLLQHFSTPPK

SEQ ID NO: 3553 - DNA, 2077 bp, Triticum aestivum
  misc_feature: Ceres CLONE ID no. 753130
  misc_feature: Ceres CDNA ID no. 40041314
  CDS (84)..(1565): REFERENCED BY SEQ ID NO: 3554
tttttttcgctttcccctttcttttcccctgctttctaacccgaggttcaccagaagcggcagcgccaccaaaaattctcgccatgaggttgggatccatgccggtgctctccctcttcgtcaacgcgctcctcctcttcgtcgtcctccagttcgacgcgaatgcgttcgccacccccacagataacatcgtgaggcagctatcgtcggtggtgaagtggccacgcggttctcccccccactcgcccgagcagtcctcacacccccagtatgatgggaatgtagcagtgcaatttgagagtggctactttgttgagacgcttgttgaaggagacaagctcggtgtcacgccccacaccattagggtgtccccagttgagggtggagagcttcttgcagtagactcagcacatagcaacattgtgcgaataaccccaccattatctgaatatagcaggggaaggctagttgctggttctttccaggggcatgcaggtcatatcgatggtaaacctattgatgcaagattcaaacgccccactggtgttgctgtggatgatacaggaaatgtttacattgctgatacagcaaatttggcaattcgaaagattggcgagtcaggggtgaccactattgctggaggaaaatccaatatcccagggtatagggatggtcccagtgaagatgcaaagttctctactgattttgatgttgtatatgtgaagaaaatgtgctctctgttggtcattgaccgtgggaatgctgcccttcggaaaatcgtccttccgcaagagaactgtacttaccaggatgccgcattcctatcttcagatatcgtactggttattggtgccgttgtggctggatatctcttttctgtggtacagcatggatttggttcatcaacttctgaaaagatagaagcatctgaagatggtaaacaagagagcagcactgcaggaaagccacctttggttgtggagagccttaaagaggaaccaagtgcgggatggccgtcttttgggacacttgttgctgatctactgaagcttgctgttgaaggtgtggggaatcttgtcctcaacattgccccgctacgcatgcaacgtgtgaagaaaaaaacaggcctcactcctctcaaagataggcttgtgatgcccgaggacagggaggagaacccagtagcccagaagctcagtagcaccccaatgataaccgagacgctccatgctcctagtgctgctaacgagactgtggcaaaggctcataagagcatcaaatcatcgaaattcagggattctactctctcaagcaagcacaggtccaccaagagacaggagtacgctgagttctacggttcaaccgagacacctcaagcaagcgcaaaggtcccaaaagaccggctccgtcaccgtcatcgggagaagaatggggaggttacctatgggactgggcatccagagcctaagcccttagagatgaaagcggcagactacagcgatccgaagtatgatcactacaacatgagaagcaaatatggtgctgacagcggcttcaggtactgactgatggaagagctctcgtcattgtgcctacagccttcttatcgtcatgccttagggtgtctttcgacgtcgtctctacccccagtgtactaaaagcacaaggatgctgcttatgggtcactgtctcgccctactctccgtccgcaagatgtggcaggtaaagtcagtctagcaatttaggtgggggtagacgtacgtcgtaagtaggtagcatgtatctactatgcgatttcggcaagccggatgtaattttcgcagaaagcaactgttgaccccagattttggtatggtccaaaacataattaagaaggccttaaatagagaagtgagtaagaatgttctgtatcatcagaagaagaaactttgatatttgggccatagccatccgatgtcatctctaaggccgaagttgtgtttaaagtactgatattttgtatgcagaacactattggactgattatgccccaaaatggccttatatgagaaaactttctacaaaaaaaaaaaaaaaa

SEQ ID NO: 3554 - protein, 488 aa, Triticum aestivum
  misc_feature: Ceres CLONE ID no. 753130
  misc_feature: Ceres CDNA ID no. 40041314
  misc_feature (144)..(171): Pfam Name: NHL PFAM Desc: NHL repeat
  misc_feature: Homolog of GI Number: 50251216 NR Desc: putative NHL repeat
  misc_feature: Homolog of GI Number: 42572439 NR Desc: NHL repeat
  misc_feature: Homolog of GI Number: 50912413 NR Desc: putative NHL repeat
  misc_feature: Homolog of GI Number: 20856013 NR Desc: At1g23880/T23E23_8
  misc_feature: Homolog of GI Number: 53793193 NR Desc: NHL repeat
  misc_feature: Homolog of GI Number: 30698020 NR Desc: NHL repeat
  misc_feature: Homolog of GI Number: 3176691 NR Desc: Contains homology to serine/ threonine protein kinase gbX99618 from Mycobacterium tuberculosis. ESTs gbF14403
  misc_feature: Homolog of GI Number: 9369390 NR Desc: T23E23.5
  misc_feature: Homolog of GI Number: 30685100 NR Desc: NHL repeat
  misc_feature: Homolog of GI Number: 42571623 NR Desc: NHL repeat
MPVLSLFVNALLLFVVLQFDANAFATPTDNIVRQLSSVVKWPRGSPPHSPEQSSHPQYDGNVAVQFESGYFVETLVEGDKLGVTPHTIRVSPVEGGELLAVDSAHSNIVRITPPLSEYSRGRLVAGSFQGHAGHIDGKPIDARFKRPTGVAVDDTGNVYIADTANLAIRKIGESGVTTIAGGKSNIPGYRDGPSEDAKFSTDFDVVYVKKMCSLLVIDRGNAALRKIVLPQENCTYQDAAFLSSDIVLVIGAVVAGYLFSVVQHGFGSSTSEKIEASEDGKQESSTAGKPPLVVESLKEEPSAGWPSFGTLVADLLKLAVEGVGNLVLNIAPLRMQRVKKKTGLTPLKDRLVMPEDREENPVAQKLSSTPMITETLHAPSAANETVAKAHKSIKSSKFRDSTLSSKHRSTKRQEYAEFYGSTETPQASAKVPKDRLRHRHREKNGEVTYGTGHPEPKPLEMKAADYSDPKYDHYNMRSKYGADSGFRY

SEQ ID NO: 3555 - DNA, 907 bp, Triticum aestivum
  misc_feature: Ceres CLONE ID no. 753219
  misc_feature: Ceres CDNA ID no. 40351324
  CDS (46)..(588): REFERENCED BY SEQ ID NO: 3556
gagagagaagttttcagtttcagaaagaaagcaaaagcaatagcaatgggttggatcggtgagactgttgattccatcaaatctcttcagatccgccaggtcctcacccaggctgtgagcctaggcatgattgttacgtctgcactgataatatggaaggcattgatgtgcgttactggcagtgaatctcccgttgttgttgttctttctggaagcatggaacccggattcaagcggggagacatcttgttcttgcacatgagtaaagatcctattcgggcaggggagattgttgtgtttaatgttgatggacgtgagattccaattgttcatcgtgtaattaaggtacatgaaagggaagatactggggaggttgatgttctcacaaaaggagacaacaattatggggatgacaggctactgtatgctcatggtcaactttggctgcaaaggcaccacattatgggtagagccgtcgggttcttaccatacgtaggctgggtgaccatcattatgactgaaaagcctattatcaagtatattctcattggtgctttggggttgctcgtgataacttcgaaagattaaatgatgaatatgaagtcaaaactgcggtctaacttcggatggtagggtgagcagaatataatggtaagattaaaagatgaatctgaaatcattttgtaccattcatagtatatgggggacaatatgatgttaaggatttatgcaaaatagttgaattttggtatattcttacttcttcctactccttgatgagttggtatctgactgaaacccctcttcctttgcattttgagtgaaaccccccttcctttatattttaatttggtgcagtttaagattaagcatataaatcagctgttccttaaaaaaaaaaaaaaaa

SEQ ID NO: 3556 - protein, 180 aa, Triticum aestivum; identical to SEQ ID NO: 1752
  misc_feature: Ceres CLONE ID no. 753219
  misc_feature: Ceres CDNA ID no. 40351324
  misc_feature (52)..(124): Pfam Name: Peptidase_S24 PFAM Desc: Peptidase S24

SEQ ID NO: 3557 - DNA, 1851 bp, Triticum aestivum
  misc_feature: Ceres CLONE ID no. 753222
  misc_feature: Ceres CDNA ID no. 40351325
  CDS (56)..(1630): REFERENCED BY SEQ ID NO: 3558
aacccagcccagcccacccattgtaggcaggcacttgctcagttgtccggacgacatggctttcgaaggagcataccatttcctgcagctcgccgtcggccatgccacatcctcgccggcggcactgctcctcgtcgtagtacccttactgctgttactgctagcatcggtaaggaggtccaccatgaccggacgcaagctgcggctcccgccttcgcctccgggcagcctccccatcatcggccacctccaccacatcggcgcccagacccatatctccctccagcacctggtcgacaagtacggccacaacggcctcctcttcctccgtgctggggcggtgcccaccgtcatcgtctcctcgcccagcgccgccgaggccgtcatgcgcacccgcgaccacatcctcgcgtcgcgcccgtggtccatggcctcccacatcctgcgctacaacaccaccgacgtcgccttctcgcccctgggcgagtactggcagcacaccaggaagctcgtcaacacccatctcctcagcgccaagaaggtgcactccttcgcaaatggccgtcaagaagaggtgtgcctcgtcgtcaacaagattcgtgaggcggccaccactgctccatccacggcggtggacatgagcgagtttctggccgcctacaccaacgatgttgtaagccgctcggtgctgggagcgacccaccggaagaaaggccgcaacacgctcttcagagagatgaccgagaccaacgtcgaccttctcgtgggattcaaccttgagaacttcatccctaggtggccactgacggaggtgctcttcaggctggtctgctggaaggttcagcgacacctcaacaagtgggacgccttgctggaagaggtcatcaaggagcacatcaacttgaagcaagacaattctgccgacttcatccatgttttcctctctctacagcaagagtacggtctcaccgacgataatgtcaagtccctcttgatgaacatatttgaggcagccatagaaacatcatatctggtgctggaatacgccatggccgagcttatcaacaacagacatgttatgaagaaactacaaaccgaggtaaggacgtttgcatcgtccaagggaaaaaagttggacatgattacggaggaggacctcagcagcctgccgtacctaaaggcaaccatgaaagaggcgctgcgcttgcacccaccagggcctttactcctcccacactactccactgctgattgcagcatcgacggatatgacataccggccaaaacacgtatccttgtgaatggttgggccattgggagagacccaaaggcttgggagagaccggaggagttcatgcccgagaggttcctacaagatggtcaggagaaatctagcaacctgggtcaagattttaagtatcttccatttggatccggacgcaggatttgccccggggcaaatttcgcactcgcgaccatggagattatgctcgtaaacctcatgtaccattttgactgggaggttcccaatgagaaagatggtgctggtggaaaggttagtatggctgagacgttcgggctgatgcttcgccgaaatgagaaactctaccttgttccaaggattgcctaataactagtagtgcccccgatcccaagtgtaagcctatttagacttgtgcgcaataattaaggtgagggctaaaataagcatgttgtccatctattgttgctggcgatcgataagatggacgagaagtttaatgcactggttatagtgcagttatgttgtagtagtcatgaaaaataatgtatttgagttgtgatggacttatattaaaaaaaaaaaaaaaa

SEQ ID NO: 3558 - protein, 524 aa, Triticum aestivum
  misc_feature: Ceres CLONE ID no. 753222
  misc_feature: Ceres CDNA ID no. 40351325
  misc_feature (52)..(522): Pfam Name: p450 PFAM Desc: Cytochrome P450
MAFEGAYHFLQLAVGHATSSPAALLLVVVPLLLLLLASVRRSTMTGRKLRLPPSPPGSLPIIGHLHHIGAQTHISLQHLVDKYGHNGLLFLRAGAVPTVIVSSPSAAEAVMRTRDHILASRPWSMASHILRYNTTDVAFSPLGEYWQHTRKLVNTHLLSAKKVHSFANGRQEEVCLVVNKIREAATTAPSTAVDMSEFLAAYTNDVVSRSVLGATHRKKGRNTLFREMTETNVDLLVGFNLENFIPRWPLTEVLFRLVCWKVQRHLNKWDALLEEVIKEHINLKQDNSADFIHVFLSLQQEYGLTDDNVKSLLMNIFEAAIETSYLVLEYAMAELINNRHVMKKLQTEVRTFASSKGKKLDMITEEDLSSLPYLKATMKEALRLHPPGPLLLPHYSTADCSIDGYDIPAKTRILVNGWAIGRDPKAWERPEEFMPERFLQDGQEKSSNLGQDFKYLPFGSGRRICPGANFALATMEIMLVNLMYHFDWEVPNEKDGAGGKVSMAETFGLMLRRNEKLYLVPRIA

SEQ ID NO: 3559 - DNA, 929 bp, Triticum aestivum
  misc_feature: Ceres CLONE ID no. 753332
  misc_feature: Ceres CDNA ID no. 25891143
  CDS (25)..(687): REFERENCED BY SEQ ID NO: 3560
atcagcaactacaacgtgagaaacatggcttccttaagctccttagtgctgctccttgcagctctaattctatcccctcaagttcttgcaaactatgagaatcccccagtgtacaagcctcccactgagaaaccaccagtttataagcccccagttgagaagcctcctgtttacaaacctccagttgaaaaccccccaatttataagcctccagtagagaagccaccagtgtacaagcccccagttgagaaacccccagtttataagcccccagttgagaaaccaccagtgtacaagcccccagttgaaaaaccaccagtgtacaagcccccagttgaaaaacccccagtgtacaagcccccagttgaaaaaccaccagtgtacaagcccccagttgagaagcccccagtttacaagcccccagttgagaagccaccagtttacaagcccccagttgagaagccaccagtatacaagcccccagttgagaagcctccagtgtacaagccaccagtagagaagcctccagtttacaagccaccagtagagaaacctccagtttacaagcccccagtggagaaacctcctatttacaagccacctgttgagaagcctccggtctacaagccaccatatggaaagccaccatacccaaagtaccctccaactgatgacacccatttctgaaggatgtcaagaggtgtattgagtatatgctaaataagaggtgctcaaaatgtagttatagattacaaattattgcaagggttgctcttagcttcttcatttcaagcttttgtttacactttgcagtgctatggcaaagataagagtatcatggatggaaaaagggggggggaaaatgttgctttgtactccaaattatgaataatagaactttatattatttatcaaaaaaaaaaaaaaaa

SEQ ID NO: 3560 - protein, 220 aa, Triticum aestivum
  misc_feature: Ceres CLONE ID no. 753332
  misc_feature: Ceres CDNA ID no. 25891143
  misc_feature (107)..(116): Pfam Name: Extensin_1 PFAM Desc: Extensin
  misc_feature (117)..(126): Pfam Name: Extensin_1 PFAM Desc: Extensin
  misc_feature (127)..(136): Pfam Name: Extensin_1 PFAM Desc: Extensin
  misc_feature (137)..(146): Pfam Name: Extensin_1 PFAM Desc: Extensin
  misc_feature (147)..(156): Pfam Name: Extensin_1 PFAM Desc: Extensin
  misc_feature (157)..(166): Pfam Name: Extensin_1 PFAM Desc: Extensin
  misc_feature (167)..(176): Pfam Name: Extensin_1 PFAM Desc: Extensin
  misc_feature (177)..(186): Pfam Name: Extensin_1 PFAM Desc: Extensin
  misc_feature (37)..(46): Pfam Name: Extensin_1 PFAM Desc: Extensin
  misc_feature (67)..(76): Pfam Name: Extensin_1 PFAM Desc: Extensin
  misc_feature (77)..(86): Pfam Name: Extensin_1 PFAM Desc: Extensin
  misc_feature (87)..(96): Pfam Name: Extensin_1 PFAM Desc: Extensin
  misc_feature (97)..(106): Pfam Name: Extensin_1 PFAM Desc: Extensin
  misc_feature: Homolog of GI Number: 82581111 NR Desc: proline
  misc_feature: Homolog of GI Number: 3914458 NR Desc: Repetitive proline
  misc_feature: Homolog of GI Number: 1279233 NR Desc: proline rich protein
  misc_feature: Homolog of GI Number: 130997 NR Desc: Repetitive proline
  misc_feature: Homolog of GI Number: 3914441 NR Desc: Repetitive proline
  misc_feature: Homolog of GI Number: 8096255 NR Desc: TrPRP2
  misc_feature: Homolog of GI Number: 437310 NR Desc: nodulin
  misc_feature: Homolog of GI Number: 3914459 NR Desc: Repetitive proline
  misc_feature: Homolog of GI Number: 6580688 NR Desc: proline
  misc_feature: Homolog of GI Number: 296830 NR Desc: LENOD2
  misc_feature: Useful for making shorter plants
  misc_feature: Useful for modifying plant structure
  misc_feature: Useful for sterility
MASLSSLVLLLAALILSPQVLANYENPPVYKPPTEKPPVYKPPVEKPPVYKPPVENPPIYKPPVEKPPVYKPPVEKPPVYKPPVEKPPVYKPPVEKPPVYKPPVEKPPVYKPPVEKPPVYKPPVEKPPVYKPPVEKPPVYKPPVEKPPVYKPPVEKPPVYKPPVEKPPVYKPPVEKPPVYKPPVEKPPIYKPPVEKPPVYKPPYGKPPYPKYPPTDDTHF

SEQ ID NO: 3561 - DNA, 1866 bp, Triticum aestivum
  misc_feature: Ceres CLONE ID no. 753540
  misc_feature: Ceres CDNA ID no. 29191549
  CDS (259)..(1722): REFERENCED BY SEQ ID NO: 3562
aaccaacccgtaccagcaaccgcgtcgacgggctggtactgctcctcctactattacaggaaggccggcgccatcgccgaggacgcccagctcggcgaatcattccgtccatggcttgattgtctgcccgtataacagcaaagcgatccaaggttcctagccagctccacggtcgcgagaaaggtaccgacaggtcgtgctgttgattcattactaggtgggagggagcgaagcaaagggcataccatcgaccgaccgatggttgcgcacaaggcggcctcgtggctgcccgtggacttccggctgccggcggtgccgcaggcggcgctgggcatactggcgttcgaggcgggggcggccatgtccaagctgctctcgctgcaccgctcgctctcggagcaggaggtctcccggctgcgctccgacgccatgcgctcgccgggggtggcctacctcaactccaccgaccaggcgttcctcctccggctggcgtgcgccgagctggtgctgtcgctcgacgccgcggcagccgccgtcgcgcgcctcggcctgcgctgcggcatcgacttcgccggggtgtacgcgagcatcaaggccggcgcgcacgacgcgcgcctcgacctgctcgccgccaaggggctcaaggtcaaggccaagaagatggagcgcctcgtggccgccacgtccaagctgtgctccgagatggaggcgctcgacgagctcgagtccgccgagcggaagctcaccgtccgcggctggagtcgcctcagcgggccgataccgcagaagctcgcggacccgccgcaggccggcgactcgatgggcgccgactcgctcaagcaggagatcaagacgcagctgctcaaggtgcggcggctcaaggaggagtccctgtggagccagagctacgagaaggccgtgggcctcatggcgcgcgctgcctgcgccgtgtttgtccgcatctgcgccgtcttcggccagttcgtgccggggcttccgccgccgatgccgtccacctccgccgaaagcgtccagaccaggctgtccaagctgctgatgagcccgcggacggggaagacaaaggcgtcgtcggggccgatcacgcggcgggagcgggagggggcgggggcgccgtcccgggtgcacccgccgatgcagcagctgagcagctcgtgcccgatcatcggccagaggccgctgtcggggcagaagggcggcgtggactggcgcaagcttctggacccgccggccagcacggtgggcggcgcggggctggaccagcagtacgcgaacgtgatcgtgtcggcggaggagctgctgcagatggaggcggaggggcggcaggaggaggcgaacgcggagcgggcggagatgtacgagatgctgccggggaagctccgcgcggcggtgcggtcgaagctgcgcgactggtggcgggacccggggccgctggacgccgggctggcggaggggtggaaggaggcggtggagcggatcatggcgtggctgggcccgatggcgcgcgacaccgtgcagtggcagtcggagcggaacatggaccggacgcggcggttcgacggcggcacgcgcgtgtacgcgctgcagacgctgcggtgggcggacaaggacaaggcggaggcggcgatcgtggaggtgctcgtcgcgctgagctgcgtctgctggtacgaggagcggcggcgcggctccgtgcgcgtcagctgatcgcgtcggaagccgttcaacgacggcgccatggcatggcacacacaccttgtccaaagcccattcttttcttgtcttccttctttggttcgtttgtcaaagcaattgatttgaagagttgaattttcaaaaaaaaaaaaaaaa

SEQ ID NO: 3562 - protein, 487 aa, Triticum aestivum
  misc_feature: Ceres CLONE ID no. 753540
  misc_feature: Ceres CDNA ID no. 29191549
  misc_feature: Homolog of GI Number: 34908240 NR Desc: putative Avr9/Cf
  misc_feature: Homolog of GI Number: 56784692 NR Desc: putative Avr9/Cf
  misc_feature: Homolog of GI Number: 12003396 NR Desc: Avr9/Cf
  misc_feature: Homolog of GI Number: 34902086 NR Desc: SR
  misc_feature: Homolog of GI Number: 57834005 NR Desc: P0650D04.6
  misc_feature: Homolog of GI Number: 66776365 NR Desc: PE
  misc_feature: Homolog of GI Number: 66780099 NR Desc: PE
  misc_feature: Homolog of GI Number: 66778899 NR Desc: UvrD/REP helicase
  misc_feature: Homolog of GI Number: 66777243 NR Desc: Ribonuclease PH
  misc_feature: Homolog of GI Number: 2605798 NR Desc: minor ampullate silk protein MiSp1
MVAHKAASWLPVDFRLPAVPQAALGILAFEAGAAMSKLLSLHRSLSEQEVSRLRSDAMRSPGVAYLNSTDQAFLLRLACAELVLSLDAAAAAVARLGLRCGIDFAGVYASIKAGAHDARLDLLAAKGLKVKAKKMERLVAATSKLCSEMEALDELESAERKLTVRGWSRLSGPIPQKLADPPQAGDSMGADSLKQEIKTQLLKVRRLKEESLWSQSYEKAVGLMARAACAVFVRICAVFGQFVPGLPPPMPSTSAESVQTRLSKLLMSPRTGKTKASSGPITRREREGAGAPSRVHPPMQQLSSSCPIIGQRPLSGQKGGVDWRKLLDPPASTVGGAGLDQQYANVIVSAEELLQMEAEGRQEEANAERAEMYEMLPGKLRAAVRSKLRDWWRDPGPLDAGLAEGWKEAVERIMAWLGPMARDTVQWQSERNMDRTRRFDGGTRVYALQTLRWADKDKAEAAIVEVLVALSCVCWYEERRRGSVRVS

SEQ ID NO: 3563 - DNA, 1512 bp, Triticum aestivum
  misc_feature: Ceres CLONE ID no. 753629
  misc_feature: Ceres CDNA ID no. 25447424
  CDS (235)..(1437): REFERENCED BY SEQ ID NO: 3564
aaaaaaaggagagcctcctgctaaaaaagagaggaaggaggtcaatccagcgatctgcttgcttcttccccgcccgcccgcccttatcgaggattccattccaaccccccgtcgccagcccacgcacccaccatacccagctcgaaaacgagaggatcatccgcaggcaaggccggggagaggatcgaatcaaggagggctcgcgtcggggattggagctcacgcgaaccaaccatggttgaatcggaggtcgacgcatcggcggcaccgaccgccacggccacggccagggcctcggcggcggtgctcaccgcgccgctgtcgctggaagggggcctcgcggcggagctccagccggcgaacctcgtgcagcgggtgctcagcctcttcgggaacgtcaggccgggcgccgatctctcgcacttccagctgcctgctacgttcaacctgccaaaatcgcagctccagttgtacggggaaatagtctactgcgacggagacgactacctgagcagatgcggcaaaggcaaggacagcctcgagcgcttcacggcggtcgtcgcatggagcatctcgacgacgaggccgcccatctttggtttcgcgccctacaacccggtcctcggagagacgcaccatgtctccagagggtcactccatgtccttcttgagcaggtgtgtcataaacccccggtctctgcgcttcacgctaccgatgacggcgggaacgtcgagcttgtctggagccaacacccagtgccgaaatttaatggtgctagcatagaggcaacggtgcacggcaagaggcaagtcaggcttccaaagttcaacgagacatacgagatggactgtccaaatctgctcatcaggctgcttcctgggccctccgtcgagtggtccggcaccgtcaggatcgtctgcaaggactccgggctcgaggcagaattgagctaccacagaagcaactccttcatgggaatgggaggtgacgggaggtgcgttaagggcaaggtgttccattcatcgagcccgcaggacaccgtcttcgagatcgatggctactgggataggactgtttcactcaaggatgttgagagtggggaggtcttggttctctacgacgcgaacctctccatcgctaacctcgtcacaccggaggttaaagatgaagagggcttgtcatctaccgagtcggcggtcgtctggagcgaagtcagcgaggctatcctggcaaaggattgggagaaggctagcgaggcgaagcggaaagtcgagggcacagctaggagccttgagaaggagaggaatgagaagggagaggtgtggatgcccaagcacttctcattgtcccaggacaaggatgggaactgggagtgctggccattagagaaatcagtgcgtccagctcctatcgttgtaccttctccttcttcatgacactacattacatgtaataacaatgttaaatcatataatcaagctgaccattctttttcaaaaaaaaaaaaaaaa

SEQ ID NO: 3564 - protein, 400 aa, Triticum aestivum
  misc_feature: Ceres CLONE ID no. 753629
  misc_feature: Ceres CDNA ID no. 25447424
  misc_feature (8)..(400): Pfam Name: Oxysterol_BP PFAM Desc: Oxysterol
  misc_feature: Homolog of GI Number: 34905144 NR Desc: oxysterol
  misc_feature: Homolog of GI Number: 50947637 NR Desc: oxysterol
  misc_feature: Homolog of GI Number: 26449627 NR Desc: putative oxysterol
  misc_feature: Homolog of GI Number: 18416633 NR Desc: oxysterol
  misc_feature: Homolog of GI Number: 42567152 NR Desc: oxysterol
  misc_feature: Homolog of GI Number: 54638624 NR Desc: GA18643
  misc_feature: Homolog of GI Number: 24648381 NR Desc: CG5077
  misc_feature: Homolog of GI Number: 28381033 NR Desc: AT23163p
  misc_feature: Homolog of GI Number: 24648385 NR Desc: CG5077
  misc_feature: Homolog of GI Number: 45551935 NR Desc: CG5077
MVESEVDASAAPTATATARASAAVLTAPLSLEGGLAAELQPANLVQRVLSLFGNVRPGADLSHFQLPATFNLPKSQLQLYGEIVYCDGDDYLSRCGKGKDSLERFTAVVAWSISTTRPPIFGFAPYNPVLGETHHVSRGSLHVLLEQVCHKPPVSALHATDDGGNVELVWSQHPVPKFNGASIEATVHGKRQVRLPKFNETYEMDCPNLLIRLLPGPSVEWSGTVRIVCKDSGLEAELSYHRSNSFMGMGGDGRCVKGKVFHSSSPQDTVFEIDGYWDRTVSLKDVESGEVLVLYDANLSIANLVTPEVKDEEGLSSTESAVVWSEVSEAILAKDWEKASEAKRKVEGTARSLEKERNEKGEVWMPKHFSLSQDKDGNWECWPLEKSVRPAPIVVPSPSS

SEQ ID NO: 3565 - DNA, 1413 bp, Triticum aestivum
  misc_feature: Ceres CLONE ID no. 753674
  misc_feature: Ceres CDNA ID no. 36530648
  CDS (108)..(989): REFERENCED BY SEQ ID NO: 3566
accacacactgccctccctccccctccctccccccaccccactcctccccgccgccgccgccgccgccccgctccgatccgccccgcgccgcgcggatcgccgcgccatggaccagtacgagaaggtggagaagatcggggagggcacgtacggggtggtgtacaaggccaaggaccgctacaccaacgagacgatcgcgctcaagaagatccggctggagcaggaggacgagggcgtcccctccaccgccatccgcgagatctccctcctcaaggagatgcagcaccggaacatcgtcaggctgcaggacgtggtgcacaacgagaagtgcatatacctcgtcttcgagtacctcgacctcgacctcaagaagcacatggactcctccgcggacttcaagaaccaccacatagtcaagtccttcctctaccagatcctgcacggcatcgcctactgccactcgcaccgtgtgcttcacagggatctcaagccccagaacctgctgatagatcgccgtaccaattcattgaagcttgctgacttcggattggcgagggcgttcggcattcctgtccggacatttactcacgaggtggtgacattatggtatagagcaccagaaattcttctgggtgcgaggcagtattctacccctgttgatgtgtggtcggttggttgcattttcgccgaaatggtgaatcagaaacctctatttcctggtgattctgagattgatgaactcttcaagattttcagaattatgggcactcctaatgaagaaacctggccaggtgtttcttcgttacctgactacaaatcagctttccccaagtggccatccgtggatcttgcaactgtggttccaacactcgaacctttgggacttgatcttctctctaaaatgctctgcttagatccaaccagaagaatcaacgcccgaaccgccctcgagcacgagtacttcaaggatctggacgtatcctcgtagatcacttgccctgctcctctgtaaattaagatcgcgtcgactgatcgatagcttcctggatcatgtactgtgtgctcctttctctcccattctttctgactctggctgtgtagagagaaatgagaacggaagcgcctccggattcacccttccttgtagtccaagccaattgaaaaatgatcctgatgctctgggagctctgcattgcgatttcgcccgtatttatatggacatcgacgccggcaccagacttgttcatgtacgatggattttggagtagtggcagatagtcaaggggctgcagtgtttcatgaactaccaactgatgtgacaatgtttgggagtgtactactacttgtacttggtaaacatcattatcatcatgaatggaatcagttgtggacaactaaaaaaaaaaaaaaaa

SEQ ID NO: 3566 - protein, 293 aa, Triticum aestivum
  misc_feature: Ceres CLONE ID no. 753674
  misc_feature: Ceres CDNA ID no. 36530648
  misc_feature (4)..(286): Pfam Name: Pkinase PFAM Desc: Protein kinase domain
  misc_feature: Homolog of GI Number: 13249052 NR Desc: CDC2 homolog
  misc_feature: Homolog of GI Number: 2289782 NR Desc: cdc2 kinase
  misc_feature: Homolog of GI Number: 454980 NR Desc: cdc2Pa
  misc_feature: Homolog of GI Number: 8671339 NR Desc: cdc2Pnc
  misc_feature: Homolog of GI Number: 17224978 NR Desc: cyclin dependent kinase
  misc_feature: Homolog of GI Number: 1321672 NR Desc: cyclin
  misc_feature: Homolog of GI Number: 25989351 NR Desc: cyclin
  misc_feature: Homolog of GI Number: 50904887 NR Desc: p34cdc2
  misc_feature: Homolog of GI Number: 4096105 NR Desc: p34cdc2
  misc_feature: Homolog of GI Number: 1196796 NR Desc: protein kinase p34cdc2
MDQYEKVEKIGEGTYGVVYKAKDRYTNETIALKKIRLEQEDEGVPSTAIREISLLKEMQHRNIVRLQDVVHNEKCIYLVFEYLDLDLKKHMDSSADFKNHHIVKSFLYQILHGIAYCHSHRVLHRDLKPQNLLIDRRTNSLKLADFGLARAFGIPVRTFTHEVVTLWYRAPEILLGARQYSTPVDVWSVGCIFAEMVNQKPLFPGDSEIDELFKIFRIMGTPNEETWPGVSSLPDYKSAFPKWPSVDLATVVPTLEPLGLDLLSKMLCLDPTRRINARTALEHEYFKDLDVSS

SEQ ID NO: 3567 - DNA, 1152 bp, Triticum aestivum
  misc_feature: Ceres CLONE ID no. 754043
  misc_feature: Ceres CDNA ID no. 25892200
  CDS (141)..(821): REFERENCED BY SEQ ID NO: 3568
tccgaaatccgaaccccgccgccgccgccgccgccgcctccgccctcctcctccgtcagcctcgccccggagcagcgcgtcgttggcggcggaggccgtgtaaacccataaagttctgttttaagcgcatatcgaattttatggacatatctcaggagcaacaacaagattttggtgtgctactaaagcagggggctgaaggaagggtatttgtttctacatttgttggacgaaaatgcgtaatcaaagagcgcttctcaaagaagtatcgacacccattgctggactcaaagctgactctaaaacgcttaaatgctgaagctagatgcatgacgaaagcaaggcggcttggtgttcctacaccagttctgtatgctgtggaccctcttccacatacgttaacctttgagtttgtggatggcttgtgcgtcaaagatattcttcttggatttgggtcaaatgggataaatgaagaacgtcttaatgacattgccatacagatagggaatgcagttggcaaactacacgatggaggtcttgttcatggtgatttgacaacttcaaatatgatgatcaagaacagcaccaatcaactggttcttattgattttggtctgagctttacatcaactattcctgaggacaaggcagtggacctatatgttcttgagagagccttgatttccatgcattcttcatgtggggatgtgatggagaagatccttgcagcgtaccgaaaagcttcaaggcagtggtgcgccactacgaacaagctagctcaagtcaggcagcggggcagaaaacgaacaatggttgggtaaaacttgacccggagatgctgaatgcaacgaattgaacctgcattaccatccattgtctgtgttattagtttgcacgtagtggttcagcggaattggctcttgcagaatttaaatggacgtcaagtgaatcatttgtaacactgcttgttgtacttccgttaggaatcatatatctcccaactctttaacttgtgagttttggatgatcgttgtgtatcttagtgaaccgatgcgtttactttgttgcggtgcatctcgtgaaatgtgaattgatgtaatttattgaaactacaactatgtgtgttctccgcgttgaaaaaaaaaaaaaaaa

SEQ ID NO: 3568 - protein, 226 aa, Triticum aestivum
  misc_feature: Ceres CLONE ID no. 754043
  misc_feature: Ceres CDNA ID no. 25892200
  misc_feature (22)..(180): Pfam Name: RIO1 PFAM Desc: RIO1 family
  misc_feature: Homolog of GI Number: 31432148 NR Desc: putative endopeptidase
  misc_feature: Homolog of GI Number: 5107820 NR Desc: contains similarity to protein kinase domains
  misc_feature: Homolog of GI Number: 72015291 NR Desc:  similar to TP53 regulating kinase
  misc_feature: Homolog of GI Number: 33303845 NR Desc: chromosome 20 open reading frame 64
  misc_feature: Homolog of GI Number: 41327715 NR Desc: p53
  misc_feature: Homolog of GI Number: 73992550 NR Desc:  similar to TP53 regulating kinase
  misc_feature: Homolog of GI Number: 50759021 NR Desc:  similar to TP53 regulating kinase
  misc_feature: Homolog of GI Number: 25396009 NR Desc: protein F52C12.2
  misc_feature: Homolog of GI Number: 15679424 NR Desc: O
MDISQEQQQDFGVLLKQGAEGRVFVSTFVGRKCVIKERFSKKYRHPLLDSKLTLKRLNAEARCMTKARRLGVPTPVLYAVDPLPHTLTFEFVDGLCVKDILLGFGSNGINEERLNDIAIQIGNAVGKLHDGGLVHGDLTTSNMMIKNSTNQLVLIDFGLSFTSTIPEDKAVDLYVLERALISMHSSCGDVMEKILAAYRKASRQWCATTNKLAQVRQRGRKRTMVG

SEQ ID NO: 3569 - DNA, 1462 bp, Triticum aestivum
  misc_feature: Ceres CLONE ID no. 754274
  misc_feature: Ceres CDNA ID no. 25892835
  CDS (208)..(1044): REFERENCED BY SEQ ID NO: 3570
agaccaaaccaaaccagaccgaaagcagagccagcgagcgagagagaggaggcccggccaaaaggagcggggcgcctccctcataagcggaggcgcggagcgctagctggccggctctcacgttgcggaattccgaggcccccaggaatagccagccagccgttcccggagggcggagggcggaggcggaggcggagtcccgaggggatggggaacgtgacgtcgtcggtggcggcgcggctggccttcttcccgccggagccggccacgtacgaggtggcggcggcggagggcggggccgggctgcggatgacgggggtgctccccgacgccaacgtcgacgtgcacgcgctgcccaccagggccggcacccgcgtcgtcgccgccttctggcgctacccctccgcgcgcctcacgctgctctactcccacggcaacgccgccgacctcggccagatgctcggcctcttcatggagctccgctcccacctccgcgtcaacatcatgtgctatgactattcaggatatggggcctctacaggaaaaccatcggagtataacacgtactacgacatagaggctgtctatgactgtttgaaaaaggagtatgggatagggcaagaggatctgatcctgtatgggcaatcagttggaagcggaccgacgttgcacttggcctcacgtttggagaaactaagaggggtcgtccttcacagcggtattctgtcaggcatacgcgttttgtatccagtgaaagtgacactttggtttgatatcttcaagaacatcgacaaaataaagcaggtcgaatgtccagtgctggttatacatggaacggcggacgacatcgtcgacttctcgcacggcaagcgcctatgggagctagcgaaggagaagtacgagccgctgtgggtgaaaggcggcggccactgcaacctggagacgtaccccgagtacatccggcacctgcggaagttcgtgaacgcgatggagaagctggtgaaggagcgagcgacaaaggcgccccagacactgatgatctgacggaagaacggaagaagccagccgcggcggacggctgtctcctccccgccgggctccgatgacatgacaccgtgggggtggggggagggaagtgcaacggcgtcgtcgtcgcttatcgctggtccggtcgcgggttcgggattttagacaggctccatggctggaatgtgctggggatgactgaagagaaacagaagcctagtggaggaagcatgcgggaaatcatatatagcctgttgttgttgggtagtgttgagttggggctctctctcctttttcttttttatccagcctgtgtattagttgatgtgcaaagaagtatcccatctctcctaattgattgcaatgtgcattgcgtgctgtcaggcagcgtggcatttaggtgtctgggttcacagtttcaaaaaaaaaaaaaaaa

SEQ ID NO: 3570 - protein, 278 aa, Triticum aestivum
  misc_feature: Ceres CLONE ID no. 754274
  misc_feature: Ceres CDNA ID no. 25892835
  misc_feature (194)..(256): Pfam Name: Abhydrolase_1 PFAM Desc: alpha/beta hydrolase fold
  misc_feature: Homolog of GI Number: 51535771 NR Desc: Cgi67 serine protease
  misc_feature: Homolog of GI Number: 34905260 NR Desc: putative TPA: Cgi67 serine protease precursor
  misc_feature: Homolog of GI Number: 34911338 NR Desc: P0519D04.38
  misc_feature: Homolog of GI Number: 50905845 NR Desc: putative Cgi67 serine protease
  misc_feature: Homolog of GI Number: 55631745 NR Desc:  similar to C9orf77 protein
  misc_feature: Homolog of GI Number: 33877638 NR Desc: C19orf27 protein
  misc_feature: Homolog of GI Number: 57102220 NR Desc:  similar to C19orf27 protein
  misc_feature: Homolog of GI Number: 37590307 NR Desc: LOC58489 protein
  misc_feature: Homolog of GI Number: 51475912 NR Desc:  similar to C19orf27 protein
MGNVTSSVAARLAFFPPEPATYEVAAAEGGAGLRMTGVLPDANVDVHALPTRAGTRVVAAFWRYPSARLTLLYSHGNAADLGQMLGLFMELRSHLRVNIMCYDYSGYGASTGKPSEYNTYYDIEAVYDCLKKEYGIGQEDLILYGQSVGSGPTLHLASRLEKLRGVVLHSGILSGIRVLYPVKVTLWFDIFKNIDKIKQVECPVLVIHGTADDIVDFSHGKRLWELAKEKYEPLWVKGGGHCNLETYPEYIRHLRKFVNAMEKLVKERATKAPQTLMI

SEQ ID NO: 3571 - DNA, 959 bp, Triticum aestivum
  misc_feature: Ceres CLONE ID no. 754281
  misc_feature: Ceres CDNA ID no. 35383281
  CDS (73)..(822): REFERENCED BY SEQ ID NO: 3572
aagagtagagatacgcaccggaactcccaaagcgaaagcctctctcaccggcgacgacacgcaccagcaccgatggcccgctacgaccgagcgatcaccgtcttctcccccgacggccacctcttccaggttgagtacgccctcgaggccgtccgcaagggcaacgccgccgtcggcgtccgaggcgtcgacaccgtcgtcctcggtgtcgagaagaagtccacccccaagctccaagactccaggtccgtgcgcaagatcgcgagcctggacacccacatcgcgttggcctgcgcgggtctgaaggcggacgcgcgcgtgctcatcaaccgggcgcgcgtcgagtgccagagccaccgcctcaccgtcgaggaccccgtcactgtcgagtacatcacgcgctacatcgccggcctgcagcagaagtacacgcagagcggaggggtgcgcccgttcgggctctccacgctcatagttggcttcgacccctatactgagaagcctgcgctgtaccagaccgacccctccggcaccttctccgcctggaaggccaacgccaccggccgcaactccaactccatgcgcgagttccttgagaagaattacaaggagacgtccggcaaggagaccatcaagcttaccatccgagccctccttgaggttgtcgagagtggtggcaagaacattgagattgctgtgatgacgcacaaagatggtcttcgccagcttgaggaagaggagatcgatgagtatgttgctgagattgaagcagagaaggctgctgctgaggctgcgaagaagggtggcccgaaagacacataatgtactaatgatttagcacagtcgcagcacatggctcctctagctctgtttatgttcacagcttgtctgtttgtttaaaatgtttgcgaagaactttttttttttgagggaaactgtttacaaaaaaaaaaaaaaaa

SEQ ID NO: 3572 - protein, 249 aa, Triticum aestivum
  misc_feature: Ceres CLONE ID no. 754281
  misc_feature: Ceres CDNA ID no. 35383281
  misc_feature (27)..(210): Pfam Name: Proteasome PFAM Desc: Proteasome A
  misc_feature: Homolog of GI Number: 50948271 NR Desc: proteasome alpha subunit
  misc_feature: Homolog of GI Number: 50726660 NR Desc: Proteasome subunit alpha type 7
  misc_feature: Homolog of GI Number: 12644044 NR Desc: Proteasome subunit alpha type 7
  misc_feature: Homolog of GI Number: 76160964 NR Desc: proteasome
  misc_feature: Homolog of GI Number: 12229936 NR Desc: Proteasome subunit alpha type 7
  misc_feature: Homolog of GI Number: 82621184 NR Desc: proteasome
  misc_feature: Homolog of GI Number: 77999287 NR Desc: proteasome
  misc_feature: Homolog of GI Number: 10177129 NR Desc: 20S proteasome subunit PAD2
  misc_feature: Homolog of GI Number: 20148239 NR Desc: multicatalytic endopeptidase complex
  misc_feature: Homolog of GI Number: 21593040 NR Desc: multicatalytic endopeptidase complex  alpha chain
  misc_feature: Useful for delaying flowering time
  misc_feature: Useful for increasing increasing anthocyanin content
  misc_feature: Useful for making ornamental plants with modified flowers
  misc_feature: Useful for making ornamental plants with modified leaves
  misc_feature: Useful for making shorter plants
  misc_feature: Useful for sterility
MARYDRAITVFSPDGHLFQVEYALEAVRKGNAAVGVRGVDTVVLGVEKKSTPKLQDSRSVRKIASLDTHIALACAGLKADARVLINRARVECQSHRLTVEDPVTVEYITRYIAGLQQKYTQSGGVRPFGLSTLIVGFDPYTEKPALYQTDPSGTFSAWKANATGRNSNSMREFLEKNYKETSGKETIKLTIRALLEVVESGGKNIEIAVMTHKDGLRQLEEEEIDEYVAEIEAEKAAAEAAKKGGPKDT

SEQ ID NO: 3573 - DNA, 1031 bp, Triticum aestivum
  misc_feature: Ceres CLONE ID no. 754393
  misc_feature: Ceres CDNA ID no. 25892980
  CDS (37)..(579): REFERENCED BY SEQ ID NO: 3574
aaaagtggacagcacttccgccgagcgccgggcaagatggggttcatcggcgaccaggtggaggcgatccgctcgatgcaggtccgccaggtgctcgcgcagatcatcagcctcggtatgattgttacgtcggcattgatcatatggaaggggttgatggttgcgactgggagtgagtccccggtggtcgtagttctttctggtagcatggagcctggcttcaaaaggggtgatatcctgtttttgcgcatgagtaaagaacccatccgtactggagaaatagttgtttttaatgttgatggccgtgaaattccaattgttcaccgtgtgattaaggttcatgaacgccaggaaagtgctgaagttgacatcctcacaaaaggtgacaacaattttggggatgaccgactgctgtacgcgcacggtcagctgtggcttcagcagcaccacatcatggggcgggctgtaggctatcttccatacgttgggtgggttaccattgtgatgactgagaagccgatcatcaagtaccttctgattggcgcactgggcctgctggtgataacgtcgaaagactgaagattccaccttgtcacagggtcgtagtctggtcttgtagtagcgcagaagtaaccgacagctgaagatgttgcatcgtgtattgaatggaagttttatgtgtctgttttgacttctcgtgtattgaatggaagtaaccgacaccacttcgacgttcgtgtcttcctagtgtggccagtgttggctctgtggaggatatgggagcggagctatatggttgtctcctcggggcagtttgctgtggtcgtagctccagtgttacagatcatgcatgagcttctggagctatgcctgagctctgctttgcctctgtcaatcgagcatatgaaggtggactccaggtgacctcatgcgccccactccacccacactagcgaactttatcccgatactctcttcgcaaaaaaataattgcggcgtgattgtcatcttggacaaaaaaaaaaaaaaaa

SEQ ID NO: 3574 - protein, 180 aa, Triticum aestivum; identical to SEQ ID NO: 2924
  misc_feature: Ceres CLONE ID no. 754393
  misc_feature: Ceres CDNA ID no. 25892980
  misc_feature (52)..(115): Pfam Name: Peptidase_S24 PFAM Desc: Peptidase S24
  misc_feature: Homolog of GI Number: 55296017 NR Desc: putative signal peptidase 18K chain
  misc_feature: Homolog of GI Number: 20465737 NR Desc: putative signal peptidase subunit
  misc_feature: Homolog of GI Number: 51972110 NR Desc: At3g15710
  misc_feature: Homolog of GI Number: 58383727 NR Desc: ENSANGP00000020448
  misc_feature: Homolog of GI Number: 48146371 NR Desc: SPC18
  misc_feature: Homolog of GI Number: 50752707 NR Desc:  similar to SPC18 protein
  misc_feature: Homolog of GI Number: 34784421 NR Desc: Spc18 protein
  misc_feature: Homolog of GI Number: 62898009 NR Desc: signal peptidase complex
  misc_feature: Homolog of GI Number: 55642557 NR Desc:  similar to SPC18 protein
  misc_feature: Useful for making ornamental plants with modified flowers
  misc_feature: Useful for making ornamental plants with modified flowers
  misc_feature: Useful for making ornamental plants with modified flowers
  misc_feature: Useful for making plants with increased biomass and foliage
  misc_feature: Useful for making plants with increased biomass and foliage
  misc_feature: Useful for making smaller plants

SEQ ID NO: 3575 - DNA, 812 bp, Triticum aestivum
  misc_feature: Ceres CLONE ID no. 754644
  misc_feature: Ceres CDNA ID no. 24766772
  CDS (78)..(641): REFERENCED BY SEQ ID NO: 3576
agcacacagtcaccagtcaccagagtccacaacgaagcaagtgtgatctagccactccctgcatcctgctgtgagtaatgacgaccatggttgccttgagctccttcgctggtgccaccgtcgttgtccgccccgcctcctggtctccggcgctgacgcgtcagcgcgccctcctcgtcagggcgcagaccgagccggatatcgagccgaccaaggagacgacgagcgcgtcgacatcctccccaaccccaaccccaagcccggtggcgcccaagcccaagcccaaggctaacccctcggtgtgggacgcgctcgcgttcagcggcccagcgccggagcgcatcaacggccggctcgctatggtgggcttcgtggcggcgttctccgtcgaggcagcgcgcggcggcgggctactcgaccaggccggcagcggcgccgggttgggatggttcctgacgaccgcagcggtgttctcggtggcgtcgctggtgccgctccttcagggacagagcgtggagagcaagtccagcggcgtatggagcgccgacgccgagctatggaacggccgcttcgccatgctcggcctcgtcgcactcgccatcaccgagttcatcaccggcacgcccttcgtcaacgtctgaaactagctagtgtagtgcagtacgcttgcacgtgcatgtacatatttgttggtcatgctgaggaactaggactacggactctgacgttctgtaagccttatcattagcttgtctttcttggtgatgatgtcttggagcctacaattaatgcaggtaaaaaaaaaaaaaaaa

SEQ ID NO: 3576 - protein, 187 aa, Triticum aestivum
  misc_feature: Ceres CLONE ID no. 754644
  misc_feature: Ceres CDNA ID no. 24766772
  misc_feature (90)..(106): Pfam Name: Chloroa_b PFAM Desc: Chlorophyll A
  misc_feature: Homolog of GI Number: 50934635 NR Desc: putative low molecular mass early light
  misc_feature: Homolog of GI Number: 50934633 NR Desc: putative low molecular mass early light
  misc_feature: Homolog of GI Number: 4521272 NR Desc: early light
  misc_feature: Homolog of GI Number: 14029814 NR Desc: early light
  misc_feature: Homolog of GI Number: 33520417 NR Desc: early light inducible protein
  misc_feature: Homolog of GI Number: 20711 NR Desc: ELI protein
  misc_feature: Homolog of GI Number: 7268175 NR Desc: light induced protein like
  misc_feature: Homolog of GI Number: 50251956 NR Desc: putative early light
  misc_feature: Homolog of GI Number: 19525538 NR Desc: early light
  misc_feature: Homolog of GI Number: 263865 NR Desc: early light
MTTMVALSSFAGATVVVRPASWSPALTRQRALLVRAQTEPDIEPTKETTSASTSSPTPTPSPVAPKPKPKANPSVWDALAFSGPAPERINGRLAMVGFVAAFSVEAARGGGLLDQAGSGAGLGWFLTTAAVFSVASLVPLLQGQSVESKSSGVWSADAELWNGRFAMLGLVALAITEFITGTPFVNV

SEQ ID NO: 3577 - DNA, 1163 bp, Triticum aestivum
  misc_feature: Ceres CLONE ID no. 754768
  misc_feature: Ceres CDNA ID no. 25892981
  CDS (96)..(932): REFERENCED BY SEQ ID NO: 3578
cttccacccttcaccgccgccagcgccacagcctccaaaccctcgatctcccgcatcggagctccctgcccccaaccccccacccccacccaaccatggcggaccgcggcggcgagcgtggtggcgaccgcggaggcgagcgcggcgggttcggccgcggcttcgggcgcggcgggcgcggggaccgtggcgggcgccgcggcggccgtcgtggccctcgccaggaggaggagaagtgggtgcccgtcaccaaactcggccgcctcgtcaaggagggccgcttcaccaagatggaggagctctacctccactcgctacccatcaaggagcaccagatcgtggagcagctctgcccggggctcaaggacgaggtgatgaagatcacccccgtgcagaagcagacccgcgccggccagcggacccgcttcaaggcgttcgtcgtcgtcggcgacagcaacggccacgtcgggctcggcgtcaagtgcgccaaggaggtggccacggccatccgcggcgccatcatcctcgcaaagctctccatcgtgcccgttaggaggggctactgggggaacaagatcggcctgccccacaccgtgccctgcaaggtcaccggcaagtgcggctctgtcaccgtgcgcatggtgcccgccccgaggggttctggaatcgtcgccgcgcgcgtccccaagaaggtgctccagttcgctggtattgatgacgtcttcacttcctcgcgtggatccaccaagaccctcggcaacttcgtcaaggcaaccttcgactgcctgatgaagacctatggattcctcacccctgacttctggagggagacgaccttcaccaaggcaccgtaccaggagttcactgacattttggcgaagccgacgaaggccctgatgcttgatgcaccagccgagaagatagaagcttaggatgtccgtgtaaagggtttttactagctgggagctgtctaatgcactttgctttattcagttattaatactttgaatcgtgctgtttcaggatgtctctgtttgccgtcaagtgttggtttgtggaactatgctactctcttttatcgtcaatggacgctacataattatggcaatcgatcttttttatctatagatgcttggcttctacctataaaaaaaaaaaaaaaa

SEQ ID NO: 3578 - protein, 278 aa, Triticum aestivum
  misc_feature: Ceres CLONE ID no. 754768
  misc_feature: Ceres CDNA ID no. 25892981
  misc_feature (171)..(244): Pfam Name: Ribosomal_S5_C PFAM Desc: Ribosomal protein S5
  misc_feature (88)..(154): Pfam Name: Ribosomal_S5 PFAM Desc: Ribosomal protein S5
  misc_feature: Homolog of GI Number: 50919281 NR Desc: putative 40S ribosomal protein S2
  misc_feature: Homolog of GI Number: 50935111 NR Desc: putative 40S ribosomal protein S2
  misc_feature: Homolog of GI Number: 22137092 NR Desc: At2g41840/T11A7.6
  misc_feature: Homolog of GI Number: 21553851 NR Desc: 40S ribosomal protein S2
  misc_feature: Homolog of GI Number: 62318510 NR Desc: ribosomal protein S2
  misc_feature: Homolog of GI Number: 18181932 NR Desc: ribosomal protein S2
  misc_feature: Homolog of GI Number: 21618011 NR Desc: ribosomal protein S2
  misc_feature: Homolog of GI Number: 21539457 NR Desc: ribosomal protein S2
  misc_feature: Homolog of GI Number: 30017231 NR Desc: At3g57490
  misc_feature: Homolog of GI Number: 51708309 NR Desc:  similar to ribosomal protein S2
  misc_feature: Useful for increasing chlorophyll and photosynthetic capacity
  misc_feature: Useful for sterility
MADRGGERGGDRGGERGGFGRGFGRGGRGDRGGRRGGRRGPRQEEEKWVPVTKLGRLVKEGRFTKMEELYLHSLPIKEHQIVEQLCPGLKDEVMKITPVQKQTRAGQRTRFKAFVVVGDSNGHVGLGVKCAKEVATAIRGAIILAKLSIVPVRRGYWGNKIGLPHTVPCKVTGKCGSVTVRMVPAPRGSGIVAARVPKKVLQFAGIDDVFTSSRGSTKTLGNFVKATFDCLMKTYGFLTPDFWRETTFTKAPYQEFTDILAKPTKALMLDAPAEKIEA

SEQ ID NO: 3579 - DNA, 1540 bp, Triticum aestivum
  misc_feature: Ceres CLONE ID no. 755024
  misc_feature: Ceres CDNA ID no. 25445534
  CDS (192)..(1286): REFERENCED BY SEQ ID NO: 3580
atcagcctaaacccgcaccaaagccccgagcgccgtcggatcagatcccactccaccaccaccaccaccacgctcctgccggccaccgctccttatattccgaggccggccggagaccccctgctcattttccgtctccccccctctgcccgccctcctcctcctcgagctgagctcaaggggaaagaaccatggagccggcgacgatggcgtggacggcggggctggtgggcgccggcctggtgtactggttcgtgtgggtgatgggcgcggcggaggtgaaggggaagcgggcggtggatctcaagatgggatccatcacgcgggacaaggtgcaggacaagtacacgcagtactggtccttcttccgccgccccaaggagacggcctccacgcaggcctccgccgacaaggtgcccgccttcgtcgacaccttctacaacctcgtcaccgacatctacgagtggggctggggccagtccttccacttctcgccctcgctccccggccgctcccaccgcgacgccacccgcgtccacgaggagcgcgtcgccgacctgctgggtgccgagccgggccaccgcgtgctcgacgtcggctgcggcgtcggcgggcccatgcgcgccatcgcggcgcactccggcgcccgcgtcgtcggcatcaccatcaacgagtaccaggtgaaccgcgcccgcgcgcacaaccgcaatgccggcctcgacgcgcagtgcgaggtggtgtgcggcaacttcatggccatgcccttcgacgacgcctccttcgacggcgcctactccatcgaggccacctgccacgcgcccaggctgcaggacgtgtacggggaggtgtaccgcgtgctcaagccggggcggctctacgtgtcctacgagtgggtgaccacgccgctgtaccgcgccgacgacccggcgcacgtggaggccatccacggcatcgagcgcggcgacgcgctcccggggctgcgccggcaggacgagatcgcgtccatcgcgcaggaggtcgggttcgaggtggtgcaggagctggacctggcgctgccgccgtcgctgccctggtggacgcggctcaagatggggcgcctcgcctactggcgcaactcgctggtggtgcgcgtgctcaccctgctccggatcgcgcccaagggcgtggtggaggtgcacgagatgctgtacgagaccgcgcagcacctcaccctcggcggcgagaccggcatattctcgcccatgcacatggtggtcctccgcaagcccgccgccgccgccgaatagagcgagcgatcgaacaagaagtaatttcaatcaatttctaaatcagaggtaagaaaaaccgggaggaggaaaaacagaggcttattattagctaatggagtgctagtgctattgatttggcgttgtagccgggaggagagaataggagcggccgatgatgcttactgttggtggtagctttcgttttctttttcgatttttgggtggagttggactgcatgcaggctggattcagatcaaaaaaaaaaaaaaaa

SEQ ID NO: 3580 - protein, 364 aa, Triticum aestivum
  misc_feature: Ceres CLONE ID no. 755024
  misc_feature: Ceres CDNA ID no. 25445534
  misc_feature (112)..(293): Pfam Name: Ubie_methyltran PFAM Desc: ubiE/COQ5 methyltransferase family
  misc_feature: Homolog of GI Number: 3560533 NR Desc: 24
  misc_feature: Homolog of GI Number: 22136020 NR Desc: 24
  misc_feature: Homolog of GI Number: 21360447 NR Desc: At1g76090/T23E18_40
  misc_feature: Homolog of GI Number: 2246454 NR Desc: S
  misc_feature: Homolog of GI Number: 2246456 NR Desc: S
  misc_feature: Homolog of GI Number: 2246452 NR Desc: S
  misc_feature: Homolog of GI Number: 23397216 NR Desc: putative sterol
  misc_feature: Homolog of GI Number: 12083242 NR Desc: putative sterol
  misc_feature: Homolog of GI Number: 21555010 NR Desc: sterol
  misc_feature: Homolog of GI Number: 1061040 NR Desc: sterol
  misc_feature: Useful for making ornamental plants with modified flowers
  misc_feature: Useful for sterility
MEPATMAWTAGLVGAGLVYWFVWVMGAAEVKGKRAVDLKMGSITRDKVQDKYTQYWSFFRRPKETASTQASADKVPAFVDTFYNLVTDIYEWGWGQSFHFSPSLPGRSHRDATRVHEERVADLLGAEPGHRVLDVGCGVGGPMRAIAAHSGARVVGITINEYQVNRARAHNRNAGLDAQCEVVCGNFMAMPFDDASFDGAYSIEATCHAPRLQDVYGEVYRVLKPGRLYVSYEWVTTPLYRADDPAHVEAIHGIERGDALPGLRRQDEIASIAQEVGFEVVQELDLALPPSLPWWTRLKMGRLAYWRNSLVVRVLTLLRIAPKGVVEVHEMLYETAQHLTLGGETGIFSPMHMVVLRKPAAAAE

SEQ ID NO: 3581 - DNA, 1540 bp, Triticum aestivum
  misc_feature: Ceres CLONE ID no. 755077
  misc_feature: Ceres CDNA ID no. 25891546
  CDS (110)..(1315): REFERENCED BY SEQ ID NO: 3582
aaccgaatcttcggtttctacccaccaaacgcccacgcctcttgctgctccacgccggactcgccaccggaggagggccaaaccgaatccgaataaagccgccaagtcaatgcagttcgcgatcaccaccaccgccgtctccgcgaacccgcatctgaagcctctggtctccttcccgcggccgtcgccccagcaccgggtccgagtccaccctcctcgccaccgcccgaacacgagggcgagcgccatggcctcctgggcgacgcaggagctcaccatcacgcgccccgacgactggcacctccacctccgcgacggcgacgtgatggccgctgtgctcccccacagcgcgaggcactttcagagagccatcgtcatgcccaacctgaagcccccggttacaacaacgtcacgtgcgatcgcgtacagagatgagatcatgaaggcgctgcctcccggcagcagcttcgtgccgctcatgacgctctacctcacggacagcactagcccggaagaaattaagattgcaagaaagagtggtgtggtttttgctgtcaagttgtatcctgctggagcaactactaactcccaagatggcgtaactgatattttggggaaatgcttgcctgtccttgaagagatggttaagcaggaaatgcctttacttgttcatggagaagtcacagatcctcatgtcgatacctttgaccgtgagaaggtcttcattgagaaaatattagcaccacttgtacaaaaacttccacagctgaaaatcgttatggaacatatcactacgatggatgcagtgaacttcgtagaatcatgcaaagaaggtcatgttgctgcaacagtgactccacagcatctccttctaaacaggaatgcgttgtttcagggtggtttacagcctcacaattattgcttgccagtgctgaagagagaaactcacaggcaagctattgtttctgctgtaacaagtgggagcagacaatactttcttggcactgacagtgctccccatgataaacggatgaaggagtgttcctgtggatgtgcaggaatatatagcgctcctgttgctctttctctttatgcgaaggtatttgaagaggtcggtgctcttgataagctagaggcgtttacaagcttcaatgggccagatttttatggactcccaaggaacacatcaaagattgttctgagaaggagcccctggaaagtgcctgcaacttatgcgtacggttcaggggtgattgtgcctatgtccaccggcaacactctggaatggcttccgtccgatcagcctgaagaataagcaaattacagacgatccatttgggggagaaacaataagtggagccgttccatctccccctttaaagtagaatgagcctgacaaacatggttttggttgtaaacttaccccgtgtgggattcctaaaagcaactttgtaagagcaacttattcgaagcaagagcgaaaaagtcttcgtctgaataaaagaaaagaggttcttgttgagttaaaaaaaaaaaaaaa

SEQ ID NO: 3582 - protein, 355 aa, Triticum aestivum
  misc_feature: Ceres CLONE ID no. 755077
  misc_feature: Ceres CDNA ID no. 25891546
  misc_feature (6)..(351): Pfam Name: Amidohydro_1 PFAM Desc: Amidohydrolase family
  misc_feature: Homolog of GI Number: 7269140 NR Desc: dihydroorotase
  misc_feature: Homolog of GI Number: 17977977 NR Desc: dihydroorotase
  misc_feature: Homolog of GI Number: 34909480 NR Desc: putative dihydroorotase
  misc_feature: Homolog of GI Number: 76808528 NR Desc: dihydroorotase
  misc_feature: Homolog of GI Number: 48767967 NR Desc: COG0418: Dihydroorotase
  misc_feature: Homolog of GI Number: 68555105 NR Desc: Dihydroorotase homodimeric type
  misc_feature: Homolog of GI Number: 53759341 NR Desc: COG0418: Dihydroorotase
  misc_feature: Homolog of GI Number: 45520118 NR Desc: COG0418: Dihydroorotase
  misc_feature: Homolog of GI Number: 68214310 NR Desc: Dihydroorotase homodimeric type
  misc_feature: Homolog of GI Number: 67737566 NR Desc: COG0418: Dihydroorotase
MASWATQELTITRPDDWHLHLRDGDVMAAVLPHSARHFQRAIVMPNLKPPVTTTSRAIAYRDEIMKALPPGSSFVPLMTLYLTDSTSPEEIKIARKSGVVFAVKLYPAGATTNSQDGVTDILGKCLPVLEEMVKQEMPLLVHGEVTDPHVDTFDREKVFIEKILAPLVQKLPQLKIVMEHITTMDAVNFVESCKEGHVAATVTPQHLLLNRNALFQGGLQPHNYCLPVLKRETHRQAIVSAVTSGSRQYFLGTDSAPHDKRMKECSCGCAGIYSAPVALSLYAKVFEEVGALDKLEAFTSFNGPDFYGLPRNTSKIVLRRSPWKVPATYAYGSGVIVPMSTGNTLEWLPSDQPEE

SEQ ID NO: 3583 - DNA, 1094 bp, Triticum aestivum
  misc_feature: Ceres CLONE ID no. 755339
  misc_feature: Ceres CDNA ID no. 36705741
  CDS (102)..(770): REFERENCED BY SEQ ID NO: 3584
cccagcagaaacgtcgcctcttctccaccgccggcccacaaaatcccaaggcctctccctcctctctcctcgcttcccttctccttctccgaccgaccgccatggccctggactccgtcccttcctaccccagcgacctgggatccagcggcagggcaaccaggacccagcaaagaatccggaaggaggagcgaacgtggacggcggacacctacgcgccgtacgacgacgggcaccagtggaggaagtacggcgagaagaagctctccaactccaacttcccgaggttctactacagatgtacctacaagactgacctgaagtgccctgcgacaaaacaagtccaacagaaggacatgagcgacccaccattgttcacggtcacttacttcaaccatcacagctgcaacaccacctcgaggcccatcggcagcgccccagacaccactgagcagtcgtcctcgaggagggcagtgtccatctgcttcgggtcgcatgccaccggcgagcagccgacattcctaacgtcgccgggcacactgcagtcaccagcgagcacaaccaaccaacagaacgacagaggcgcttacggtcaccagtttcagtggacagacacatcaccgtcggcaggcgatgccccagtcaagatggagaccgacagtctcgccggaacaggcgcttcgtctggcgctgctagcggccatgctctgtcgaggacactgctgccgatcggccagtcgagatgcatcgagtactttcagttcttgtgatggaagtgtgctggggagctccttggtccttgttgcaggtcgagtctgagtagcgacgactgctgttccgaagttctgaaggatccacatcgagagattactgccgctgctgccaccgctgttcttttgcttcctttgcattcagattcgagccagatttgtgtgcttggatgatgtaaagaactagactgaagtttatttatttatctagtagtacatcaccttgaaaaagaaaggtaatgtttcccatttggaagtagtttggctggccgctcggtcactaatgaagtactgcaaagttcagatacaaaaaaaaaaaaaaaa

SEQ ID NO: 3584 - protein, 222 aa, Triticum aestivum
  misc_feature: Ceres CLONE ID no. 755339
  misc_feature: Ceres CDNA ID no. 36705741
  misc_feature (41)..(104): Pfam Name: WRKY PFAM Desc: WRKY DNA
  misc_feature: Homolog of GI Number: 77552842 NR Desc: DNA
  misc_feature: Homolog of GI Number: 77552841 NR Desc: DNA
  misc_feature: Homolog of GI Number: 46394346 NR Desc: TPA: WRKY transcription factor 46
  misc_feature: Homolog of GI Number: 77553498 NR Desc: WRKY DNA binding domain
  misc_feature: Homolog of GI Number: 77548440 NR Desc: WRKY DNA binding domain
  misc_feature: Homolog of GI Number: 56201706 NR Desc: WRKY transcription factor 18
  misc_feature: Homolog of GI Number: 46394290 NR Desc: TPA: WRKY transcription factor 18
  misc_feature: Homolog of GI Number: 34907796 NR Desc: P0703B11.18
  misc_feature: Homolog of GI Number: 7406997 NR Desc: DNA
  misc_feature: Homolog of GI Number: 4895219 NR Desc: putative WRKY
MALDSVPSYPSDLGSSGRATRTQQRIRKEERTWTADTYAPYDDGHQWRKYGEKKLSNSNFPRFYYRCTYKTDLKCPATKQVQQKDMSDPPLFTVTYFNHHSCNTTSRPIGSAPDTTEQSSSRRAVSICFGSHATGEQPTFLTSPGTLQSPASTTNQQNDRGAYGHQFQWTDTSPSAGDAPVKMETDSLAGTGASSGAASGHALSRTLLPIGQSRCIEYFQFL

SEQ ID NO: 3585 - DNA, 1011 bp, Triticum aestivum
  misc_feature: Ceres CLONE ID no. 756036
  misc_feature: Ceres CDNA ID no. 36530614
  CDS (134)..(760): REFERENCED BY SEQ ID NO: 3586
ccagacaccggctccccgtccaccgggcgggacccacaacaggagcctctcccttgacgccgccttcttcgagggcctcgccttgcaggggggaggaggcgggggttgtggtggccataagaggagcgggtccatggatggggtgaactcgccgttcgaaggcgagtcggcgctgtcgggcgggctggactacgccaagaaggccatgccggccgagaggatcgccgagctagctctccttgaccccaaacgcgcaaagaggattttggcaaaccggcagtcggcagcgaggtcgaaggagaggaagatcaagtataccggtgagctagagaggaaggtccagacactgcagaccgaggccactacgctatcagcacagcttacacttctccagagggatacttctggtttaactaccgagaatagagaactcaaacttcggttgcagtccatggaggagcaagctaaactacgggatgctctaaatgacgctctgcgagaagaagtccagcggcttaagatagctgcagggcaagctccaaaaatgaatgggagtcaattcaacggcggactccagcagattccatcctatttctctcagcaacaccagcgacagcagcagcagcagcatcaacaacagatggcttacttaggtgggcaccaagctcagcgtcaccatccaaaccatcaccagagcccatcgaatggtggccagtcgctgagtggtctgtccctagacgactccatggatttcatttgaggaacactagggccctcctattaaatcatacaccaactgcaactcagcattgtacagatagctaatgtactatctatgcatatgaatcattggtagggtagctagcctttctttgtatttctatcattaatcagaaagcatgctcttgtatgacataatctcctctttcccttctttgtctgtttctggagagcaattgatgatactgggaactcttacttacaatgtgcttttcaaaaaaaaaaaaaaaa

SEQ ID NO: 3586 - protein, 184 aa, Triticum aestivum
  misc_feature: Ceres CLONE ID no. 756036
  misc_feature: Ceres CDNA ID no. 36530614
  misc_feature (15)..(75): Pfam Name: bZIP_1 PFAM Desc: bZIP transcription factor
  misc_feature (77)..(107): Pfam Name: bZIP_2 PFAM Desc: Basic region leucine zipper
  misc_feature: Homolog of GI Number: 77553754 NR Desc: susceptibility transcription factor RVS1
  misc_feature: Homolog of GI Number: 62733344 NR Desc: bZIP transcriptional activator RSG
  misc_feature: Homolog of GI Number: 29367343 NR Desc: bZIP
  misc_feature: Homolog of GI Number: 19401702 NR Desc: susceptibility transcription factor RVS1
  misc_feature: Homolog of GI Number: 2921823 NR Desc: shoot
  misc_feature: Homolog of GI Number: 50940017 NR Desc: putative transcription activator RF2a
  misc_feature: Homolog of GI Number: 8777512 NR Desc: bZIP transcriptional activator RSG
  misc_feature: Homolog of GI Number: 21553989 NR Desc: VirE2
  misc_feature: Homolog of GI Number: 7258340 NR Desc: VirE2
  misc_feature: Homolog of GI Number: 21436379 NR Desc: putative VirE2
MPAERIAELALLDPKRAKRILANRQSAARSKERKIKYTGELERKVQTLQTEATTLSAQLTLLQRDTSGLTTENRELKLRLQSMEEQAKLRDALNDALREEVQRLKIAAGQAPKMNGSQFNGGLQQIPSYFSQQHQRQQQQQHQQQMAYLGGHQAQRHHPNHHQSPSNGGQSLSGLSLDDSMDFI

SEQ ID NO: 3587 - DNA, 1765 bp, Triticum aestivum
  misc_feature: Ceres CLONE ID no. 756140
  misc_feature: Ceres CDNA ID no. 24766196
  CDS (96)..(1508): REFERENCED BY SEQ ID NO: 3588
agagcaatacttgttgccaacacagacaccgctctgcctcttgaacccaagcagagcatcaaagaaaccagaggaggcggaggcagaggaagaagatggcgctcctccttgtgcttgtcggcgttgtggtcggcgtggtgctcgcgagcagcctgctgctgcggtggaacgaggtcaggtacggccggaggaaggagggccgcttgccgccggggacaatggggtggccgctcttcggcgagaccaccgagttcctcaagcagggcccgagcttcatgaagcagaggaggctcaggtacgggaggctgttccggacgcacatcctgggttgccccacggtggtgtgcatggacccggagctcaaccgccggatgctgctgcagggcgaggccggcggcctggtgcccggctacccgcagtccatgctcgacatcctcggccgcaacaatatcgccgccgtgcacggccagctgcaccgcgtcatgcgtggtgccatggtcggcctcgtccgccccgccgcgctccggcaaagcctcctccccaagatcgacgccttcatgcgcgaccacctctgcggctgggccggcaccgttgtcgacgtccaggccaagaccaaggagatggccttgctgtctgcactcaggcagatcgccggcgtcacggccggcccactctctgacgccctcaagacggagctgtacacgcttgtgctcggcaccatctccttgcccatcaacctcccagggaccagctactaccaaggctttcaggcaaggaagaagctcgtgtccattctagagcagatgatcgcggaacggcgatcctctggtgatgctcacgatgacatgttggatgctctcttgagaagcggcgatgacggcaccagggaaaagattagcgatgagcagatcattgacttgctcatcgccctcatctactctgggtacgagaccatgtcgacgacctcaatgatggctgtcaagtacctgtcagaacatccgcgggccctcgaagaacttaggagagagcatcttgatatcaggaagggaaaatcgccggacgaagccatcagctacgatgatgtcaagtccatgactttcactcgagctgccatttttgagacgctaagattagccacagttgtgaatggactgctgaggaaaactattaaggatgtagaaatgaatgggtatgtcattccaaaaggctggagaatctatgtttacacaagggagataaactacgatccgttcatgtatcctgacccgatgacctttaatccgtggagatggctggagaagaacatggaatcgcacccgcacttcatgttgttcggagggggcggccggatgtgccccgggaaggaggtgggaacggtggagatcacgactttcctccactatttcgtgacccgatacagatgggaggaagaaggcaagaacaccatcttgaaattcccccgggtggaagctcccaacgggctgcatatccgagttcaagattactgaactcttccaagaaacattttgcagagtttagatagatatgacaaagacaaagacgatgagagcgcgattctgcgccgatgaatagattagattagaaatttgatacctgtataaacataggaaaatagcgatagtatagatgttataggttcactaggtagccgggataataggcaacaacatgctcctgtgttcttttgttctaccaattccgaaatgaacaaaggcgtatgatgtgggtaaaaaaaaaaaaaaaa

SEQ ID NO: 3588 - protein, 470 aa, Triticum aestivum
  misc_feature: Ceres CLONE ID no. 756140
  misc_feature: Ceres CDNA ID no. 24766196
  misc_feature (38)..(89): Pfam Name: p450 PFAM Desc: Cytochrome P450
  misc_feature: Homolog of GI Number: 5921933 NR Desc: Cytochrome P450 85
  misc_feature: Homolog of GI Number: 68565030 NR Desc: Cytochrome P450 85A
  misc_feature: Homolog of GI Number: 27544770 NR Desc: brassinosteroid
  misc_feature: Homolog of GI Number: 14475586 NR Desc: brassinosteroid
  misc_feature: Homolog of GI Number: 9294419 NR Desc: cytochrome P450
  misc_feature: Homolog of GI Number: 50838910 NR Desc: cytochrome P450
  misc_feature: Homolog of GI Number: 38194919 NR Desc: cytochrome P450
  misc_feature: Homolog of GI Number: 63108260 NR Desc: cytochrome P450 enzyme
  misc_feature: Homolog of GI Number: 21536828 NR Desc: cytochrome P450 homolog
  misc_feature: Homolog of GI Number: 42573531 NR Desc: cytochrome P450
  misc_feature: Useful for delaying flowering time
  misc_feature: Useful for increasing chlorophyll and photosynthetic capacity
  misc_feature: Useful for making larger plants
  misc_feature: Useful for making lethal plants for genetic confinement systems
  misc_feature: Useful for making ornamental plants with modified leaves
  misc_feature: Useful for making plants that grow better in shade
  misc_feature: Useful for making plants with altered leaf shape eg curled leaves
  misc_feature: Useful for making plants with increased biomass and foliage
  misc_feature: Useful for making plants with increased biomass and foliage
  misc_feature: Useful for making plants with increased biomass and foliage
MALLLVLVGVVVGVVLASSLLLRWNEVRYGRRKEGRLPPGTMGWPLFGETTEFLKQGPSFMKQRRLRYGRLFRTHILGCPTVVCMDPELNRRMLLQGEAGGLVPGYPQSMLDILGRNNIAAVHGQLHRVMRGAMVGLVRPAALRQSLLPKIDAFMRDHLCGWAGTVVDVQAKTKEMALLSALRQIAGVTAGPLSDALKTELYTLVLGTISLPINLPGTSYYQGFQARKKLVSILEQMIAERRSSGDAHDDMLDALLRSGDDGTREKISDEQIIDLLIALIYSGYETMSTTSMMAVKYLSEHPRALEELRREHLDIRKGKSPDEAISYDDVKSMTFTRAAIFETLRLATVVNGLLRKTIKDVEMNGYVIPKGWRIYVYTREINYDPFMYPDPMTFNPWRWLEKNMESHPHFMLFGGGGRMCPGKEVGTVEITTFLHYFVTRYRWEEEGKNTILKFPRVEAPNGLHIRVQDY

SEQ ID NO: 3589 - DNA, 931 bp, Triticum aestivum
  misc_feature: Ceres CLONE ID no. 756390
  misc_feature: Ceres CDNA ID no. 40351326
  CDS (145)..(735): REFERENCED BY SEQ ID NO: 3590
actgcggcttacaccagggaaaggctctcgcatcgctccctccccggggcgacacgggcggcggctcaggcgcccctccaccagaccccctcctcattcccctcccctcgccgtcgccggtgggctccgccgggcgaagcccgcatggatccggcggcggcgggacctcttctacccggcgtcgctcgtgaggggaagacttgcagcggcgggcgacggatgccggacgacgtacggtgctggtgtcggctgcgggcggcggatggggagctggggcggcggcatcggtccgggctccggcgtggcctgggcgtggacggcatgcatgcgcgcggcggcggtcggcttcggatcgtgcgtggggtgcggatcgacgtcgggcgcggcagcggctttcgtctcccggatttcgccgccgcagccgctcaccgcccacgcctcctacccgtcgacgagatgacgaagcgcaccaagaaggctggtattgtcggcaaatatggtacccgttatggtgccagtttgcgtaagcagatcaagaagatggaggtgtctcagcactccaagtacttctgtgagttctgtgggaagtttgctgtgaagaggaaagcagttggaatttggggatgcaaggactgtgggaaggtgaaggctggcggtgcttacactatgaacactgccagtgcggtcactgtcaggagcactatccgtcgtttgagggagcagactgaagcataagttgctactagtgttttgtcctagtgaatcatctgggatttcgcagtttagacgatactttggattcagttccattggctgtttagtcaaggattatctttgtacttggtgcgatgatgttctgttatgttattctcccacccttttgttgcctgattccactctgatttactgtggattaaaaaaaaaaaaaaaa

SEQ ID NO: 3590 - protein, 92 aa, Triticum aestivum; identical to SEQ ID NO: 294
  misc_feature: Ceres CLONE ID no. 756390
  misc_feature: Ceres CDNA ID no. 40351326
  misc_feature: null
  misc_feature: Useful for making plants with modulated cold sensitivity
  misc_feature (2)..(91): Pfam Name: Ribosomal_L37ae PFAM Desc: Ribosomal L37ae protein family

SEQ ID NO: 3591 - DNA, 2005 bp, Triticum aestivum
  misc_feature: Ceres CLONE ID no. 756409
  misc_feature: Ceres CDNA ID no. 40351327
  CDS (275)..(1600): REFERENCED BY SEQ ID NO: 3592
gattgcctcgcctcgccatttcgcctcccgtcttcgcatcgcgcgccccgccgccgccgccgcctcctccacacccgtcctgcgcggcgcggccgcgtcttgctccgtgcggcgagaggcgagatctcggccgggctttgctgcgcgcgccgccgtagtggaggaggcggcgggggcggttggtgggcggggccaggtggcctagcggttcgtggtcgccggagttacagcaggacgagtgggagtcgtcgtcgtctcgcgggtcgcggcggcgatgtacgtgccgcagtcgtcccgcggcgggggcggctccgccggggagcagcctagggtttaccaagtctggcggggaagcaacgagtttctcttgcaagggcggttcatatttggacctgatgtgagatccttgtttctcactatattcctcatccttgcaccagtgttggtcttctgtatatttgttgccagacatctgatgaatgattttcctgatcactgggggatttcagttatggttgtagcggttgtcttcacagtatatgatttgacgctgctgcttcttacctctggtagagatcctggtatagtacctcgtaacacgcacccccctgaacctgaatcccttgatgggaacaatgatactggaaacggtcagactccacaacaattgcgcttaccacggacaaaggatgtttatgtaaatggagttgttgtaaaggtcaagtactgcgacacctgcatgctgtatcggccacctcgttgctctcactgttctatctgtaacaactgtgtggagcgttttgatcatcactgtccttgggttggtcaatgcataggactgcgtaattatcgcttcttctatatgtttgtcttctcgaccacattactctgcctctacgtatttgggttctgctgggtgtacataattaagatcagagatgcagaagattcatcgatttggagggcaatgttgaagacacctgcctcaatggttctgatcatctactgttttatttgtgtgtggtttgttggtggtctttctgtcttccatttctacctgatgagcaccaaccagactacttacgagaacttcaggtatcggtacgaccggcgggctaacccatataatgtaggtgtggtgaacaactttctggagatcttctgcactgctgtccccgcttccaagaattatttccgagctagggtcccagtagagcaaggtttacagcaatcacgcccaccaaccaggggcttcatgagcccaaacatgggcaaacctgttggagaccttgaattgggcaggaagccagtatcatgggacgaacctcggtcaggagctgatataagagatttagaagttgggggcatgttggatgagaaagaaggcagaataacccatgcgtcacctgatctcagcagagaagcccttccagttgagctcatggaaggtagggctggtatgcattcgagacgatcaagctggggtcacagaagtgggacctcagagtcgatggacagcattgccgtgcagatgggaggtggagaaactaactggggctcggtcagcagtggccacggcacaaccagtggaactcactagcaaaccgaacgccgctttctgacgccacactgggtctgatctcaacaacgaacgaccctgtctgatctacagaatgaagaacggcctttctgagtaccctgcgatcatgtgcctttcaattagggtatactatatgccaatgctttcttacccgtgtccgtttcatcttggaagggcgtcagtccttttgatgtgcttctcgtttggtgttttaagtaagcaaagaaaataacagaagagatttaactcctgctgcgtggcttggattgtcaatctgtgtgtatatatttattattggaacagtctgtaagaaagtgtgctctgtatgatttgctgcttgtaatattcttagctttgaaatcatgttttataaatgtactgttgttatcaaaaaaaaaaaaaaaa

SEQ ID NO: 3592 - protein, 441 aa, Triticum aestivum
  misc_feature: Ceres CLONE ID no. 756409
  misc_feature: Ceres CDNA ID no. 40351327
  misc_feature (141)..(205): Pfam Name: zf PFAM Desc: DHHC zinc finger domain
MYVPQSSRGGGGSAGEQPRVYQVWRGSNEFLLQGRFIFGPDVRSLFLTIFLILAPVLVFCIFVARHLMNDFPDHWGISVMVVAVVFTVYDLTLLLLTSGRDPGIVPRNTHPPEPESLDGNNDTGNGQTPQQLRLPRTKDVYVNGVVVKVKYCDTCMLYRPPRCSHCSICNNCVERFDHHCPWVGQCIGLRNYRFFYMFVFSTTLLCLYVFGFCWVYIIKIRDAEDSSIWRAMLKTPASMVLIIYCFICVWFVGGLSVFHFYLMSTNQTTYENFRYRYDRRANPYNVGVVNNFLEIFCTAVPASKNYFRARVPVEQGLQQSRPPTRGFMSPNMGKPVGDLELGRKPVSWDEPRSGADIRDLEVGGMLDEKEGRITHASPDLSREALPVELMEGRAGMHSRRSSWGHRSGTSESMDSIAVQMGGGETNWGSVSSGHGTTSGTH

SEQ ID NO: 3593 - DNA, 1412 bp, Triticum aestivum
  misc_feature: Ceres CLONE ID no. 756508
  misc_feature: Ceres CDNA ID no. 25446235
  CDS (61)..(1215): REFERENCED BY SEQ ID NO: 3594
tctcttcttcccattgatgtccctgtcaacaacgcaacttcggccgagcgctcctaggagatggattcatctagagaccggctcctagccctagcagaggaatatccggagtatgatatggagctgctggggcacgtcctcgacaacgagaatcttcgagtcaagtacatcccggaggcaataaaagtgctcttcgagacgccgtccggctttgcgatcttcgccatcgactctggctacctctatgacaacgacagggacttcactggcattgacacgatctgggttcactgtgtcaagaaggaatctgcggacttttttctctggccaaagggattcctaaagcttgacaaggcgaccaaggccatagccattaattctgatggtattcataaaagccttgctgaatttatcgagcagaaggttgggatggaggatatactattggtcggtgaatctgcatacgtagaagttattgaagcacacgtgggagttacatgtagatgcgatgctaatgcaattgagctgatgtggggcctgcaaaacctattgcatgatttagtgcctgaagaggaatcggagttcggaaagaatgaccgcaagtactatagtcaaaaattacttgcctacctgcgtcacattgacaatgaggtcaggcctgaaatgatcaatggagagattgctttattggcttccatcatacaccgttgtaatgttaccaacaagaattaccgcgacaacatgcataagcttgataaggttctttacaagagatctggcctcaggactgaccaatgggacactgtgacgcatgctacagctctagctaaattgattggagaatctgtacccatccctgaaagtatgttcagttctgtcgaaaagggaactctaactagtaatctagtcgattacagtgatgagattgacaaggacactataaaagtaatatacgagcatgtggtacaacttaataaacttaagttttcaacgctgcacaagctcaagattcttctttgcgatgctaaagcagcagtcttgcgggagcctcgggagtctgaagagatgttggttgaggtgccacaagtgttcagttccaagaggagttgccaggaggaggctgaatgtgaccggcagaataagagtctcaaggttaacgacggtgacagtgatgtggtccaaagtgatgcaattatggatgcaaaaacgaattagtttcactttgctgacctatgaatgaatgtgctcaagtcagttccttattattttgcgctgacctattaatgaatgtgctcgagtaagttccttattttgcgctatcaacaaatttggaacagtccaaactgaactgtcatgtactttgttaattagtttcttaccaatgcttgcttgtaacaaaaaaaaaaaaaaaa

SEQ ID NO: 3594 - protein, 384 aa, Triticum aestivum
  misc_feature: Ceres CLONE ID no. 756508
  misc_feature: Ceres CDNA ID no. 25446235
MDSSRDRLLALAEEYPEYDMELLGHVLDNENLRVKYIPEAIKVLFETPSGFAIFAIDSGYLYDNDRDFTGIDTIWVHCVKKESADFFLWPKGFLKLDKATKAIAINSDGIHKSLAEFIEQKVGMEDILLVGESAYVEVIEAHVGVTCRCDANAIELMWGLQNLLHDLVPEEESEFGKNDRKYYSQKLLAYLRHIDNEVRPEMINGEIALLASIIHRCNVTNKNYRDNMHKLDKVLYKRSGLRTDQWDTVTHATALAKLIGESVPIPESMFSSVEKGTLTSNLVDYSDEIDKDTIKVIYEHVVQLNKLKFSTLHKLKILLCDAKAAVLREPRESEEMLVEVPQVFSSKRSCQEEAECDRQNKSLKVNDGDSDVVQSDAIMDAKTN

SEQ ID NO: 3595 - DNA, 701 bp, Triticum aestivum
  misc_feature: Ceres CLONE ID no. 756667
  misc_feature: Ceres CDNA ID no. 36707418
  CDS (75)..(536): REFERENCED BY SEQ ID NO: 3596
acatctgcaattccccacctccgagcgaaacacctctccctcactctcacctccgagaagctccagcggcagccatggccgcaaaggcagacaagaagccggcggccgagaacaaggtggagaaggcggcggagaagacccccgcggggaagaagcccaaggccgagaagcggctgccggcgggcaagacggcgtccaaggaggccggcggcgaggggaagacccggggcaggaagaagggcagcaaggcgaagaagggcgtggagacgtacaagatctacatcttcaaggtgctgaagcaggtgcacccggacatcggcatctcctccaaggccatgtccatcatgaactccttcatcaacgacatcttcgagaagctcgccggcgagtcggccaagctcgcgaggtacaacaagaagcccaccatcacctctagggagatccagacctccgtccgcctcgtcctccccggcgagctcgccaagcacgccgtctccgagggcaccaaggccgtcaccaagttcacatcctcctagactgacggcgcgccgcttgttgtgacagatgtagttggctgctgttagtcgctgactctgcttatgtatctgcaagtagtggtaggagtggtcgtctgtgtgccaacgcttcgttggctagttggttgtcagaactgaagttgctaatcaaaaaaaaaaaaaaaa

SEQ ID NO: 3596 - protein, 153 aa, Triticum aestivum
  misc_feature: Ceres CLONE ID no. 756667
  misc_feature: Ceres CDNA ID no. 36707418
  misc_feature: No seed is being produced by the plant
  misc_feature: The plant flowers significantly late compared to wild-type.
  misc_feature: Useful for biocontainment applications
  misc_feature: Useful for making plants with modulated flowering time
  misc_feature (60)..(132): Pfam Name: Histone PFAM Desc: Core histone H2A/H2B/H3/H4
  misc_feature: Homolog of GI Number: 122033 NR Desc: Histone H2B.2
  misc_feature: Homolog of GI Number: 22325 NR Desc: H2B histone
  misc_feature: Homolog of GI Number: 577825 NR Desc: H2B histone
  misc_feature: Homolog of GI Number: 21801 NR Desc: histone H2B
  misc_feature: Homolog of GI Number: 34895900 NR Desc: putative histone H2B
  misc_feature: Homolog of GI Number: 34895838 NR Desc: putative histone H2B
  misc_feature: Homolog of GI Number: 34895896 NR Desc: putative histone H2B
  misc_feature: Homolog of GI Number: 34895832 NR Desc: putative histone H2B
  misc_feature: Homolog of GI Number: 50932769 NR Desc: putative histone H2B
  misc_feature: Homolog of GI Number: 1708107 NR Desc: Histone H2B
MAAKADKKPAAENKVEKAAEKTPAGKKPKAEKRLPAGKTASKEAGGEGKTRGRKKGSKAKKGVETYKIYIFKVLKQVHPDIGISSKAMSIMNSFINDIFEKLAGESAKLARYNKKPTITSREIQTSVRLVLPGELAKHAVSEGTKAVTKFTSS

SEQ ID NO: 3597 - DNA, 746 bp, Triticum aestivum
  misc_feature: Ceres CLONE ID no. 756787
  misc_feature: Ceres CDNA ID no. 24766844
  CDS (63)..(461): REFERENCED BY SEQ ID NO: 3598
atcccaagctagcaaagccaagcttagccatagccacagaccagtaagatcgatcagtagcaatggcgccctccaagctcgccctcttcctcgccctgaacctggtcctccttgcggccgcccagggctgcggaccctactgcccaccagtcgtccctaccccgtccatcctcccaccgcccgtgccgtcgaccggcgggggcagctgctcgatcaacacgctgaagctgggcgtgtgcgccaacgtgctgaacctgctgaagctcaagatcggcgtgccagcgaacgaggagtgctgcccgcttctgggcgggctcgccgacctcgacgctgccgtgtgcctctgcaccgccatcagggccaacattctcggcatcaagctcaacgtgcccatcgacctgaccctcctcctcaaccagtgcggcaagaagtgcccctccgacttcacctgccccatctgatccatccaacaccatcgatgaatattatacatgcatttttttattcgtaactagtttgcatttcatacgtacgcaccatacgtatattttctatgttccagttccggtactatatgttaggtgtttgaatgggctccctcgctcgtgcatgcatgcttgataagtttgtgattgatcacatgatcagtgtatctcgttatggtatctaaatgcatgatgcatgtatttgtaaaaggattgtatgtgtatgaggaataaaaggtttgttcaaaaaaaaaaaaaaaa

SEQ ID NO: 3598 - protein, 132 aa, Triticum aestivum
  misc_feature: Ceres CLONE ID no. 756787
  misc_feature: Ceres CDNA ID no. 24766844
  misc_feature (49)..(130): Pfam Name: Tryp_alpha_amyl PFAM Desc: Protease inhibitor/seed storage/LTP family
  misc_feature: Homolog of GI Number: 39748092 NR Desc: lipid transfer protein
  misc_feature: Homolog of GI Number: 2226329 NR Desc: physical impedance induced protein
  misc_feature: Homolog of GI Number: 37536704 NR Desc: putative lipid transfer protein
  misc_feature: Homolog of GI Number: 50911525 NR Desc: root
  misc_feature: Homolog of GI Number: 39748094 NR Desc: lipid transfer protein
  misc_feature: Homolog of GI Number: 37536712 NR Desc: putative lipid transfer protein
  misc_feature: Homolog of GI Number: 37536718 NR Desc: putative lipid transfer protein
  misc_feature: Homolog of GI Number: 58578282 NR Desc: extensin
  misc_feature: Homolog of GI Number: 60542797 NR Desc: arachidonic acid
MAPSKLALFLALNLVLLAAAQGCGPYCPPVVPTPSILPPPVPSTGGGSCSINTLKLGVCANVLNLLKLKIGVPANEECCPLLGGLADLDAAVCLCTAIRANILGIKLNVPIDLTLLLNQCGKKCPSDFTCPI

SEQ ID NO: 3599 - DNA, 1406 bp, Triticum aestivum
  misc_feature: Ceres CLONE ID no. 756825
  misc_feature: Ceres CDNA ID no. 25891138
  CDS (75)..(1190): REFERENCED BY SEQ ID NO: 3600
tagatctcacactccaagctagccaacaccagctactgctcggtgaactagtttggtacgtagcagctagcacgatggggcagcttagcaagaaccttctggtggcggccgtgctggccgtggcggcggtggagctgtgcggcgccatcccgctggaggacaaggacctggagtcggaggaggcgctgtgggacctgtacgagcggtggcagaccgcgcaccgcgtgccccgccaccacgccgagaagcaccgccgcttcggcaccttcaagtccaacgcccacttcgtccactcccacaacaagcgcggcgaccgcccctaccgcctccgcctcaaccgcttcggcgacatgagccaggccgagttccgcgccaccttcgtcggcgacttccgccgcgacaccctggccacgccgccgtccgtccccggattcatgtacgccgccgtgaacgtgtccgacctgccgccgtccgtggactggcggcagaagggcgccgtgacgggcgtcaaggaccagggcaagtgcggtagctgctgggccttctccacggtggtgtccgtggaaggcatcaacgccatccgcacgggcagcctcgtgtccctctcggagcaggagctcatcgactgcgacacggcggacaacgaagggtgccagggcgggctcatggacaacgccttcgagtacatcaagagcaacggcgggctcatcaccgaggctgcctacccgtaccgcgccgcccaaggcacctgcaacgtcgcgagagcggcccagaactcccccgtggtggtgcacatcgacgggcaccaggacgtgccggccaacagcgaggaggcgctggcccaggcggtggcgaaccagcccgtgtccgtggccgtcgaggccagcgggaaggcgttcatgttctactccgagggggtcttcaccggcagctgcggcacggagctggaccacggcgtcgcggtggtcgggtacggcgtggcagaggacggcaaggcgtactggacggtgaagaactcgtgggggccgtcgtggggggagcagggctacatcagggtggagaaggattccggcgtcgcgggcgggctctgcggcatcgccatggaggcgtcctaccccgtcaagaccgacagcaagcccaagcccacgccgacgcccaggcgcgccctcggagccagggagtcacagtgatgcggcggaattattgctactactactatcgttcctagttaaattaagggtgaaataagttaagattgaattaaatggttctgcgtgggcacgcggcaagaattaagtgtcacgtgggacaaggtcgatcgatatgtatttggattttctgaatgtaatgtaaaatataatgtgatgtaatgtattgctggttacagtgcaaaaaaaaaaaaaaaa

SEQ ID NO: 3600 - protein, 371 aa, Triticum aestivum
  misc_feature: Ceres CLONE ID no. 756825
  misc_feature: Ceres CDNA ID no. 25891138
  misc_feature (130)..(349): Pfam Name: Peptidase_C1 PFAM Desc: Papain family cysteine protease
  misc_feature: Homolog of GI Number: 4426617 NR Desc: cysteine endopeptidase precursor
  misc_feature: Homolog of GI Number: 7435804 NR Desc: cysteine proteinase
  misc_feature: Homolog of GI Number: 1146116 NR Desc: cysteine proteinase EPB1 precursor
  misc_feature: Homolog of GI Number: 1146118 NR Desc: cysteine proteinase EPB2 precursor
  misc_feature: Homolog of GI Number: 56785107 NR Desc: putative cysteine proteinase
  misc_feature: Homolog of GI Number: 40806500 NR Desc: putative cysteine protease 2
  misc_feature: Homolog of GI Number: 58531896 NR Desc: cysteine protease
  misc_feature: Homolog of GI Number: 396568 NR Desc: thiol
  misc_feature: Homolog of GI Number: 51965090 NR Desc: PREDICTED OJ1150_A11.17 gene product
  misc_feature: Homolog of GI Number: 31559528 NR Desc: cysteine proteinase
MGQLSKNLLVAAVLAVAAVELCGAIPLEDKDLESEEALWDLYERWQTAHRVPRHHAEKHRRFGTFKSNAHFVHSHNKRGDRPYRLRLNRFGDMSQAEFRATFVGDFRRDTLATPPSVPGFMYAAVNVSDLPPSVDWRQKGAVTGVKDQGKCGSCWAFSTVVSVEGINAIRTGSLVSLSEQELIDCDTADNEGCQGGLMDNAFEYIKSNGGLITEAAYPYRAAQGTCNVARAAQNSPVVVHIDGHQDVPANSEEALAQAVANQPVSVAVEASGKAFMFYSEGVFTGSCGTELDHGVAVVGYGVAEDGKAYWTVKNSWGPSWGEQGYIRVEKDSGVAGGLCGIAMEASYPVKTDSKPKPTPTPRRALGARESQ

SEQ ID NO: 3601 - DNA, 1196 bp, Triticum aestivum
  misc_feature: Ceres CLONE ID no. 757222
  misc_feature: Ceres CDNA ID no. 40351328
  CDS (210)..(683): REFERENCED BY SEQ ID NO: 3602
caggccgggcgttgcaacgaacaaacaaacgctgctttcagaagaagggttcttccttctccactccttgtattccgtcacacgagtccgacggcgacgacgacttgagggagaaggcgaagaggaaggaaggcggactcgagaggttcgacggggattttggtgttcgtccggcggattcccagcgatcggccgatcctcgccggcggatggggcaggcgttccgcaaactgttcgatgccttcttcggcaacagcgagatgagggtcgtgatgcttgggctggatgccgcgggcaagaccaccatcctgtacaagctgcacatcggggaggtcctctcgactgtccctacgattgggttcaatgttgagaaagttcagtacaagaacgtgctgtttacagtgtgggatgttggtggccaggagaagttgaggcccttgtggagacattactttaataacacagatggcttgatctacgtggttgattcattggatagggagagaattggaaaagccaaagcagagtttcagacaataatcaacgatcctttcatgcttaacagtgtcatattggtatttgccaataaacaagatatgaaaggggcgatgacaccaatggaggtgtgcgaaggccttggcctctatgatttgaagaaccgcgtctggcacatccaagtatgagggcttggactggctgtcaagtactctgcaggatctgcaagcgttcggtcgcctaccctcaggagggacctaacagttctaagtagcacttctgcttataagatcctaatgctcatactaacaacctttggatgaaagatgacactcagagagaaagaaaaagatagtggtgagaaacacatccaggttttgcgataagctttggtgttgattctgctgaagaaaagactttgcttgggtctgaccacatcaaatttaccagtacaatcttgtcatggatagtgtggattctctaattcgtgacatatttcatgtaaaatttcctgtgagtttagaggagctaaccatcttatgcttttgttcacatatgaggagtggaacataatgttattgatgtaaattttctgtaagataattttggcacatacgatccgtatctagacaaaagaattttgggacggagggagtacaatttatgtctcccttgccccccccccaaaaaaaaaaaaaaaa

SEQ ID NO: 3602 - protein, 157 aa, Triticum aestivum
  misc_feature: Ceres CLONE ID no. 757222
  misc_feature: Ceres CDNA ID no. 40351328
  misc_feature: null
  misc_feature: Useful for making plants with altered terpenoid content
  misc_feature (19)..(150): Pfam Name: Ras PFAM Desc: Ras family
MGQAFRKLFDAFFGNSEMRVVMLGLDAAGKTTILYKLHIGEVLSTVPTIGFNVEKVQYKNVLFTVWDVGGQEKLRPLWRHYFNNTDGLIYVVDSLDRERIGKAKAEFQTIINDPFMLNSVILVFANKQDMKGAMTPMEVCEGLGLYDLKNRVWHIQV

SEQ ID NO: 3603 - DNA, 1943 bp, Triticum aestivum
  misc_feature: Ceres CLONE ID no. 757381
  misc_feature: Ceres CDNA ID no. 35383282
  CDS (135)..(1730): REFERENCED BY SEQ ID NO: 3604
aatttatcccactcctccctcccaccttcgtccccccctccctctgcagagacagacagcacagccgagccaagccaggagcagccagccacaaagaggggaggggaagctggaggggaggcgctgagcgagcaatggaggcgcatatggcggcggcccgaccgccgacgcaccaccacaaccacagccacagccagcagcagcagcagaaggcggccaacctggcgcgcaccttcaccaagctgctccgccggaagcgctccgactccgcggcggcgaaggcgggggccggggccggggccaaggaggcggatgcgccgccgtccgtcaccggggacgactacgacagctccatggacgccaccacccccaccaccgccaccacggccaccatgccgtcgctcagcaagctcaagctctccgggaacctcgccgcggcctactccctcgacgccttcttccgcaacgccgccgagaagaaggccgccggggcgccccagcagcagccctcgccgccggccgccgcgacggttgccgccgcggactccctcctcgccaatctgttcgcgggcgtctcggccgtcaaggcggcctacgcgcagctgcagctcgcgcagttcccctacgacgcggaggccattcagtccgcggacgccgccgtggtcgcggagctcaccaggttgtccgacaccaagcggaggttcctcaaggatcccgccggcgcggccagggacgccgcggcggcgggcaacaccgccctctccgcgcatgccgaggagcagcggcatctgctcaagacgtaccagatcacggcgcgcaagctggaggcggagctccgtgccaaggatgcggagctcgaccgcgccaagggctccctcgatgcggagctccgggcggagcgcgccatggaggtgcgcctgcatccgggccgcaccctcgcgtcgctggacgagctccacgtctccggcctcaacccaacccacttcctcaccgccctgcggcacgccgtgaagtcgatccgctccttctccaagtcaatgctcagctcgatgcaggcagctgggtgggatctgaccgcggcggccgccgccgtccacccaggcgtcccgttgcgacgggccggggacgccaagttcgtcttcgaatcctacgtcgccatgaagatgttcgccaatttccaccggagggacttcaatttcagcttcttggacgagcgggagttctacgagcggcgccgcttcttcgaggagttcacggagctcaaggcggcgccggccagcgtcttcctcgacgtgcggaacacccggtggagcggattcggcaagttcttgcgcgccaagtacctatcgctggtgcacgccaggatggagacggccttcttcggcaggcaggagcagcgcggcatcgtgagcgccgggcccgggttcccggagagctcgtggttcgccgagttcgcggagatggcgcgccgcgtgtggctgctgcattgcctcttctacgcgttcgacggcggcgacgaggaggacggcacgtccatcttccaggtccggaccggcgcgcggttcgcggaggtgtacatggagagcgtcaacgacgggcgcacggaggacgcgttctgcaccgccgccgaggaccgcaccgtcgggttcaccgtagtacctgggtttagagtcggccgtacggtgatccaatgccgcgtgtacctggcgcggccgggacggcggccgtgatcagcaaattagaaccgccctgtttggggcgcccggcggacgacgattggggaggaaaatttccattttggggcggccgtcgaggtctctcgccggtcgccggctggggtggcgatcatggtggtggcgggggttatgtatctattaagggatgtagcgatgtgatcataatataagtgacatttcagttcggatccaaaaaaaaaaaaaaaa

SEQ ID NO: 3604 - protein, 531 aa, Triticum aestivum
  misc_feature: Ceres CLONE ID no. 757381
  misc_feature: Ceres CDNA ID no. 35383282
  misc_feature: Homolog of GI Number: 53828581 NR Desc: At1g53380
  misc_feature: Homolog of GI Number: 72547023 NR Desc: proteophosphoglycan ppg4
  misc_feature: Homolog of GI Number: 72547041 NR Desc: proteophosphoglycan ppg1
  misc_feature: Homolog of GI Number: 72547036 NR Desc: proteophosphoglycan 5
  misc_feature: Homolog of GI Number: 72547018 NR Desc: proteophosphoglycan ppg3
  misc_feature: Homolog of GI Number: 67987177 NR Desc: 4Fe
  misc_feature: Homolog of GI Number: 66778264 NR Desc: LigA
  misc_feature: Homolog of GI Number: 19923466 NR Desc: splicing coactivator subunit SRm300
  misc_feature: Homolog of GI Number: 71891780 NR Desc: KIAA0324 protein
  misc_feature: Homolog of GI Number: 41400381 NR Desc: minus agglutinin
MEAHMAAARPPTHHHNHSHSQQQQQKAANLARTFTKLLRRKRSDSAAAKAGAGAGAKEADAPPSVTGDDYDSSMDATTPTTATTATMPSLSKLKLSGNLAAAYSLDAFFRNAAEKKAAGAPQQQPSPPAAATVAAADSLLANLFAGVSAVKAAYAQLQLAQFPYDAEAIQSADAAVVAELTRLSDTKRRFLKDPAGAARDAAAAGNTALSAHAEEQRHLLKTYQITARKLEAELRAKDAELDRAKGSLDAELRAERAMEVRLHPGRTLASLDELHVSGLNPTHFLTALRHAVKSIRSFSKSMLSSMQAAGWDLTAAAAAVHPGVPLRRAGDAKFVFESYVAMKMFANFHRRDFNFSFLDEREFYERRRFFEEFTELKAAPASVFLDVRNTRWSGFGKFLRAKYLSLVHARMETAFFGRQEQRGIVSAGPGFPESSWFAEFAEMARRVWLLHCLFYAFDGGDEEDGTSIFQVRTGARFAEVYMESVNDGRTEDAFCTAAEDRTVGFTVVPGFRVGRTVIQCRVYLARPGRRP

SEQ ID NO: 3605 - DNA, 1528 bp, Triticum aestivum
  misc_feature: Ceres CLONE ID no. 758665
  misc_feature: Ceres CDNA ID no. 25892836
  CDS (128)..(1321): REFERENCED BY SEQ ID NO: 3606
accacacacccacaatcatcggtgtcatcgtcacccaaattctgcgactacaaaatatactccccgtgcgtgcctgtcaaaaaaccagaaccacggccagtgaccaagcgaagacgaaggaagagagatgccggggctcacggcgccgtcggactacgcggaggagccgccgcgccacccggccctcaggatcaactccaaggagccatttaatgctgagcctcatcgatctgcgttagtttcatcttatatcaccccagtggatttcttctacaagaggaatcatggaccaattcccaaagttgatgatatctcaagatacagtgtttccatcagtggcctcatgaataagcatatccagctgtccatggatgacattaggatgcttccgaagtacaatgtcactgcaacattacagtgtgcaggcaataagagaactgcaatgagtaaggtgcggaaagtgagaggtgttggatgggatgtatctgctcttggaaatgcaacttggggtggagcaaaactatctgatgtccttgaactagttggaatacataaactcagttcagtcacatctttaggaggcaaacatgttgagtttgtcagtgttgacaggtgtaaagaggagaaaggtggcccctataaggcatcaattccactaaagcaggcaacagatcctgatgctgatgtgttactcgcatatgaaatgaatggagagaccatcaatcgtgaccatggatatccactccgtgtggtcgtacctggtgttataggtgcacgctccgtaaaatggcttgacagcatcaacataatcaaggaagaatgccagggtttttttatgcaaaaagattacaagatgttcccacctaccgtagattgggacaatattaattggtcaactagaagaccacaaatggattttcctgtgcagtctgctatttgcaccctggaagatgtggatgttatcaaggaaggaaaggctagaattgctggatatgcagtctcaggcggcggccgcggcattgagagagtagatatatctgttgatgggggtaaaacatgggttgaagctcatagatatcagaaaagcaatgtgccatacgtctctgatggagctcaaagcgacaagtgggcatgggttctatttgaggccacattggacataccagcaaatgccgagatagtagctaaggcggtggattcggccgcaaacattcaacccgaaaacgtggaggacatatggaatctgagaggaatcctcaacacatcttggcatcggatcaaaatacagaatacatcatgcgtatctagatccaaaatgtgaaggaagtatgttgatgtgcctagaacaagcagcacgctggtccagctgagtccatgatatctccaaataataaagctactgcagcttaatttctgtgattttcgtatagactttgtcatggaactgtgttggtttgttaccagcgttacgaataactgcttttgttggctgatatgatatgaggaaatcgcaaaaaaaaaaaaaaaa

SEQ ID NO: 3606 - protein, 397 aa, Triticum aestivum
  misc_feature: Ceres CLONE ID no. 758665
  misc_feature: Ceres CDNA ID no. 25892836
  misc_feature (258)..(389): Pfam Name: Mo PFAM Desc: Mo
  misc_feature (3)..(237): Pfam Name: Oxidored_molyb PFAM Desc: Oxidoreductase molybdopterin binding domain
  misc_feature: Homolog of GI Number: 50947895 NR Desc: Moco containing protein
  misc_feature: Homolog of GI Number: 77554934 NR Desc: Oxidoreductase molybdopterin binding domain
  misc_feature: Homolog of GI Number: 62901056 NR Desc: Sulfite oxidase
  misc_feature: Homolog of GI Number: 6468008 NR Desc: sulfite oxidase
  misc_feature: Homolog of GI Number: 82941457 NR Desc: sulfite oxidase
  misc_feature: Homolog of GI Number: 82621174 NR Desc: sulfite oxidase
  misc_feature: Homolog of GI Number: 79295451 NR Desc: SOX
  misc_feature: Homolog of GI Number: 30424565 NR Desc: sulfite oxidase
  misc_feature: Homolog of GI Number: 74024924 NR Desc: sulfite oxidase
  misc_feature: Homolog of GI Number: 586053 NR Desc: Sulfite oxidase
MPGLTAPSDYAEEPPRHPALRINSKEPFNAEPHRSALVSSYITPVDFFYKRNHGPIPKVDDISRYSVSISGLMNKHIQLSMDDIRMLPKYNVTATLQCAGNKRTAMSKVRKVRGVGWDVSALGNATWGGAKLSDVLELVGIHKLSSVTSLGGKHVEFVSVDRCKEEKGGPYKASIPLKQATDPDADVLLAYEMNGETINRDHGYPLRVVVPGVIGARSVKWLDSINIIKEECQGFFMQKDYKMFPPTVDWDNINWSTRRPQMDFPVQSAICTLEDVDVIKEGKARIAGYAVSGGGRGIERVDISVDGGKTWVEAHRYQKSNVPYVSDGAQSDKWAWVLFEATLDIPANAEIVAKAVDSAANIQPENVEDIWNLRGILNTSWHRIKIQNTSCVSRSKM

SEQ ID NO: 3607 - DNA, 1136 bp, Triticum aestivum
  misc_feature: Ceres CLONE ID no. 758977
  misc_feature: Ceres CDNA ID no. 25445530
  CDS (90)..(905): REFERENCED BY SEQ ID NO: 3608
atcaggtaaacacacaaccatacacaaggcgcacggttgcaaaacaagggagttatttagaagcaaggagtaaggaaccacctgaagccatgtgtatcgctgcatggatttggcaggctcaccctcagcaccagctcctgctgctgctcaacagagatgagttccatagcaggcctacaaaggcagtaggatggtggggggagggctcaatgaagattcttggtggcagggatgtacttggtggaggaacatggatggggagcaccaaagatggcagacttgccttcctgaccaatgtgctcgagcctgatgtgatgcctggcgcacgcactaggggagacctgcccctcaggttcctgcagggcaacaagagcccactggaggttgcaactgaagtcgcaaaagaagctgatgagtacaatggcttcaaccttatactagctgatctaaccaggaatgtcatggtttatgtgtcaaaccggccaaaggggcagcctgcgacgattcagctcgtctcaccaggactccatgtgttgtccaatgcaaggctagacagcccttggcagaaagcaattcgccttggtaaaaacttcagggagtttataaggaagcatggtgatgatgaagttgaagcgaaggatatagctgatagactaatgactgacaccacgagggctgataaagataggctgccaaacaccggttgtgatcccaactgggagcacggtctgagctccatcttcatcgaggtgcaaactgacgaagggctctatggtacaaggagcacagcagttctttcagtgaactatgatggagaagctagcttatatgagaagtacctcgagagtggtatatggaagaaccacacagtgcattaccagatagaattgccaatgcgcacctaaaggcaggagcctcaaataggaagaaagaatgaatagctaccattgtgcatgctgttatttccacagttgcgctttaagatcacataatgatctctaattatggcaattaaattatttactgtatgcggatctataaattcagagacagatcaagtcaaattgttgaatatatatacataataataatatgatatagtatgtttatttacagacttaaaaaaaaaaaaaaaa

SEQ ID NO: 3608 - protein, 271 aa, Triticum aestivum
  misc_feature: Ceres CLONE ID no. 758977
  misc_feature: Ceres CDNA ID no. 25445530
  misc_feature: Homolog of GI Number: 50927973 NR Desc: OSJNBa0017B10.5
  misc_feature: Homolog of GI Number: 45519033 NR Desc: COG3332: Uncharacterized conserved protein
  misc_feature: Homolog of GI Number: 17546499 NR Desc: PUTATIVE SIGNAL PEPTIDE PROTEIN
  misc_feature: Homolog of GI Number: 47575525 NR Desc: COG3332: Uncharacterized conserved protein
  misc_feature: Homolog of GI Number: 61821913 NR Desc:  similar to Em:AC006547.3
MCIAAWIWQAHPQHQLLLLLNRDEFHSRPTKAVGWWGEGSMKILGGRDVLGGGTWMGSTKDGRLAFLTNVLEPDVMPGARTRGDLPLRFLQGNKSPLEVATEVAKEADEYNGFNLILADLTRNVMVYVSNRPKGQPATIQLVSPGLHVLSNARLDSPWQKAIRLGKNFREFIRKHGDDEVEAKDIADRLMTDTTRADKDRLPNTGCDPNWEHGLSSIFIEVQTDEGLYGTRSTAVLSVNYDGEASLYEKYLESGIWKNHTVHYQIELPMRT

SEQ ID NO: 3609 - DNA, 516 bp, Triticum aestivum
  misc_feature: Ceres CLONE ID no. 759622
  misc_feature: Ceres CDNA ID no. 29191550
  CDS (94)..(339): REFERENCED BY SEQ ID NO: 3610
gatccatccacacttcacggcatccattccagagcaacagcaggttcagtttcagtttccatctggttcgagtggtttttcggtcgcttgccaatggcggacatagcgatgctggtggccgacgaggcgttcgagaagaggctgcagcgaggggcgcccttcgccggcgccggcgaggaggcgtccaaaggacgggagaacttcggggccgtggccaaggtgtggggctcctgggcgtcgggggtcaaggtgcgcgtcgcgctgctcgtcaaggcggacgtcgccgagccgaaggcaccggtcgccatggcagcctttgacggcttattctctgcttaattagtcatctccttctttctgaaatggagttaatttggaggagttttacctgtatccccactcctcctcccctgagtcaatttcagtattgattcgtcacttgtatatacccatgatgtagtttactgaattgcaaacatttgtactgcgcttatttctaaaaaaaaaaaaaaaaaa

SEQ ID NO: 3610 - protein, 81 aa, Triticum aestivum
  misc_feature: Ceres CLONE ID no. 759622
  misc_feature: Ceres CDNA ID no. 29191550
  misc_feature: Homolog of GI Number: 7638400 NR Desc: OSE3
MADIAMLVADEAFEKRLQRGAPFAGAGEEASKGRENFGAVAKVWGSWASGVKVRVALLVKADVAEPKAPVAMAAFDGLFSA

SEQ ID NO: 3611 - DNA, 559 bp, Triticum aestivum
  misc_feature: Ceres CLONE ID no. 759623
  misc_feature: Ceres CDNA ID no. 29191551
  CDS (79)..(396): REFERENCED BY SEQ ID NO: 3612
tcacccttccgccgccgccgacgccgacgacgacgctaaccgaccgagcgcgagcaccgcaccgccgccgcggccgccatggtgaacgttccgaagaccaagaagacttactgcaaaaacaaggagtgcaagaagcacacccttcacaaggtcactcaatacaagaagggtaaggacagcctgtctgcccagggaaagcgtcgttatgacaggaagcagtcgggatacggtggtcagaccaagcccgttttccacaagaaggcaaaaaccaccaagaagattgtgctgaagctgcagtgccagagctgcaagcactactcccagcgcgccatcaagaggtgcaagcattttgagatcggtggagacaagaagggcaagggaacatccctcttctagattgctttcacctatatctgtagtcgttgtgttcaagaactattactacttgtcatattgttttggtgttatgagttgaatcaatcagaccctgtcatgtatccaaacccctttatctggcatttgagcaacgatcgacttggcagaaaaaaaaaaaaaaaaa

SEQ ID NO: 3612 - protein, 105 aa, Triticum aestivum; identical to SEQ ID NO: 1996
  misc_feature: Ceres CLONE ID no. 759623
  misc_feature: Ceres CDNA ID no. 29191551
  misc_feature (19)..(95): Pfam Name: Ribosomal_L44 PFAM Desc: Ribosomal protein L44
  misc_feature: Homolog of GI Number: 34901296 NR Desc: putative 60S ribosomal protein L44
  misc_feature: Homolog of GI Number: 41152660 NR Desc: 60S ribosomal protein L44
  misc_feature: Homolog of GI Number: 15281775 NR Desc: 60S ribosomal protein L144
  misc_feature: Homolog of GI Number: 21553918 NR Desc: ribosomal protein
  misc_feature: Homolog of GI Number: 170920 NR Desc: ribosomal protein L41
  misc_feature: Homolog of GI Number: 1553131 NR Desc: ribosomal protein L44 isoform b
  misc_feature: Homolog of GI Number: 82621114 NR Desc: ribosomal protein L41
  misc_feature: Homolog of GI Number: 66852786 NR Desc: ribosomal protein L41
  misc_feature: Homolog of GI Number: 3128243 NR Desc: ribosomal protein L41
  misc_feature: Homolog of GI Number: 12083868 NR Desc: ribosomal protein L41

SEQ ID NO: 3613 - DNA, 496 bp, Triticum aestivum
  misc_feature: Ceres CLONE ID no. 759635
  misc_feature: Ceres CDNA ID no. 29191552
  CDS (108)..(299): REFERENCED BY SEQ ID NO: 3614
gtaacaaatcgaagagtgggtctctctctcgcggcggcgcaggcgtctctctccttctcctccggcggcggcaaggcattttggcatctgagcccaacagctagcagatggcaggcggcagagttgcacatgcgaccctcaaggggccgagcgtggtgaaggagatcttcattggactcacccttgggctggttgctggtggtatgtggaagatgcatcactggaacgagcagaggaagacgcgatccttctacgacatgcttgagaaggggcagatcagcgtcgttgtcgaggagtagttctgaagtgctgaaccagaagttctacatctcgaagtcttttgtcattttggttttgccagtaatttctgaaactctctggagagcatgacagagtgattgctgtggagattgtcatgaaaataagcacaccaccatttgagaacatcgaaccattttgaatttgctttttgtcgtagaaaaaaaaaaaaaaaaaa

SEQ ID NO: 3614 - protein, 63 aa, Triticum aestivum
  misc_feature: Ceres CLONE ID no. 759635
  misc_feature: Ceres CDNA ID no. 29191552
  misc_feature (2)..(63): Pfam Name: COX5C PFAM Desc: Cytochrome c oxidase subunit Vc
  misc_feature: Homolog of GI Number: 1070356 NR Desc: cytochrome c oxidase
  misc_feature: Homolog of GI Number: 48428177 NR Desc: Cytochrome c oxidase polypeptide Vc
  misc_feature: Homolog of GI Number: 2275216 NR Desc: putative cytochrome c oxidase Vc subunit
  misc_feature: Homolog of GI Number: 7340711 NR Desc: cytochrome c oxidase subunit 5c
  misc_feature: Homolog of GI Number: 18409602 NR Desc: cytochrome c oxidase subunit 5c
  misc_feature: Homolog of GI Number: 21593916 NR Desc: cytochrome c oxidase subunit
  misc_feature: Homolog of GI Number: 18409600 NR Desc: cytochrome c oxidase subunit 5c
  misc_feature: Homolog of GI Number: 10178149 NR Desc: cytochrome c oxidase Vc subunit
  misc_feature: Homolog of GI Number: 4105786 NR Desc: PGPS/D8
MAGGRVAHATLKGPSVVKEIFIGLTLGLVAGGMWKMHHWNEQRKTRSFYDMLEKGQISVVVEE

SEQ ID NO: 3615 - DNA, 452 bp, Triticum aestivum
  misc_feature: Ceres CLONE ID no. 759671
  misc_feature: Ceres CDNA ID no. 40351329
  CDS (75)..(245): REFERENCED BY SEQ ID NO: 3616
gaccctttcttcctcccacgcgcatcctagcaaccggcggcggcaggcggaaggcgaacaagaaggcggcaacgatggggcactccaacgtctggaactcccaccccaagaactacgggcccggctcccgcgtctgccgggtctgtggaaactcccatggactgatcaggaagtatgggctgatgtgctgcaggcagtgtttccgcagcaacgccaaggacattggcttcatcaagtaccgttaattcacctggtcctgctaccctgaagtgaagctaatcagggatgaagtaatgggactcttaatagaaggcttaatttcaattccagtaatgattgctcagtactctgagagtggctttatattttgatggatactgaatgatgtaattgttgaacatgagttaattacccatggggtagccttttatcagaaaaaaaaaaaaaaaaaa

SEQ ID NO: 3616 - protein, 56 aa, Triticum aestivum
  misc_feature: Ceres CLONE ID no. 759671
  misc_feature: Ceres CDNA ID no. 40351329
  misc_feature (3)..(56): Pfam Name: Ribosomal_S14 PFAM Desc: Ribosomal protein S14p/S29e
MGHSNVWNSHPKNYGPGSRVCRVCGNSHGLIRKYGLMCCRQCFRSNAKDIGFIKYR

SEQ ID NO: 3617 - DNA, 445 bp, Triticum aestivum
  misc_feature: Ceres CLONE ID no. 759683
  misc_feature: Ceres CDNA ID no. 25892837
  CDS (88)..(294): REFERENCED BY SEQ ID NO: 3618
atcacaacaccgagtccaaactaacccccggctgcaccagctcccattcctcgccggcgagctcaccggacacagcccgaagccaagatgactacttccaggcgccttgctgacaggaagacagcgaagttccagaagaacatcaccaagaggggttcggtgcctgaaaccactgtgaagaaggggaatgactatcctgttggacctatagtgcttggattcttcatctttgtggtcgtcggatcatctctgtttcagataatcaggacagcgagcagtggtgggatggcctgaacgccgtcatacattaatacagttgcagctaaattcgtttgatgtcgtcatagtttgtcttacttaaaagtacccagtttcagctgatgttgtaagaactgtaagagttatcaatcttatacatattaaacggaaaaaaaaaaaaaaaaaa

SEQ ID NO: 3618 - protein, 68 aa, Triticum aestivum
  misc_feature: Ceres CLONE ID no. 759683
  misc_feature: Ceres CDNA ID no. 25892837
  misc_feature (1)..(65): Pfam Name: RAMP4 PFAM Desc: Ribosome associated membrane protein RAMP4
  misc_feature: Homolog of GI Number: 25403305 NR Desc: protein F17L21.12
  misc_feature: Homolog of GI Number: 77552122 NR Desc: sorbitol transporter
  misc_feature: Homolog of GI Number: 23479574 NR Desc: Arabidopsis thaliana F17L21.12
  misc_feature: Homolog of GI Number: 67084013 NR Desc: ribosome associated membrane protein 4
  misc_feature: Homolog of GI Number: 62661741 NR Desc:  similar to Chromosome 13 open reading frame 21
MTTSRRLADRKTAKFQKNITKRGSVPETTVKKGNDYPVGPIVLGFFIFVVVGSSLFQIIRTASSGGMA

SEQ ID NO: 3619 - DNA, 605 bp, Triticum aestivum
  misc_feature: Ceres CLONE ID no. 759690
  misc_feature: Ceres CDNA ID no. 25892838
  CDS (78)..(449): REFERENCED BY SEQ ID NO: 3620
gcactagggtttatctcctctcgccgcagcctccaccgaagccaagagaggagcagggcgaaaggaggccgtcggagatgtcggagaagaagcgcgcccccggcccgcgcaaggacgaggtggtgacacgcgagtacaccgtcaacctccacaagcgcctccatggatgcaccttcaagaagaaggcaccaaatgccatcaaggagatcaggaagtttgcacagaaggccatgggaaccaacgatgtccgcattgacgtgaagctcaacaagcacatctggagcagtggcatcaggagtgtcccgaggagagtccgtgtcaggattgcccgcaagaggaatgacgaggaggacgctaaggaggagctgtactctctggtcacagttgctgaagttccccaggaaggtcttaaaggtttgggtaccaaggttgtggaggatgaggactaaaccccctgtctgtcgtatcgatcagttagaacttaatacatatctgctgagagcatattgggaagtcttgctttagcttattgttatctactgttcatgatgttccatgacttcttgatagaagatttgagacgttggaaaaaaaaaaaaaaaaaa

SEQ ID NO: 3620 - protein, 123 aa, Triticum aestivum
  misc_feature: Ceres CLONE ID no. 759690
  misc_feature: Ceres CDNA ID no. 25892838
  misc_feature (11)..(105): Pfam Name: Ribosomal_L31e PFAM Desc: Ribosomal protein L31e
  misc_feature: Homolog of GI Number: 54290930 NR Desc: putative 60S ribosomal protein L31
  misc_feature: Homolog of GI Number: 54111529 NR Desc: putative 60S ribosomal protein L31
  misc_feature: Homolog of GI Number: 50912155 NR Desc: putative 60S ribosomal protein L31
  misc_feature: Homolog of GI Number: 50947419 NR Desc: putative 60S ribosomal protein L31
  misc_feature: Homolog of GI Number: 915313 NR Desc: ribosomal protein L31
  misc_feature: Homolog of GI Number: 7229709 NR Desc: 80S ribosomal protein L31
  misc_feature: Homolog of GI Number: 56481165 NR Desc: 60S ribosomal protein L31a
  misc_feature: Homolog of GI Number: 14423899 NR Desc: 60S ribosomal protein L31
  misc_feature: Homolog of GI Number: 21553532 NR Desc: 60S ribosomal protein L31
  misc_feature: Homolog of GI Number: 21700813 NR Desc: AT5g56710/MIK19_16
MSEKKRAPGPRKDEVVTREYTVNLHKRLHGCTFKKKAPNAIKEIRKFAQKAMGTNDVRIDVKLNKHIWSSGIRSVPRRVRVRIARKRNDEEDAKEELYSLVTVAEVPQEGLKGLGTKVVEDED

SEQ ID NO: 3621 - DNA, 426 bp, Triticum aestivum
  misc_feature: Ceres CLONE ID no. 759699
  misc_feature: Ceres CDNA ID no. 29191553
  CDS (72)..(254): REFERENCED BY SEQ ID NO: 3622
gcgaaaccctagcccttcttccgccgccgccgaaccccagcgcaccggagccgcagcagaagggatcggagatggccaagtcgaagaaccacacggcgcacaaccagtcgtacaaggcgcacaggaacggcatcaagaagcccaagcgccagcgccaggcctccaccaaggggatggacccgaagttcctgaggaacctgaggtactcaaggaagcacaacgtcaaggctggtgagggagaggttgagaagtaagatggacgagtttctggtggtcgatatgtctcatgtatcgctaggatctactgttttgaacttaatccagtgttctgtatgaccaaagaatatctatgtcgttacctaagttttgtcatgctgctggattggaaatgatatttgcagctttatgaaaaaaaaaaaaaaaaaa

SEQ ID NO: 3622 - protein, 60 aa, Triticum aestivum
  misc_feature: Ceres CLONE ID no. 759699
  misc_feature: Ceres CDNA ID no. 29191553
  misc_feature (4)..(42): Pfam Name: Ribosomal_L29e PFAM Desc: Ribosomal L29e protein family
  misc_feature: Homolog of GI Number: 34905656 NR Desc: P0475H04.11
  misc_feature: Homolog of GI Number: 30679956 NR Desc: 60S ribosomal protein L29
  misc_feature: Homolog of GI Number: 7959366 NR Desc: ribosomal protein L29
  misc_feature: Homolog of GI Number: 7549643 NR Desc: ribosomal protein L29
  misc_feature: Homolog of GI Number: 7549645 NR Desc: ribosomal protein L29
  misc_feature: Homolog of GI Number: 12231298 NR Desc: ripening regulated protein DDTFR19
  misc_feature: Homolog of GI Number: 27764982 NR Desc: At3g06680
  misc_feature: Homolog of GI Number: 55622000 NR Desc:  similar to 60S ribosomal protein L29
  misc_feature: Homolog of GI Number: 55959755 NR Desc: OTTHUMP00000017090
  misc_feature: Homolog of GI Number: 73945896 NR Desc:  similar to 60S ribosomal protein L29
MAKSKNHTAHNQSYKAHRNGIKKPKRQRQASTKGMDPKFLRNLRYSRKHNVKAGEGEVEK

SEQ ID NO: 3623 - DNA, 453 bp, Triticum aestivum
  misc_feature: Ceres CLONE ID no. 759710
  misc_feature: Ceres CDNA ID no. 29191554
  CDS (2)..(214): REFERENCED BY SEQ ID NO: 3624
tccgatccaagggtttcctcgcgccgccgccgcagccgccttcgtccacgccgccacgatgccgtcgcacaagaccttccggatcaagcagaagctggccaagaagcagcgccagaaccgccccatcccctactggatccgcatgaggaccgacaacaccatcaggtacaacgccaagcgcaggcactggcgccgcaccaagctcggattctaatccggggatgacggcgatgacacccgttgctgccgacgggagaagggtctagggtacctagggtttatgatgtctcgttgtttttgcatgctagcaagtgactccgggatgccagttttaagatttcgcttgtgttgaaagatattattattattactgcttgtagcctacctgggataccgtcatattttgctgattatggaaccccttttatcctgcttaaaaaaaaaaaaaaaaaa

SEQ ID NO: 3624 - protein, 51 aa, Triticum aestivum; identical to SEQ ID NO: 2442
  misc_feature: Ceres CLONE ID no. 759710
  misc_feature: Ceres CDNA ID no. 29191554
  misc_feature (9)..(51): Pfam Name: Ribosomal_L39 PFAM Desc: Ribosomal L39 protein
  misc_feature: Homolog of GI Number: 50915614 NR Desc: putative 60S ribosomal protein L39
  misc_feature: Homolog of GI Number: 57471714 NR Desc: ribosomal protein L39
  misc_feature: Homolog of GI Number: 50915618 NR Desc: 60S RIBOSOMAL PROTEIN L39
  misc_feature: Homolog of GI Number: 55773789 NR Desc: 60S ribosomal protein L39
  misc_feature: Homolog of GI Number: 72073922 NR Desc:  similar to 60S ribosomal protein L39
  misc_feature: Homolog of GI Number: 21618028 NR Desc: putative ribosomal protein L39
  misc_feature: Homolog of GI Number: 24266968 NR Desc: ribosomal protein L39
  misc_feature: Homolog of GI Number: 66934980 NR Desc: ribosomal protein L39
  misc_feature: Homolog of GI Number: 67084113 NR Desc: ribosomal protein L39
  misc_feature: Homolog of GI Number: 62655648 NR Desc:  similar to RIKEN cDNA 4930517K11

SEQ ID NO: 3625 - DNA, 1015 bp, Triticum aestivum
  misc_feature: Ceres CLONE ID no. 759873
  misc_feature: Ceres CDNA ID no. 40351330
  CDS (214)..(780): REFERENCED BY SEQ ID NO: 3626
acacacactccttcactgcccagtacccaccccactgccatcacccccaccaccggtactaccagcaggtccagcaccaccatcgccctacgcccccacaggccacagcaacacgagaaaaccaccgcaagcgcgcgccccgcccccgagacgcgacggtagaatccggcaggcacgagtacggcgcgcggacacatagcccgagcgcgcgcgatggcagtcggggggcgacgcgcggcggtggcggcgtgcgggcgctggtgcctggtgatcctcgccgtcgcctccgcgctcggggtctccggacccgcgctctactggcgctacaagaagggcttctcctcccccgccgccgccgccgtctccgccccctcctgcccgccctgcacctgcgactgcccgccgcccctctccctccagtccatcgcgcccgggctcatgaacttctcaatttcagcttgcggcacaaatgaccctgagcgtaccaaggagatggagaagcagtttgttgatctcctcaacgaggaactcaagctgcagcaggttgtagctgaggagcacatccatcacatgaatgccacacttgtcgaggcaaaaaggcaggctaccctgtaccagcgagaggcggagaagtgtaacgcggccacagagacttgtgaggaagccagggagaagtctgagggggcaatctcaaaggagaggaaactgacatcactgtgggaacgtcgagctcgcgaattgggttggcaggattctcgagccgcgaccaccgcacgatagcttggcaagcagtttgcttctgcaggtaaaattatctgcagcagacgacatttttaccacaccgagcaatgttagctgtacgggtccacgtgtaatgtttgccagtgtattatgagttgtcccagttgaagtatagttactctagacactgtagattccttataaatgtaactagtatacatgtttaaatatgaagctttattgtaacgtacgtatattgaaaaaaaaaaaaaaa

SEQ ID NO: 3626 - protein, 188 aa, Triticum aestivum
  misc_feature: Ceres CLONE ID no. 759873
  misc_feature: Ceres CDNA ID no. 40351330
MAVGGRRAAVAACGRWCLVILAVASALGVSGPALYWRYKKGFSSPAAAAVSAPSCPPCTCDCPPPLSLQSIAPGLMNFSISACGTNDPERTKEMEKQFVDLLNEELKLQQVVAEEHIHHMNATLVEAKRQATLYQREAEKCNAATETCEEAREKSEGAISKERKLTSLWERRARELGWQDSRAATTAR

SEQ ID NO: 3627 - DNA, 781 bp, Triticum aestivum
  misc_feature: Ceres CLONE ID no. 760167
  misc_feature: Ceres CDNA ID no. 40351331
  CDS (61)..(456): REFERENCED BY SEQ ID NO: 3628
atacaccaaaccaaagtaagtgttctaagagtgagcaacttcaaaacaccatagtgagaaatgacttccaagggtgcaattctcttgtgtctcaatgttctcttcttcactgtggttagttccacatatgttccatgcaacccaccccccaaaactcccaaacacccacctgtcccaaagccaccttccccaaagcaagtttcttgccccaaggacactgttaagtttggtgtgtgtgctgatgtgttaggtttgattaacgtgcaactagggaagccaccaaaaaccccatgctgcagcctcattcagggtcttgctgatcttgaagctgcagtgtgcctttgcactgctctcaaggctaatgtgttgggcatcaacctcaatgttccagtgaacttgagcttgcttctcaactactgtggaaagggtgttcccaagggattcgtctgctactaaatcaacacttctaatgtgtagtttcttaatgttaagtatgtcttaaggttctatattttgctatattcgtcattcatcaatctatgaactttgttgttttgtttttccgtctggcacgtgccatttatagccaacgaacatttcgttcgcaattggttattattattattattattattgtgatggttgaaacttgaaagtcttctcgtggtctttcttgtagcctccctcacactactccttttgtattctaagtgaaaatttatactaataaaaattctacatttaagctaagatgcattatttaccaaaaaaaaaaaaaaaa

SEQ ID NO: 3628 - protein, 131 aa, Triticum aestivum; identical to SEQ ID NO: 3410
  misc_feature: Ceres CLONE ID no. 760167
  misc_feature: Ceres CDNA ID no. 40351331
  misc_feature (49)..(130): Pfam Name: Tryp_alpha_amyl PFAM Desc: Protease inhibitor/seed storage/LTP family

SEQ ID NO: 3629 - DNA, 625 bp, Triticum aestivum
  misc_feature: Ceres CLONE ID no. 760173
  misc_feature: Ceres CDNA ID no. 40351332
  CDS (70)..(438): REFERENCED BY SEQ ID NO: 3630
gttggagttgttcgcaagaaaccggagcgttgattttcttctatttctcgatcgtcttcacgaggaagaatggcaaagagttacttcaaacaagagcatgatcttgagaagagaagagctgaggctgctaggattagagagaaatacccagaccgtatcccggtgattgtggagaaggcagaaagaagtgatatcccaagtattgacaagaagaagtaccttgtccctgctgatctgacagttggacagtttgtctatgttatccgcaaaaggattaaattaagtgcagaaaaggcaatctttatctttgtggacaacgtccttccacctacaggagcaattatgtcttccatatatgatgagaagaaggatgaagatgggtttctttatgttacttacagtggagagaacacttttggggatctgacttcccattagcattattttaaagattggcactataatataattgctttctcattggccagtctcataaatttgtatcggtactcgatatcaaagaacattgctctcaatacaatgtacagtttgtatataaactctaagaagaacctgtttaatgttaaaaatgtttcctccttttcagccaaaaaaaaaaaaaaaa

SEQ ID NO: 3630 - protein, 122 aa, Triticum aestivum; identical to SEQ ID NO: 2890
  misc_feature: Ceres CLONE ID no. 760173
  misc_feature: Ceres CDNA ID no. 40351332
  misc_feature (14)..(117): Pfam Name: MAP1_LC3 PFAM Desc: Microtubule associated protein 1A/1B

SEQ ID NO: 3631 - DNA, 962 bp, Triticum aestivum
  misc_feature: Ceres CLONE ID no. 760873
  misc_feature: Ceres CDNA ID no. 36582575
  CDS (32)..(808): REFERENCED BY SEQ ID NO: 3632
acatacgctaaaaaaaaacacatgcgccgtaatggcccttaggtgcgcggccggcggcggcggcggcggcggcgcctacctgacgccgcggaggagcagatgctgcggcgtcggctctgcgcgaccctcagccacgaccagggggacacgagggctcagcctcctcctgaggatcccgtcctcacaatactccgaagctccatgggcgttgcgctgctcgcctgattcccctcctctggagggtgaccagcattcagatcgaactggggcgctgggggcgctgaaggccatggtgtgcgacatgttcaggcccctggcgcgcaacatctcggatatccgatcccttcgcactgtctttgacctcgaggattatcaagtcggcatgctgtttggtgcttttcttggctgcgtcgggtgctaccagctgtggaaggctgctccttccatctttgttgatgctgcccttgcctatgcattctataaactgagcgttatgtcctcggaggtgcgccggcagggcaaatgcaatgatttgctgactcgcttgaaatttggtattgtggttattatggctactaaggacttcaggaagaactatgaactcttggatattgtcaagatgcctgttttctttctttatctttcgacattcatctttgatgtggcacgcatgaagaaatatgcaaagcattatctgattctcacagttaatttattgagaatgaagggcggagctcaagaattgttcagaataatgttttatccgagctatacatctccatatgatgattgcttccgtaggaaataaaatgtagacccctgagattgtgtggatctgtttatgtgagatttttatataagaatttttagtataatgtgtaataacatttatgtaatgctagtttacttgcccatggttgtgtacagttttgcggcattcttcatacaaaaaaaaaaaaaaa

SEQ ID NO: 3632 - protein, 258 aa, Triticum aestivum
  misc_feature: Ceres CLONE ID no. 760873
  misc_feature: Ceres CDNA ID no. 36582575
  misc_feature: Homolog of GI Number: 50929093 NR Desc: OSJNBb0079B02.16
MALRCAAGGGGGGGAYLTPRRSRCCGVGSARPSATTRGTRGLSLLLRIPSSQYSEAPWALRCSPDSPPLEGDQHSDRTGALGALKAMVCDMFRPLARNISDIRSLRTVFDLEDYQVGMLFGAFLGCVGCYQLWKAAPSIFVDAALAYAFYKLSVMSSEVRRQGKCNDLLTRLKFGIVVIMATKDFRKNYELLDIVKMPVFFLYLSTFIFDVARMKKYAKHYLILTVNLLRMKGGAQELFRIMFYPSYTSPYDDCFRRK

SEQ ID NO: 3633 - DNA, 1248 bp, Triticum aestivum
  misc_feature: Ceres CLONE ID no. 761186
  misc_feature: Ceres CDNA ID no. 25892839
  CDS (41)..(847): REFERENCED BY SEQ ID NO: 3634
accccgtaggcgagagaggggaggcgcaggtgggtgcgtgatggccgccgtcgccggagccggaggaggcgacgagatgctgcttcggcgctcgcgccggcggctgcccctcgccgacctcacgaacctctcctccgccacctccgccatcacccgcctgaagcgcaatccccagcaccgcacgagccccgccagcagcaccagcagcattggctcctccaccgttccccgcatccccacgcctcctccgcccgcggccctctccgtttctacgactaagggcaaggataaatccacaagggagcttcaaagttccaatactcatctaaacaagattcaaaagatcagtaaacctaaggtgaagactggaggcgtgctacctgggacgtcatctcctcccagcaaaaacacaaggaagataacaaggaaagagcagccgcgcacagagtctttgatctccaccttgtatgcctctagtaaaacaaaggcgaagactagtggagacgtgctgcctggggcatcaacacctcccaccaaaaagataatgaaggtaacaagggaagagcagccgcgcacagagcctttgatctcccccttgtatgcctccagtaaaacagggctgaagactggagacgggctgcctggggcatctttgcctcccagaaaaaagacaaggaaggtaacaagcagcagcaggaaagagcagatgcagatggaggagatgagttgtgatgagtccctggtactgagcgaggatttcatcaaggagcggagggcctactttgcggagatcgatgcatttgagctggtagaggagtttgtttcatcaggaagcgacgcagagtagacgttcatttggctcttgttgctttatatacatctctggaagtcgattaggcgggcatatgattcacaagagtagaaaagatatatgtgttgcacggccagcctgggtggagagaggttagctgagtcttaattctagagcgcggagtccatgaagtagtaaagtgttgagtcctcaagattggttgctgcctcgcaattcctctgctgacatgatggtagtcgttaagctggtgacatgatggtaagtactgtagaaaatataaggtggtggtatgtatgtactcagctagtgtaatgcgtactaggtatcgtcttgtcagcagttgggtattgtgatggcatatatccatacagaacctgcagaagaaaatgatggaaagtgtaaaaaaaaaaaaaaaa

SEQ ID NO: 3634 - protein, 268 aa, Triticum aestivum
  misc_feature: Ceres CLONE ID no. 761186
  misc_feature: Ceres CDNA ID no. 25892839
MAAVAGAGGGDEMLLRRSRRRLPLADLTNLSSATSAITRLKRNPQHRTSPASSTSSIGSSTVPRIPTPPPPAALSVSTTKGKDKSTRELQSSNTHLNKIQKISKPKVKTGGVLPGTSSPPSKNTRKITRKEQPRTESLISTLYASSKTKAKTSGDVLPGASTPPTKKIMKVTREEQPRTEPLISPLYASSKTGLKTGDGLPGASLPPRKKTRKVTSSSRKEQMQMEEMSCDESLVLSEDFIKERRAYFAEIDAFELVEEFVSSGSDAE

SEQ ID NO: 3635 - DNA, 1741 bp, Triticum aestivum
  misc_feature: Ceres CLONE ID no. 761431
  misc_feature: Ceres CDNA ID no. 40041315
  CDS (78)..(1628): REFERENCED BY SEQ ID NO: 3636
ccattattcactggactggagcgaggtagctaccaagtgatcaagccagtacctacgtacgcacgcacaagagcgagatgaaaaggggcgggaggaacgagagcggcaagaagcttgtgagcggaggaggagcggccgccgtcgcgtgtctcctgcttcctctcgtcgtcctcgccgtcctcaagtccgacttcatgccgcagcaggtcgttcacattgcagagacgagcattggcgaagctggtgtagagggtgcaatatggcagccgcggcaacaactagtagccaagtcaaaagctggacatgatccggtcgtcgaagcacccccttctccggcgtcgggcgacgagacgcccgacaaggtcgtcgatgcaaacagagctctcaaaaatgggaaggggttcctggccgcggacgtgggaatggatggttctttgataaaatcagatgctgatgtagccgcaccaaggagcaagttaagttgcaacttcagcagtcatcgcacgagcatgtgtgccatgcaaggtgacgtccgtatgcacggcaaaaccgccaccgtctacgtcgtctcagcgtccgacgacaaccggccagacaatgggacgatcacgatccgcccgtacccgcgcaaatgggagacaccgacgatgcaacttgtccgtgaggtgaccatccgttggagagccccaccgggaccgggtgcgccgcggtgcacggtgacctacgacgtcccagcggtggtcttctccaccggtggctacggcgtcaacatcttccacgccatcaccgacatcattatgcctctctacaacacagcgcgggagtacgatgggcgcgtccggctcgtggccacaaactacgaccgcaaatggatcaccaagtaccgtcacgccctctccatgctctccatctacccgatcattgacttcgacgccgacaacgaggtgcgctgcttcccgtcggtgcatgtgggaacggagagccataaggaactagggattgactcggctctctccggcaagggctacacgatgatgggcttccgcagcctgctccggtcggcttactctctgaagcgtgagtgggtgacccccataaagagtggaaggcctcgtctcgtcatggtgctgcggaggaactcgagggcgctgacgaacgaggcggaagttatagcagctgccaccgaggttggcttcgaggtggtagccgcggggccggaggtggtgcgcgacctgggaaagttcgcggagacggtgaactcgtgcgacgtgttggtgggtgtgcacggcgcggggctgagcaacatggtgttcctcccgcgcaacggcacggtggtgcagatcgtcccttggggcgagatgaagtggccggcctggacctcctacggcgagccggtggctcccatggggcttcggtacgtggagtacgaggtgaccgccgaggagacgacgctcaagtacgtgtacccgaggaaccacaccgtcttcacggatcccgtctccctacacaaacagggattcaacatgttgtgggagaccttcctcaacgggcagaatgtcaccctcgacatccaacgcttcacaggggtcctgcaacacatctaccgctccgttaccatcacatcataagtagattacgtccgaggtttttgattttcttttcaaaaatgtaataacacgtcgattccatacctcacactggctcagcaatggctctggccctcacaaaaaaaaaaaaaaaa

SEQ ID NO: 3636 - protein, 516 aa, Triticum aestivum
  misc_feature: Ceres CLONE ID no. 761431
  misc_feature: Ceres CDNA ID no. 40041315
  misc_feature: Homolog of GI Number: 54291090 NR Desc: putative HGA6
  misc_feature: Homolog of GI Number: 56409850 NR Desc: glycosyltransferase
  misc_feature: Homolog of GI Number: 56409844 NR Desc: glycosyltransferase
  misc_feature: Homolog of GI Number: 56409852 NR Desc: glycosyltransferase
  misc_feature: Homolog of GI Number: 56409848 NR Desc: glycosyltransferase
  misc_feature: Homolog of GI Number: 55769891 NR Desc: putative HGA6
  misc_feature: Homolog of GI Number: 34895336 NR Desc: P0494A10.22
  misc_feature: Homolog of GI Number: 50907669 NR Desc: putative HGA6
  misc_feature: Homolog of GI Number: 34895340 NR Desc: P0494A10.24
  misc_feature: Homolog of GI Number: 55769893 NR Desc: putative HGA6
MKRGGRNESGKKLVSGGGAAAVACLLLPLVVLAVLKSDFMPQQVVHIAETSIGEAGVEGAIWQPRQQLVAKSKAGHDPVVEAPPSPASGDETPDKVVDANRALKNGKGFLAADVGMDGSLIKSDADVAAPRSKLSCNFSSHRTSMCAMQGDVRMHGKTATVYVVSASDDNRPDNGTITIRPYPRKWETPTMQLVREVTIRWRAPPGPGAPRCTVTYDVPAVVFSTGGYGVNIFHAITDIIMPLYNTAREYDGRVRLVATNYDRKWITKYRHALSMLSIYPIIDFDADNEVRCFPSVHVGTESHKELGIDSALSGKGYTMMGFRSLLRSAYSLKREWVTPIKSGRPRLVMVLRRNSRALTNEAEVIAAATEVGFEVVAAGPEVVRDLGKFAETVNSCDVLVGVHGAGLSNMVFLPRNGTVVQIVPWGEMKWPAWTSYGEPVAPMGLRYVEYEVTAEETTLKYVYPRNHTVFTDPVSLHKQGFNMLWETFLNGQNVTLDIQRFTGVLQHIYRSVTITS

SEQ ID NO: 3637 - DNA, 1112 bp, Triticum aestivum
  misc_feature: Ceres CLONE ID no. 761581
  misc_feature: Ceres CDNA ID no. 29191555
  CDS (139)..(1032): REFERENCED BY SEQ ID NO: 3638
aacacaaagtcttgcttcagtctgcgcctagtcctagcaggtcgcgaatttcgccggttctattgtttctctaattatcttcgagcagatcactagcaggcaccgacggatttggagcagctctgatctttagcggccatggtcaagaaaggaatccagtatgtcgtggtggatgccttcacggcccagccgttcaagggcaacccggcggcggtgtgcttcctggaggacgacgcggccgcccccgcgggggacgggcggtggatgcagtccgtcgccgtcgagttcaacctctcccagacggccttcttctcccgtgactcgtcctgcgcagccgacgccaccacgccgcggttccacctccgctggttcacccccgtcaccgaggtcgcgctctgcggccacgcaacgctggccaccgcccacttcctcttcacgtctgtcctcgcggagcgccatggcgtggttgagttcgcgaccaagtccggggtcctgaccgccaagaaggttcctgcaccggaggctgaggagcaggggaagctgttcattgagctggacttccccatgagtgattatgtgggttgcgatcccgccgacgagctgccgtccatcccggagacgctcaacggcgcgcccgtcgtcagtgttcacaaatcagtggccaccaacgacttcattgttgaactttcatcaggaaaagaggtcgccgatgtccttcctaacatcgaagaaataagaaagtgtgccggcagaggtgtgattgttacagcaccggcgcctgctggatcgggttatgacttcttcacacgcttcttctgcccaaaatttgggattgatgaggatcccgtatgtggcagtgcacactgtgttttggcaccctactggggtggaaagctggggaagcaaaaactgatagcgtttcaggtatctccaaggagtggggcactatacctggagctggatgttgcgaatcagcgagtgcggattcagggagaagctgttactgtcatggctgggacactcttcgcttagctagcatattgaccatccattgacttgctctatgaacttgggagaaataaatatatttgctgccaaaaaaaaaaaaaaaa

SEQ ID NO: 3638 - protein, 297 aa, Triticum aestivum
  misc_feature: Ceres CLONE ID no. 761581
  misc_feature: Ceres CDNA ID no. 29191555
  misc_feature (5)..(293): Pfam Name: PhzC PFAM Desc: Phenazine biosynthesis
  misc_feature: Homolog of GI Number: 53370728 NR Desc: phenazine biosynthesis family protein
  misc_feature: Homolog of GI Number: 79461947 NR Desc: catalytic
  misc_feature: Homolog of GI Number: 51972140 NR Desc: At4g02850
  misc_feature: Homolog of GI Number: 68346489 NR Desc: phenazine biosynthesis protein PhzF family
  misc_feature: Homolog of GI Number: 50926029 NR Desc: Zgc:101129 protein
  misc_feature: Homolog of GI Number: 29833535 NR Desc: putative oxidoreductase
  misc_feature: Homolog of GI Number: 55633945 NR Desc:  MAWD binding protein
  misc_feature: Homolog of GI Number: 56418941 NR Desc: hypothetical conserved protein
  misc_feature: Homolog of GI Number: 48765088 NR Desc: COG0384: Predicted epimerase
  misc_feature: Homolog of GI Number: 25354024 NR Desc: protein R02D1.1
MVKKGIQYVVVDAFTAQPFKGNPAAVCFLEDDAAAPAGDGRWMQSVAVEFNLSQTAFFSRDSSCAADATTPRFHLRWFTPVTEVALCGHATLATAHFLFTSVLAERHGVVEFATKSGVLTAKKVPAPEAEEQGKLFIELDFPMSDYVGCDPADELPSIPETLNGAPVVSVHKSVATNDFIVELSSGKEVADVLPNIEEIRKCAGRGVIVTAPAPAGSGYDFFTRFFCPKFGIDEDPVCGSAHCVLAPYWGGKLGKQKLIAFQVSPRSGALYLELDVANQRVRIQGEAVTVMAGTLFA

SEQ ID NO: 3639 - DNA, 921 bp, Triticum aestivum
  misc_feature: Ceres CLONE ID no. 761897
  misc_feature: Ceres CDNA ID no. 29191556
  CDS (183)..(692): REFERENCED BY SEQ ID NO: 3640
atcaacaacctctccgctttctccttcccgtctctctcctctggtcccgattcccttctccgagcttcctccctataaataaggcggcccgcggcggccatcaattcccgtcaccgcccaccgaggccgcgaattattcctccgccccgcccgccgcgaaaaccctagccgccgccgatcccatggccaccgcctccagccaggcgagcctcctcctccagaagcagctccgagatctcgcgaagcaccccgtcgatgggttttcagctgggctcgtcgacgacagcaacgtcttcgagtggcaggtcaccatcatcggcccgcccgagaccctatatgatggaggctatttcaatgcaattatgagcttcccacaaaattatccgaacagccctccaacagtcagattcacttctgaaatgtggcatcctaatgtttatccagatgggcgggtatgcatttctattcttcatccacctggtgatgatcccaacggatatgagctcgcgagtgagcgttggacaccagtccatacggttgagagtatagtattaagcatcatttcgatgctttctagtccaaatgatgaatcaccggcaaatattgaagcagctaaggactggagagagaagcaggatgagttcaagaagaaggtcaggcgcgccgtacggaaatcccaggaaatgctctgaataaaatgggagtactggggaagttagccatgccatttcaggtgtggagggttttgctgttgatctccaaatgtccatccgacactagcaatttcacttctcccctgtatattttccattagcctgtctcctgtggaggtcttggttttgactctgaaaacgcaacacatattctaagggtttggttgttgtaattgtgtggcttcggctaccaaaaaaaaaaaaaaaa

SEQ ID NO: 3640 - protein, 169 aa, Triticum aestivum
  misc_feature: Ceres CLONE ID no. 761897
  misc_feature: Ceres CDNA ID no. 29191556
  misc_feature (11)..(162): Pfam Name: UQ_con PFAM Desc: Ubiquitin
  misc_feature: Homolog of GI Number: 50931677 NR Desc: putative ubiquitin
  misc_feature: Homolog of GI Number: 34908132 NR Desc: putative Ubiquitin carrier protein UBC7
  misc_feature: Homolog of GI Number: 2641619 NR Desc: ubiquitin
  misc_feature: Homolog of GI Number: 2624417 NR Desc: Ubiquitin carrier protein
  misc_feature: Homolog of GI Number: 19347846 NR Desc: putative E2
  misc_feature: Homolog of GI Number: 28973769 NR Desc: putative E2
  misc_feature: Homolog of GI Number: 9759251 NR Desc: ubiquitin
  misc_feature: Homolog of GI Number: 66354436 NR Desc: ubiquitinating enzyme
  misc_feature: Homolog of GI Number: 81076243 NR Desc: ubiquitin
  misc_feature: Homolog of GI Number: 100813 NR Desc: ubiquitin
MATASSQASLLLQKQLRDLAKHPVDGFSAGLVDDSNVFEWQVTIIGPPETLYDGGYFNAIMSFPQNYPNSPPTVRFTSEMWHPNVYPDGRVCISILHPPGDDPNGYELASERWTPVHTVESIVLSIISMLSSPNDESPANIEAAKDWREKQDEFKKKVRRAVRKSQEML

SEQ ID NO: 3641 - DNA, 1472 bp, Triticum aestivum
  misc_feature: Ceres CLONE ID no. 762041
  misc_feature: Ceres CDNA ID no. 35383283
  CDS (127)..(1272): REFERENCED BY SEQ ID NO: 3642
ccagtccacctccccccctatccccaccgcctccacaaccccaccccccccctccgctgcccctcccatcgcattcgcatccacctccgcgccccaagcacagcacaggggaagaagcgatcggcaatggcgtcctccacccagggccaggtcatcacctgcaaagcggcggtggcgtacgaggcgaacaagccgctggtggtggaggacgtgcaggtggcgccgccgcaggccggcgaggtccgcatcaagatcctctccaccgcgctctgccacaccgactactacacctggagcggcaaggatcctgagggtctctttccttgcattctcggtcatgaggctgctggaatcgttgagagcgttggcgaaggggtgaccgatgtgcagcctggggaccatgtcatcccttgctaccaagcggaatgcaagaactgcaagatgtgcaacagcgggaagaccaacctctgcggcaaagttcgtggcgccacaggggtaggggtcatgatgagcgaccgcaagagccgcttctcggtgaatgggaagcccatctaccatttcatggggacgtcgacgttcagtcagtacactgttgtgcatgacgtcagtgttgcgaagatcaacccgcaggcgcccctggataaggtctgcctgctcggctgtggtgtttccactggtcttggagcagtatggaatactgcaaaggttgaagcaggttcagttgttgctgtttttgggcttggcacagttggacttgcagttgctgagggggcaaaatcagctggtgcttctcggattattggcattgacattgatgccaagaagtttgatgttgctaagaactttggagtcacagagtttgtgaacccaaaagaccatgacaaaccaatccagcaggtcctagttgaccttacagatggtggtgtggattacagttttgagtgcatcggaaatgtttctatcatgagggctgcactcgaatgctgccacaagggctggggtacctctgttgtcgttggtgtagctgcatctggccaggagattgccacacggccattccagcttgtcactggccgtgtctggaagggaacagcttttggtggcttcaagagtcggagccaggttccatggctcgtcgagaagtacatgaacaaggaaatcaaggtggacgagtacatcacccacaacatgaaccttaccgatatcaacaaggcgttcgacctgctgcacgaaggcggctgcctgcggtgcgtgctggccatggagcactgaggatcctgctatgtgtctcgccctgcctcgaagcggagcagtttgtgtcgtgtgaagttgtaatgcagatctatcctccgccctgggactatagaactcgtttggcctagaaactcttgaacacgaaccgctgctataataatatgttgtgttggatggttgcctctggttggggtcattaaagaaaaaaaaaaaaaaaa

SEQ ID NO: 3642 - protein, 381 aa, Triticum aestivum
  misc_feature: Ceres CLONE ID no. 762041
  misc_feature: Ceres CDNA ID no. 35383283
  misc_feature (196)..(338): Pfam Name: ADH_zinc_N PFAM Desc: Zinc
  misc_feature: Homolog of GI Number: 3121727 NR Desc: Alcohol dehydrogenase class III
  misc_feature: Homolog of GI Number: 3023271 NR Desc: Alcohol dehydrogenase class III
  misc_feature: Homolog of GI Number: 33589744 NR Desc: At5g43940/MRH10_4
  misc_feature: Homolog of GI Number: 74002261 NR Desc:  similar to Alcohol dehydrogenase class III chi chain
  misc_feature: Homolog of GI Number: 25283011 NR Desc: alcohol dehydrogenase
  misc_feature: Homolog of GI Number: 46195771 NR Desc: alcohol dehydrogenase 5
  misc_feature: Homolog of GI Number: 16565980 NR Desc: alcohol dehydrogenase
  misc_feature: Homolog of GI Number: 50915842 NR Desc: alcohol dehydrogenase class III
  misc_feature: Homolog of GI Number: 1143388 NR Desc: class III ADH
  misc_feature: Homolog of GI Number: 1498024 NR Desc: glutathione
  misc_feature: Useful for sterility
MASSTQGQVITCKAAVAYEANKPLVVEDVQVAPPQAGEVRIKILSTALCHTDYYTWSGKDPEGLFPCILGHEAAGIVESVGEGVTDVQPGDHVIPCYQAECKNCKMCNSGKTNLCGKVRGATGVGVMMSDRKSRFSVNGKPIYHFMGTSTFSQYTVVHDVSVAKINPQAPLDKVCLLGCGVSTGLGAVWNTAKVEAGSVVAVFGLGTVGLAVAEGAKSAGASRIIGIDIDAKKFDVAKNFGVTEFVNPKDHDKPIQQVLVDLTDGGVDYSFECIGNVSIMRAALECCHKGWGTSVVVGVAASGQEIATRPFQLVTGRVWKGTAFGGFKSRSQVPWLVEKYMNKEIKVDEYITHNMNLTDINKAFDLLHEGGCLRCVLAMEH

SEQ ID NO: 3643 - DNA, 1318 bp, Triticum aestivum
  misc_feature: Ceres CLONE ID no. 762177
  misc_feature: Ceres CDNA ID no. 25446236
  CDS (435)..(755): REFERENCED BY SEQ ID NO: 3644
aactacgcgcacacacgcagcagccaccgtcgccccgcgagctttgcctggccgcgcactgccgcaaccacacgtgagcttttctgacacccaccgcccacggtcgacctgcgaaccacacacgcaccgtcgcgaagtgttgattgatcccctccatggcctcgtgctcgccgtcacagcccgtcgccctggggacggagaggggcaagatccgtggagctgcgcatggggtcagcatatcgtcctcctgctcctcaattctggtcgggtatcgtttggtccgtgcggcagagatggtgaattcctccttgggtgccccagggtggtgcggccttatatttcaagaaataaaatcttatggttacatgctatcagttaaggtgaatccgtgaaaggccgcttgaattgtatgcctcgctcagaggttgctacgtatggttgatggattgaacttcaaggaatttgtttcttttctctctaccttcagcgcaagggccagccttcagcaaaagattgagttgatatttaaggtgtatgacattgatggcaaggggaaagtatccttcaaggacctggtagaggttttacgggacctaactggctcatccatgtcagaaaagcaaagagagcaagtactaacaaaggtgttggaagaagccgggtacacacaggattccacgctagcattagaagatttcgtgacgatcatcgaccaccccggcccgaagatggaggtggaagtgcccatcgactaagtgaacggcgaatgcagatttcagctgatgaggacgcaagaaactctccctgtctgctgaaaacaagtgtccatagccaatagagcgtgcggcgtaatagagtgggagctcagcgtttgagctcttgtgtgcctgtctacacacatgccaagtcttactagctttgttaatagtgcaattcagcgtcagtttagtccatttttctttctggtttgagggaattaaatagtgcctcgcacgcaccacgagttgcaaagcccgtgacgccctcaatcaggccgcctagcagaagaaggtcgttatgagcaacggtgacacccgcttctatgccaaagaggaaatcgccgtgccagtcgccgcttcacccaacaccgacaatgccggctctaatgtgtccgagaaggaggtgtcttccatggctagaactatgatgatttatccttcaaaagaaacaaaaaaaaactatgatgatttattcataagtttagaataattatattatactatttgtatgccaaatgcaatggtgtatttgcatttaaaggacaaaaaaaaaaaaaaaa

SEQ ID NO: 3644 - protein, 106 aa, Triticum aestivum
  misc_feature: Ceres CLONE ID no. 762177
  misc_feature: Ceres CDNA ID no. 25446236
  misc_feature (26)..(54): Pfam Name: efhand PFAM Desc: EF hand
  misc_feature: Homolog of GI Number: 51090727 NR Desc: putative calcineurin B subunit
  misc_feature: Homolog of GI Number: 21592761 NR Desc: calcineurin
  misc_feature: Homolog of GI Number: 16550937 NR Desc: calcineurin
  misc_feature: Homolog of GI Number: 50946209 NR Desc: putative Calcineurin B subunit
  misc_feature: Homolog of GI Number: 458230 NR Desc: calcineurin B
  misc_feature: Homolog of GI Number: 42553280 NR Desc: CALB_NEUCR Calcineurin B subunit
  misc_feature: Homolog of GI Number: 52001480 NR Desc: Calcineurin B subunit
  misc_feature: Homolog of GI Number: 2645886 NR Desc: calcineurin subunit B
  misc_feature: Homolog of GI Number: 66845251 NR Desc: calcineurin regulatory subunit
  misc_feature: Homolog of GI Number: 56467093 NR Desc: calcineurin B subunit
MVDGLNFKEFVSFLSTFSARASLQQKIELIFKVYDIDGKGKVSFKDLVEVLRDLTGSSMSEKQREQVLTKVLEEAGYTQDSTLALEDFVTIIDHPGPKMEVEVPID

SEQ ID NO: 3645 - DNA, 635 bp, Triticum aestivum
  misc_feature: Ceres CLONE ID no. 762439
  misc_feature: Ceres CDNA ID no. 35383284
  CDS (65)..(424): REFERENCED BY SEQ ID NO: 3646
actctggcactctccccctttcctcctccccacccacacactttttgatcctgagggcggcgtgatggcgctgaggggcgtttggcagctgcagaagcttgtggtgaactactgcgactggggagggagcagcagaggaatcagggcttttatggagtcacatcttccagctttgaaggaaaagaatccccagttagaggtagtgacacagcttgtccgtggtcagcatcctaacttgaagggcatttacaaaaaccataacgagagagtggtttgtgtcagaaatctagcacccgaggacatcatgttgcaagctagtaggctaaggtgttctctgggcaggaaagtggtgaagctgagaaccagacacgttacgaaacggccaagtgtccaggggacatggacgacggaactgaagatgtgaatcaaagttccgagagaggctgttgcagtgttcctgttgaactgtttgagatctatggcaagaactctgtgctgctattagacctaccttttgtcagtagttacagtttcattttttgtttgtttgagacataataatctgataatatcatgtaaacgtgggagattcttgttagtggcggatgtgatcttagacaaaaaaaaaaaaaaaa

SEQ ID NO: 3646 - protein, 119 aa, Triticum aestivum
  misc_feature: Ceres CLONE ID no. 762439
  misc_feature: Ceres CDNA ID no. 35383284
  misc_feature (18)..(91): Pfam Name: L51_S25_CI PFAM Desc: Mitochondrial ribosomal protein L51 / S25 / CI
  misc_feature: Homolog of GI Number: 66850941 NR Desc: mitochondrial ribosomal protein L43
  misc_feature: Homolog of GI Number: 50404889 NR Desc: Mitochondrial ribosome protein
MALRGVWQLQKLVVNYCDWGGSSRGIRAFMESHLPALKEKNPQLEVVTQLVRGQHPNLKGIYKNHNERVVCVRNLAPEDIMLQASRLRCSLGRKVVKLRTRHVTKRPSVQGTWTTELKM

SEQ ID NO: 3647 - DNA, 1679 bp, Triticum aestivum
  misc_feature: Ceres CLONE ID no. 762592
  misc_feature: Ceres CDNA ID no. 35383285
  CDS (484)..(1635): REFERENCED BY SEQ ID NO: 3648
gccactccactctccccctcctccgccccactctcctcttccctcttctcggcagccgctctcccacccccggctgctagggttagggttccgcatttgccctctcacccacggcccccgctcagccccacggcattgcgttgccttgccttgcctctcctgcaacccagctcagcccaatcagcccaatcatccccggaggcgccctgcgtgccggtgccggcgctttgcttccgagttcttgtcatttgcgcggttccaaggagttcatttgttgcttttccgtgagcgtgggctgctgtctggcgcagatcaagctgaaagggacaagtgctagctgtgtctactagtacctgtggagtcctgcgtgatagtaggtacagtcacaagctcagcccatatttcgccccgggaaatgcctcaggtgctgcgttcttgaggcctgctagcttccagtctttcccgtgaaggagcgtcaatccgatggggtttgttggcagatttttgtttttgctcttgctggtggtcaccacccctgccttgggccaactgccgtcgcaggacatcctcgcgctcctggccttcaagaagggaatcactcatgaccctgccggtttcgtcacagactcctggaatgacgagtcaattgacttcaatggctgcccggcctcctggaacggtgtcgtgtgcaatggcgccagcgtggctggagttgtgcttgacggccatcggatctccggtgttgccgatctctccgtgtttgccaacctgaccatgcttgtcaagctctccatggccaataacaatctctccgggagcctccctagcaatgtggccagtctcaagagcttgaagttcctcgacatctccaacaaccggttctcgggtccaatccctgatgatattggcagtctccggagcctgcagaacatgtcgcttgccgggaacaacttctcaggcccattgcctgactccattgacgggctcgcgtcgcttcagtcgctggatgtgagcggcaatgctctgtctggcccattgccggcggctctgaaaggtcttcggagcatggttgctctgaacctctcatataatgccttcacaaagggcattcctgctgggcttggcctccttgtgaacctccagtctgtggatctgagctggaatcaattggatggtggtgtcgattggaaattcttgattgagtcaactgttactcatgttgacttcagtggaaacttgctcaccagcaccacccccaaagaactcaagtttctcgcagacatttcagagacagttgtatatctgaaccttagcaacaacaagttgactgggtcactgatagatggagttgagctctcaacttttgggaggttgaaggtgcttgatctgagtagtaatgagctgtctggagacctcccaggattcaattatgtttatgatcttgaagttttgcgccttgcaaacaatggattcactgggtttgtacctagtggacttctaaagggagattctctggtgttgaaccaactggaccttagtgcaaataacctgacaggtataagctctaattcagaatttatgtttttgatccccttgctatttcattttatgcatggcatgcaatgctcattctgattatattggaagtttgatccatctatttaaaaaaaaaaaaaaaa

SEQ ID NO: 3648 - protein, 383 aa, Triticum aestivum
  misc_feature: Ceres CLONE ID no. 762592
  misc_feature: Ceres CDNA ID no. 35383285
  misc_feature (122)..(145): Pfam Name: LRR_1 PFAM Desc: Leucine Rich Repeat
  misc_feature: Homolog of GI Number: 50934165 NR Desc: putative phytosulfokine receptor
  misc_feature: Homolog of GI Number: 30685259 NR Desc: leucine
  misc_feature: Homolog of GI Number: 28139918 NR Desc: receptor
  misc_feature: Homolog of GI Number: 15240263 NR Desc: leucine
  misc_feature: Homolog of GI Number: 34904492 NR Desc: putative receptor protein kinase
  misc_feature: Homolog of GI Number: 34905736 NR Desc: putative receptor protein kinase
  misc_feature: Homolog of GI Number: 3894385 NR Desc: Hcr2
  misc_feature: Homolog of GI Number: 34913144 NR Desc: putative receptor
  misc_feature: Homolog of GI Number: 3885336 NR Desc: putative receptor
  misc_feature: Homolog of GI Number: 3643604 NR Desc: putative receptor
MGFVGRFLFLLLLVVTTPALGQLPSQDILALLAFKKGITHDPAGFVTDSWNDESIDFNGCPASWNGVVCNGASVAGVVLDGHRISGVADLSVFANLTMLVKLSMANNNLSGSLPSNVASLKSLKFLDISNNRFSGPIPDDIGSLRSLQNMSLAGNNFSGPLPDSIDGLASLQSLDVSGNALSGPLPAALKGLRSMVALNLSYNAFTKGIPAGLGLLVNLQSVDLSWNQLDGGVDWKFLIESTVTHVDFSGNLLTSTTPKELKFLADISETVVYLNLSNNKLTGSLIDGVELSTFGRLKVLDLSSNELSGDLPGFNYVYDLEVLRLANNGFTGFVPSGLLKGDSLVLNQLDLSANNLTGISSNSEFMFLIPLLFHFMHGMQCSF

SEQ ID NO: 3649 - DNA, 1465 bp, Triticum aestivum
  misc_feature: Ceres CLONE ID no. 763303
  misc_feature: Ceres CDNA ID no. 35383286
  CDS (90)..(1172): REFERENCED BY SEQ ID NO: 3650
acaaaaagcgcgagcagagcagcctagcgtttggattttgcagccgccggccccggagccccctgaccgacacggtcgccgccgccgccatgtctgccttcgtcgggaaatacgcagatgagctgatgaagacggccaagtacatcgcgacgccggggaagggcatcctggcggcggacgagtcgacgggcaccatcgggaagcggctggcgagcatcaacgtggagaacgtggagtccaaccggcaggcgctgcgggagatgctcttcacggcgcccggcgcgctcgagtacctctccggcgtcatcctcttcgaggagacgctctaccagacggccgccgacggcaccccgttcgtggacatcctcaaggccggcaacgtcatcccgggcatcaaggtcgacaagggcaccgtcgacatcgccgggaccgtcggcgagaccaccacccagggcctcgactccctgggcgcgcgctgcgccaagtactacgaggccggcgcgcgcttcgccaagtggcgcgccgtgctcaagatcgggcccggcgccgagccgtcggagctcgccgtgaagcagaacgccgaggggctggcgcggtacgcgctcatctgccaggagaacgggctggtccccatcgtggagcccgagatcctcaccgacgggccacacgacatcaaggcctgcgccgccgccaccgagcgcgtcctcgccgccgtctacaagtcgctcaacgaccacaaggtgctcctcgagggcaccctcctcaagcccaacatggtcacccccggctccgacagccccaaggttggcgcggaggtgatagcggagtacacggtggcggcgctgcggcgcacggtgccgccggcggtgcccggggtggtgttcctgtcgggcgggcagagcgaggagcaggcgacgcagaacctggacgccatgaacaagctggcggtgctcaagccgtggacgctcaccttctccttcggccgggcgctgcagcagagcaccatcaagaagtgggccggcaagaaggagaacgtcgccgacgcgcaggccaccttcctcgcccggtgcaagggcaactccgaggccacgctcggcaagtacggcggcgccgccgccggtggggacgccgccgcgtccgagagcttgcacgtcgcggggtacaagtactaaggcaccgtcgctcccgcgccattcccggatccaggatctcggtgcaacccgtgtgtgcgtgcggcacatggattgcgccgagattcgtgcgtgcatgcagatatatatgctcttccttttctgccgtgtacttaaattctctctcctccccgttgctcctatttaaccagaactactgatgatatataagtggtatatatgtgaaagtgtgaatgcaacgcttttagtatatgtttgagcttgattcatgaaaaaaaattgaatatcggtaaatactaaaaaaaaaaaaaaaa

SEQ ID NO: 3650 - protein, 360 aa, Triticum aestivum
  misc_feature: Ceres CLONE ID no. 763303
  misc_feature: Ceres CDNA ID no. 35383286
  misc_feature: null
  misc_feature: Useful for making plants with modulated phosphate use efficiency
  misc_feature (11)..(360): Pfam Name: Glycolytic PFAM Desc: Fructose
  misc_feature: Homolog of GI Number: 31711854 NR Desc: At4g26530
  misc_feature: Homolog of GI Number: 40362980 NR Desc: fructose 1
  misc_feature: Homolog of GI Number: 927507 NR Desc: fructose
  misc_feature: Homolog of GI Number: 2213867 NR Desc: fructose
  misc_feature: Homolog of GI Number: 40457267 NR Desc: fructose
  misc_feature: Homolog of GI Number: 40716077 NR Desc: fructose
  misc_feature: Homolog of GI Number: 22620 NR Desc: fructose
  misc_feature: Homolog of GI Number: 17104659 NR Desc: putative fructose bisphosphate aldolase
  misc_feature: Homolog of GI Number: 51090360 NR Desc: putative fructose
  misc_feature: Homolog of GI Number: 50878379 NR Desc: putative fructose
  misc_feature: Useful for making ornamental plants with modified leaves
  misc_feature: Useful for making plants with increased biomass
  misc_feature: Useful for sterility
  misc_feature: Useful for sterility
MSAFVGKYADELMKTAKYIATPGKGILAADESTGTIGKRLASINVENVESNRQALREMLFTAPGALEYLSGVILFEETLYQTAADGTPFVDILKAGNVIPGIKVDKGTVDIAGTVGETTTQGLDSLGARCAKYYEAGARFAKWRAVLKIGPGAEPSELAVKQNAEGLARYALICQENGLVPIVEPEILTDGPHDIKACAAATERVLAAVYKSLNDHKVLLEGTLLKPNMVTPGSDSPKVGAEVIAEYTVAALRRTVPPAVPGVVFLSGGQSEEQATQNLDAMNKLAVLKPWTLTFSFGRALQQSTIKKWAGKKENVADAQATFLARCKGNSEATLGKYGGAAAGGDAAASESLHVAGYKY

SEQ ID NO: 3651 - DNA, 742 bp, Triticum aestivum
  misc_feature: Ceres CLONE ID no. 763457
  misc_feature: Ceres CDNA ID no. 40351333
  CDS (12)..(608): REFERENCED BY SEQ ID NO: 3652
aaatcgagaaaatggcaagaatatcaaattggtctcttgtcttcctcctcatctctacactactccacatagagcccagcctctcaagcccaagcccaagcccaagcccaagcccgttcataaaatcctcctgcagcagcacccagtacccagccctctgcgtctcatccctctccgtctacgcctccagcatccaacaggaccctcaccaactggttcagacagcactctccctctccctgaaccgcacccaagccaccaaaaccttcgtggctaactgcaacaaattcagaggcctgaaacccagagagcacgctgcactcaaggactgcgccgaggaaatcagcgacagcgttgaccgcctcagccggtcgctgaaggagctcaagctatgtaaggttaagggtgaggacttcacgtggcacattagcaacgtggagacatgggtcagttctgctttgaccgatgagagcacttgcggcgatggattctccgggaaggcgctgaatgggaagatcaaggactctattagggctaggatgctcaatgttgctcaggttactagcaatgctctctcgcttattaaccactatgctgcacaacactagttgggaacaatgatcttggttgcttaatgctttacttttcttcttttatgtgctctatgtaattattatatatgtgagtctttatagatatatggatcttctcatgcttcttaaatgcaaaaaaaaaaaaaaaa

SEQ ID NO: 3652 - protein, 198 aa, Triticum aestivum
  misc_feature: Ceres CLONE ID no. 763457
  misc_feature: Ceres CDNA ID no. 40351333
  misc_feature (31)..(190): Pfam Name: PMEI PFAM Desc: Plant invertase/pectin methylesterase inhibitor
MARISNWSLVFLLISTLLHIEPSLSSPSPSPSPSPFIKSSCSSTQYPALCVSSLSVYASSIQQDPHQLVQTALSLSLNRTQATKTFVANCNKFRGLKPREHAALKDCAEEISDSVDRLSRSLKELKLCKVKGEDFTWHISNVETWVSSALTDESTCGDGFSGKALNGKIKDSIRARMLNVAQVTSNALSLINHYAAQH

SEQ ID NO: 3653 - DNA, 1423 bp, Triticum aestivum
  misc_feature: Ceres CLONE ID no. 763521
  misc_feature: Ceres CDNA ID no. 40041316
  CDS (101)..(1189): REFERENCED BY SEQ ID NO: 3654
acaccaaacatatagctcatcagctagccaaggcctgcaactgcaagctccggctgtctgtcacgtacgtacatacttatatacatacacgccgccaggcatgtctgccgccgcctgcgtctccttctgcccctcccccgcgtcctctcgccacggcgccgggccgatcgtcgacgtcgtcgggctgccgccggctgtggaggaggcggaggagcgcggcgccgagagggacctcctggagttcggcgccgacgggatgatcagcgccagcagtgacagtgacgaagatgctgctgctgctgagatcgatgacgaggaggagcactcggtgagaaggccacgggcggtggttcagaagttcatgtgcgaacgcaaggctgtcggcgacggcttcgttctccggaggagcattggcaggcctgagttgcagagcttggatcctttcatctccctggacgagtttgaattttctcgtccagctggcttttccgatcatccacaccgaggattcgagaatgttacctacatgcttgagggaggcttgagttaccatgacttttcaggccacaagggcacgatcaacaccggggatgttcagtggatgacggccgggcgtggtgtggtgcacgcagagatgccgggcggtgagggggtgcagaggggcctcaacctctggctcaacctctcctcaaaggacaagatggtggcgccgaggtaccaggacctgaggagccacgacgtccccacggcggagaaggacggcgtgtccatcaaggtcatcgccggcgaggccctgggcgcgcgctcgccgatccagacgcgcaccccggccatgtggctcgacgtcaccatgcggcccggcgcgcgcctgcgccagcccgtcccggccggctggagcgcgtgcgcctacgtcctcgacggcgaggccagcttcggccagccaggggacgaggcggccggcgcgcaccagtgcgtcgtgttcggcggcgacggcgatggcgtggacgtgcggagcgacagcgcgacgacgcgtttcttgttgctggcggcgcggccgcacggcgaggcggtggcgctggacgggcccttcgtgatgaacacgagcgaggaggcacaacaggccagggaggactacctgaaccgccgcaacggcttcgagatggccgccggctggacctctagccagtgaccacagtcgtgcattcacagacattggtgggccaacgagagaagaaggtgccatggcagtcgacggcacaacggggctgcattgaatgtatatttttttcctgcctggtgaattagtgatcgggctagctcaaaatccaatccaaaggcccacggggttatttgttctagtcaagttataagtgttctttatggcgaaagaaaaatataagtattgcgaaaaaaaaaaaaaaaa

SEQ ID NO: 3654 - protein, 362 aa, Triticum aestivum
  misc_feature: Ceres CLONE ID no. 763521
  misc_feature: Ceres CDNA ID no. 40041316
  misc_feature (246)..(351): Pfam Name: Pirin_C PFAM Desc: Pirin C
  misc_feature (97)..(193): Pfam Name: Pirin PFAM Desc: Pirin
  misc_feature: Homolog of GI Number: 50944913 NR Desc: putative pirin
  misc_feature: Homolog of GI Number: 50920071 NR Desc: putative pirin
  misc_feature: Homolog of GI Number: 6651245 NR Desc: pirin
  misc_feature: Homolog of GI Number: 49066057 NR Desc: Putative pirin
  misc_feature: Homolog of GI Number: 30689259 NR Desc: pirin
  misc_feature: Homolog of GI Number: 19070663 NR Desc: pirin
  misc_feature: Homolog of GI Number: 72018206 NR Desc:  similar to Pirin
  misc_feature: Homolog of GI Number: 14195009 NR Desc: Putative pirin
  misc_feature: Homolog of GI Number: 62901820 NR Desc: pirin
  misc_feature: Homolog of GI Number: 61356292 NR Desc: pirin
MSAAACVSFCPSPASSRHGAGPIVDVVGLPPAVEEAEERGAERDLLEFGADGMISASSDSDEDAAAAEIDDEEEHSVRRPRAVVQKFMCERKAVGDGFVLRRSIGRPELQSLDPFISLDEFEFSRPAGFSDHPHRGFENVTYMLEGGLSYHDFSGHKGTINTGDVQWMTAGRGVVHAEMPGGEGVQRGLNLWLNLSSKDKMVAPRYQDLRSHDVPTAEKDGVSIKVIAGEALGARSPIQTRTPAMWLDVTMRPGARLRQPVPAGWSACAYVLDGEASFGQPGDEAAGAHQCVVFGGDGDGVDVRSDSATTRFLLLAARPHGEAVALDGPFVMNTSEEAQQAREDYLNRRNGFEMAAGWTSSQ

SEQ ID NO: 3655 - DNA, 634 bp, Triticum aestivum
  misc_feature: Ceres CLONE ID no. 763623
  misc_feature: Ceres CDNA ID no. 40351334
  CDS (41)..(511): REFERENCED BY SEQ ID NO: 3656
aacacacatcgcaaacacgctgttcctacaatcattccaaatgtgcccttccggtcgcaccctcctcccttcctccgtctccgatttccgaccggcattcgacgtcctcgatgccgaccgcgacggcaaaatcagccgcgacgacctccgcgccttctacgccggagtcggcggcggaggagatgacgtgatcggggcaatgatgacagtggctgacaccaataaggacgggttcgtggagtacgaggagttcgagcgcgtggtctcggcggagagaaagcccgtggggtactgtggggccatggaggacgtgttcagggtcatggacaaggacggcgacggcaagctcagccaccatgatctgaagacttacatggcctgcgctggttttccggccaccgacaacgacatcaacgccatgatccgattcggcggcggcgaccaaaacggcggcgttacgttcgatggtttgcttcgtatattggcgcttgattgttcccccgctaattaattaaacctctcgggtattggctgcgcgcgtttcgttacattaattaaacaagtgttgggttttgtactttgtccaagtttgagaaattacagtgattaattgaatccaaaaaaaaaaaaaaaa

SEQ ID NO: 3656 - protein, 156 aa, Triticum aestivum
  misc_feature: Ceres CLONE ID no. 763623
  misc_feature: Ceres CDNA ID no. 40351334
  misc_feature (50)..(78): Pfam Name: efhand PFAM Desc: EF hand
MCPSGRTLLPSSVSDFRPAFDVLDADRDGKISRDDLRAFYAGVGGGGDDVIGAMMTVADTNKDGFVEYEEFERVVSAERKPVGYCGAMEDVFRVMDKDGDGKLSHHDLKTYMACAGFPATDNDINAMIRFGGGDQNGGVTFDGLLRILALDCSPAN

SEQ ID NO: 3657 - DNA, 464 bp, Triticum aestivum
  misc_feature: Ceres CLONE ID no. 763665
  misc_feature: Ceres CDNA ID no. 40351335
  CDS (43)..(216): REFERENCED BY SEQ ID NO: 3658
agaaaaaaagtttctaagttaaggaaatccagagagacaaaaatggccggtgacggtgcagctacatgcatagacatcctccttgccatcattctccctcctcttggagtctttctcaaatatggctgccaggtggagttctggatttgtttggtgctgaccctttttggttatatacctggaattatctatgctgtctatgctatcaccaagtgatcaccctttaactttgtgtggacaataaacaaatgtcatgggcgtttctgtctttcaactcagatattagtgtttctttaatatatcgccaatgttgtcatattcttatgttctgtttttaaaaccccttttgttcttagcttaagcgagagtggagtgtgtagcttactagcttgtgtatgtagtctctagatttggtaattgatttgaaatacacaatttcatttgtatcaaaaaaaaaaaaaaaa

SEQ ID NO: 3658 - protein, 57 aa, Triticum aestivum; identical to SEQ ID NO: 3440
  misc_feature: Ceres CLONE ID no. 763665
  misc_feature: Ceres CDNA ID no. 40351335
  misc_feature (7)..(57): Pfam Name: UPF0057 PFAM Desc: Uncharacterized protein family UPF0057

SEQ ID NO: 3659 - DNA, 1509 bp, Triticum aestivum
  misc_feature: Ceres CLONE ID no. 763718
  misc_feature: Ceres CDNA ID no. 25446984
  CDS (292)..(1269): REFERENCED BY SEQ ID NO: 3660
acactccgagaaagcttggcttctactactactactccagcacaataactaggccacccacaaacacacccgcacccgcacacagccgcggcgacagacacccaacggcatcgtcatcatcaccgccaccgccaccacttcttctagatagctcctggtactgccgtgccgtcattagccgcgggagcagagcctggacgagtcccagatcggtcggttcggtcggcaccggaaggcattcaggcagctaggcgtgggaactagattaggatcctagcggcaaagtgcagcatgggcgccgggattaggatcctagcggcggccctcctggcgctcgcggctgtccgcggcgcgacggcgcagctccggcagggctactactccgccagctgccccaacgtggaggccatcgtgcaagccgccgtggccctcaaggtccagcagacgcccgtcgccgtcggcgccaccgtccgcctcttcttccacgactgcttcgtccagggatgcgacgcgtcggtcatcatcgtgtcgtcggggaacaacacggcggagaaggaccacgtgagcaacctctccctcgccggcgacggcttcgacaccgtcatcaaggcgaaggcggccgtggacacgcagtgccccagccccaacctggtgtcgtgcgcggacatcctcaccatggccacccgggacgtcatcggcctggccgacggcccggcgtaccccgtggagctcgggaggctggacgggctggtgtcgacggcgagcaacgtggacgggaacctgccgccgccgtcgttcaacctggaccagctgacggcgatgttcgccgccaacaacctgtcccaggccgacatgattgcgctctccgcggcgcacacggtggggttcgcgcactgcgggacgttcacgggccggatccagacggcggcagtggacccgacgatggaccccgggtacgcgtcgcaactgctggcggcgtgcccggcgggggtggacccgaacgtggcgctggagatcgacccggtgacgccgcacgccttcgacaaccagtacttcatcaacctgcagaaggggatgggcctgctcacctccgaccaggtcctctacgccgacctccggtcgcgccccaccgtcgacgcctgggcggccaacagctccgacttcgaggccgccttcgtcgccgccatgaccaacctcggccgcgtcggcgtcaagacggaccccgcgctcggcaacatccgccgcgactgcgccgtgctcaacagctgatttgtttggttattgcattggttgatgcaggagaacaagatgcagtgcaagctcgatcgatgcttgggggtatgatatggatatcctatcatcaactgttcatagttagcttggccactcgatggggtggtgctgagattataatacaggtagctttcgagacacaagtctagttctaatccatcggaatgttaatggttgaggagtctgttgagttgagcaccaaaaaaaaaaaaaaaa

SEQ ID NO: 3660 - protein, 325 aa, Triticum aestivum
  misc_feature: Ceres CLONE ID no. 763718
  misc_feature: Ceres CDNA ID no. 25446984
  misc_feature (41)..(287): Pfam Name: peroxidase PFAM Desc: Peroxidase
  misc_feature: Homolog of GI Number: 50918943 NR Desc: putative peroxidase
  misc_feature: Homolog of GI Number: 34915320 NR Desc: putative peroxidase
  misc_feature: Homolog of GI Number: 28629828 NR Desc: peroxidase 1
  misc_feature: Homolog of GI Number: 14485511 NR Desc: putative peroxidase
  misc_feature: Homolog of GI Number: 6522917 NR Desc: peroxidase ATP21a
  misc_feature: Homolog of GI Number: 971564 NR Desc: peroxidase2
  misc_feature: Homolog of GI Number: 13992528 NR Desc: peroxidase2
  misc_feature: Homolog of GI Number: 20148497 NR Desc: peroxidase
  misc_feature: Homolog of GI Number: 1546708 NR Desc: peroxidase ATP9a
  misc_feature: Homolog of GI Number: 23297814 NR Desc: putative peroxidase
  misc_feature: Useful for making ornamental plants with modified flowers
MGAGIRILAAALLALAAVRGATAQLRQGYYSASCPNVEAIVQAAVALKVQQTPVAVGATVRLFFHDCFVQGCDASVIIVSSGNNTAEKDHVSNLSLAGDGFDTVIKAKAAVDTQCPSPNLVSCADILTMATRDVIGLADGPAYPVELGRLDGLVSTASNVDGNLPPPSFNLDQLTAMFAANNLSQADMIALSAAHTVGFAHCGTFTGRIQTAAVDPTMDPGYASQLLAACPAGVDPNVALEIDPVTPHAFDNQYFINLQKGMGLLTSDQVLYADLRSRPTVDAWAANSSDFEAAFVAAMTNLGRVGVKTDPALGNIRRDCAVLNS

SEQ ID NO: 3661 - DNA, 1792 bp, Triticum aestivum
  misc_feature: Ceres CLONE ID no. 763958
  misc_feature: Ceres CDNA ID no. 40041317
  CDS (133)..(1272): REFERENCED BY SEQ ID NO: 3662
ctaccatttttggtcggttcggtcgggttgctccaagagcagtcgcgagctccgtcgccgcattgatgaatgccgaagctatagcggctctccgtcgtcgctcttcccagggatgccacggtcgcccggatcatgccattgccaaccgcggtcgtagctggcgttgccgcctcggtcgccacgctggtgctgctggcggtcgccgccgcgctctgctggtggcggctcggggcgcgccgtagccggacctccgacaccgcctccgacgaaactccccccacgctagcggagtggggcaggtgcggccggacgtcgtcggcgccggactaccacggcgccaggcggttcacgctggaggagatgtcccacgccaccaagaacttcagcgacgccaacctcgtgggcgccggcaccttcggcaaggtctacatgggcctcctgctcgacggcaccgtcgtcgccatcaagcgccgcgtcggcgcgccgcgccaggacttcgtcgacgaggtgaggcggcagtcggagatctggcaccggaacgtggtgaccctcatcggctactgccaggacgggggtctgcagatgctcgtcttcgagcacctgcccaacggcagcgtctgcggccatctctacgatagcggcaaggagtcgatgacaaggctggagttcaagcagaggctctcgatcgccatcggagcggccaaaggcctggaccatctgcacagcctcgcgcctccgttgatccacaagggcttcaagacgagcaacgtgctggtggacgagaacttcatcgccaaggtgtccgacgccggagtcgaccggctgctcagagggctcgaggaccccggctcgccgctcaacggattccgttccggcatctaccaggatccagaggcacattccttggcacagctctctgcgagcagcgacgtgtacagctttggggttttccttctggagctcatcaccggcagggaggccgccaccttggtttctccggaatcaaccgaatctctcgctcattggttggagacgtcgggagacgaggtggcggacccgaggctcggcggcagcttcacctcggagggcatgaaggagctggttggcctgacgatgcagtgcctgagcccgtcggcggtgaggaggcggcccaagatgcggctggtcgcggcggagctcgaccgcatcctggagaaggagatgaccctgacgacggtcatgggggatggcacggccatcatcacccttgggagccagctcttcacgtcatgatcatccaatatttgttaccacaaaatggatatttttgtgtttcgcgattgctaaactttagttgcctgaaaatcaattgagcatcaattgaattcccctagcatcgagctggaaatcaagacgacgtgacgtcttcgacggaggggagttcaagggttgactgatatgggtgtggtagaggaggacttcaccggagcaaaaaagggggaaggatggttgcagggatgaccggggtgacggccaatggaccggcataggaggcgattcaggcagggcgggacgatgaggcgacataggctgaaggtggcgggtaccggcggttaggccaatgaaggcgggtggctcgacaatggaagcgtttgtcagcaatggggatgaaggggaaatcgaccaatgtatgtacttttttcaggcaactggcatttagccggtccattttgttttgtacatttgcatataaagcaactgcctgtgcaaaaaaaaaaaaaaaaaaaaaaaaaaaataaaaaaaaaaaaaaaa

SEQ ID NO: 3662 - protein, 379 aa, Triticum aestivum
  misc_feature: Ceres CLONE ID no. 763958
  misc_feature: Ceres CDNA ID no. 40041317
  misc_feature (265)..(282): Pfam Name: Pkinase_Tyr PFAM Desc: Protein tyrosine kinase
  misc_feature: Homolog of GI Number: 34907204 NR Desc: serine/threonine protein kinase
  misc_feature: Homolog of GI Number: 57899627 NR Desc: nodulation receptor kinase
  misc_feature: Homolog of GI Number: 30688460 NR Desc: protein kinase family protein
  misc_feature: Homolog of GI Number: 34907096 NR Desc: putative serine/threonine protein kinase
  misc_feature: Homolog of GI Number: 34909240 NR Desc: putative receptor protein kinase
  misc_feature: Homolog of GI Number: 56785324 NR Desc: putative receptor
  misc_feature: Homolog of GI Number: 8978274 NR Desc: receptor protein kinase
  misc_feature: Homolog of GI Number: 50931845 NR Desc: putative receptor protein kinase
  misc_feature: Homolog of GI Number: 50928775 NR Desc: OSJNBa0058K23.13
  misc_feature: Homolog of GI Number: 5679841 NR Desc: l1332.5
MPLPTAVVAGVAASVATLVLLAVAAALCWWRLGARRSRTSDTASDETPPTLAEWGRCGRTSSAPDYHGARRFTLEEMSHATKNFSDANLVGAGTFGKVYMGLLLDGTVVAIKRRVGAPRQDFVDEVRRQSEIWHRNVVTLIGYCQDGGLQMLVFEHLPNGSVCGHLYDSGKESMTRLEFKQRLSIAIGAAKGLDHLHSLAPPLIHKGFKTSNVLVDENFIAKVSDAGVDRLLRGLEDPGSPLNGFRSGIYQDPEAHSLAQLSASSDVYSFGVFLLELITGREAATLVSPESTESLAHWLETSGDEVADPRLGGSFTSEGMKELVGLTMQCLSPSAVRRRPKMRLVAAELDRILEKEMTLTTVMGDGTAIITLGSQLFTS

SEQ ID NO: 3663 - DNA, 839 bp, Triticum aestivum
  misc_feature: Ceres CLONE ID no. 764486
  misc_feature: Ceres CDNA ID no. 36699854
  CDS (30)..(656): REFERENCED BY SEQ ID NO: 3664
acaccaaatccattcatccaagttcaaagatgaagatgatccacgttcttttcctccttgctcttgtctcgttcacttcccatgcttctgtcaatgatttctgtgtagcagacctaaaaggtccagatagcccttcaggctatcagtgcaagccacctaacacagtcacagtggatgactttgtgttctctggctttgtagctggaaacaccacaaacactttcaatgctgcattaacctccgcatttgttactgattttccaggtgtgaatggtcttggtgtatctgtggcacggttagacatagccaaaggtggatcaatcccaatgcacacacaccctgctgccactgaacttctaataatggtggaaggtcaaatcactgctggttttatgaccccaactgcactttataccaagacactgaaacctggagatattatggtttttccacaaggacagttgcattttcaggttaattctggaaacggaaaagccactgcttttctggcattcagtagtgcaaaccctggagcacaactacttgaccttctgttatttggcaacaccttgccttctgacttggttgcacagactaccttccttgatgttgcacaagtcaagaaggttaaggctcgttttggtggcagaggctagggtttcttatgaatcaactcatacctagtgtttgttttagtgataatcgtcagcaattaataaacttgtgcatttgggtgtgttttgctttcattttaagtttgattccaaacttatgatttgagggtttgaagtttgacgatgtataaataaaaattttagagtttaaaaaaaaaaaaaaaa

SEQ ID NO: 3664 - protein, 208 aa, Triticum aestivum
  misc_feature: Ceres CLONE ID no. 764486
  misc_feature: Ceres CDNA ID no. 36699854
  misc_feature (88)..(162): Pfam Name: Cupin_2 PFAM Desc: Cupin domain
  misc_feature: Homolog of GI Number: 7242813 NR Desc: germin
  misc_feature: Homolog of GI Number: 60219079 NR Desc: germin
  misc_feature: Homolog of GI Number: 4098517 NR Desc: auxin
  misc_feature: Homolog of GI Number: 13277342 NR Desc: Germin
  misc_feature: Homolog of GI Number: 1916809 NR Desc: auxin
  misc_feature: Homolog of GI Number: 1916807 NR Desc: auxin
  misc_feature: Homolog of GI Number: 4666250 NR Desc: germin
  misc_feature: Homolog of GI Number: 1755184 NR Desc: germin
  misc_feature: Homolog of GI Number: 20148495 NR Desc: germin
MKMIHVLFLLALVSFTSHASVNDFCVADLKGPDSPSGYQCKPPNTVTVDDFVFSGFVAGNTTNTFNAALTSAFVTDFPGVNGLGVSVARLDIAKGGSIPMHTHPAATELLIMVEGQITAGFMTPTALYTKTLKPGDIMVFPQGQLHFQVNSGNGKATAFLAFSSANPGAQLLDLLLFGNTLPSDLVAQTTFLDVAQVKKVKARFGGRG

SEQ ID NO: 3665 - DNA, 1421 bp, Triticum aestivum
  misc_feature: Ceres CLONE ID no. 764831
  misc_feature: Ceres CDNA ID no. 25892741
  CDS (36)..(1193): REFERENCED BY SEQ ID NO: 3666
atccgaatccccggcaccagccacgccgtcgtcccatggcgcttgcgctgcgctgccccgccgccgcctcgccgtccagggcccccttccccaactcctcctcccactcccagtcggctgcgaggcccgcgaggaggccggcggggggctgcaggtgccagtactaccacggcgacgcccccccaagaagctacgaccacatccccaagcagttccgcgaggagaacctcaaggatggcctgatggataattacaagaatgttccccagttcctttatggcttaagcccatctcagatggaaatgtttacaactgacgacaacccttataatcggcagtcaaagaaagttacagaggaaagcgttgctgctttgaggagttatgatgaattcggtatgtactccttatcaggcacgcatgagggccctgcaaattacagcatgggtatgggcatgcccagcatgagcatgggtagagcagggaaaggatatagaagaatgagaagctcagccccggatctgccatcattgctgttggactcccgaattatatttcttggaatgccaattgttccagctgtaactgagcttattgctgctcagtttctgtggctagactatgatgaccgcacgaagccaatttacttgtatataaactccacaggaacaatggatgaaaataacgagctggtcgcgtctgaaactgatgcctatgcaattgctgatttcattaatcgaagcaaagccaaggtttacaccatcaaccttagcatggcgtatggtcaggctgccatgcttctttccctggggatgaagggtaaaagaggagtgctaccaaattcgataactaaactgcacctgcccaaggtccacaaatccggtggagctgccattgatatgtggattaaggcaaaagagttggagacaaacacggactactatctggaactcgtgtcccagggagtcggtaaacctaaggaagagctcgcagagttcctgagaggcccgaggtacttccgcgcgcaggaggccatcgactacgggctcgccgacacgatcctgcactcgctggacggctcgttcaagccgaaggacctgacggcgcagctggccaaggcgcaggagatgcggcagtctgggaagcgcgctccggctggagctgggcgatggtcgaccccgaccgcacccagatagactagaacgcgacgatatgctcaggcgactgtcctgtctgttggttatagacttagaagatatctgtctgttgtctgagatagattatccacgccggtatcgttgccaccatcttgtcatggatattgtattgtcatggaaaccccaaaattttgccaactctggtttgtagaagaagtgataatgataatagacttgaggtttcttgtgtcaaaaaaaaaaaaaaaa

SEQ ID NO: 3666 - protein, 243 aa, Triticum aestivum
  misc_feature: Ceres CLONE ID no. 764831
  misc_feature: Ceres CDNA ID no. 25892741
  misc_feature (15)..(203): Pfam Name: CLP_protease PFAM Desc: Clp protease
  misc_feature: Homolog of GI Number: 23308343 NR Desc: At1g49970/F2J10_5
  misc_feature: Homolog of GI Number: 22531207 NR Desc: ATP
  misc_feature: Homolog of GI Number: 51970012 NR Desc: ClpP protease complex subunit ClpR3
  misc_feature: Homolog of GI Number: 51971563 NR Desc: ClpP protease complex subunit ClpR3
  misc_feature: Homolog of GI Number: 13794458 NR Desc: ATP
  misc_feature: Homolog of GI Number: 22299302 NR Desc: ATP
  misc_feature: Homolog of GI Number: 21593086 NR Desc: ATP
  misc_feature: Homolog of GI Number: 23126723 NR Desc: COG0740: Protease subunit of ATP
  misc_feature: Homolog of GI Number: 56783783 NR Desc: putative ATP
  misc_feature: Homolog of GI Number: 55792477 NR Desc: plastid catalytic subunit of ClpP5 protease
  misc_feature: Useful for making lethal plants for genetic confinement systems
  misc_feature: Useful for making lethal plants for genetic confinement systems
  misc_feature: Useful for making plants with increased biomass and foliage
  misc_feature: Useful for making plants with increased biomass and foliage
MSMGRAGKGYRRMRSSAPDLPSLLLDSRIIFLGMPIVPAVTELIAAQFLWLDYDDRTKPIYLYINSTGTMDENNELVASETDAYAIADFINRSKAKVYTINLSMAYGQAAMLLSLGMKGKRGVLPNSITKLHLPKVHKSGGAAIDMWIKAKELETNTDYYLELVSQGVGKPKEELAEFLRGPRYFRAQEAIDYGLADTILHSLDGSFKPKDLTAQLAKAQEMRQSGKRAPAGAGRWSTPTAPR

SEQ ID NO: 3667 - DNA, 1573 bp, Triticum aestivum
  misc_feature: Ceres CLONE ID no. 764921
  misc_feature: Ceres CDNA ID no. 25446237
  CDS (155)..(1177): REFERENCED BY SEQ ID NO: 3668
caaaccgcgcttccttcttagcctctgctctgttcttgcccgtgaacaccacgagtaccaagcaccgagaaactaggagaggaaggaggaggaggaagaagcctctccatagaatcaaccgatcgatcgggggtcttgatcttggccagcgagaatgcggcagatctcgtccatgctgcaggggctggcccgctccatgtctctgggaaaggagaggaaggaggcggaggagccgcaggggacggtgctgcgctcgtcggggacgctctggggcgagggctccgagaccttcgccgccgcgtgctcccgccgcggcgagaagggcaccaaccaggacacctccatcgtctgggagggatacgggtgccaggacgacaccatcttctgcggcgtcttcgacggccacggccagtggggccactacgtcgccaaggccgtccgggagtcgctgccgcagcagctgctgtgccgctggcaggaggccgtcgcgctgacgtcgctcatcgacggcgagaagaggctcggcgactgccagttcgacctcctgaggcagtcctacctggcagccgccgccgccgtggacgaggagctccgccgaagccggcgcctcgacgccgtcaacagcggttgcacggctctgtccatcgtcaagcagggcgacctgatggtagtcgccaacgtcggcgactcgcgggccgtccttgcgaccacatcggacgacggggacgtcacggccgtccagctcaccgtcgacttcaagcccgacttaccccaggagaaggcgcgcatcatacagtgcgagggccgcgtgcactgcctcgacgacgagcccggcgtgcaccgggtgtgggtgccccaccgggatgcgccggggctggccatgtcgcgggccttcggcgactactgcgtcaaggactacggcgtcatctcggcgccggaggtgacgcagaggaggatcaccgcccgagaccagttcgtcatcctggccaccgacggggtctgggacgtgctctccaacgaggaggccgtgcggatcgtggcggccacgccggacagggagaaggcggcgaagcggctcgtcgagtgcgccgtccgcgggtggaggcgcaagcggcggggcgtcgccgtcgacgactgctcggcggtctgcctcttcttccactcgccggcgccctgaacgagctgccccgagaccgcgattgcattgccatcagggcgaggggaaagcgacccgtccacttgccggtagatcgatcgatcggtgcgcgacgtcgccgtccgagagagacgaccagaaggtgcagttcgcgccatgattgggacgctgcacgaatgaccggggcggtgggtcgactgctgccggtggatcaccgaaaaattctccggttttgacacgctgcttgccgaaatgtacgaggatcaacggcagccactagcaaatggcagaagaaacaagacgcaccttgtccttattttcgtcctccatggctctcgttggcctgaaaatgcactatgagagacagtaatatggaaaattattggtgtacaaaacgtcacaaaaaaaaaaaaaaaa

SEQ ID NO: 3668 - protein, 340 aa, Triticum aestivum
  misc_feature: Ceres CLONE ID no. 764921
  misc_feature: Ceres CDNA ID no. 25446237
  misc_feature (45)..(321): Pfam Name: PP2C PFAM Desc: Protein phosphatase 2C
  misc_feature: Homolog of GI Number: 30690850 NR Desc: protein phosphatase 2C
  misc_feature: Homolog of GI Number: 21592402 NR Desc: protein phosphatase
  misc_feature: Homolog of GI Number: 18652937 NR Desc: protein phosphatase 2C
  misc_feature: Homolog of GI Number: 21593997 NR Desc: protein phosphatase
  misc_feature: Homolog of GI Number: 79305850 NR Desc: catalytic/ protein phosphatase type 2C
  misc_feature: Homolog of GI Number: 7715607 NR Desc: F20B17.6
  misc_feature: Homolog of GI Number: 4966343 NR Desc: Is a member of PF00481 Protein phosphatase 2C family.
  misc_feature: Homolog of GI Number: 9759038 NR Desc: protein phosphatase
  misc_feature: Homolog of GI Number: 21360455 NR Desc: AT5g36250/T30G6_11
  misc_feature: Homolog of GI Number: 50922947 NR Desc: OSJNBb0062H02.4
MRQISSMLQGLARSMSLGKERKEAEEPQGTVLRSSGTLWGEGSETFAAACSRRGEKGTNQDTSIVWEGYGCQDDTIFCGVFDGHGQWGHYVAKAVRESLPQQLLCRWQEAVALTSLIDGEKRLGDCQFDLLRQSYLAAAAAVDEELRRSRRLDAVNSGCTALSIVKQGDLMVVANVGDSRAVLATTSDDGDVTAVQLTVDFKPDLPQEKARIIQCEGRVHCLDDEPGVHRVWVPHRDAPGLAMSRAFGDYCVKDYGVISAPEVTQRRITARDQFVILATDGVWDVLSNEEAVRIVAATPDREKAAKRLVECAVRGWRRKRRGVAVDDCSAVCLFFHSPAP

SEQ ID NO: 3669 - DNA, 502 bp, Triticum aestivum
  misc_feature: Ceres CLONE ID no. 766235
  misc_feature: Ceres CDNA ID no. 40351336
  CDS (64)..(342): REFERENCED BY SEQ ID NO: 3670
agtgtctgctgccttccattcgttcacctcctcaacctctgcagcgccttcgatccagaaaacatgactaagagaacaaagaaggctggcattgttggaaaatacggtacccgttatggcgccagtctgcgtaagcagattaagaagatggaagttagtcaacacagcaagtttttctgtgaattttgtggaaagtatgctgtgaagaggaaagctgtgggaatatggggatgcaaggactgtggtaaagtgaaagctggcggtgcttacactttgaataccgcaagtgccgtgactgtacggagcaccatcaggaggttgagggagcaaactgagagttaagcttttttgtttatgctatcaattactattagactttgcatgaagtgcctagtttgtattcactgaactgcactggttgtattcaaagtaaactccttaagtttaattttgagatgactcttttaattttaattgtttggaacgaaaaaaaaaaaaaaaa

SEQ ID NO: 3670 - protein, 92 aa, Triticum aestivum; identical to SEQ ID NO: 3392
  misc_feature: Ceres CLONE ID no. 766235
  misc_feature: Ceres CDNA ID no. 40351336
  misc_feature: null
  misc_feature: Useful for making plants with modulated cold sensitivity
  misc_feature (2)..(91): Pfam Name: Ribosomal_L37ae PFAM Desc: Ribosomal L37ae protein family

SEQ ID NO: 3671 - DNA, 769 bp, Triticum aestivum
  misc_feature: Ceres CLONE ID no. 766263
  misc_feature: Ceres CDNA ID no. 36582739
  CDS (109)..(531): REFERENCED BY SEQ ID NO: 3672
tcatataagatcgattatactcacaagttttgttctttcctagcaattcggcgcaatcgtcttctgcttcaaggaaggagagcttgttattctctatcaacaaggaaaatgtcaggtgaagaggttgttgttgcagctgagccagctgctgccatcccaggcgagcctatggatatcatgactgccttgcaacttgtgctcagaaaatctctggcttatggtggtcttgcacgaggccttcacgaaggggcaaaagtgattgagaagcatgctgcacaactctgtgttctagcagaagactgtgaccagcctgactatgttaaactggttaaggccctttgtgcagagcacaatgttagcctgctgacagttccgagtgcaaagacccttggagaatgggctggtttgtgcaagattgattccgaaggaaaagctaggaaggttactggttgctcctgtgtggttgtgaaggattttggtgaggagcatgaagcctataacgtcgttctgcagcatgtgaaatctcaatgagttgcaagattcatagattttatgcatttcattttgggttattccatgagaatgaattttgccttgtagctggattatatctaccttgggttttgattgtttaatatgactgccacattctaaatgttgttccttttttctttctttctttgatgcattgctgttactctaattaggaactcttgtttcacatttaatcattaaagaagggaaagttacatgaaaaaaaaaaaaaaaa

SEQ ID NO: 3672 - protein, 140 aa, Triticum aestivum; identical to SEQ ID NO: 1964
  misc_feature: Ceres CLONE ID no. 766263
  misc_feature: Ceres CDNA ID no. 36582739
  misc_feature (25)..(120): Pfam Name: Ribosomal_L7Ae PFAM Desc: Ribosomal protein L7Ae/L30e/S12e/Gadd45 family
  misc_feature: Homolog of GI Number: 50935291 NR Desc: putative 40S ribosomal protein S12
  misc_feature: Homolog of GI Number: 50934241 NR Desc: putative ribosomal protein S12
  misc_feature: Homolog of GI Number: 5106775 NR Desc: ribosomal protein S12
  misc_feature: Homolog of GI Number: 21537373 NR Desc: 40S ribosomal protein S12
  misc_feature: Homolog of GI Number: 21536844 NR Desc: 40S ribosomal protein S12
  misc_feature: Homolog of GI Number: 30025643 NR Desc: 40S ribosomal protein S12
  misc_feature: Homolog of GI Number: 67083929 NR Desc: ribosomal protein S12
  misc_feature: Homolog of GI Number: 18845074 NR Desc: 40S ribosomal protein S12
  misc_feature: Homolog of GI Number: 24266978 NR Desc: ribosomal protein S12
  misc_feature: Homolog of GI Number: 66548338 NR Desc:  similar to ribosomal protein S12

SEQ ID NO: 3673 - DNA, 660 bp, Glycine max; identical to SEQ ID NO: 3415
  misc_feature: Ceres CLONE ID no. 767686
  misc_feature: Ceres CDNA ID no. 25891120
  CDS (50)..(496): REFERENCED BY SEQ ID NO: 3674

SEQ ID NO: 3674 - protein, 148 aa, Glycine max; identical to SEQ ID NO: 3416
  misc_feature: Ceres CLONE ID no. 767686
  misc_feature: Ceres CDNA ID no. 25891120
  misc_feature (26)..(101): Pfam Name: Histone PFAM Desc: Core histone H2A/H2B/H3/H4
  misc_feature: Homolog of GI Number: 7649159 NR Desc: histone H2A
  misc_feature: Homolog of GI Number: 47026912 NR Desc: histone H2A
  misc_feature: Homolog of GI Number: 47026919 NR Desc: histone H2A
  misc_feature: Homolog of GI Number: 34914498 NR Desc: putative histone H2A
  misc_feature: Homolog of GI Number: 729669 NR Desc: Histone H2A
  misc_feature: Homolog of GI Number: 122006 NR Desc: Histone H2A
  misc_feature: Homolog of GI Number: 50931693 NR Desc: putative histone H2A
  misc_feature: Homolog of GI Number: 729671 NR Desc: Histone H2A
  misc_feature: Homolog of GI Number: 61826353 NR Desc:  similar to Histone H2A.x
  misc_feature: Homolog of GI Number: 62653580 NR Desc:  similar to Histone H2A.x

SEQ ID NO: 3675 - DNA, 973 bp, Glycine max
  misc_feature: Ceres CLONE ID no. 768110
  misc_feature: Ceres CDNA ID no. 25891121
  CDS (116)..(814): REFERENCED BY SEQ ID NO: 3676
ataaaagagaggtgaggtgaactcgtgtggggtgtggtagtgtggcagcgacacgtatcaacttcaataatcgcatcgcagaagcagtttccggtgcatctcatcgtctccgaaaatgaacgacgcagatgtctcgaagcaaatccagcagatggtgcggttcatccgccaggaagctgaggaaaaggccaacgagatctctgtctccgccgaagaggaattcaatatcgagaagctgcagttggtcgaagccgacaagaagaagatcaggcaagaatacgaacgcaaagagcgccaagttgaaattcgcaagaagattgagtactcaatgcagctgaatgcttctcggattaaagttcttcaagctcaagatgacgtgatcagttccatgaaagaagctgcatccaaggaacttttgactgtgagtcatcatcatgatgatcatgtgtacagaaaccttctgaaagatctcattgttcagtgtttgctaagactgaaagaaccttctgtcttattgagatgtcggaaagatgacctgcacttggtagagaacgtgctggattcagctgctcaggagtatgctgagaaagcaaatgtcgatcccccagagatcattgttgacaaccaagtctatcttccacctggacccagtcgtcacaattctcacgatctctactgctccggtggggtggtgttggcttctcgtgatggaaagattgtgtgtgaaaatactcttgatgcacgtcttgatgtagttttccgtaaaaagcttccagagatccgaaagcagctctttggacaaattgttgcttgaagattttgattgtaatgtttggttacccctggaactatatcccgaagcataagcttgtcttcatgtcttggacctgaatagctatcaagccattgcttctgtgaacttataattattgtcccttaaattacgtcattttcggtaaaaaaaaaaaaaaaa

SEQ ID NO: 3676 - protein, 232 aa, Glycine max
  misc_feature: Ceres CLONE ID no. 768110
  misc_feature: Ceres CDNA ID no. 25891121
  misc_feature (16)..(227): Pfam Name: vATP PFAM Desc: ATP synthase
  misc_feature: Homolog of GI Number: 29290712 NR Desc: vacuolar ATPase subunit E
  misc_feature: Homolog of GI Number: 5733660 NR Desc: vacuolar V
  misc_feature: Homolog of GI Number: 12585474 NR Desc: Vacuolar ATP synthase subunit E
  misc_feature: Homolog of GI Number: 34912000 NR Desc: putative YLP
  misc_feature: Homolog of GI Number: 2267583 NR Desc: vacuolar H+
  misc_feature: Homolog of GI Number: 15222641 NR Desc: vacuolar ATP synthase subunit E
  misc_feature: Homolog of GI Number: 9652289 NR Desc: putative vacuolar proton ATPase subunit E
  misc_feature: Homolog of GI Number: 20148607 NR Desc: similar to vacuolar ATPases
  misc_feature: Homolog of GI Number: 1143394 NR Desc: V
  misc_feature: Homolog of GI Number: 1263911 NR Desc: vacuolar H
MNDADVSKQIQQMVRFIRQEAEEKANEISVSAEEEFNIEKLQLVEADKKKIRQEYERKERQVEIRKKIEYSMQLNASRIKVLQAQDDVISSMKEAASKELLTVSHHHDDHVYRNLLKDLIVQCLLRLKEPSVLLRCRKDDLHLVENVLDSAAQEYAEKANVDPPEIIVDNQVYLPPGPSRHNSHDLYCSGGVVLASRDGKIVCENTLDARLDVVFRKKLPEIRKQLFGQIVA

SEQ ID NO: 3677 - DNA, 654 bp, Glycine max
  misc_feature: Ceres CLONE ID no. 768113
  misc_feature: Ceres CDNA ID no. 40351337
  CDS (27)..(416): REFERENCED BY SEQ ID NO: 3678
ctagatagagagtttcgttcgtcaccatgacttttaagcgcaggaatggaggtcgcaacaaacacggccgtggccacgtcaagttcattcgatgctccaactgcggcaaatgctgtcctaaggacaaggctatcaagaggtttctggtgaggaacattgttgaacaggctgcagtcagagatgttcaggaggcttgtgtctatgaacaatacacgcttccgaagctttatgtgaagatgcagtattgtgtttcctgtgctatccactctcatgttgtgagggttcgatcccgcactgataggagaaagcgtgagcctccacagcgatttatcagacgcagggatgatgcaccaaggcctggtcagcctggtcaagccccacgtcctgctggagtaggagctcctgcccgaacttaaaaaacaaattccaaagttttttggggcttgttggttcagttttatgttacaaacttatactccatttgctgtttattttttaaatttcagttttgtgtagggatattatattttcttctagttgtttgctttagtcctcggagaaaattttctattattatttgatggttttgaggagaatgaaacctgatatattattgatatattttagcgttttgaagtaaaaaaaaaaaaaaaa

SEQ ID NO: 3678 - protein, 129 aa, Glycine max
  misc_feature: Ceres CLONE ID no. 768113
  misc_feature: Ceres CDNA ID no. 40351337
  misc_feature (1)..(120): Pfam Name: Ribosomal_S26e PFAM Desc: Ribosomal protein S26e
MTFKRRNGGRNKHGRGHVKFIRCSNCGKCCPKDKAIKRFLVRNIVEQAAVRDVQEACVYEQYTLPKLYVKMQYCVSCAIHSHVVRVRSRTDRRKREPPQRFIRRRDDAPRPGQPGQAPRPAGVGAPART

SEQ ID NO: 3679 - DNA, 526 bp, Glycine max
  misc_feature: Ceres CLONE ID no. 768156
  misc_feature: Ceres CDNA ID no. 40351338
  CDS (3)..(377): REFERENCED BY SEQ ID NO: 3680
ttttcgcggcgcacagcagaactctgcttcttcggattccgatcgcacgcgccgtcaccatggtgaacgttccgaaaacaaagaagacatactgcaagagtaaggagtgcaggaagcacacgctgcacaaggttacccaatacaagaagggtaaggatagcattgctgcccaaggaaaacgccgttatgatcgcaaacaatccggttatggtggacaaactaagcccgtcttccacaagaaggctaaaaccaccaagaagattgttctgaggttgcaatgccagggttgcaagcatgtctcccaacacgctattaagaggtgcaagcactttgagattggtggtgacaagaagggcaagggaacatcactcttctagtttgagaattaggatttagagctttatgtttcagcaatgttggaatgttttgtttctctctggattttttctgctagttatattttattattttgcaacaccttgttattgagaaattaaaactattttgctcaaaaaaaaaaaaaaaa

SEQ ID NO: 3680 - protein, 105 aa, Glycine max; identical to SEQ ID NO: 3358
  misc_feature: Ceres CLONE ID no. 768156
  misc_feature: Ceres CDNA ID no. 40351338
  misc_feature (19)..(95): Pfam Name: Ribosomal_L44 PFAM Desc: Ribosomal protein L44

SEQ ID NO: 3681 - DNA, 506 bp, Glycine max
  misc_feature: Ceres CLONE ID no. 768484
  misc_feature: Ceres CDNA ID no. 25445760
  CDS (57)..(296): REFERENCED BY SEQ ID NO: 3682
actcatacaatagagaccagcttttgcttctttgtgaacatggagatgaggaaatcatgtggcttcttcttgttggggtgccagtccatactgaaagaattgatctttgtgaagaagtaacctgtcctgttgctaatggcaattttctgatttctcacacccaaacattgcctgcaattactccaccgggaccctactctctgaagatgacattgaaggatgatcgggaggaggtgttaacttgcgttaagtttaattttaaaattgtttttggatcttttgtgtctgatatgtaaagtgtcctttgcatgcctgatctggggaacttttttgctttgttgtgaagtgttttattgtattttgcactgtatatcacctttcaattcaagagtcgtatcgtataaggccaatattctctaatgtcagagtcattagactcacgatgttgtataaggtccatgactgaatttctctttctgtatttgcacaaaaaaaaaaaaaaaaaa

SEQ ID NO: 3682 - protein, 79 aa, Glycine max
  misc_feature: Ceres CLONE ID no. 768484
  misc_feature: Ceres CDNA ID no. 25445760
  misc_feature (6)..(70): Pfam Name: E1_DerP2_DerF2 PFAM Desc: ML domain
  misc_feature: Homolog of GI Number: 55294668 NR Desc: putative ML domain protein
  misc_feature: Homolog of GI Number: 50355738 NR Desc: putative  ML domain protein
MWLLLVGVPVHTERIDLCEEVTCPVANGNFLISHTQTLPAITPPGPYSLKMTLKDDREEVLTCVKFNFKIVFGSFVSDM

SEQ ID NO: 3683 - DNA, 1054 bp, Triticum aestivum
  misc_feature: Ceres CLONE ID no. 769571
  misc_feature: Ceres CDNA ID no. 25891685
  CDS (115)..(714): REFERENCED BY SEQ ID NO: 3684
atcaccagttcaccacaatccccattcccaaagctcgaccaaagccgtgacactcctcccccacgtcgtcctccccgccgcgcaccaaaccctaagctatccccgccgatcccaatggccggcacccaccaccggcccctccacgccctcctcggcggcggcgcagtcgccgacctgctcctctggaggcggaggaacgcctccgcggcggccgtggccggcgccacgctcgtctggttcctcttcgagcgcgccgggtacagcctcgcctcggtcctctccaacgccctgctcctcctcgtcgtcatcctcttcttctgggccaagtccgcctcgctgctcaacagacctcttccaccagtgccgaatctagaggtctcagatgtggtcattgagaaagctgtaggtcgggctcttgtatggataaacaaggtgttggctgttgcccatgacattgccatcaagagagaccgtacagtttttatacaggttataatggctctatgggtggtttcatgtattgggatgatcttcaacttctttacgctcatttacattggtgtactactcgctctgttgattcccccggtatatgagaggcaccaggatgttattgatgaaaaggttggtttatcacacagcatacagtcaaggcacttgaataccgtcgttagcaagacagggcaaccacctaaacaaaagaaggctgagtagaagaaatattttagcccatttggaagctctccagttgcccagtgcagttggcctcgtcctcagaatctctataccgtgatccgtccaccgctgagagtatttctggatatccagggcataatgtttaactgctgatacgtgggtttagatgcacgctcttcagtctgagaaatggaatgatctgtatattgtttccatgaacatgaaacttgtcgaggtttacatcttgtggataatgacgtataccttttctcgcaacatccttctctatgactacgtgtgatgtcgtgtcttgcatatacaaatgcggtgcctgttagtgacaaaaaaaaaaaaaaaa

SEQ ID NO: 3684 - protein, 199 aa, Triticum aestivum
  misc_feature: Ceres CLONE ID no. 769571
  misc_feature: Ceres CDNA ID no. 25891685
  misc_feature (18)..(196): Pfam Name: Reticulon PFAM Desc: Reticulon
  misc_feature: Homolog of GI Number: 50929523 NR Desc: OSJNBa0043A12.26
  misc_feature: Homolog of GI Number: 38604042 NR Desc: At2g15280
  misc_feature: Homolog of GI Number: 52076447 NR Desc: putative 24 kDa seed maturation protein
  misc_feature: Homolog of GI Number: 50251960 NR Desc: putative 24 kDa seed maturation protein
  misc_feature: Homolog of GI Number: 78714222 NR Desc: reticulon
  misc_feature: Homolog of GI Number: 34904202 NR Desc: P0492F05.25
  misc_feature: Homolog of GI Number: 62865747 NR Desc: m
  misc_feature: Homolog of GI Number: 30681227 NR Desc: reticulon family protein
  misc_feature: Homolog of GI Number: 50923537 NR Desc: OSJNBa0016N04.6
MAGTHHRPLHALLGGGAVADLLLWRRRNASAAAVAGATLVWFLFERAGYSLASVLSNALLLLVVILFFWAKSASLLNRPLPPVPNLEVSDVVIEKAVGRALVWINKVLAVAHDIAIKRDRTVFIQVIMALWVVSCIGMIFNFFTLIYIGVLLALLIPPVYERHQDVIDEKVGLSHSIQSRHLNTVVSKTGQPPKQKKAE

SEQ ID NO: 3685 - DNA, 1210 bp, Triticum aestivum
  misc_feature: Ceres CLONE ID no. 769849
  misc_feature: Ceres CDNA ID no. 40351339
  CDS (187)..(939): REFERENCED BY SEQ ID NO: 3686
acgattccatccacacatcaacacatggctccgccgaacagatcgttttcgccagagctatattgcctacagcgatcctcaccctcgcatcacttgaataactgcacgtggtgggcaggcgaggccgactcgtgatctgatcgggcgacaagagaatatcgctgtgcttgttctctttcgcggcgcatgtggccttgcccgcgagcgagcgcgacggacggacggacggacggacgccggcgatcacagtcacatggtcacatggaggatgacggaatggatgtgaccacatgctgttatcctattattaatggggtgttgccacgggattgccacaactctcgcggggagcaggggatgtgcgtcgtcggggccatcaacaactacacggagcagctctacacctacggggactcccccaagagttcgtcgtacaacctgacggagagcctcatgttcctggcgcacttcgtgggggacgtgcaccagccgctgcacgtcggctacgaggacgacgagggcggcaacaccatcacggtgcactggtaccacaggaaggccaacctccaccacgtgtgggacgtgagcatcatcgacacggtgatgaaggacttctacaacaagagcctcgacaccatggtggccgccctgcagacgaacctcaccgagggatggtctgacgatgtcggtcactgggagaattgcgccaacaagaaggcgacctgcgcaaacgactacgcgatcgagagcataagtctgtcgtgcaactacgcctacaaagatgtggtgcagaacatcaccctaggagatgattattacttcacccgctacccggttgtggagaagagattggcgcaggccggcgtcagactggcgctgatactcaaccgtatatttgacaagaaagaagctgatactatgccgttatacgtgcagtagaatagctatacttgtacaaaaggtgtatatatacgggctggacaaaattcggtattgtagctgccactgccacgccgtttgatcaatttccacttcaataggtttaccattatgtaatataaagagtcacgcaaccttggcacggctttcagaaattcattagttgtaaagttgcaatacaaaccctcttattagtctatttgcttgaacaataaacaaatccacaagtgcagtttaaagcgatgttttagtttcaaaaaaaaaaaaaaaa

SEQ ID NO: 3686 - protein, 250 aa, Triticum aestivum
  misc_feature: Ceres CLONE ID no. 769849
  misc_feature: Ceres CDNA ID no. 40351339
  misc_feature (20)..(238): Pfam Name: S1 PFAM Desc: S1/P1 Nuclease
MWPCPRASATDGRTDGRRRSQSHGHMEDDGMDVTTCCYPIINGVLPRDCHNSRGEQGMCVVGAINNYTEQLYTYGDSPKSSSYNLTESLMFLAHFVGDVHQPLHVGYEDDEGGNTITVHWYHRKANLHHVWDVSIIDTVMKDFYNKSLDTMVAALQTNLTEGWSDDVGHWENCANKKATCANDYAIESISLSCNYAYKDVVQNITLGDDYYFTRYPVVEKRLAQAGVRLALILNRIFDKKEADTMPLYVQ

SEQ ID NO: 3687 - DNA, 1861 bp, Triticum aestivum
  misc_feature: Ceres CLONE ID no. 770021
  misc_feature: Ceres CDNA ID no. 25402067
  CDS (369)..(1514): REFERENCED BY SEQ ID NO: 3688
tctctgccgtcacatcccagattcaccccttctcctcgttgctttcagccggcttgccctcctccctccccagtctcccctcgtcgccagccccgccgccgcagccgcagccgccggtaccccaccaccccgagagaaggaggtcgtctcctccgtcacccctccgtcctctcctccgctgggctcgcggggagcgaagatccgcccggacgcggctcctcttgctgatttcgggggttgttctcttgccgcggcgagtttataggatgatgagctaagaaggtatagctcgtgcaagccgccgcgcctttgttgtttctgataaaccgacgagcaggcgagagtcttgcttgaggtggtagtgagagatggatgcagtgtccgaggttgccgatgccatgggtgcattgggcgttgacaatggggcgagccagaaatttctgcccaaagacggtccagacagcgaggagttggccgatgtggcgctttcgggcgagagtgaggtgatcaatccatctgaagaggtgggtggtgaagccacctcgccatcggaggacataaagtcgcaaccggaggacataaaggcccgtgttcccaagggaagccaaagccgttcccctaaggttactaaatcacagcgccagagcccacggagcggcgataagagtcaagctaagaaaaacactccgagttctccgtccactaaggcgcccattgcacgagtgtctgatccagatttagttgatagctcttcaagcaatggtgatgctgatgttaagaaaaaggcggagaagagcaattcccgaccagttgctaaggagagcttgtcgctcgaggattcaaaggagaagaggaaaactcagaaagcatctaaccaacgtgttgtcaaaaacgatgaagaatctaattgtgaaagagtaaagcctcagaaggtcggcagcaccccttcatatggatttgccttcaaatgcaacgagagagctgaaaaaagaagggagttctactcgaagctcgaggagaagatccatgcacaggaattggagaaaaacaacatgcaggcaaaatcaaaggaaatggaagaagctgaactcagacagctacggaaaagtttgaatttcaaggcagcaccgatgcccagcttttataaggaaccaccagctcccaaagttgagttgaagaaggtccctaccaccagacctcgatcaccaaagcttggtcgctcaaagaacacaacctcagcaggcacagcagtaagtaccaatccttcgagccgcccagttcgtctgagcctcgaccaaagggcctcccaaaacagccccaaggcagcacctgctccgaagaagtcccaacggaaatctctccccaaattgccgtcagagcagacaggttctgttgacattgcaacttctatatcttctgcagaacagctagaaattagcaagtcaactgcagatcccatccggacgccaatccgtgctcaagtcactccagacgaccatgtgctcaatgcatagaaaacggtcgagtccagtctttcggaaagctgagagtcatgcctcagcgtcccatgtctgcatttttgttatttgggtagtaaacttgtggctggtatcatgtgcttgaattagtgtaatcacctggagtttgaagcatggcaagcagccaacgtactgtttatcttctcagtttgtgttgtttttcaaacagtacaagggagtggtgttatttgtagttagtaacatttgcatatgactaccttgtatttccaggtcgcaagacttttccccgcatgcgttttcgcttgtcttctttaccgcaaaatttgcggcaatctgtgatgaacttggcaaaaaaaaaaaaa

SEQ ID NO: 3688 - protein, 381 aa, Triticum aestivum
  misc_feature: Ceres CLONE ID no. 770021
  misc_feature: Ceres CDNA ID no. 25402067
  misc_feature (199)..(255): Pfam Name: TPX2 PFAM Desc: Targeting protein for Xklp2
  misc_feature: Homolog of GI Number: 51091378 NR Desc: putative BRI1
  misc_feature: Homolog of GI Number: 50906049 NR Desc: putative BRI1
  misc_feature: Homolog of GI Number: 42733498 NR Desc: BRI1
  misc_feature: Homolog of GI Number: 51091379 NR Desc: BRI1
  misc_feature: Homolog of GI Number: 51091380 NR Desc: BRI1
  misc_feature: Homolog of GI Number: 77551547 NR Desc: Targeting protein for Xklp2
  misc_feature: Homolog of GI Number: 32395575 NR Desc: seed specific protein Bn15D14A
  misc_feature: Homolog of GI Number: 50934761 NR Desc: putative seed specific protein
MDAVSEVADAMGALGVDNGASQKFLPKDGPDSEELADVALSGESEVINPSEEVGGEATSPSEDIKSQPEDIKARVPKGSQSRSPKVTKSQRQSPRSGDKSQAKKNTPSSPSTKAPIARVSDPDLVDSSSSNGDADVKKKAEKSNSRPVAKESLSLEDSKEKRKTQKASNQRVVKNDEESNCERVKPQKVGSTPSYGFAFKCNERAEKRREFYSKLEEKIHAQELEKNNMQAKSKEMEEAELRQLRKSLNFKAAPMPSFYKEPPAPKVELKKVPTTRPRSPKLGRSKNTTSAGTAVSTNPSSRPVRLSLDQRASQNSPKAAPAPKKSQRKSLPKLPSEQTGSVDIATSISSAEQLEISKSTADPIRTPIRAQVTPDDHVLNA

SEQ ID NO: 3689 - DNA, 1470 bp, Triticum aestivum
  misc_feature: Ceres CLONE ID no. 770600
  misc_feature: Ceres CDNA ID no. 40041318
  CDS (206)..(1123): REFERENCED BY SEQ ID NO: 3690
gaatcatctcctctctgcctccctcgacccacttcggcatctgccgggccgggatcgataccgccgccaccgcataaataccgcctcccctgccactgccactccccctctcttctcctcctctcctcccgtggcctctgcctgacaacgctgggcggaattggtcggctgagcctgagagagagagagagagagagaaagaaagatgatgaagcaggagtcgtggatggaggtgctgccggtgccgccggcgccctacttcgccggccaggcaggcggctggttcttgcagcaggaccagcggggcaccggcggcggcggcggggcgtggtcgccgcaggagaacaagctcttcgaggaggcactcgctcgggtcgacggggacgcgccggaccggtgggagcgggtggcggcgctgctgcccggcaagacggtggccgacgtcatgcggcagtacgacgacctcgagaacgacgtctgcttcatcgaggcggggctcgtccccttcccccactacaacgccaacgccggcgccccggcctccgggttcaccctcgactgggacggcggcggcgacctggcgttcaagcgctcctgctacatggcggcgggcggcaacggcaagcgcgggcgcggcgcggaccaggagcgcaagaagggcgtgccatggacggaggaggagcacaagctgttcttgatgggcctgaagaagtacgggcgaggcgactggcggaacatctcgcgcaactacgtgacgagccggacgccgacgcaggtggccagccacgcgcagaagtacttcatccgcctcaactccggcggcaaggacaagcgccgctccagcatccacgacatcaccaccgtcaacattccggacgacgaccacgccagcaacaccaacccctcgccgtcgccgccctccgcgctcaccgccacctcctccgccccggagcagttcggcgcgctcgtcgacagcaagccgccgccgcctctcggcgggaaccaccgcttcatgccggcccatctgtacggcagcgtgaagctggaggccagcaataacggctaccacggcgactctgttctgatgcagatgcaatgcggccagctccagcctctcggttgaccaggggctccttggagcagcagcagcccagccgccatcggagaaagctgtctcgtcctcgagcgtgcacgaggagggaggggagaaccacaccacatcgcacgtgctcttggtcagcgagcagagatcatccatgcaggagcagtacactggacggacggacggacggacggagagcgaggatgagatgaggatgagcggcatggcagcaggatggagacggcgtttggcctctgtgtacataacaccacgccgaccgtgaaataattagcaatattctattaaaaaaaaaaaaaaaaaaaaaaaaaaaaaaaaaaaaaaaaaaaaaaaaaaaaaaaaaaaaaaaa

SEQ ID NO: 3690 - protein, 305 aa, Triticum aestivum
  misc_feature: Ceres CLONE ID no. 770600
  misc_feature: Ceres CDNA ID no. 40041318
  misc_feature (152)..(199): Pfam Name: Myb_DNA PFAM Desc: Myb
  misc_feature: Homolog of GI Number: 56784263 NR Desc: putative MYB transcription factor
  misc_feature: Homolog of GI Number: 34908386 NR Desc: P0529E05.19
  misc_feature: Homolog of GI Number: 34895714 NR Desc: putative myb
  misc_feature: Homolog of GI Number: 55770209 NR Desc: putative MYB
  misc_feature: Homolog of GI Number: 51557078 NR Desc: MYB transcription factor
  misc_feature: Homolog of GI Number: 18874263 NR Desc: MYB
  misc_feature: Homolog of GI Number: 3335378 NR Desc: putative MYB family transcription factor
  misc_feature: Homolog of GI Number: 29824293 NR Desc: putative MYB family transcription factor
  misc_feature: Homolog of GI Number: 18874265 NR Desc: MYB
  misc_feature: Homolog of GI Number: 56605378 NR Desc: putative MYB transcription factor
MMKQESWMEVLPVPPAPYFAGQAGGWFLQQDQRGTGGGGGAWSPQENKLFEEALARVDGDAPDRWERVAALLPGKTVADVMRQYDDLENDVCFIEAGLVPFPHYNANAGAPASGFTLDWDGGGDLAFKRSCYMAAGGNGKRGRGADQERKKGVPWTEEEHKLFLMGLKKYGRGDWRNISRNYVTSRTPTQVASHAQKYFIRLNSGGKDKRRSSIHDITTVNIPDDDHASNTNPSPSPPSALTATSSAPEQFGALVDSKPPPPLGGNHRFMPAHLYGSVKLEASNNGYHGDSVLMQMQCGQLQPLG

SEQ ID NO: 3691 - DNA, 1764 bp, Triticum aestivum
  misc_feature: Ceres CLONE ID no. 770990
  misc_feature: Ceres CDNA ID no. 40041319
  CDS (96)..(1487): REFERENCED BY SEQ ID NO: 3692
acaaacctagcagcagcaaacacaccacgcaccattgaccaccttctcaccctccttctcgagaattagctgagagtcatcctgaggcagtggtaatggcgggcccagcggcgtcgttgaggttcacggtgaggaggaaggcggccgagctggtgacgccggcggggccgacgccccgggagctgaagcggctctcggacatcgatgaccaggacggtctgcggttccacatccccgtcatccagttctaccggcgcgacgcgtccatgggcggcagggacccagcggcagtggtccgggacgccgtggccagggcgctcgtgcactactacccgttcgccggccggctgagggagctcgaagggcgcaagctcgccgtcgactgcaccggcgagggcgtgctgttcatcgaggccgacgccgacgtgcgtctggagcacttcggcgacgccctgcagccgcccttcccgggactcgaggagctcatcttcgacgtccccgggtcgtccgaagtcctcggcactccactcctcctcttccaggtgacacgcctggcgtgtggaggcttcatcctggcggtgcggctgatgcacacgatggcggacgcgcaggggctggtgcagttcctggccgccgtggcggaactggcgcgaggcgcggcggcgccgtcggtgcggccggtgtgggagcgggagctgctggaggcgcggaacccgccgcgccctggcttcgcgcaccgggagtacgacgaggtgccggacaccaagggcaccatcgtgccgctcgacgacatggcgcaccgctccttcttctttggggcccgggaggtcgccgccatccggtcccacctggcgccgggcctcaggaagcgcgccaccacgttcgaggtcctcacgggaagcctgtggaagtgccgtaccgtggcgctggcccccgacgctgacgaggtgatgcggatgatctgcatcgtcaacgcccgcggcggcaagcagggcggtgcgagcgctatcccggccggctactacgggaacgcgttcgccttcccggtggccgtgtcggcctccggcgacctgtgcgcgaaccccctgagctacgccgtgaagctggtgaaggaggccaagtcggaggtggacgtggagtacatgcggtcggtggcggacctgatggtgcagcgcgggcggccgcacttcacggtggtgcgcgcgtacctggcgtcggacgtgaccaaggccgggttcggcgacctggacttcgggtggggcaggccggtgtacggcgggccggcaaagggcggcgtgggcgccatccccggggtggccagcttcctgatcccgttcaagaacggcaagggcgaggacggcatcgtgatccccatgtgcctgcctgggcccgccatggacaagttcgtggaggagatgggcaagctgctgcgcccggccgtcgacgtccccgacatgttccccgccatgatcaaatctgcgctctgaatcagcgagcgcgcgtgcgctgtcccatcgtccgtttcgctgtccgtaattacgtccccggttatttgttggtgaatagtacgtaagttgttagtaagtacagtagaaatttaatccgcagtgggtgtgtggtgctgatgtgatggagcggagtgaacaaggctcgtcggatgcactgcggctgacgggcgcgcatgggttgtaacttgtaagggtgactttgtatgtgtctgtttgaataattccaatgtattgccatacaaaaaaaaaaaaaaaa

SEQ ID NO: 3692 - protein, 463 aa, Triticum aestivum
  misc_feature: Ceres CLONE ID no. 770990
  misc_feature: Ceres CDNA ID no. 40041319
  misc_feature (10)..(444): Pfam Name: Transferase PFAM Desc: Transferase family
  misc_feature: Homolog of GI Number: 56694504 NR Desc: anthraniloyal
  misc_feature: Homolog of GI Number: 22854876 NR Desc: benzoyl coenzyme A: benzyl alcohol benzoyl transferase
  misc_feature: Homolog of GI Number: 22854880 NR Desc: benzoyl coenzyme A: benzyl alcohol benzoyl transferase
  misc_feature: Homolog of GI Number: 51556912 NR Desc: benzoyl
  misc_feature: Homolog of GI Number: 1171577 NR Desc: hsr201
  misc_feature: Homolog of GI Number: 78708873 NR Desc: hypersensitivity
  misc_feature: Homolog of GI Number: 57471999 NR Desc: putative alcohol acyl
  misc_feature: Homolog of GI Number: 37535814 NR Desc: putative hypersensitivity
  misc_feature: Homolog of GI Number: 41323261 NR Desc: alcohol acyl transferase
  misc_feature: Homolog of GI Number: 77555596 NR Desc: Transferase family
  misc_feature: Useful for delaying flowering time
  misc_feature: Useful for increasing chlorophyll and photosynthetic capacity
  misc_feature: Useful for making ornamental plants with modified flowers
  misc_feature: Useful for making ornamental plants with modified leaves
  misc_feature: Useful for making plants with increased biomass
  misc_feature: Useful for making plants with increased biomass and foliage
  misc_feature: Useful for making plants with increased biomass and foliage
  misc_feature: Useful for making shorter plants
  misc_feature: Useful for modifying plant architecture
  misc_feature: Useful for sterility
MAGPAASLRFTVRRKAAELVTPAGPTPRELKRLSDIDDQDGLRFHIPVIQFYRRDASMGGRDPAAVVRDAVARALVHYYPFAGRLRELEGRKLAVDCTGEGVLFIEADADVRLEHFGDALQPPFPGLEELIFDVPGSSEVLGTPLLLFQVTRLACGGFILAVRLMHTMADAQGLVQFLAAVAELARGAAAPSVRPVWERELLEARNPPRPGFAHREYDEVPDTKGTIVPLDDMAHRSFFFGAREVAAIRSHLAPGLRKRATTFEVLTGSLWKCRTVALAPDADEVMRMICIVNARGGKQGGASAIPAGYYGNAFAFPVAVSASGDLCANPLSYAVKLVKEAKSEVDVEYMRSVADLMVQRGRPHFTVVRAYLASDVTKAGFGDLDFGWGRPVYGGPAKGGVGAIPGVASFLIPFKNGKGEDGIVIPMCLPGPAMDKFVEEMGKLLRPAVDVPDMFPAMIKSAL

SEQ ID NO: 3693 - DNA, 794 bp, Triticum aestivum
  misc_feature: Ceres CLONE ID no. 771203
  misc_feature: Ceres CDNA ID no. 35383287
  CDS (69)..(494): REFERENCED BY SEQ ID NO: 3694
gagaaggaaggaggcaacgaagcgaggggattccgcggagttggtggaggcgagggtttggtgcggccatggagaacctggcgatgctgtgggggatcatcgggccgggcgtcgccggcgcgctcttcggcgccggctggtggttctgggtcgacgccgttgtctgcagcgccgtccaggtctccttcatccactacctgcccgggatcttcgcgtcgctggccgcgctcatgttcaattgcgtcgacaaggatgccatcgggaacgactactactcgtcctacggggatgattccgagtggagggtgaagctctggcttttcgtcgcctatgtagtttctttcatctgcctggctagatcagtgggtttgttggtgcaagacgccctgacagacaagggcccttctgtgtggactggtgttgccggcgtcctgcaatgcgtttttgtgttgataagtgggttgacatactggacgtgccacaccgaggactaggaagggtcaaaatgctgtgagcggactgggatggatggtaaaacttgtcgcgaagacgtctgctctactgcccgtgtgtggtcctgtgtaaattaacgttcattccagggcgcgattactgctacgataaaaaaaaaggtgggattactgagtgtctgttgtgtgcatagctgactgcttcctgaaatggatccgtagcatcagtactactacgtgtttattatcataatttgttgtgagcctgtggtgcttggtggctcgagaggttagcattgagattggataaaaaaaaaaaaaaaa

SEQ ID NO: 3694 - protein, 141 aa, Triticum aestivum
  misc_feature: Ceres CLONE ID no. 771203
  misc_feature: Ceres CDNA ID no. 35383287
  misc_feature (1)..(141): Pfam Name: UPF0220 PFAM Desc: Uncharacterised protein family
  misc_feature: Homolog of GI Number: 8778790 NR Desc: T32E20.29
  misc_feature: Homolog of GI Number: 54641349 NR Desc: GA13431
  misc_feature: Homolog of GI Number: 24657484 NR Desc: CG15012
MENLAMLWGIIGPGVAGALFGAGWWFWVDAVVCSAVQVSFIHYLPGIFASLAALMFNCVDKDAIGNDYYSSYGDDSEWRVKLWLFVAYVVSFICLARSVGLLVQDALTDKGPSVWTGVAGVLQCVFVLISGLTYWTCHTED

SEQ ID NO: 3695 - DNA, 930 bp, Triticum aestivum
  misc_feature: Ceres CLONE ID no. 771318
  misc_feature: Ceres CDNA ID no. 25891244
  CDS (219)..(587): REFERENCED BY SEQ ID NO: 3696
aagaatatgattcggcccacattcgtgctcgctcgatccacagaaaacgcagcgctaggtttctcctcacacgcgcccgagctcccactccgccgcccgccgcccgccgccgacgccggtctccgtcgcctccctctactccgacccgacccgactctgcaccggctcttcttccctgcttctcgggaggaaatactgtgtgagccaagagctcaaagatgaacaaggggaagatctttaagttagccaagggattccgaggaagggctaaaaactgcataagaatcgccagggagcgtgtagaaaaagcattgcaatattcttacagggatcggcgcaacaagaaaagggacatgcggtctctctggatcgagcgcatcaatgctggtacacgactccatggggtgaactatggcaacttcatgcatggactgatgaaggagaatgtccaactcaacaggaaggtactttcagagctgtcgatgcatgagccatacagcttcaaggctcttgttgatgtatctcgcactgcgttccctgggaacaggccggctgccaagaaggaaggactagcaagtattctatgaacaattcagtccgccggttgaaacctaccaaagccttgtgatgaactcatgtgatgggggtatgtatcacatcatgttttagtccatattattcggtctgttggcctgttgaacacttctttctttggataatgtgctctgtttaccgtcaataaatccagtagagcagaatgtttttaaaccatgtaaaagaagagatctggtctttttgggcagaaagtttttcttgcttttatctgaagtcatgtagtccttgtgaagatatgctggataggccacaccatcttgttatggccatccttgaatagctactgcctgttgatttgtaaaaaaaaaaaaaaaa

SEQ ID NO: 3696 - protein, 122 aa, Triticum aestivum
  misc_feature: Ceres CLONE ID no. 771318
  misc_feature: Ceres CDNA ID no. 25891244
  misc_feature (5)..(98): Pfam Name: Ribosomal_L20 PFAM Desc: Ribosomal protein L20
  misc_feature: Homolog of GI Number: 52353395 NR Desc: putative 50S ribosomal protein L20
  misc_feature: Homolog of GI Number: 34910194 NR Desc: OSJNBb0036G09.15
  misc_feature: Homolog of GI Number: 21554397 NR Desc: ribosomal protein L20
  misc_feature: Homolog of GI Number: 46308931 NR Desc: COG0292: Ribosomal protein L20
  misc_feature: Homolog of GI Number: 68171433 NR Desc: Ribosomal protein L20
  misc_feature: Homolog of GI Number: 48833996 NR Desc: COG0292: Ribosomal protein L20
  misc_feature: Homolog of GI Number: 68247828 NR Desc: Ribosomal protein L20
  misc_feature: Homolog of GI Number: 57238868 NR Desc: 50S ribosomal protein L20
  misc_feature: Homolog of GI Number: 45682620 NR Desc: COG0292: Ribosomal protein L20
  misc_feature: Homolog of GI Number: 68191162 NR Desc: Ribosomal protein L20
MNKGKIFKLAKGFRGRAKNCIRIARERVEKALQYSYRDRRNKKRDMRSLWIERINAGTRLHGVNYGNFMHGLMKENVQLNRKVLSELSMHEPYSFKALVDVSRTAFPGNRPAAKKEGLASIL

SEQ ID NO: 3697 - DNA, 1497 bp, Triticum aestivum
  misc_feature: Ceres CLONE ID no. 771679
  misc_feature: Ceres CDNA ID no. 25446081
  CDS (96)..(1190): REFERENCED BY SEQ ID NO: 3698
cttccacttgcacacaacattcttcctcgcaccactcagctagcagctaccaaacacaagctcgcaagctcacgagtacgtgcgaagcactgatcatgggagatgcgctttgcgatcagctcctcgtggacatcgacggcgagttccagctccccaccgacgccgaagacctattcagcatcctcgagacgtgggacgactgcgtgaacggcgccgccacagcgctgagccccaccgccggcgccagcagccgtggtgggctgctgggtggctctgcgtcggggaacaaaggcagcaagcggcgagcacggcaggacgattgtgacggcacagcgcagacgcataagaggcagaagtgctcgctggaggagggaggcggcgcggcgccgaagacggcccacatcacagtggagcgcaaccgccggaagcagatgaacgagcacctgaccgtgctgcggtcgctcatgccctgcttctatgtcaagcgtggtgaccaagcatccatcataggaggagtggtggactacatcaaggagttgcagcaagtgaagcagtcgctggaggcgaagaagcagcgcaaggcctacaccgagcacgtcctcagcccgcggccgccgccgtcgtcctacagcccacgcctcccgctcagcccgctccacaaatccacgccgccgcttagcccactgctcaggtccactccgccgctcagccctcgcctcgccgtcccgatcagccctgctaggacgccgccgacgccaggcagcccctacaagctccggcccctgccgccgccgatctccggctccacctatgtgtccccggcgatgacgcctacaggctacgatgcggcctcctcctacctcccctcgctcgacgccatcgccgccgagctgtcggtgtacgccaacaggcaggcgctacagctgcccccgaccgacccactccccgacgtgagggtggagttcgccggcgcgaacctggtgctgaagacggtgtcgcaccgcgcgccggggcaggcggtgaagatcatcgccgcgctcgagtcacgggcgccggcgctggagatcctccacgccaagatcagcaccatcgacgacaccgacgtcaacgccttcaccgtcaagattggaatcgagtgctcgctcagcgcggaagagctagtgcaagagattcagcaaacgttctcgtaaaggtcccgcttcgagttgaactctttcttgtgttcctaagagggctgaaactcgtcgaattgaacagtgaagatgcatgtaatgttacgcatgcttaggtttgtgcatgtgtgtgtgtctagtaagatcgaaactgaggatgagctgacgagccgggcacttgaatggtcgtagtacaggtggtactctacctatagctaactagctagatcgatcgttttttgtgctacctgcgtacgtatgtaactgcagtcgttgaatggtacgtgcatttattttcacaactcatctaaaaaaaaaaaaaaaa

SEQ ID NO: 3698 - protein, 252 aa, Triticum aestivum
  misc_feature: Ceres CLONE ID no. 771679
  misc_feature: Ceres CDNA ID no. 25446081
  misc_feature: Useful for making plants with modulated growth and phenotype characteristics
  misc_feature: The sequence is a functional homolog of  SEQ ID NO 1503 in the  10/374,780 US patent application
  misc_feature (1)..(37): Pfam Name: HLH PFAM Desc: Helix
  misc_feature: Homolog of GI Number: 52077082 NR Desc: basic helix
  misc_feature: Homolog of GI Number: 50252033 NR Desc: basic helix
  misc_feature: Homolog of GI Number: 6862916 NR Desc: putative helix
  misc_feature: Homolog of GI Number: 30687365 NR Desc: basic helix
  misc_feature: Homolog of GI Number: 50911671 NR Desc: putative basic
  misc_feature: Homolog of GI Number: 50928385 NR Desc: OSJNBa0086O06.20
  misc_feature: Homolog of GI Number: 50946977 NR Desc: putative basic
  misc_feature: Homolog of GI Number: 20127054 NR Desc: putative bHLH transcription factor
  misc_feature: Homolog of GI Number: 50900332 NR Desc: helix
  misc_feature: Homolog of GI Number: 18395124 NR Desc: basic helix
MNEHLTVLRSLMPCFYVKRGDQASIIGGVVDYIKELQQVKQSLEAKKQRKAYTEHVLSPRPPPSSYSPRLPLSPLHKSTPPLSPLLRSTPPLSPRLAVPISPARTPPTPGSPYKLRPLPPPISGSTYVSPAMTPTGYDAASSYLPSLDAIAAELSVYANRQALQLPPTDPLPDVRVEFAGANLVLKTVSHRAPGQAVKIIAALESRAPALEILHAKISTIDDTDVNAFTVKIGIECSLSAEELVQEIQQTFS

SEQ ID NO: 3699 - DNA, 1208 bp, Triticum aestivum
  misc_feature: Ceres CLONE ID no. 771944
  misc_feature: Ceres CDNA ID no. 36707667
  CDS (38)..(1042): REFERENCED BY SEQ ID NO: 3700
aaaccctagagagagagatgagagagactcatcttccatggccggcggcgattcttctcccgtggcggcggcggctgcggcgagaaagtgggagtgggaccaagaagagtatcggtgcgagtcgccggagtattcattggacccgcgatacagcgagtacgaccccaagcagggtcgtttcatatacgtccgctacttcttcaacggcaaactcgacctggacgaggagtcacctgttggtcccatgcgacatactggtaaaatcttcaaagagggattccggctcaaaaattcagtcaatgttgtctccatcaagattgtttcctctgactatggctacccactctatgtctacggtaccatcatagccagggatagtctggatagaaaatgtgtctatatattccggcgcgaccaggatgattgccagctcatcagctcaaaggatgattcattgattttgactggacccaagagaggattcatggtatgcgatgatatattcttcgaaatcaatctgaaggtgaaggatgtgcatgggatgactgtcgatgatgatagactcagtaaaggcctgatggaggtggatgctatccgcaggctggaatatagtcccagatatgtggttgatacggaaacacttgtcagcatgcacagcatattagatttaaactatacattcattaggaggtcggtggagggcactgttgagatcaagaaccttgagggacctgatgaattccatgggaagattgttgcttccactaccagcattccatgcgacattgtgctacatgatagcaaagtgagtggtgcgctaactgcgggtgaaaatggagtcctacaaatggcgcgacgcgtagtaggagtctctgtggatgaggtgctggtgttgactgttgctgctgctgtcggtgatgatgagttatctgcccgcactgttcagtttactccaaggcgcaatggttacgatgatgagagtatcacctgcggggactacaagatgcttctgaaggtcacttggtcgattgtgtatttctgatgtaactcttagttattcagtcacggcagtctgccagattctctagatacttaggatgcaatgaagtttcattatgggaaccagttatggtacatgctaaaacaatatatgtattccagcgtgtattgtatctattctgactcttctcccaaaaaaaaaaaaaaaa

SEQ ID NO: 3700 - protein, 334 aa, Triticum aestivum
  misc_feature: Ceres CLONE ID no. 771944
  misc_feature: Ceres CDNA ID no. 36707667
  misc_feature: Homolog of GI Number: 58531987 NR Desc: OSJNBb0003B01.20
  misc_feature: Homolog of GI Number: 50902240 NR Desc: P0408G07.8
  misc_feature: Homolog of GI Number: 5777618 NR Desc: CAA30376.1 protein
  misc_feature: Homolog of GI Number: 21913313 NR Desc: csAtPR5
MAGGDSSPVAAAAAARKWEWDQEEYRCESPEYSLDPRYSEYDPKQGRFIYVRYFFNGKLDLDEESPVGPMRHTGKIFKEGFRLKNSVNVVSIKIVSSDYGYPLYVYGTIIARDSLDRKCVYIFRRDQDDCQLISSKDDSLILTGPKRGFMVCDDIFFEINLKVKDVHGMTVDDDRLSKGLMEVDAIRRLEYSPRYVVDTETLVSMHSILDLNYTFIRRSVEGTVEIKNLEGPDEFHGKIVASTTSIPCDIVLHDSKVSGALTAGENGVLQMARRVVGVSVDEVLVLTVAAAVGDDELSARTVQFTPRRNGYDDESITCGDYKMLLKVTWSIVYF

SEQ ID NO: 3701 - DNA, 1257 bp, Triticum aestivum
  misc_feature: Ceres CLONE ID no. 772106
  misc_feature: Ceres CDNA ID no. 40041320
  CDS (70)..(1110): REFERENCED BY SEQ ID NO: 3702
aaaattatctgttcgtcggcgtcccttcaaggcttcaacaacccttcggtagggttccggcgactccggatggccggtcgccaccgtaacccgctgccttcttccttctcccgcggcgccggtgccggaaaccacccgcaccctcctccgccccatcaccctcatctcccgccttaccacctcgacgaattccgcgagccgccgcgcctccccccgcaccacctcgatgacttccgagacccggctcgcctgccaccaggccaccccgacagcctccgcgagcatcctccgccgccgcgccaccacttggcgggccacggcggagggaccctgcccccagcatcgcacatggccgcggcgctggaggagcgtatcggcgcggagattgaggaggcgcacgcgctgctcggacagaaccagcgactctctgcgacgcacgtggcgctcgtgcaggaggtctccgccgtgcggcacgagcttggccacaccgctcgagccatcggcgccgcccagcaagagggagatctccgtattcgcgaggtctatgagaggttaatgaaaatggaagcagagctccgagcagtagaggagatgagagcggaacttgcacatgttcgtatggacattcaacagctgggtgcagcaagacaggaactcatgggtcagatccagggatatacacaagatttggctcgttcagcagtagagttgcagcaggtggctgcagtgaaagctgagacccaagaactcaggcatgaaacacagcatttaagatccagtattgagcttgagaagaaaggatatgcagagagttatgagcagggacaagagatgcagaagaaattggtctcagttgcttctgaagtggagaaacttcgtgctgaggttgctaatgctgagaagagatcacgagctgctgtatctgcaggcaatcaaggttacgctggaagctatggaaatcctaatgccaattatgctgcaaatccttacaatgctggatacagcatgactcaagcaaatgctactgattctggttctcagtatggggctggggcagcgcatagttcctggggcgcctacgacatgcaaagagctccaggacggagatgaataccgacatcctcctcccttttcttttattattaaatctggtcctgttagcgaagtaacaaacggagatttctggcacaacctgatttctgtgcaatgttaatttatgacgagtcagatatgccttgtgtaaaaaaaaaaaaaaaa

SEQ ID NO: 3702 - protein, 346 aa, Triticum aestivum
  misc_feature: Ceres CLONE ID no. 772106
  misc_feature: Ceres CDNA ID no. 40041320
  misc_feature: Homolog of GI Number: 50937587 NR Desc: myosin
  misc_feature: Homolog of GI Number: 12323180 NR Desc: myosin
  misc_feature: Homolog of GI Number: 50925177 NR Desc: OSJNBa0044K18.21
  misc_feature: Homolog of GI Number: 47678879 NR Desc: transglutaminase
  misc_feature: Homolog of GI Number: 47678875 NR Desc: transglutaminase
  misc_feature: Homolog of GI Number: 77691312 NR Desc: OmpA/MotB
  misc_feature: Homolog of GI Number: 50940371 NR Desc: putative pherophorin
MAGRHRNPLPSSFSRGAGAGNHPHPPPPHHPHLPPYHLDEFREPPRLPPHHLDDFRDPARLPPGHPDSLREHPPPPRHHLAGHGGGTLPPASHMAAALEERIGAEIEEAHALLGQNQRLSATHVALVQEVSAVRHELGHTARAIGAAQQEGDLRIREVYERLMKMEAELRAVEEMRAELAHVRMDIQQLGAARQELMGQIQGYTQDLARSAVELQQVAAVKAETQELRHETQHLRSSIELEKKGYAESYEQGQEMQKKLVSVASEVEKLRAEVANAEKRSRAAVSAGNQGYAGSYGNPNANYAANPYNAGYSMTQANATDSGSQYGAGAAHSSWGAYDMQRAPGRR

SEQ ID NO: 3703 - DNA, 770 bp, Triticum aestivum
  misc_feature: Ceres CLONE ID no. 772203
  misc_feature: Ceres CDNA ID no. 35383288
  CDS (126)..(500): REFERENCED BY SEQ ID NO: 3704
tccgcctttccctcccccattcgcgtcgcgtctccaccccacctcccctcgcctcctcctccacctccccgtgtcgcgagaaaccctcgtcccttcctcccctctcctccctcgtccctcctcccatggcggagtcgcccgagaacgccgccgcggcgcccgccgctcctcccgcccccgccccggccccggcgccggcgccgaagccgtccccgcccgccaggtccgggatcccgccgcggtacgacctcgacgccaagtgggacgcctgcctcgacctctccatccgccgcgtcgcctactcctccctcgccggcgccttcgggggcctcatcctcttccgtagcccaacaacccgctgggcatcagttgcacttggagctggtgtggggataggggctgcgttcactgaatgctcatacatattcaatggttctcctccaaagtggtcggccaatgcttcgactgttgctgctcattctgaagggggagacaattaaaacagtgtcgggcgggatgagtagcccaatcttggcggagttttggagcgtttgttgattgaacctagctgtttggtgtctgatgatatcgccacttgtcatagtatgtcctgaaagttagcgtgtgccccctcgtgaattttcttcacacattacgcggaaaccattcgtgactgcggtctgatgatatgaccctatggctccgtaagttgggtctgtcgtgaggttttatgtctggcaataaatttttggccaaaaaaaaaaaaaaaa

SEQ ID NO: 3704 - protein, 124 aa, Triticum aestivum
  misc_feature: Ceres CLONE ID no. 772203
  misc_feature: Ceres CDNA ID no. 35383288
  misc_feature: Homolog of GI Number: 6523547 NR Desc: hydroxyproline
  misc_feature: Homolog of GI Number: 21992 NR Desc: extensin
  misc_feature: Homolog of GI Number: 12018147 NR Desc: vegetative cell wall protein gp1
  misc_feature: Homolog of GI Number: 28279905 NR Desc: Wiskott
  misc_feature: Homolog of GI Number: 45433535 NR Desc: Wiskott
  misc_feature: Homolog of GI Number: 488731 NR Desc: chitinase
  misc_feature: Homolog of GI Number: 56207762 NR Desc: Wiskott
MAESPENAAAAPAAPPAPAPAPAPAPKPSPPARSGIPPRYDLDAKWDACLDLSIRRVAYSSLAGAFGGLILFRSPTTRWASVALGAGVGIGAAFTECSYIFNGSPPKWSANASTVAAHSEGGDN

SEQ ID NO: 3705 - DNA, 647 bp, Triticum aestivum
  misc_feature: Ceres CLONE ID no. 772244
  misc_feature: Ceres CDNA ID no. 36516380
  CDS (66)..(512): REFERENCED BY SEQ ID NO: 3706
ttagacctactaaaccctcctagctcactctcgccagcactagctagctagcttagccggcagcaatggcgtccaggacctcggcggcgtgcctgctggcgctgctggtggccagcacgttcctggccggcgacgcgtgcaacagctgcaagcaccacacccctcccccggcgtccccgtccccgcccccgccagcgcctgctaccccgacgccatgcccgccaccgccgtcatcgggcggcacggggtactgccccacggacacactgaagctgggcgcctgcgccaacgtgctgggcctagtgagcgcgggcgtcggcaccgcccccagcggcggcggcgacaagtgctgcagcctcctcggcggcctggccgaccttgaggccgccgtgtgcctctgcaccgcgctcaaggccaacgtcctcggcatcgtcctcaacatccccatcaagctcagcctcctcctcaactactgcggcaagaccgcccccaagggcttccagtgcgcttaattcatcagcaaatcgtccatcactcagcgcatgcatgcatcgtcagtgcatccgttattttagttgttcattccaaatttgatttcatcatgcaataatatatcggtcggttgttaagtaaaaaaaaaaaaaaaa

SEQ ID NO: 3706 - protein, 148 aa, Triticum aestivum
  misc_feature: Ceres CLONE ID no. 772244
  misc_feature: Ceres CDNA ID no. 36516380
  misc_feature (63)..(147): Pfam Name: Tryp_alpha_amyl PFAM Desc: Protease inhibitor/seed storage/LTP family
  misc_feature: Homolog of GI Number: 4240033 NR Desc: ZmGR1a
  misc_feature: Homolog of GI Number: 58578282 NR Desc: extensin
  misc_feature: Homolog of GI Number: 45758393 NR Desc: HyPRP
  misc_feature: Homolog of GI Number: 50927845 NR Desc: OSJNBa0010H02.24
  misc_feature: Homolog of GI Number: 50911525 NR Desc: root
  misc_feature: Homolog of GI Number: 4240035 NR Desc: ZmGR1b
  misc_feature: Homolog of GI Number: 508304 NR Desc: bimodular protein
  misc_feature: Homolog of GI Number: 60542797 NR Desc: arachidonic acid
  misc_feature: Homolog of GI Number: 37536718 NR Desc: putative lipid transfer protein
  misc_feature: Homolog of GI Number: 34365599 NR Desc: At1g62510
MASRTSAACLLALLVASTFLAGDACNSCKHHTPPPASPSPPPPAPATPTPCPPPPSSGGTGYCPTDTLKLGACANVLGLVSAGVGTAPSGGGDKCCSLLGGLADLEAAVCLCTALKANVLGIVLNIPIKLSLLLNYCGKTAPKGFQCA

SEQ ID NO: 3707 - DNA, 1255 bp, Triticum aestivum
  misc_feature: Ceres CLONE ID no. 772479
  misc_feature: Ceres CDNA ID no. 25892007
  CDS (70)..(879): REFERENCED BY SEQ ID NO: 3708
atcccacccgacccgacccccgcgcggcggccgcacccgtccccagacccaagagcgagccgaccgaagatgtccgaccaagccgccggagccgggggcggcgacgcgctgttctcgcggtgcctgctcgcgctctacgtcatcagcccggtcaccgtgttcctgctccgcttcgtctccgcgccctatggcaagctctcgcgcccggggtggggcccggccatcccggccgcgctcgcctggtgcgccatggagagccccaccctctggctcccgcccctcgtctcccccctcccgctgctgctcgccgccgccgcggcctccggctccccgctcgccgcgctcccgacggcgctctacgcgctccactacgtcaaccgcacggtcctccacccgctgcgcatcctgcgcctgcgccgcgccgcggcgcccgtgcccgttctcgtcgcagcctgcggcttcgggttcaacctcctcaacgcctacgtgcaggcccgctcctgggcgctccacgccggccgccccgcctccgccttcgcgctcgcccgctgcctcgccgggctcgccctgttcgcgtgggggatgcgggtcaacgtcgcggcggacaaggagctcctgcggctcaaggaggccgggggcgggtacaagatcccgcggggcggctggttcgacgcggtgacctgccccaactacttcggcgagatcgtggagtggctcggctactgcctggtggcctggtcgccggcgtcctgggccttcttcctctacacctgcgccaacctcatgccgagggccagggaccaccgccagtggtacctcaacaagttcggcggcgagtacccggcgtcgcgcaaggcggtcatcccgtacatctactagcctctgcaacttctgtcaccttggatcgaaggggggaaatggtgtggctgaggagaactgtagttctttttcttccctttcctagtgcctgcttgtgattgaggattgcctgattcccttcctttggaaattgaatatggtttgaagaaaatgaacttttctgaaacctcaaccacattgttctctggatcaacactgaaccatgctcatcttgaagtgatcccatgtataacctgcactcctgcagactaaaaattggacgatttttcaatagtcgggcaacttcgttagtgcagttttagttttggtagtgcagtttcagatattgagattctccatatatcatattgaatgagctcgaaaaaaaaaaaaaaaa

SEQ ID NO: 3708 - protein, 269 aa, Triticum aestivum
  misc_feature: Ceres CLONE ID no. 772479
  misc_feature: Ceres CDNA ID no. 25892007
  misc_feature (120)..(269): Pfam Name: Steroid_dh PFAM Desc: 3
  misc_feature: Homolog of GI Number: 34908346 NR Desc: putative steroid reductase DET2
  misc_feature: Homolog of GI Number: 62954889 NR Desc: 3
  misc_feature: Homolog of GI Number: 34850849 NR Desc: steroid 5alpha
  misc_feature: Homolog of GI Number: 11493760 NR Desc: putative steroid reductase
  misc_feature: Homolog of GI Number: 23476464 NR Desc: steroid 5
  misc_feature: Homolog of GI Number: 19310675 NR Desc: putative 3
  misc_feature: Homolog of GI Number: 50403823 NR Desc: 5
  misc_feature: Homolog of GI Number: 1280611 NR Desc: steroid reductase DET2
  misc_feature: Homolog of GI Number: 57335416 NR Desc: steroid 5 alpha reductase DET2
  misc_feature: Homolog of GI Number: 74003097 NR Desc:  similar to 3
MSDQAAGAGGGDALFSRCLLALYVISPVTVFLLRFVSAPYGKLSRPGWGPAIPAALAWCAMESPTLWLPPLVSPLPLLLAAAAASGSPLAALPTALYALHYVNRTVLHPLRILRLRRAAAPVPVLVAACGFGFNLLNAYVQARSWALHAGRPASAFALARCLAGLALFAWGMRVNVAADKELLRLKEAGGGYKIPRGGWFDAVTCPNYFGEIVEWLGYCLVAWSPASWAFFLYTCANLMPRARDHRQWYLNKFGGEYPASRKAVIPYIY

SEQ ID NO: 3709 - DNA, 592 bp, Triticum aestivum
  misc_feature: Ceres CLONE ID no. 772792
  misc_feature: Ceres CDNA ID no. 40351340
  CDS (17)..(406): REFERENCED BY SEQ ID NO: 3710
aacacccttcgccaaaatgcagatcttcgtcaagaccctcacggggaagaccatcaccctcgaggttgagagcagcgataccatcgacaatgtcaaggccaagatccaggacaaggaggggatcccgccggaccagcagcggctgatcttcgccggcaagcagttggaggacggccgcacccttgccgactacaacatccagaaggagtcgaccctccatctcgtcctcaggctccgcggaggcatcatcgagccatccctgcaggcgcttgcccgcaagtacaaccaggagaagatgatctgccgcaaatgctatgcgcgcctgcaccctagggctgtcaactgccgcaagaagaagtgtggccacagcaaccagctgaggcccaagaagaagatcaagaactagagtgccactagtcagtttcatgggccggttgaatccatcgcgtgtcggagtttatgctattatcgtctcgtttgtcgttgaaccttattttactttgctttcagcctcgtatcgttgtggtgataattgacagtattggtatatggtagcagacctataattttgccgttaaaaaaaaaaaaaaaa

SEQ ID NO: 3710 - protein, 129 aa, Triticum aestivum
  misc_feature: Ceres CLONE ID no. 772792
  misc_feature: Ceres CDNA ID no. 40351340
  misc_feature (1)..(74): Pfam Name: ubiquitin PFAM Desc: Ubiquitin family
  misc_feature (77)..(128): Pfam Name: Ribosomal_L40e PFAM Desc: Ribosomal L40e family
MQIFVKTLTGKTITLEVESSDTIDNVKAKIQDKEGIPPDQQRLIFAGKQLEDGRTLADYNIQKESTLHLVLRLRGGIIEPSLQALARKYNQEKMICRKCYARLHPRAVNCRKKKCGHSNQLRPKKKIKN

SEQ ID NO: 3711 - DNA, 866 bp, Triticum aestivum
  misc_feature: Ceres CLONE ID no. 772803
  misc_feature: Ceres CDNA ID no. 25891247
  CDS (175)..(732): REFERENCED BY SEQ ID NO: 3712
taaattcagaagcagcggcatctccatcaccgtcgccgtcgccgccgccgccgccgcgcctccactgagtgccgccctagcctgcgcgcctctcctcgagcctggcctccgccgtccccgtgcacgcccacgagcctcccgccaccgggcccagtcctccttcctagctccagaatgggtctcctcagcatcatcagaaaaatcaagcgcaaggaaaaggagatgcgtattctcatggtcggcctggacaactcgggtaagacgacaattgtgctcaagataaatggggaggacaccagtgtcatcagccctactcttggctttaatatcaagaccatccagtaccaaaagtactcgctgaacatatgggatgttgggggccagaagaccatccgttcgtattggaggaactactttgagcagactgacggtctagtttgggtggtggatagttccgatgtccgaaggctcgatgattgccgtgctgagctccacaatcttttgaaagaagagagactggctgggtcatcgctgttagttttcgcaaataagcaggacattcaaggcgctttgaagcctgacgagatcgccaaggttctgaatcttgaagtgatgaacaaggaccggcactggaagattgtcggctgcagcgcctacacgggcgacggcctgctccagggcttcgactggctggttcaggacatcgcctcccgcatctatgtcctcgactgaaacaaccaaactctctggacatttagccataggcatgctgctgctttggccatctcatggcatctgtatgtaatctgatcaagtttgaaccaaaccataaatgacatttttattctacaaaaaaaaaaaaaaaa

SEQ ID NO: 3712 - protein, 185 aa, Triticum aestivum
  misc_feature: Ceres CLONE ID no. 772803
  misc_feature: Ceres CDNA ID no. 25891247
  misc_feature (18)..(179): Pfam Name: Ras PFAM Desc: Ras family
  misc_feature: Homolog of GI Number: 17104667 NR Desc: putative ADP
  misc_feature: Homolog of GI Number: 66813292 NR Desc: ADP
  misc_feature: Homolog of GI Number: 68363374 NR Desc:  similar to ADP
  misc_feature: Homolog of GI Number: 53734021 NR Desc: Zgc:103658
  misc_feature: Homolog of GI Number: 74833822 NR Desc: arl_A17
  misc_feature: Homolog of GI Number: 48095928 NR Desc: similar to ADP
  misc_feature: Homolog of GI Number: 76689115 NR Desc:  similar to ADP
  misc_feature: Homolog of GI Number: 62898736 NR Desc: ADP
  misc_feature: Homolog of GI Number: 30584891 NR Desc: Homo sapiens ADP
  misc_feature: Homolog of GI Number: 21465908 NR Desc: Chain A
  misc_feature: Useful for increasing seed/fruit yield or modifying fruit content
  misc_feature: Useful for making ornamental plants with modified leaves
  misc_feature: Useful for sterility
MGLLSIIRKIKRKEKEMRILMVGLDNSGKTTIVLKINGEDTSVISPTLGFNIKTIQYQKYSLNIWDVGGQKTIRSYWRNYFEQTDGLVWVVDSSDVRRLDDCRAELHNLLKEERLAGSSLLVFANKQDIQGALKPDEIAKVLNLEVMNKDRHWKIVGCSAYTGDGLLQGFDWLVQDIASRIYVLD

SEQ ID NO: 3713 - DNA, 857 bp, Triticum aestivum
  misc_feature: Ceres CLONE ID no. 773050
  misc_feature: Ceres CDNA ID no. 29191557
  CDS (139)..(720): REFERENCED BY SEQ ID NO: 3714
aaaataagaaagccgcggggcacttccgtggttcatctcctctcctccaccaaaccttatctcgctgcctgcaccgacgacttggagcggccgcgctccgtgatccaagcacccgaagcgccggcgcagctcccctcgatggccggcgacgagcccccaacggcgacggtcgaggccccgacgacggaggcggcgtgccaggacctggtggagatcctggaggagggatcgggccggctggacatgggccggtacgtggaccacgtccgcgacctgtcggcgggcgccatcgctaccttcgagggcaccacgcgggaccacttcgacgggaggcgcgtggtggagctccgctacgaggcgtacggggccatggcgcggcgccgcctcgaggccatcctccgcgaggcccgcgccgcgcacgcgctgtgccggctggccgtggcgcaccgcctcgggaccgtccccgccggcgaggccagcgtgttcgtggcggcctcggccgtgcaccgcgccgacgccatggacgcgtgccgctacgtgatcgacgagatcaaggcctccgtgcccatctggaagaaggaggtgtacgacgacggcgaggtctggaaggagaaccgcgagttcctcgaccgcaccgacgccgagaagaagggcaagccggccgctgccgccggccgcggcggcggcgggtgctgcggcagcaaggtgagggtcagctgatgagtggcggccgccggatcgcgatcacgtggacgtgccttttttttccccttgtgttacgagagattttagtggaagagaaaggtgaagttcgaatacaataatatcttcacattttgttaaaaaaaaaaaaaaaa

SEQ ID NO: 3714 - protein, 193 aa, Triticum aestivum
  misc_feature: Ceres CLONE ID no. 773050
  misc_feature: Ceres CDNA ID no. 29191557
  misc_feature (25)..(142): Pfam Name: MoaE PFAM Desc: MoaE protein
  misc_feature: Homolog of GI Number: 50905205 NR Desc: putative molybdopterin synthase large subunit MOCS2B
  misc_feature: Homolog of GI Number: 2281094 NR Desc: putative molybdopterin synthase large subunit
  misc_feature: Homolog of GI Number: 29243132 NR Desc: putative molybdopterin synthase large subunit
  misc_feature: Homolog of GI Number: 58384913 NR Desc: ENSANGP00000013467
  misc_feature: Homolog of GI Number: 66564230 NR Desc:  similar to CG10238
  misc_feature: Homolog of GI Number: 35493754 NR Desc: molybdopterin synthase large subunit MOCS2B
  misc_feature: Homolog of GI Number: 50927005 NR Desc: Molybdopterin synthase
  misc_feature: Homolog of GI Number: 57085285 NR Desc:  similar to Molybdenum cofactor synthesis protein 2 large subunit
  misc_feature: Homolog of GI Number: 21356259 NR Desc: CG10238
  misc_feature: Homolog of GI Number: 54638840 NR Desc: GA10181
MAGDEPPTATVEAPTTEAACQDLVEILEEGSGRLDMGRYVDHVRDLSAGAIATFEGTTRDHFDGRRVVELRYEAYGAMARRRLEAILREARAAHALCRLAVAHRLGTVPAGEASVFVAASAVHRADAMDACRYVIDEIKASVPIWKKEVYDDGEVWKENREFLDRTDAEKKGKPAAAAGRGGGGCCGSKVRVS

SEQ ID NO: 3715 - DNA, 1345 bp, Triticum aestivum
  misc_feature: Ceres CLONE ID no. 773125
  misc_feature: Ceres CDNA ID no. 24766517
  CDS (291)..(1118): REFERENCED BY SEQ ID NO: 3716
aaaaactgcaagtccgcacctgtccggggaacccgtcccgatccgttccgcaaccagacccggccagttttcccccagcaagcatgggagtaattgcgttgacgacggggacgctgcacggggaatcggggagatattaaccgattccttttcctctggattccggccgtccttttcccgcactataaattccggggcagcggcaagaatccgcagagaccgctgtcagaaggccctgcactcaaactcagcaggtggaggggggcgatagaggcaacgggccgccggcgatgtcgtcgtcgtggaactcggtggggctggaggtgctctaccaggtcatcgggtggatcgccttcgtcgcctggtccttcagcttctacccgcaggtcgtcctcaactacaggcgcaagagtgtcgtcggtctgaacttcgattttctggtgctgaatttcacaaagcattcttcctacctcatatacaatgctgctctattcttcagccccttcatccagcaacagtatcatgacaagtttggtgataaagagatgattcctgttgctgcaaatgatgttgctttctctctacatgcagtggccttgacatcttttaccctttaccaagtttttatttatgagcgtggaaaccagaaagtctccaaagtgtgcatatcaatctctgctgttgtctggtcagctgctattgtttgcctcattgtagcttggccaaaaagtaactggctatggcttattgatgtattcaattcaatacaggttgcgatgacaacagtcaagtacatccctcaggctgtgatgaacttcaggcggaagagtacagttggttggagtattggcaatattttacttgatcttacagggggggtgctgaactttggtcagatgggtgtgcaatctattgatcagcacactttagtgaatttctatggaaatatcggcaagactcttctttcattggaaactgttttcttcgatgttctcttcataattcaacactatgtgttgtaccctgtcaaacgggatgagaatggtaaggccatcatttctgagagggtagctcctctgatcaggccctcagataagcctgaagaagatagtgtatgatatatgtacagtacacacagtgctgtctcaatttctatctgttttaacaaagataaaccacgattatttttcatgtattgtgaattaactgctgtacatatttcttcacggattactgtaaaaatttaaatattgcagaccttcagttttgtccttgacatttatactttgtgtaaagatttacaaaaaacaatatataattgatttggctaaaaaaaaaaaaaaaa

SEQ ID NO: 3716 - protein, 275 aa, Triticum aestivum
  misc_feature: Ceres CLONE ID no. 773125
  misc_feature: Ceres CDNA ID no. 24766517
  misc_feature (163)..(215): Pfam Name: PQ PFAM Desc: PQ loop repeat
  misc_feature: Homolog of GI Number: 77554312 NR Desc: Lysosomal Cystine Transporter
  misc_feature: Homolog of GI Number: 77554311 NR Desc: Lysosomal Cystine Transporter
  misc_feature: Homolog of GI Number: 47123179 NR Desc: MGC83915 protein
  misc_feature: Homolog of GI Number: 55241258 NR Desc: ENSANGP00000020402
  misc_feature: Homolog of GI Number: 31208055 NR Desc: ENSANGP00000020402
  misc_feature: Homolog of GI Number: 23273064 NR Desc: CTNS protein
  misc_feature: Homolog of GI Number: 50758292 NR Desc:  similar to Cystinosin
  misc_feature: Homolog of GI Number: 73967295 NR Desc:  similar to Cystinosin isoform 1
MSSSWNSVGLEVLYQVIGWIAFVAWSFSFYPQVVLNYRRKSVVGLNFDFLVLNFTKHSSYLIYNAALFFSPFIQQQYHDKFGDKEMIPVAANDVAFSLHAVALTSFTLYQVFIYERGNQKVSKVCISISAVVWSAAIVCLIVAWPKSNWLWLIDVFNSIQVAMTTVKYIPQAVMNFRRKSTVGWSIGNILLDLTGGVLNFGQMGVQSIDQHTLVNFYGNIGKTLLSLETVFFDVLFIIQHYVLYPVKRDENGKAIISERVAPLIRPSDKPEEDSV

SEQ ID NO: 3717 - DNA, 795 bp, Triticum aestivum
  misc_feature: Ceres CLONE ID no. 773393
  misc_feature: Ceres CDNA ID no. 25891249
  CDS (73)..(570): REFERENCED BY SEQ ID NO: 3718
agagcgaccgacggacgccaccagcagagccgagccggcggcgggggcagcttggtcgacgccacggccgcgatgggggcggggggatcctggcgctgggccgtgggcgcggtctgcggcgggctggtctactaccactgcgcggtgcggcgggcgagcgcggtgtccctcgccgccgacgtgctcctcgtcctcctctgctccctctccatcctcggcctcctcttccgccacctgcacatctcggtgcctgtggatcctcttgagtggcagatttctcaagagatggcaaatagtatagttgcgtccttggctaacacaattggagctgcggagtctgtattgagggtggctgcaactggacatgacaagaaactcttgttcaaggtggttcttactctgtatttcctagcagctttgggaagggtcgtctcaggcgctgctattgcctatgctgctctgtgcatcttctccctctacatgttcgcgcaaagcaccgaccagtttgatcagctcccttgggttcctttaggaagagactcgctgggcggcgcccaggataccacatgatttcttcatgtacatgtcttgccgttgccgatccttttatttcttcattgttcgagttctgcatatggccatggaggccaatagcttgaaccgtccccagtgttgttttaagatgaacactggtgcgccacgtgtgcagccatgtgcgttccctttttttaaaggggagatgaatgtgacattaataaaaaagaagagggcattcacataaaaaaaaaaaaaaaa

SEQ ID NO: 3718 - protein, 165 aa, Triticum aestivum
  misc_feature: Ceres CLONE ID no. 773393
  misc_feature: Ceres CDNA ID no. 25891249
  misc_feature: Homolog of GI Number: 50942487 NR Desc: pentatricopeptide
  misc_feature: Homolog of GI Number: 15219392 NR Desc: pentatricopeptide
  misc_feature: Useful for making ornamental plants with modified leaves
MGAGGSWRWAVGAVCGGLVYYHCAVRRASAVSLAADVLLVLLCSLSILGLLFRHLHISVPVDPLEWQISQEMANSIVASLANTIGAAESVLRVAATGHDKKLLFKVVLTLYFLAALGRVVSGAAIAYAALCIFSLYMFAQSTDQFDQLPWVPLGRDSLGGAQDTT

SEQ ID NO: 3719 - DNA, 628 bp, Triticum aestivum
  misc_feature: Ceres CLONE ID no. 773551
  misc_feature: Ceres CDNA ID no. 25445720
  CDS (86)..(355): REFERENCED BY SEQ ID NO: 3720
ccacaccgctccagaggtcgccgccgccgccgccgccgccgcctccccgccgtcggccgctacgagaaccccagagtaaaggaaaatgccttcacttcagaaagctttacctccagaacttgccgacaatgcgcttagattataccgcgaatgcttaaggagggctaagttcatcggtagtcagcaacataacacagggcttcttgtttccatggtgaggcaacagttcaagaaaaacatgcatgaaactgatccagagaagatacagaaaatgaaggatgatgcggcacggggccttatcaatcacataatatatgaatccgagaagatgacaggacgtaaattctcaggttaagaaagttgaaagtagacttttggcaatatgctgtacgagttgaacagcgacttgatcctatggctgttgaattatttttctcctccgacacaaggaccatctaatgcttttctttgttgttgacttaataaagcagtgttttttcatcagttgcattttactgtgcttctggatgtaattgacccacgcatgccaagcgttagctgttttgttaaggtgtaaatcttcagcaattttaagtgctccaatctgtgtctaaaaaaaaaaaaaaaa

SEQ ID NO: 3720 - protein, 89 aa, Triticum aestivum
  misc_feature: Ceres CLONE ID no. 773551
  misc_feature: Ceres CDNA ID no. 25445720
  misc_feature (11)..(63): Pfam Name: Complex1_LYR PFAM Desc: Complex 1 protein
MPSLQKALPPELADNALRLYRECLRRAKFIGSQQHNTGLLVSMVRQQFKKNMHETDPEKIQKMKDDAARGLINHIIYESEKMTGRKFSG

SEQ ID NO: 3721 - DNA, 1987 bp, Triticum aestivum
  misc_feature: Ceres CLONE ID no. 774208
  misc_feature: Ceres CDNA ID no. 40351341
  CDS (1)..(1497): REFERENCED BY SEQ ID NO: 3722
actcctcccccctccccctccccctttcttctccctccaaaaaccgacatctccaccctccaaacaccaccaccatcaactgcagcccagtcccagtcccgccagaaccgcgagatccgatccgactccgactccgggcagcagagttggcgccacggaaccggagctcgccgctggcctgtccttcccgcctgccgtttgatcctcccggttcgtgaaacctttcctccccgctcgatccatgcccgggaggtgctcgttcttgcccccgagatccgtccggtccgccccgagcagcgggatctctccgtgatcctcgtcttggccttcttccccggcccgaagatccgggatttccttttccggttcggtttcgccagcgtgcgtttcgccggagcgccgctgccgccgccgggcatggcgtacgcgtcgccgtacgtgctctcgttcctgctgctgctgtccatgccggcggtctactacctcgggccgcgcctgctgctgcccaagacgctcccggccatcccggacgccgacgagacggaggacctcgcgctcttccgccgcgccgtgctcctctcgtccgcgcccgccgccggctccggcgcggcgccctcctccttcggcgtgttcggccgccgcccgcaggcgcggcccaaggtggccttcctcttcctcaccaactccgacctcgtcttcgcgccgctctgggagaagttcttcgcggggcaccacggcctgctcaacctctacgtccacgccgaccccgccgccaacctcacgctgcccccgaccccgtccttccgcggccgcatcatccggggcaaggccacggcgcgcgcctccgccacgctcatctccgccgcgcgccgcctcctcgccaccgcgctgctcgacgacccggccaaccagttcttcgcgctgctctcccagtcctgcgtcccgctcctccccttccccgccctctaccgcaccctcctcaccgacaacaatgccggccgccaccgccgccaccgcagcttcatcgagatcctggacagcgagcccacgctgcacgcccgctactacgcgcgcggcgacaacgtgatgctcccggaggtgcccttcgaccgcttccgcgtcggctcccagttcttcgtgctcgccaggcgccacgccgtcatggtggtcagggacaggaggctctggaacaagttcaaggcgccgtgcctcgtcaaggagaaggactcgtgctacccggaggagcactacttcccgacgctgctcgacatgcaggaccccgacggctgcaccaagtacaccctcaccagggtcaactggaccgacgccgtcggcggccacccgcacacctaccagccggaggaggtctccggggacctcatcagggagctcaggaagtccaacgggacctactcccacatgttcgcgcgcaagttcgcgccggagacccttgcgccgctcatggagatcgccgactccgtcatcctccgtgactaggcgccaagtgttcgtggacatgaacagaacaagggttggtgatgtgatgaagaagcataagctggtccatccatcccctttgtggtttcttcagggaggagcaaaccagcaccaaacctacttcgccttgttgttccgtcgctggccgtcgctcggcgaaggggatgctgctgcttgctcagactcagagagtgatgtgggtgttggtggcgaagtgccccgactgcctctatcctatgtgagtattgttgtgtttcttggtgtttttcctttccactttgatcccgagcgagaggaagtcgtcggcacgcggtaggcgtgtcgctggtagttagcacggatgatcatcctatgtattcacaacggaggcaacctgtcgatacatgtagtgatggtttttgtagtatatgttatccccatgttgtcattgtcaatatcacacaccttttcctctaaaaatgtatcatcatctgcaaaaaaaaaaaaaaaa

SEQ ID NO: 3722 - protein, 359 aa, Triticum aestivum
  misc_feature: Ceres CLONE ID no. 774208
  misc_feature: Ceres CDNA ID no. 40351341
MAYASPYVLSFLLLLSMPAVYYLGPRLLLPKTLPAIPDADETEDLALFRRAVLLSSAPAAGSGAAPSSFGVFGRRPQARPKVAFLFLTNSDLVFAPLWEKFFAGHHGLLNLYVHADPAANLTLPPTPSFRGRIIRGKATARASATLISAARRLLATALLDDPANQFFALLSQSCVPLLPFPALYRTLLTDNNAGRHRRHRSFIEILDSEPTLHARYYARGDNVMLPEVPFDRFRVGSQFFVLARRHAVMVVRDRRLWNKFKAPCLVKEKDSCYPEEHYFPTLLDMQDPDGCTKYTLTRVNWTDAVGGHPHTYQPEEVSGDLIRELRKSNGTYSHMFARKFAPETLAPLMEIADSVILRD

SEQ ID NO: 3723 - DNA, 590 bp, Triticum aestivum
  misc_feature: Ceres CLONE ID no. 774536
  misc_feature: Ceres CDNA ID no. 29191601
  CDS (88)..(516): REFERENCED BY SEQ ID NO: 3724
gtactaccgcaagtgcaaagtagctcacacatccatcggcgccagactactgactcagatcctccaccgaccaccagacccagaccgatggcttcttcttccgtgctgctcggaggaggcgcgggcgcgggcgccgccgccttcaccggcgccgctgccggcaaggctcttcccaggccgtgtttcctcgccgctcgtccgcacactgtcagcggtggccgcctctgcctgcaaacccctcctagagcgactcctgctaacgacgccgtcgagaccgtgaagggggcggccggggaagccggagacaaggtctcggaaggggcggacagcgtgacgaaggcggccagcgacgcggcgggcaaggtacaggaggcggtagagggcgccgtggagggagccaaggacctgggcgagaaggcgaagcaggcgacggaggaggcgtgggacgccaccaaagacgccgcacagggcgtcgccgacgacgtcaccgccgcggttgaggatgtgagcaaatgagctcaacatttgcgtatcagattgaatatttaacatgcatgatgtgcacgcgagtgtcaaaaaaaaaaaaaaaa

SEQ ID NO: 3724 - protein, 142 aa, Triticum aestivum
  misc_feature: Ceres CLONE ID no. 774536
  misc_feature: Ceres CDNA ID no. 29191601
  misc_feature (69)..(138): Pfam Name: LEA_4 PFAM Desc: Late embryogenesis abundant protein
  misc_feature: Homolog of GI Number: 20067227 NR Desc: WCOR14c
  misc_feature: Homolog of GI Number: 20067229 NR Desc: WCOR14a
  misc_feature: Homolog of GI Number: 6561861 NR Desc: cold
  misc_feature: Homolog of GI Number: 20067231 NR Desc: REP13
  misc_feature: Homolog of GI Number: 24528340 NR Desc: cor14b
  misc_feature: Homolog of GI Number: 481813 NR Desc: leaf
  misc_feature: Homolog of GI Number: 19352333 NR Desc: cold acclimation protein WCS19
  misc_feature: Homolog of GI Number: 28273091 NR Desc: chloroplast
  misc_feature: Homolog of GI Number: 7489369 NR Desc: cold
  misc_feature: Homolog of GI Number: 419793 NR Desc: cold
MASSSVLLGGGAGAGAAAFTGAAAGKALPRPCFLAARPHTVSGGRLCLQTPPRATPANDAVETVKGAAGEAGDKVSEGADSVTKAASDAAGKVQEAVEGAVEGAKDLGEKAKQATEEAWDATKDAAQGVADDVTAAVEDVSK

SEQ ID NO: 3725 - DNA, 711 bp, Triticum aestivum
  misc_feature: Ceres CLONE ID no. 776257
  misc_feature: Ceres CDNA ID no. 25891253
  CDS (142)..(501): REFERENCED BY SEQ ID NO: 3726
acttacaccactctctgcactctgcagcgtccacaccccagccagcctcctcgtctccgcagatcagcagcccccaaatcggcgacccctctctctccgatctccaatccccacctcgcacacgcgcaccaaccgggcacgatgcgggcgatctcgtcggcggcgggagggatgctgcgggcgcggctgagcgcggcggcgcgcctccgcggcgggcacggcgacggcgggggccggtggacgacgcccggccacgaggtgcggcccaaggggtacccgatgaaccgcacgccgccgccgccgggcgagtcgcgcaagtgggaggactgggagctcccctgctacgtcacctccttcctcaccgtcgtcatcctcggcgtcgggctcaacgccaagcccgacctcaccctcgagacctgggcgcaccacaaggcgctcgagcgcctccagcagcaggagctctccgccgcctccgcctccgccgaagccctgtccgagtgatccgcgagcgcgcgccccaggtctgcctccaaacctaggttgcctctgttctgttttgcttccaataaggatggttgtgaacttgtgatgtaccaatctgatattgatgggacctgggctgaacactatatttctgtttctgttttgttgttgaaatttatctgatgatgatggcagatgccgtatgcatttccaaaaaaaaaaaaaaaa

SEQ ID NO: 3726 - protein, 119 aa, Triticum aestivum
  misc_feature: Ceres CLONE ID no. 776257
  misc_feature: Ceres CDNA ID no. 25891253
  misc_feature: Homolog of GI Number: 9858777 NR Desc: BAC19.9
  misc_feature: Homolog of GI Number: 15027957 NR Desc: putative arginine/serine
  misc_feature: Homolog of GI Number: 32400889 NR Desc: ocs
MRAISSAAGGMLRARLSAAARLRGGHGDGGGRWTTPGHEVRPKGYPMNRTPPPPGESRKWEDWELPCYVTSFLTVVILGVGLNAKPDLTLETWAHHKALERLQQQELSAASASAEALSE

SEQ ID NO: 3727 - DNA, 605 bp, Triticum aestivum
  misc_feature: Ceres CLONE ID no. 776474
  misc_feature: Ceres CDNA ID no. 40351342
  CDS (140)..(367): REFERENCED BY SEQ ID NO: 3728
tgtagttgtacgtggtggtgctccaaatgctttctcgcaaagcattgttgcatatgagatcatactgcacccgaatcagggacgcgttttgactgtccgtgagaacgcaaggcttcagggtttccccgattactaccggatgtacggtcccatgaaggagaagtacatccaagtgggaaacgcggtggctgtccctgttgcgcgggcactgggctactctttgggccgagcgtaccagggcgaggtggatgcggggtatgatgcgctgtttgttcttcctgacagcttcaccaacatcggacagaccggtgcgagggcaagggcctcctccgttggcacccctgcaggcgaggttgtcgagcagtagaacagagcctatctgttgtgttatgtggggtgggggttcgagtctagtccatttgtcgcgggaactaaattgctgcagcatgtaaggattgctcgagttgttaccgtttgtcgctggttgaacttgtgatcgttgagatccttggtcttagatgaagaaactagtagtatgttgttccattgttgctacccattgacaattattattgtctgttgctccatcaaaaaaaaaaaaaaaa

SEQ ID NO: 3728 - protein, 75 aa, Triticum aestivum
  misc_feature: Ceres CLONE ID no. 776474
  misc_feature: Ceres CDNA ID no. 40351342
  misc_feature (6)..(30): Pfam Name: DNA_methylase PFAM Desc: C
MYGPMKEKYIQVGNAVAVPVARALGYSLGRAYQGEVDAGYDALFVLPDSFTNIGQTGARARASSVGTPAGEVVEQ

SEQ ID NO: 3729 - DNA, 820 bp, Triticum aestivum
  misc_feature: Ceres CLONE ID no. 777072
  misc_feature: Ceres CDNA ID no. 40351343
  CDS (118)..(537): REFERENCED BY SEQ ID NO: 3730
attcccaaatttctcattctcccatttcctctcagaaccctcgatcactcccacgcgctcctatatcctctccttcaccgtcgctctctccaacgatcacaacaacatcgtcatcccatggcaaacgccgcatctggtatggcagtccatgatgactgcaagttaaggtttttggagctgaagacaaagaggacacaccgtttcatagtttttaagattgaggagcagcagaagcaggtcattgtggagaagcttggtgagccagcccaaggctatgaagatttcactgccagccttcctgctgatgagtgccgttatgctgtttatgattttgagtatctgactgaagggaatgtccctaaaagcagaatttttttcattgcatggtcccctgacacatcaagggtgaggagcaagatgatctatgcaagctccaaagacagattcaagagggagctggatggaattcaagtagagctgcaagcaactgatcctactgagatgggtcttgatgtgttcaaaagccgggccaactaaaatgattatagaaaatagtaggctttctggtgggagcagcactccttaagccttagttactcatggaaaatatcctagtttgtgggatggtcaacttgggtagttatggtcccaaactctctcaattttccaagttgtggcataaattctattgcaccttttaacaagctttgcttgttccagtgtgttttattatgatttgtgatttatacaaccttgcgtttgagtgccattttagtcgtcttatcccttactagttgaatttgtaaaaaaaaaaaaaaaa

SEQ ID NO: 3730 - protein, 139 aa, Triticum aestivum
  misc_feature: Ceres CLONE ID no. 777072
  misc_feature: Ceres CDNA ID no. 40351343
  misc_feature: The plant senesces significantly late copared to wild-type.
  misc_feature: Useful for making plants with modulated time to senescence
  misc_feature (12)..(139): Pfam Name: Cofilin_ADF PFAM Desc: Cofilin/tropomyosin
MANAASGMAVHDDCKLRFLELKTKRTHRFIVFKIEEQQKQVIVEKLGEPAQGYEDFTASLPADECRYAVYDFEYLTEGNVPKSRIFFIAWSPDTSRVRSKMIYASSKDRFKRELDGIQVELQATDPTEMGLDVFKSRAN

SEQ ID NO: 3731 - DNA, 2140 bp, Triticum aestivum
  misc_feature: Ceres CLONE ID no. 777111
  misc_feature: Ceres CDNA ID no. 40351344
  CDS (135)..(1640): REFERENCED BY SEQ ID NO: 3732
accgaccaacgcccctcgagtcgtcgctccaaatcatagcattccggccggatctatccgacgagcgaagagtcttcgctctgcacaaccatttttggctcgattccggagaaggtccggggctccttgaagcgatggatcagcgggcgaggtaccctcccggcatcggcaacggccgcggcgggaatcctaactaccacggccgtggcccgccgccgacgcagcagcatcagcatcagcagcagcagcaggcgcaggggcaccagcagcagcacatggagcggcagtcgcagcgctcgcagcaccacaaccagcagcttcagcatcagcagtggcttcggcggaatcagaccgctagcgaggccgccgcgggcgccgccaaagccagcgagcaccacgcgccggctgccgccgatgacgccgatttgagtccgcaagactggaaggcccaattgaagcttccacctccagatacacgctaccagaccgaggatgtcactgcaactaaaggaaatgaatttgaagactattttctgaagcgtgaacttcttatgggcatatatgagaaaggatttgaaagaccgtctcctatccaagaagaaagcattcctattgcattaaccggcagcgacattcttgcaagagcaaaaaatggaacaggcaagactgctgcattttgtatacctgcgctagagaagattgatcaagacaaaaatgctattcaagttgttattttggtccccacgagggaattggctttacaaacatcacaagtctgcaaggaacttgggaaacacttgaagattcaagtcatggtcactactggaggaacaagcctaaaggatgatattgtccgtctttatcaacctgtgcatttacttgtggggacgcctggtcgtgttttggaccttacaaagaaaggcatttgcattctgaaggactgttcaatgcttattatggatgaggcagacaagcttctttctcctgagttccaaccttccgtggagcacttaattcgataccttccatcgagtcgacagattctaatgttctctgcaacattccctgtgactgtcaaggctttcaaggacaaatatctgcctaaaccctatgttattaatcttatggacgaacttacactgaagggaattacccagttctacgcctttgttgaagaaaggcagaaagtccattgtctgaacactcttttttccaagctgcaaattaatcagtctataatattctgtaactctgtaaatcgtgttgaactactggcgaagaagatcacagagcttggttactcttgcttctacatccatgctaaaatgctgcaggatcatcgtaatagagtattccatgatttccgtaatggtgcctgcaggaaccttgtgtgtacagatctttttacaaggggaatagatatccaagctgttaatgttgtcatcaattttgatttccccaagaccgctgaaacctatctccacagggttggtagatctgggagatttggccaccttggcctggctgtgaatctgatcacctatgaggatcggtttaacttgtatcggattgagcaggagcttggaactgagataaaacccatacctcctcagatagaccggacgatatactgccaatagttatctggcagattaatcttgtatgccccaccctggaagttataagacaacttgtgtaaatagcagctcatcaggtttcatttacgtgatctttatggtgtatcttaagttgttttggggcgctctgggacaggtgaaagtgtagctagctcgtctaatttccagcggaccatgtgtgtggatgtatcatggctaagctaaaacttcccgtcactctgacaatagttaatgttgctaaccaggtgcctgttctgagactgttctctctaaaactgaaagacctccttttcttttgacaatgtattggctggctagctttttctacaggacattttgaccctggtatttctgtgagttgcgtgaccttggcgtgcacagatggatcactccacctgggccaagctgtcgcgatgtatgtgtatggaccacacattttgattattttgtatttgtatccattctgatgtgccatatttgtaactgcaaaaaaaaaaaaaaaa

SEQ ID NO: 3732 - protein, 501 aa, Triticum aestivum
  misc_feature: Ceres CLONE ID no. 777111
  misc_feature: Ceres CDNA ID no. 40351344
  misc_feature: null
  misc_feature: Useful for making plants with altered Lignin content
  misc_feature (150)..(317): Pfam Name: DEAD PFAM Desc: DEAD/DEAH box helicase
  misc_feature (383)..(459): Pfam Name: Helicase_C PFAM Desc: Helicase conserved C
MDQRARYPPGIGNGRGGNPNYHGRGPPPTQQHQHQQQQQAQGHQQQHMERQSQRSQHHNQQLQHQQWLRRNQTASEAAAGAAKASEHHAPAAADDADLSPQDWKAQLKLPPPDTRYQTEDVTATKGNEFEDYFLKRELLMGIYEKGFERPSPIQEESIPIALTGSDILARAKNGTGKTAAFCIPALEKIDQDKNAIQVVILVPTRELALQTSQVCKELGKHLKIQVMVTTGGTSLKDDIVRLYQPVHLLVGTPGRVLDLTKKGICILKDCSMLIMDEADKLLSPEFQPSVEHLIRYLPSSRQILMFSATFPVTVKAFKDKYLPKPYVINLMDELTLKGITQFYAFVEERQKVHCLNTLFSKLQINQSIIFCNSVNRVELLAKKITELGYSCFYIHAKMLQDHRNRVFHDFRNGACRNLVCTDLFTRGIDIQAVNVVINFDFPKTAETYLHRVGRSGRFGHLGLAVNLITYEDRFNLYRIEQELGTEIKPIPPQIDRTIYCQ

SEQ ID NO: 3733 - DNA, 1364 bp, Triticum aestivum
  misc_feature: Ceres CLONE ID no. 777113
  misc_feature: Ceres CDNA ID no. 29191821
  CDS (192)..(1127): REFERENCED BY SEQ ID NO: 3734
gtcttcttccgtgggatttctttcgcagcacaaccaacaaacaaatttgtaactcgcaaaaggaaggggaggaaaaataaaccctagccgcgcaaatcgaagccagcgagacggctatgcggccggcgatcgcaggacaccaggatcgccgcctctagtcgcgcccaccccgcccgctcgcttccgccgccatgagggccgccgcggcgcagatcgatccgtccccgtccccgtcccccgccgcgctggccaagtcgcggctcaagcgcctgttcgagcgccaggtcctgcgggtctcgccggcggagcggctcccgcccgtctccgccggcggggagaaggacaaggagaaggatgacttggagcccagctcggtgtgcctggacggcatggtccgcagcttcctggaggacggcggcggcaccgtcggcgagcgggccccgaccgcgcgctgctgcaactgcttcaacggcggcgacgcctcggacgacgaggacgggcccgccgcggccgaagcgtctgccatctccgacgccgcggagaccatcaagggcctcgtccactgtgccagtctccgggagcgcaacctcctcgcggacgtgtccacgctcgtggagcgccaccgcgcggcgggggcgcgcaagcgcgacctcctccgcctcctcgcggcgtccctccgcgccatgggccacgacgccgcgctctgcctctcccgctgggacaagtcgtcctcccaccccgccggcgagcacgcctacgtcgacgtcctcctccccgccggctcggagcgcggcgaccgcgagcgcgtcctcgtggacgtcgacttcaggtcccagttcgaggtcgcacggcccaccaaggcctaccgcgccgtgctgcagcggctcccgtcggcgttcgtcggcaaggaggaccggctgcgcctgctggtggccgccgccgcagactcctcgcgcgccagcctcaagaagcgcggcctccacctcgcgccgtggcggaagcccgagtacatgcgcgccaagtggctgtcccgctacgagcgcgaggctcctcctccggcgccggatgcctctgccagtgagctcgccgccatcggcgagggaggcggagacggagccaaagcttaatcaaggatcggccattagttgatttttttttctcctggggaatttgcagcgcagtccccgggcgggcagggaccggatgcagatgtttttgctatattttcgtccttttctctctcattttgacccttttgatgggtaacggagtactagcagtaacttccagtaagtatgtaccgggaagcaagagcaactaaataaataaaatttgtagtgtttagtacaaaaaaaaaaaaaaaa

SEQ ID NO: 3734 - protein, 311 aa, Triticum aestivum
  misc_feature: Ceres CLONE ID no. 777113
  misc_feature: Ceres CDNA ID no. 29191821
  misc_feature: Homolog of GI Number: 34907382 NR Desc: P0471B04.25
  misc_feature: Homolog of GI Number: 34906052 NR Desc: P0698H10.19
  misc_feature: Homolog of GI Number: 13592175 NR Desc: ppg3
  misc_feature: Homolog of GI Number: 67987177 NR Desc: 4Fe
  misc_feature: Homolog of GI Number: 11359723 NR Desc: proteophosphoglycan
  misc_feature: Homolog of GI Number: 5420387 NR Desc: proteophosphoglycan
  misc_feature: Homolog of GI Number: 66778264 NR Desc: LigA
  misc_feature: Homolog of GI Number: 56283929 NR Desc: CG3047
  misc_feature: Homolog of GI Number: 66776813 NR Desc: Phosphoribosylaminoimidazole
  misc_feature: Homolog of GI Number: 50933659 NR Desc: putative high
MRAAAAQIDPSPSPSPAALAKSRLKRLFERQVLRVSPAERLPPVSAGGEKDKEKDDLEPSSVCLDGMVRSFLEDGGGTVGERAPTARCCNCFNGGDASDDEDGPAAAEASAISDAAETIKGLVHCASLRERNLLADVSTLVERHRAAGARKRDLLRLLAASLRAMGHDAALCLSRWDKSSSHPAGEHAYVDVLLPAGSERGDRERVLVDVDFRSQFEVARPTKAYRAVLQRLPSAFVGKEDRLRLLVAAAADSSRASLKKRGLHLAPWRKPEYMRAKWLSRYEREAPPPAPDASASELAAIGEGGGDGAKA

SEQ ID NO: 3735 - DNA, 1302 bp, Triticum aestivum
  misc_feature: Ceres CLONE ID no. 778241
  misc_feature: Ceres CDNA ID no. 40041322
  CDS (208)..(1014): REFERENCED BY SEQ ID NO: 3736
gccggtaagtaggcagtgaggacaaagccacccacccaccaagagtcagtctctccctccttcccctcgtgcggtagcctccaaatcatccaacgtccaatccacttccaacaagataccgccaccatcctccgcctgatccgacctctcttccatcagcgacagcgaccccgcaacccccggctccatcgaccatcgggcgagggaatggaggaggagggcgcgaggaaggcggtgctcttccggctgttcggcgtcgaggtccgcggcgcggaggaggaggatgacgcggagcccatggagctcaagaagagcaccagcatgcccaacctcgcctgcgcctccaacagcccgccgcttctcctgcccggcgaggccagccacgacaagggctacgcctccgacgacggcgagctggcgtccacgccgcagctcaagcgctgccgccgcaaggcccaggagcgcaagaaagggattccgtggaccgaggaggagcacaggaagttcctggagggtctgaagcagctgggcaagggggactggagaggcatctccaagaacttcgtcaccaccaggacggccacgcaggtggctagccacgcccagaagtacttcctccggcagaccaaccccggcaagaagaagcgccgggccagcctcttcgacgtcggcatccccgctgcccacagctacgacgatcagctgccaagtcctcagagcgttggaaccaagcttgctcctgctgagaagatactccacacagaccgcggcgacgtgccgctaccaagttatcctggaggcatcaggggcagcaacaacaacatgcagatgcaggctgatgagctaactgaccgtgtgaagaagagatcaaagttccccaccgggacgtcgctggccgccatggctgcctccgggctggagctggcaatgtcttcgtctgccagcagcatcctggagctcagcatcgcgcctcctcgctgctacggcgcggtcgacgccatcaaggtgctgtgatcgacccccggctgccaggcctggccgaagggattgatctgatctgcaccaccaccagcttagcttcatgtggcgcccctgttctcgttgccgtgctaaccttgttgcccgtcgatcgtcctagtagctttttcagctagtgtatggagtaaaatacataagaatttgcttgctttggtacaagttggtgaagggaaaccagagaggatatgtgtagtaggtttgtttgtaatgtatggttaccaaatttaattaatgttatcagtgcttacaaaaaaaaaaaaaaaa

SEQ ID NO: 3736 - protein, 268 aa, Triticum aestivum
  misc_feature: Ceres CLONE ID no. 778241
  misc_feature: Ceres CDNA ID no. 40041322
  misc_feature (89)..(136): Pfam Name: Myb_DNA PFAM Desc: Myb
  misc_feature: Homolog of GI Number: 12406993 NR Desc: MCB1 protein
  misc_feature: Homolog of GI Number: 37536868 NR Desc: putative Myb
  misc_feature: Homolog of GI Number: 78709011 NR Desc: Myb
  misc_feature: Homolog of GI Number: 24850305 NR Desc: transcription factor MYBS2
  misc_feature: Homolog of GI Number: 50941187 NR Desc: putative transcription factor Myb1
  misc_feature: Homolog of GI Number: 12406995 NR Desc: MCB2 protein
  misc_feature: Homolog of GI Number: 53793418 NR Desc: putative MCB2 protein
  misc_feature: Homolog of GI Number: 34912404 NR Desc: putative Myb
  misc_feature: Homolog of GI Number: 34906444 NR Desc: P0671B11.14
  misc_feature: Homolog of GI Number: 55773675 NR Desc: putative MCB2 protein
MEEEGARKAVLFRLFGVEVRGAEEEDDAEPMELKKSTSMPNLACASNSPPLLLPGEASHDKGYASDDGELASTPQLKRCRRKAQERKKGIPWTEEEHRKFLEGLKQLGKGDWRGISKNFVTTRTATQVASHAQKYFLRQTNPGKKKRRASLFDVGIPAAHSYDDQLPSPQSVGTKLAPAEKILHTDRGDVPLPSYPGGIRGSNNNMQMQADELTDRVKKRSKFPTGTSLAAMAASGLELAMSSSASSILELSIAPPRCYGAVDAIKVL

SEQ ID NO: 3737 - DNA, 1488 bp, Triticum aestivum
  misc_feature: Ceres CLONE ID no. 778255
  misc_feature: Ceres CDNA ID no. 29191698
  CDS (362)..(1153): REFERENCED BY SEQ ID NO: 3738
agcgccgttcccctcgtctcctcccccctccctccctgtcgtcgcacggaccgacggcgacggccgggccccgcccgccgggccaccgcccaccgcgcctatattccagcctccacccgcctcccccagcgcagccgccagcctccgctgaaaagtcctccaaccccagagccccccctctccctgcccgtcggagagatccgggccgcctgcccccaatcccgccgccccccgcccccgaatccgcgcgccgtccacgggcgtcgggcggaagaagcctcgcgcccgcgcgcgcgcatttcctccgtcgcctcgtctcgcctcgccggggattcgggagggggcgagggagggaggcgggatgccgattggggtgtcggacgagctgctcggcaccttcgtgccgatcgccgtctactggctctactcggggctctacgtcgcgctggacggcgtggagcgcctcgacgcctaccgcctgcaccccaggggcgaggaggccgcccggaacgtcgtctccaggggtgccgtcgtcaggggcgtcctcgtccagcaggccttccaggtcgtcgtcgcgctcacgctcttcgcggttatcggcgatgagagtggtattgcaccgaagcagccttctgctgtggtgatagtgctgcaatttatcatcgccatgtttgtcatggacacatggcagtacttcatgcacagatacatgcacatcaacaagtttctgtataagcacatccattccaagcaccacactcttgtagtcccttattcctttggggctctttacaaccaccctctcgagggccttattctggacactatcggcggtgctctctccttcctcctctctggtatgacaccacgaacatccatattctttttctcttttgcgaccatcaagacggtggatgaccactgcgggctgtggcttcccggtaacatcctccatgcgttgttcaacaacaacactgcttaccatgatatccaccaccagctctatggcaataaatacaacttttcgcaacctttcttcgtcctttgggataagattttggggacatacatgccctactctctcgagaaccggaaagggggtgggttcgagtcccggccagttaagtcagtagagcagaccaaggctgattaatacgtgcatattatctgattctcgttctgcttagatccgatacacactgtcctatcacgccgcctgattctctaactatgaaaatgctgtagaagtcttatgtcctggttcatatagtgagggtttttcgtgttttctgacacttctttcttttgatttggtttgggagtcccatcttgtatcaaggtaaggtatagcgggtaaaatcttgtattgtacgaaagaatactcggcatccacttggatttgtctcctctggatcggtctgtacttccatccacatggtgatgttaacaaagaaggatgatattaacactacaaaaaaaaaaaaaaaa

SEQ ID NO: 3738 - protein, 263 aa, Triticum aestivum
  misc_feature: Ceres CLONE ID no. 778255
  misc_feature: Ceres CDNA ID no. 29191698
  misc_feature (86)..(215): Pfam Name: Sterol_desat PFAM Desc: Sterol desaturase
  misc_feature: Homolog of GI Number: 50912721 NR Desc: sterol desaturase
  misc_feature: Homolog of GI Number: 51535543 NR Desc: acid phosphatase
  misc_feature: Homolog of GI Number: 23505995 NR Desc: At1g69640/F24J1.22
  misc_feature: Homolog of GI Number: 12325199 NR Desc: putative sterol desaturase
  misc_feature: Homolog of GI Number: 13605750 NR Desc: At1g14290/F14L17_4
  misc_feature: Homolog of GI Number: 7262670 NR Desc: Contains similarity to acid phosphatase from Lupinus albus gbAB023385
  misc_feature: Homolog of GI Number: 47825000 NR Desc: putative acid phosphatase
  misc_feature: Homolog of GI Number: 53793724 NR Desc: putative acid phosphatase
  misc_feature: Homolog of GI Number: 34913184 NR Desc: putative Sur2p: syringomycin response protein
  misc_feature: Homolog of GI Number: 47900697 NR Desc: putative acid phosphatase
MPIGVSDELLGTFVPIAVYWLYSGLYVALDGVERLDAYRLHPRGEEAARNVVSRGAVVRGVLVQQAFQVVVALTLFAVIGDESGIAPKQPSAVVIVLQFIIAMFVMDTWQYFMHRYMHINKFLYKHIHSKHHTLVVPYSFGALYNHPLEGLILDTIGGALSFLLSGMTPRTSIFFFSFATIKTVDDHCGLWLPGNILHALFNNNTAYHDIHHQLYGNKYNFSQPFFVLWDKILGTYMPYSLENRKGGGFESRPVKSVEQTKAD

SEQ ID NO: 3739 - DNA, 1428 bp, Triticum aestivum
  misc_feature: Ceres CLONE ID no. 779149
  misc_feature: Ceres CDNA ID no. 40351345
  CDS (69)..(1172): REFERENCED BY SEQ ID NO: 3740
atcccatcctctcctcctccctccgcagcaccctctccggacgccggcgggccggcgaccctagcaacatgaagctccttccgaccgtcatccttctcctcctcgtcctccttgcattcgatgatgtggaggcccgaggcacacctagggctcatcgttccaatcaccagtggtccagcatgttcgtcttcggcgacgactttgtcgacaacggcaacgttcccaacatcgtcggtgaaaagacgtcgcggcagtggagctacccctacggctcttatcgcaactccaattggtctggcgctcctgttccaacaggacgcttctccaactaccggatgcaatcagattttatcgcaaggatgttgggcctcactgaagcccctccagcgtaccagctcacatcagatcaatcttgcgacgcatctggcatgaccttcgcttttggcggcgctggtgtcttcaaggtgacgtcgacggcgaagaaggtgccgacccttgctgcacaggttcaagctttcaagaggctagtcaacgatgatgtcatctccacacggcagcttcaccactctgtcgcactcatcgccatctcaggcaatgactacatgagcggctccgaggccaataatggattctactcaagcttcaatgatctcgatatttacatgggaaacgtggcgactgagatcctagataatgtggcgcaactgcagatgcttggtgtgaggaaggttctagtaaataacttgcatcccattggttgcatgccttcacagactagttcgaacaactacaccacatgtgaccttcttggcaattatggtgcatcggtgcacaacaagtatctaaaccaaatgatcggagaaagggacaacgtccacgtactggacctctactccgccttcaccgacatcgtgaatcacgcccctggtgaagggtcagatcggtccaaggacttcaagggcaagctgaccccgtgttgcgagagttcctatgagggagggtactgtggggagcgtagcagttcagggaagcacctctatgacctatgtgagaatcccgacaagagcttctactgggacgagacacacccaacacatgctgggtgggaggcggtaatggaggcgctggagcaacctttgatggaatttctcgatcaggactacgttccatgatgcctcgtatttttggcagaagcttgattatttgatagttttggtgccgtatcttttaggttagcattatatacagtatgcgtatttaggggtgagcttcagaggtattattttcggcatgtttagctgaacctttagtctagtagtagtctttataggtgaacttgttccaaattgcttaatgtctcgtattgccatgcactttgtagcaagatggtacaaaagagggataaagtaaacaaaaaaaaaaaaaaaa

SEQ ID NO: 3740 - protein, 367 aa, Triticum aestivum
  misc_feature: Ceres CLONE ID no. 779149
  misc_feature: Ceres CDNA ID no. 40351345
  misc_feature (38)..(353): Pfam Name: Lipase_GDSL PFAM Desc: GDSL
MKLLPTVILLLLVLLAFDDVEARGTPRAHRSNHQWSSMFVFGDDFVDNGNVPNIVGEKTSRQWSYPYGSYRNSNWSGAPVPTGRFSNYRMQSDFIARMLGLTEAPPAYQLTSDQSCDASGMTFAFGGAGVFKVTSTAKKVPTLAAQVQAFKRLVNDDVISTRQLHHSVALIAISGNDYMSGSEANNGFYSSFNDLDIYMGNVATEILDNVAQLQMLGVRKVLVNNLHPIGCMPSQTSSNNYTTCDLLGNYGASVHNKYLNQMIGERDNVHVLDLYSAFTDIVNHAPGEGSDRSKDFKGKLTPCCESSYEGGYCGERSSSGKHLYDLCENPDKSFYWDETHPTHAGWEAVMEALEQPLMEFLDQDYVP

SEQ ID NO: 3741 - DNA, 2719 bp, Triticum aestivum
  misc_feature: Ceres CLONE ID no. 779478
  misc_feature: Ceres CDNA ID no. 40041323
  CDS (232)..(2508): REFERENCED BY SEQ ID NO: 3742
gtcgtctgaaccacgcaagcaatggagatttgtacacgaccataccgagcaaaaccacacaacggctaaactgctcgcggcccatagatgtgtttgccgtttgcatcggcgcctcgctctgctagccgtctcctctctcctctcacagccgtcggccgtcgatcgctatattggtcgtagccagtcgtagcatggtttaacgttaggcacttgcaccacgtcgcagccaccatgtccggtccatctcctccggtgactccggcgccggttacgccggtctccccgcctgctccggacgctggagggacgccgccagtgactccggcgccggttacgccggtctctccacctgctccggacgctggcgggacgccgccggcgactccagctccgacgccacccgttgttacgccggtctctccacctcctccggacgccgccgggacgccaccacccccggacgcctctgggacgcctccggtcaccccacctcccccggacgccgccgggacgccaccgccaccggtaaatccacctcccccggacggcgccagcacgcctcctccagtgaacccaccggtgaatcctccggtcaacccccccgtgaatcctcctccaccaaggccaacgccgacgccgaacccaacgccagtaacaccatcgccacctccaccaaggccaacaccgacgccaaacccaacgccggtaactccatccccacctccaccaaggccaactccgacaccaacaccaactccaactcctagccggccgccgccatcatccccacctcccccgacgggcgtgccacgttcatccccaccgccgcctgacgccacgccgccacctcctgaagacgtcccatcttcgccgccgcccccgaacgacgccccagctgcagcagcgcctcctccgtcacctctaacgttgtctccgccgccgccgccgcagtcagcgtccgcgccgtcgacctcagccaggtcgtcgtcgagcagcgggaccgcggtgggcgtgggcgtggccgtcggggcggtggtcttgctcgggctcgcggccgccctgatattctgcttcgtgtctaggcggcgccgtcgccgaaggccggagacccgagcggatttcttctacgacccgaggcagccgacgacgccgctgcagcagtcgcacccgctgtcgacgccgtcgtcgacgccgccgctgatgcactcgtgggcgcagagcagcggcggcgacccgggcgggccgccgctcccggccatgacgggcggcacgttcggctacgacgagctggcggcggcgacggatgggttcgcagaggagaacctgctggggcagggcgggttcgggcacgtgtacaagggcacggtgaaggggcaggaggtggccatcaagaagctgcgcgccggcagcgggcagggccaccgcgagttccgcgccgaggtggacatcatcagccgcgtgcaccacaagaacctcgtctccctcgtcggcttctgcatccacgccgagcagcgcctcctcgtctacgagtacgtccccaacaagaccctcgagtcccaactgcaccacgggagcgcccgcgcgacgctggattggcctcgccggtggaagatcgccgtcggctcggcgaagggcctcgcgtatctgcacgaagactgtcatcctaagatcatccaccgtgacatcaaggcggccaacatcctcctcgactacaactatgagcccaaggtcgcagattttgggctggcaaaatgccaagaagcagaacatactgctgtttctacgcgcgtaatgggaacttttggatacctggctccggaatattacgccaccggcaaagtaaccgaccggtccgacgtctactccttcggcgtgatgcttctggagctcatcaccggacggaagcctatcatggcatcctcagatcaccagccagaaacattggctacttgggcaaagcccctgctgaccaaggccttggaggaggaaaactacgaggagctgatcgacccggagctggggaccaactatgacgcctacgacatggcgcgactcgtcgcctgcgccgccgccgccgtgcgccagacggcgcgctctcgcccgcggatggcacagatcgttcggtacctggagggcgagctgtcggcggaggacctgaacggcggcatggcgccgggccagagcgcgatgcatcgctcagggggcggcaacacggacgaagtcaggcggctcaggaggatggcgttcgggccgggcaccgggacggccggcggcaccatcagcgagtacgccagcagcgagatgagcgcgccgaccagcgagtacgggctgaacccgtccagcgagtacacggccagcagcgcggcggacacggaggacatgacggacttcccgcacagagccggcaccggcaggggcgccgccgagggggccagcggcgaggcgggacgcggaaccacggaggggttcagcaggcgcaccactggcagacgtaccagccgggggtgacgagacgtactgaatactccttacgagcgggtgatcaaggaatcgtcgctcgtgtacatatgtgatgctgtcgctgtggggtttggtttgcgtttctttgtttcagatttcgggttcatgcgatttttggtgggtggtggaagaagttgtaacttgtatgtgcgtccattaattaaccacaaagatgaataaaacaaaaaaaaaaaaaaaa

SEQ ID NO: 3742 - protein, 758 aa, Triticum aestivum
  misc_feature: Ceres CLONE ID no. 779478
  misc_feature: Ceres CDNA ID no. 40041323
  misc_feature (360)..(557): Pfam Name: Pkinase PFAM Desc: Protein kinase domain
  misc_feature (623)..(633): Pfam Name: Pkinase_Tyr PFAM Desc: Protein tyrosine kinase
  misc_feature: Homolog of GI Number: 79352581 NR Desc: ATP binding / protein kinase/ protein serine/threonine kinase/ protein
  misc_feature: Homolog of GI Number: 30725492 NR Desc: At3g24600
  misc_feature: Homolog of GI Number: 12321185 NR Desc: Pto kinase interactor
  misc_feature: Homolog of GI Number: 34894174 NR Desc: putative LRR receptor
  misc_feature: Homolog of GI Number: 57899154 NR Desc: putative receptor protein kinase PERK1
  misc_feature: Homolog of GI Number: 34909560 NR Desc: putative receptor protein kinase
  misc_feature: Homolog of GI Number: 13447449 NR Desc: receptor protein kinase PERK1
  misc_feature: Homolog of GI Number: 34902318 NR Desc: Putative DNA cytosine methyltransferase MET2a
  misc_feature: Homolog of GI Number: 9294048 NR Desc: protein kinase
  misc_feature: Homolog of GI Number: 62320604 NR Desc: protein kinase
MSGPSPPVTPAPVTPVSPPAPDAGGTPPVTPAPVTPVSPPAPDAGGTPPATPAPTPPVVTPVSPPPPDAAGTPPPPDASGTPPVTPPPPDAAGTPPPPVNPPPPDGASTPPPVNPPVNPPVNPPVNPPPPRPTPTPNPTPVTPSPPPPRPTPTPNPTPVTPSPPPPRPTPTPTPTPTPSRPPPSSPPPPTGVPRSSPPPPDATPPPPEDVPSSPPPPNDAPAAAAPPPSPLTLSPPPPPQSASAPSTSARSSSSSGTAVGVGVAVGAVVLLGLAAALIFCFVSRRRRRRRPETRADFFYDPRQPTTPLQQSHPLSTPSSTPPLMHSWAQSSGGDPGGPPLPAMTGGTFGYDELAAATDGFAEENLLGQGGFGHVYKGTVKGQEVAIKKLRAGSGQGHREFRAEVDIISRVHHKNLVSLVGFCIHAEQRLLVYEYVPNKTLESQLHHGSARATLDWPRRWKIAVGSAKGLAYLHEDCHPKIIHRDIKAANILLDYNYEPKVADFGLAKCQEAEHTAVSTRVMGTFGYLAPEYYATGKVTDRSDVYSFGVMLLELITGRKPIMASSDHQPETLATWAKPLLTKALEEENYEELIDPELGTNYDAYDMARLVACAAAAVRQTARSRPRMAQIVRYLEGELSAEDLNGGMAPGQSAMHRSGGGNTDEVRRLRRMAFGPGTGTAGGTISEYASSEMSAPTSEYGLNPSSEYTASSAADTEDMTDFPHRAGTGRGAAEGASGEAGRGTTEGFSRRTTGRRTSRG

SEQ ID NO: 3743 - DNA, 1077 bp, Triticum aestivum
  misc_feature: Ceres CLONE ID no. 779539
  misc_feature: Ceres CDNA ID no. 25892652
  CDS (1)..(684): REFERENCED BY SEQ ID NO: 3744
actcccgtagctttcctcttcctcccaccccgatcccctcctctttccccaacgctgctctcctgcactgctctactcaagctccaatcctctcctacagtccaccaccaccgtgctctatatctcccgtcgtgccgtagcttcgcttcaccgccgcgcgtcacccacccaacccctccgcctctcacgctcatctcgactccatcgccgttccccttctgctcccgtcgcgtccctgccgtctccaccccgtccgtgatctcgggcatcgtttctttcgtgggattggctgacgggaggagggagatgagccgtgggaggtctccggagccgcttgatttcttcatatggactgtcgaggacgtcggcttgtggcttgaagagataaatcttggtggctacagacaagtttttgaagaaaatagtgtcaatggagagtatctggagagcttgtcgatgtttactaccgagcagattctgcggtttatcaggcggtgccatatgaaatggggagactttatcacattgtgcaaagagttgaggcgcattaaagttgcctgcctgaaaggggagcaagaagtccggaggccatggtgggcaccatcatgcctatcagtggtgtttgtgagggcggcaaagcggaaccgacagtcccgagttgtctctcttaagctggaaccttgatgctcgctggccgcgccggaacaccgcgccgagctatcccccagattctctgccttacgggcactgcaaccgcgctatccccacaatgtaggagcagcagtatgctccgtgtccaacccgtttctctacccctgttttgtattcctttttcatcttataatataggtttgtggaatagtaagtaacctgatgttacctgaagtggataagtatatgtgcagatggttcctgtataagatctgcttcttgcatatcagcttgagttgttcttggctcaagaatggcctagagcagtagatcttcatggcactgaaatcgacgatgttcttattttattaatgctggccagaacatcaatgtgatatggttgtggcatgaaaaaaaaaaaaaaaa

SEQ ID NO: 3744 - protein, 125 aa, Triticum aestivum
  misc_feature: Ceres CLONE ID no. 779539
  misc_feature: Ceres CDNA ID no. 25892652
  misc_feature (13)..(44): Pfam Name: SAM_1 PFAM Desc: SAM domain
  misc_feature: Homolog of GI Number: 77556324 NR Desc: AC009176 putative heat
MSRGRSPEPLDFFIWTVEDVGLWLEEINLGGYRQVFEENSVNGEYLESLSMFTTEQILRFIRRCHMKWGDFITLCKELRRIKVACLKGEQEVRRPWWAPSCLSVVFVRAAKRNRQSRVVSLKLEP

SEQ ID NO: 3745 - DNA, 664 bp, Triticum aestivum
  misc_feature: Ceres CLONE ID no. 779923
  misc_feature: Ceres CDNA ID no. 40351346
  CDS (75)..(491): REFERENCED BY SEQ ID NO: 3746
actcgttctatctaattcagtttttttctcccatcataaaaaaccgaccctctcctttccctcttcaccaaccaatggctcccccaaaggccgagaagaagcccgcggagaaaaagcccgcagagaaggctccggcggagaagaagcccaaggccgagaagaagatatcgaaggaaggaggaagcgagaagaagaagaagagaacaaagaagagcgtggagacctacaagatttacatcttcaaggtgctgaagcaggttcaccccgacatcggaatctcaagcaaggccatggggatcatgaacagtttcataaacgacatcttcgagaagctcgcccaggagtcgtcgcgattggctaggtataacaagaagcctaccattacttccagggagatccaaacggcggtgcgtttggtcctccctggggagttggccaaacacgctgtctctgaaggtaccaaggccgtcaccaagttcaccagctcttgattcgttttgtttcctgtgtttcgattagggttttctgttgaccccgatttgattcgcatttttaaattagggttttattttcctttttgttgcttttgagggtgtagatgtaaaattaaagctttatttttaaataatataaatgccgttttttaacaaaaaaaaaaaaaaaa

SEQ ID NO: 3746 - protein, 138 aa, Triticum aestivum
  misc_feature: Ceres CLONE ID no. 779923
  misc_feature: Ceres CDNA ID no. 40351346
  misc_feature: No seed is being produced by the plant
  misc_feature: The plant flowers significantly late compared to wild-type.
  misc_feature: Useful for biocontainment applications
  misc_feature: Useful for making plants with modulated flowering time
  misc_feature (45)..(117): Pfam Name: Histone PFAM Desc: Core histone H2A/H2B/H3/H4
MAPPKAEKKPAEKKPAEKAPAEKKPKAEKKISKEGGSEKKKKRTKKSVETYKIYIFKVLKQVHPDIGISSKAMGIMNSFINDIFEKLAQESSRLARYNKKPTITSREIQTAVRLVLPGELAKHAVSEGTKAVTKFTSS

SEQ ID NO: 3747 - DNA, 721 bp, Triticum aestivum
  misc_feature: Ceres CLONE ID no. 780025
  misc_feature: Ceres CDNA ID no. 25446636
  CDS (156)..(479): REFERENCED BY SEQ ID NO: 3748
aaaataaataccccacacatcaattgctttgatcccagcatctcctcaaaactcaagcattgcatccctcttgatttgtagtttgttttgtgctttagataaaagttctgccaaatcaagaggggttttaagatcatagtgtgtgttttgcaacaatggctaagttctttgctgctatgatcttggcactctttgccatttccatacttcaaacagtggtaatggctgctaatgaacaaggaggccacttgtatgacaacaagagcaaatatggaagtggaagtgtcaagagttaccaatgcccatcacaatgctcgaggagatgtagccagacccaataccacaagccctgcatgtttttctgtcagaagtgctgcaggaaatgcctgtgtgtgcccccggggtattatggtaataaagctgtgtgcccttgctacaacaactggaagaccaaggaaggaggacccaagtgcccttgagcttcaacttgttcaacttcaattgtcgctttcctacatttttattgcttccttccttgtgccaatttaatgcactagctaccaaatgctactagccccttttggtggcactctatgatattatgtttttatgtattttggtgtatcactccttgggccttgtttgcctttaatgagagtggcttattaatatcaatatatcacctaccaaacttattgctagcacaaaaaaaaaaaaaaaa

SEQ ID NO: 3748 - protein, 107 aa, Triticum aestivum
  misc_feature: Ceres CLONE ID no. 780025
  misc_feature: Ceres CDNA ID no. 25446636
  misc_feature (4)..(107): Pfam Name: GASA PFAM Desc: Gibberellin regulated protein
  misc_feature: Homolog of GI Number: 56236466 NR Desc: Gip1
  misc_feature: Homolog of GI Number: 55584076 NR Desc: Gasa4
  misc_feature: Homolog of GI Number: 16516823 NR Desc: Gip1
  misc_feature: Homolog of GI Number: 16516825 NR Desc: Gip1
  misc_feature: Homolog of GI Number: 14532848 NR Desc: putative GASA4 protein
  misc_feature: Homolog of GI Number: 950099 NR Desc: gibberellin
  misc_feature: Homolog of GI Number: 2146734 NR Desc: gibberellin
  misc_feature: Homolog of GI Number: 44681330 NR Desc: At1g74670
  misc_feature: Homolog of GI Number: 12324817 NR Desc: GAST1
  misc_feature: Homolog of GI Number: 50251529 NR Desc: putative gibberellin
  misc_feature: Useful for making ornamental plants with modified leaves
  misc_feature: Useful for making plants with increased biomass and foliage
  misc_feature: Useful for making stronger plants
MAKFFAAMILALFAISILQTVVMAANEQGGHLYDNKSKYGSGSVKSYQCPSQCSRRCSQTQYHKPCMFFCQKCCRKCLCVPPGYYGNKAVCPCYNNWKTKEGGPKCP

SEQ ID NO: 3749 - DNA, 1191 bp, Triticum aestivum
  misc_feature: Ceres CLONE ID no. 780190
  misc_feature: Ceres CDNA ID no. 25892313
  CDS (141)..(737): REFERENCED BY SEQ ID NO: 3750
atcccatctcatctcggcacgttcgtcgcctcgtgcgcatcaccagtccaccgcaatccccatttcccaaagctcgaccaaagccccccgcctcgtcctcctcgccgcgcaccaaaccctagctatccccgccgatcccaatggccacccaccaccggcccctccacgccctcctcggcggcggcgcagtcgccgacctgctgctctggaggcggaggaacgcctccgcggcggccgtggccggcgcctcggtcgtctggttcctcttcgagcgcgccgggtacagcctcgcgtcggtcctctccaacgccctcctcctcctcgtcgtcatcctcttcttctgggccaagtccgcctcgctgctcaacagacctcttccaccagtgcctaatctagaggtctcagatgtggttgttgagaaagctgtagttcgggctcttgtatgggtaaacaaggtgttggctgttgcccatgacattgccatcaagagagacaggacagtttttatacaggttataatggctctatgggtggtttcatgtattgggatgctcttcaacttctttacgctcatttacattggtgtactactcgctctgttggttcccccggtatatgagaggcaccaggatgttattgatgaaaaggttggtttagtacacagcatactgtcaaggcacttgaataccgccattagcaagacagggcaaccacctaaacaaaagaaggccgagtagaagaaatattttggcccatttggaagctctccagttgtccagcgcagttggcctcgtcctcagagtctctataccgtgatccatccaccgctgagagtatttctggatatccagggcataatgtttaactgctgatacgtgggtttagatgcacgctcttcagtctgagaaacggaatgatttgtatattatttccatgaacatgaaacttgccgaggtttacatgttgtggataatgacatataccttttctcgcaacatccttctctctatggctctacgcgcgatgtcgtgtcttgcatgtacaaatgcagtgcttgttcgagtctttggttctgtatgtctactctgcagtccgaagggggtggttgcactgaaaaggtaccacgcgtagctggtgagttgtatgttgtatatgctaaccttttatgcacttacaaaaaaaaaaaaaaaa

SEQ ID NO: 3750 - protein, 198 aa, Triticum aestivum
  misc_feature: Ceres CLONE ID no. 780190
  misc_feature: Ceres CDNA ID no. 25892313
  misc_feature (17)..(173): Pfam Name: Reticulon PFAM Desc: Reticulon
  misc_feature: Homolog of GI Number: 50929523 NR Desc: OSJNBa0043A12.26
  misc_feature: Homolog of GI Number: 38604042 NR Desc: At2g15280
  misc_feature: Homolog of GI Number: 52076447 NR Desc: putative 24 kDa seed maturation protein
  misc_feature: Homolog of GI Number: 50251960 NR Desc: putative 24 kDa seed maturation protein
  misc_feature: Homolog of GI Number: 78714222 NR Desc: reticulon
  misc_feature: Homolog of GI Number: 30681541 NR Desc: reticulon family protein
  misc_feature: Homolog of GI Number: 34904202 NR Desc: P0492F05.25
  misc_feature: Homolog of GI Number: 50923537 NR Desc: OSJNBa0016N04.6
  misc_feature: Homolog of GI Number: 30681227 NR Desc: reticulon family protein
MATHHRPLHALLGGGAVADLLLWRRRNASAAAVAGASVVWFLFERAGYSLASVLSNALLLLVVILFFWAKSASLLNRPLPPVPNLEVSDVVVEKAVVRALVWVNKVLAVAHDIAIKRDRTVFIQVIMALWVVSCIGMLFNFFTLIYIGVLLALLVPPVYERHQDVIDEKVGLVHSILSRHLNTAISKTGQPPKQKKAE

SEQ ID NO: 3751 - DNA, 669 bp, Triticum aestivum
  misc_feature: Ceres CLONE ID no. 780415
  misc_feature: Ceres CDNA ID no. 40351347
  CDS (75)..(491): REFERENCED BY SEQ ID NO: 3752
actcgttctatctaattcagtttttttctcccatcataaaaaaccgaccctctcctttccctcttcaccaaccaatggctcccccaaaggccgagaagaagcccgcggagaaaaagcccgcagagaaggctccggcggagaagaagcccaaggccgagaagaagatatcgaaggaaggaggaagcgagaagaagaagaagagaacaaagaagagcgtggagacctacaagatttacatcttcaaggtgctgaagcaggttcaccccgacatcggaatctcaagcaaggccatggggatcatgaacagtttcataaacgacatcttcgagaagctcgcccaggagtcgtcgcgattggctaggtataacaagaagcctaccattacttccagggagatccaaacggcggtgcgtttggtcctccctggggagttggccaaacacgctgtctctgaaggtaccaaggccgtcaccaagttcaccagctcttgattcgttttgtttcctgtgtttcgattagggttttctgttgaccccgatttgattcgcatttttaaattagggttttattttcctttttgttgcttttgagggtgtagatgtaaaattaaagctttatttttaaataatataaatgccgttttttaaaaaaataaaaaaaaaaaaaaaa

SEQ ID NO: 3752 - protein, 138 aa, Triticum aestivum; identical to SEQ ID NO: 3746
  misc_feature: Ceres CLONE ID no. 780415
  misc_feature: Ceres CDNA ID no. 40351347
  misc_feature: No seed is being produced by the plant
  misc_feature: The plant flowers significantly late compared to wild-type.
  misc_feature: Useful for biocontainment applications
  misc_feature: Useful for making plants with modulated flowering time
  misc_feature (45)..(117): Pfam Name: Histone PFAM Desc: Core histone H2A/H2B/H3/H4

SEQ ID NO: 3753 - DNA, 1733 bp, Triticum aestivum
  misc_feature: Ceres CLONE ID no. 780730
  misc_feature: Ceres CDNA ID no. 40351348
  CDS (65)..(1576): REFERENCED BY SEQ ID NO: 3754
acctcgcgcctcgcagcagcaccaaccaaccaacacagctccagtccccgcccgccccgccacgatggtcgccacggcgaagatcccgcagcggcagctcttcatcgacggcgactggcgcgcgcccgcgctcggccgccgcctccccgtcatcaaccccaccaccgaggcctccatcggcgagatcccggcgggcacctcggaggacgtggacgcggcggtggcggccgcgcgggcggccctcaggaggaaccgcggccgcgactgggcccgcgccccgggcgccgtccgggccaagtacctccgcgccatcgccgccaagatgattgagcggaaatctgatctggctaggctagaggcacttgattgcggcaagcctcttgatgaagcggcatgggacatggacgatgttgccggctgctttgagttcttcgcgggccatgctgaagccttagacaaaaggcaaaatgctgcagttgctctcccggagaattttaaatgccatcttaagaaggaacctattggtgtagttgctctaatcacaccttggaactatcctctcctgatggctgtatggaaggtagcccctgctctggcagctggttgtacagctgtactgaaaccatctgaattagcttccgtgacttgcttagagcttggtgatgtgtgtaaagagattggtcttccatcaggtgtcttaaatattgtgactggattaggtcatgaagctggcgctcctttgtcgtcacaccctgatgtcgacaaggttgcatttaccgggagctatgcaaccggtcaaaagattatggttgctgcagctcctacagtcaagcctgttacattggaacttggtggcaaaagtcctattgtagtatttgatgatgtcgacattgacaaagctgttgagtggactctatttgggtgcttttggaccaacggtcagatttgcagtgcgacatctcgtcttcttatccataaaaacatcgctaaagaattcgtcgacaggatggttgcatggtccaaaaatatcaaggtgtcagacccgctcgaggaaggttgcaggcttgggccagttgttagtgaaggacagtatgagaagatcaagaagtttgtagcgaatgctaaaagtgaaggtgccaccattctgactgggggtgtcaggcccaagcatctggagaaaggtttcttcattgaacccacaatcatcactgacatcaacacatcaatggagatttggagggaggaagtctttggtccagtcctgtgtgtgaaggaattttctaccgaagaggaagccatcgaactggccaatgatactcattatggtctggctggtgccgtgatttctggtgaccgtgaccgatgccagagattagctgaggagatcgacgcggggtgcatctgggtgaactgctcgcagccttgcttctgccaagctccgtggggcgggaacaagcgcagtggctttgggcgcgagctaggagaaggggggatcgataactacctgagcatcaagcaagtcaccgagtacacatctgatgcgccgtggggatggtacaaggctccggctaactaagatgtaattgagctggttcgaggacctgtgtctgttccatcagaggataaatctgtgcgccggcctttgtagtggtgaataaatgtagtttgccatgtactcctgaacctttcttgcaaaataaatggcatgagttttgtgaaaaaaaaaaaaaaaa

SEQ ID NO: 3754 - protein, 503 aa, Triticum aestivum
  misc_feature: Ceres CLONE ID no. 780730
  misc_feature: Ceres CDNA ID no. 40351348
  misc_feature (18)..(486): Pfam Name: Aldedh PFAM Desc: Aldehyde dehydrogenase family
MVATAKIPQRQLFIDGDWRAPALGRRLPVINPTTEASIGEIPAGTSEDVDAAVAAARAALRRNRGRDWARAPGAVRAKYLRAIAAKMIERKSDLARLEALDCGKPLDEAAWDMDDVAGCFEFFAGHAEALDKRQNAAVALPENFKCHLKKEPIGVVALITPWNYPLLMAVWKVAPALAAGCTAVLKPSELASVTCLELGDVCKEIGLPSGVLNIVTGLGHEAGAPLSSHPDVDKVAFTGSYATGQKIMVAAAPTVKPVTLELGGKSPIVVFDDVDIDKAVEWTLFGCFWTNGQICSATSRLLIHKNIAKEFVDRMVAWSKNIKVSDPLEEGCRLGPVVSEGQYEKIKKFVANAKSEGATILTGGVRPKHLEKGFFIEPTIITDINTSMEIWREEVFGPVLCVKEFSTEEEAIELANDTHYGLAGAVISGDRDRCQRLAEEIDAGCIWVNCSQPCFCQAPWGGNKRSGFGRELGEGGIDNYLSIKQVTEYTSDAPWGWYKAPAN

SEQ ID NO: 3755 - DNA, 607 bp, Triticum aestivum
  misc_feature: Ceres CLONE ID no. 780800
  misc_feature: Ceres CDNA ID no. 25446637
  CDS (93)..(332): REFERENCED BY SEQ ID NO: 3756
gttctagtgtatgtgattgttgtgactcgttcttcttcgtcgttatcttcttcttttgttgtttgtgtgtttgttttttctctcacctgaaaatgtcttgctgcggtggtaactgtggttgcggaagcgcctgcaagtgcggcaacggctgcggaggctgcaagatgtacccagacttgagctacaccgagtcaaccaccaccgagaccttggtcatgggagtggcaccagttaaggctcaattcgagagtgctgaaatgggtgttcccgctgagaacgatggctgcaaatgtggagctaactgcacctgcaacccctgcacttgcaagtgaggtgttggagagctaaagcttcaagcagaaatggcccttagaaataatgataaaaactatatgtagtttcaaaacttcaaaattatgtagtatgtattatgttgcactctggtgttttgtgtctaaacaaacacccttagaataaagtggtcatttcttgcccttgagcaagttcaagtgttttggacttgtgatgggtgtgttaaggtcatggttgccttttttatatatatatatatatataaatgtttggtaaaacaaaaaaaaaaaaaaaa

SEQ ID NO: 3756 - protein, 79 aa, Triticum aestivum; identical to SEQ ID NO: 1962
  misc_feature: Ceres CLONE ID no. 780800
  misc_feature: Ceres CDNA ID no. 25446637
  misc_feature (1)..(78): Pfam Name: Metallothio_2 PFAM Desc: Metallothionein
  misc_feature: Homolog of GI Number: 47076854 NR Desc: type 2 metallothionein
  misc_feature: Homolog of GI Number: 541943 NR Desc: metallothionein
  misc_feature: Homolog of GI Number: 47076858 NR Desc: type 2 metallothionein
  misc_feature: Homolog of GI Number: 47076850 NR Desc: type 2 metallothionein
  misc_feature: Homolog of GI Number: 71040685 NR Desc: metallothionein
  misc_feature: Homolog of GI Number: 2815246 NR Desc: class I type 2 metallothionein
  misc_feature: Homolog of GI Number: 71040683 NR Desc: type 2 metallothionein
  misc_feature: Homolog of GI Number: 74476676 NR Desc: type 2 metallothionein
  misc_feature: Homolog of GI Number: 47076870 NR Desc: type 2 metallothionein
  misc_feature: Homolog of GI Number: 747906 NR Desc: metallothionein

SEQ ID NO: 3757 - DNA, 708 bp, Triticum aestivum
  misc_feature: Ceres CLONE ID no. 780814
  misc_feature: Ceres CDNA ID no. 40351349
  CDS (71)..(463): REFERENCED BY SEQ ID NO: 3758
ctgaacggaaaagcactggcgcagctaccctgaggcttctcttctcttctcttctctgtcgtgagtcaccatggtgagggttagtgtgctgaacgatgctctgaagagcatgtacaatgctgagaaaaggggaaagcgccaagtcatgattaggccatcctccaaagtcattatcaaattccttttggtgatgcaaaagcacggatacatcggagagtttgagtatgttgatgaccacagggctggtaaaatcgtggttgaattgaacggtagactgaacaagtgtggggttattagtccccgttttgatgtgggcgtcaaagagattgaaggttggactgctaggcttctcccctcaagacagtttgggtatattgtattgactacctctgctggcatcatggatcatgaagaggctaggaggaaaaatgttggtggtaaggtattgggcttcttctactagtttaatttttatcaaggatgtcagggatttcaattttgagattcatcggttgtaatggaggataatgctagccccctagtagtatcaatcatagcaggacctgttttgtgatgttctttattttgtttgcaaaaccaagttggtaactattacttttcttttttctttatcgttagttttcctatatgtactggcaaagttgttttcaatggtaagaactttgattaacaaaaaaaaaaaaaaaa

SEQ ID NO: 3758 - protein, 130 aa, Triticum aestivum; identical to SEQ ID NO: 1762
  misc_feature: Ceres CLONE ID no. 780814
  misc_feature: Ceres CDNA ID no. 40351349
  misc_feature (5)..(130): Pfam Name: Ribosomal_S8 PFAM Desc: Ribosomal protein S8

SEQ ID NO: 3759 - DNA, 1058 bp, Triticum aestivum
  misc_feature: Ceres CLONE ID no. 780824
  misc_feature: Ceres CDNA ID no. 40351350
  CDS (65)..(754): REFERENCED BY SEQ ID NO: 3760
atcacaaacctaaaaccctacagccagccggagaagttgcaactgcgaacagaacaacttcaaaatgccaaaatccaagagaaatagacaagttacgctttcaaagacgaagaaaaagggaagagaccacaaagagacgatagtgaacggaataaaagatgctgcagaaaagtacgggcacgtgtacgtgttctctttcgagaacatgaggaatcagaaattcaaggagttcagggaccagttgaaatcgagtagcaggttctttctcggctctaacaaagtaatgcaagttgctttaggtcgctctgcttcggatgagatcagacccggccttcataaggtttcaaagctattgcgtggagattctgggatggttttcaccaatttgtcaaaggaagaagttgaaaggctgtttaaagaatttgaggagtatgactttgcaagaacaggaagcaatgccactgaaaaggtggatctcaaagagggtccattagagcaattcacccatgagatggaaccttttctcaggaagcaaggcatgcctgttcggttaaataaaggagttgtggagcttgtttcggattttgttgtttgtgaggaaggaaagcctttgtcacccgaggcttctcgtatactgcgtttaatgggaatcaagatggctacatttcgacttagcttaatttgcagatggagtcccgatgagtttgaactttacatcgatggaccagatgaatcagatatcgaatgctcgtaggacctcttttaaaacgtagaagattctggagccccatcctccaaagaaaaaagattacacaagatatgactgacgcatatgtaatttacatcttcagtgctatagactgtgtagcgttttttggattatgtattcttagaagagttgatttgtggaaatgcagagagatttctgtgaactaggccaagctgtaactttataaaaagttcaaattactgtgatacaattttgattggcttaggggtttttatttttgcttgttatatataatttctatcaatttggaagaaaaaaaaaaaaaaaa

SEQ ID NO: 3760 - protein, 229 aa, Triticum aestivum
  misc_feature: Ceres CLONE ID no. 780824
  misc_feature: Ceres CDNA ID no. 40351350
MPKSKRNRQVTLSKTKKKGRDHKETIVNGIKDAAEKYGHVYVFSFENMRNQKFKEFRDQLKSSSRFFLGSNKVMQVALGRSASDEIRPGLHKVSKLLRGDSGMVFTNLSKEEVERLFKEFEEYDFARTGSNATEKVDLKEGPLEQFTHEMEPFLRKQGMPVRLNKGVVELVSDFVVCEEGKPLSPEASRILRLMGIKMATFRLSLICRWSPDEFELYIDGPDESDIECS

SEQ ID NO: 3761 - DNA, 974 bp, Triticum aestivum
  misc_feature: Ceres CLONE ID no. 781037
  misc_feature: Ceres CDNA ID no. 40351351
  CDS (42)..(662): REFERENCED BY SEQ ID NO: 3762
aaccgaagacagacacacgtgaaaaagaaagcgctagaaagatggcgagtggacacacaacagctgcatccgtccgcgggccccgcttcgccggcgccggccgccgcggcgccctcctcctcgcgctgctcctcgccgccgcggccgccttactcccagtagccgagccttcctgcccccgagacaattcagtcgtgaaagatataaacaaaatgcaccagagcaactatggaattggaggattctcgcatataaccgttgcgggcgcgctagctcacggcatgaaggaggtggaggtgtggctccaaacaattagtgcgggccagaggacaccgatccacagacactcgtgtgaggaggtctttgttgtcctcaaagggagaggcactctcttgctggggtcgacctcactgccgtacccgggaacgcctcaggaaattcctgtctttcagaatagcacattcacggttcctgtaaatgatccacaccaggtttggaattctgatgaacatgaagatttacaggtgcttgtgatcatatcgcgcccacctgtgaagatatttctgtatgaagattggagtatgcctcacacggcagcgaagttgaagttccccttcgtctgggatgaggactgcttagacgcacctaaagatgaactgtaggttggaatgtgctcacatggcagcgcatcggcctcggtcagcgtactgatgaagtgcggtgtacagcttgcctgcctcctaaataatgcgcatgtctgtaacatcctttctcttggaacaacattttcgtcacggattatgtacttgagagcatgaagcagccttctgcagcaagaactatttccaaattttgaattaccactgtattctagtactagtagactgcaagcgtcgctgatcttggtcagagggtcattgttcagcagatttggtgttgattcccgaacaaaattttcaaaaaaaaaaaaaaaa

SEQ ID NO: 3762 - protein, 206 aa, Triticum aestivum
  misc_feature: Ceres CLONE ID no. 781037
  misc_feature: Ceres CDNA ID no. 40351351
  misc_feature (87)..(166): Pfam Name: Cupin_2 PFAM Desc: Cupin domain
MASGHTTAASVRGPRFAGAGRRGALLLALLLAAAAALLPVAEPSCPRDNSVVKDINKMHQSNYGIGGFSHITVAGALAHGMKEVEVWLQTISAGQRTPIHRHSCEEVFVVLKGRGTLLLGSTSLPYPGTPQEIPVFQNSTFTVPVNDPHQVWNSDEHEDLQVLVIISRPPVKIFLYEDWSMPHTAAKLKFPFVWDEDCLDAPKDEL

SEQ ID NO: 3763 - DNA, 755 bp, Triticum aestivum
  misc_feature: Ceres CLONE ID no. 781071
  misc_feature: Ceres CDNA ID no. 40351352
  CDS (76)..(486): REFERENCED BY SEQ ID NO: 3764
ataacactgtcactcttacaatctcagctcatagcattcttcttcttccaacgagaatcagtctttgtgttccaaatggctcgtacgaagcaaacagcaagaaagtccaccggaggaaaagctccaaggaagcagctcgccaccaaggcagcacgtaagtccgctccggcgacgggcggcgtgaagaagccccaccgtttcaggccggggacagtggctctgagggagattcggaagtaccagaagagcacggagcttctcataaggaagcttcctttccagaggctcgtaagggaaatcgctcaggacttcaagaccgatctacgcttccagagcagtgctgtctccgctcttcaggaagccgctgaggcctacctcgttgggctctttgaggataccaacctctgcgctattcatgctaagagggttaccattatgcccaaggacattcagctagctcgtaggattaggggcgagagagcttagggtttatgatttacaaagccgtagtgttttctaagggttattattttgcaatcgattccttcagcttagtattagggtgaaagtccttgttttattgtgactgtattggaaactcgtttctgtaacgtgagaaatattaatgttgagtcctctcattttaagcttaaacctgcttggatctgtagaattacatcgtgtttggtcgttattctgatttcataacataattaatagatgtttgggatttttctggaaaaaaaaaaaaaaaa

SEQ ID NO: 3764 - protein, 136 aa, Triticum aestivum; identical to SEQ ID NO: 588
  misc_feature: Ceres CLONE ID no. 781071
  misc_feature: Ceres CDNA ID no. 40351352
  misc_feature (58)..(134): Pfam Name: Histone PFAM Desc: Core histone H2A/H2B/H3/H4

SEQ ID NO: 3765 - DNA, 624 bp, Triticum aestivum
  misc_feature: Ceres CLONE ID no. 781082
  misc_feature: Ceres CDNA ID no. 40351353
  CDS (3)..(338): REFERENCED BY SEQ ID NO: 3766
atctccttttccaatcttgccctcggcctctaacccttctctgctctctctcttccatcgctcactctgacttcgcctgcgatacccaccaccaccatgcccacaaccttccatctgccgtcaccaaccacaccttccgccaccgttaccccttcctctgtttcacccgcattggaacccttcgctccacctcttctctctttcgcatttttctggtttttttttttcagattcgagagctcaatcgcaacaactccgtaagattgcgaacgtcgttccgatggtcatcgttgtcgtcgaatccaaagtccaatcgaccacctgcgctgcccttgtgaacgtgtttgcgtggacggtgtgaccaacttcttcaacaccgctcttcatttttctgggtttttagcaaatgctttctctttcattttttcagatcttcaccatgaaaaacattctctccctcctttgtgcttgtcgccaccgacaccgtccctggatctgttggccttgtcaacatcactaaccatttttatttcaattttagttgctctgaaattgtataatttggtttggagggcttgatatttgaaatgaatgagttactttctgttaaaaaaaaaaaaaaaa

SEQ ID NO: 3766 - protein, 54 aa, Triticum aestivum
  misc_feature: Ceres CLONE ID no. 781082
  misc_feature: Ceres CDNA ID no. 40351353
MPTTFHLPSPTTPSATVTPSSVSPALEPFAPPLLSFAFFWFFFFRFESSIATTP

SEQ ID NO: 3767 - DNA, 1127 bp, Triticum aestivum
  misc_feature: Ceres CLONE ID no. 781221
  misc_feature: Ceres CDNA ID no. 40041324
  CDS (97)..(921): REFERENCED BY SEQ ID NO: 3768
acactgtcacacactccctcgctcctaaaattccagtcacgagtcacaagctcactggacacaagcgctggtgtggcgagagcacgaagcagaagcatggttgcccgcgccacggcaacgttcctccccgtcctctccctgctcctgctccgtgccggcgcggacgacgactcggcgtttgtgtacgccgggtgctcgcaggggcgctacgacgccgggacgcagtacgagtcgggcgtggactccgtgctcacatccctcgccaacagcgcgccctacgccccctacgccaacatcacttccccctcggctttaccccccgtggccggcctctaccagtgccggtccgacctcccggcctccgtctgcaccggatgcgtgcgctccgccatctccaggctctcctccctctgctcctggtccgccggcggcgccgtgcagctgcgctcgtgcttcgtgcgctacgggaacgactccttcgtcgggaagccgaacacggccgtgctcttcaagaagtgcggcggctcgcccggggacgccggcggcgccgccatgagggactcggctctcggagggctcgcgtcctcggtggcgcccgccgggggtggctaccgcgccggcggagcggggggcgtgcaggccatgtcgcagtgcgtgggggacctcgacgccaaggcgtgctccgactgcgtctcggccgcggccgcgcagctcaaggcagggtgcggctacgccaccgccggcgaagtgtacctcggcaagtgctacgcgcgcttctggtccaacggtggcggcttcgtcagcggcgcaagctcgggaagtgcatacggatttgtgccgcgcatgcacggtgagcggctggctcttgctgtcgctggtttcttcgcttcgttggcctacttttcagttctactcgtctagttacggtcgcagtatggggttgagatcaatgttagctatgttacattattgccaacaccaacacgtatgtcgcgtattgaactggacacagtgttgttttgctccagtgtgtagcaaaaatatcatgttcttatacctgtaacttgtaacttagctgggtttccaaagtgtgtaactataaatctgatctaaaaaaataaaaaaaa

SEQ ID NO: 3768 - protein, 274 aa, Triticum aestivum
  misc_feature: Ceres CLONE ID no. 781221
  misc_feature: Ceres CDNA ID no. 40041324
  misc_feature: Homolog of GI Number: 50912503 NR Desc: 33 kDa secretory protein
  misc_feature: Homolog of GI Number: 52077118 NR Desc: 33 kDa secretory protein
  misc_feature: Homolog of GI Number: 30693130 NR Desc: receptor
  misc_feature: Homolog of GI Number: 42570641 NR Desc: 33 kDa secretory protein
  misc_feature: Homolog of GI Number: 50926855 NR Desc: OSJNBa0091D06.12
  misc_feature: Homolog of GI Number: 50911154 NR Desc: receptor
  misc_feature: Homolog of GI Number: 67987177 NR Desc: 4Fe
  misc_feature: Homolog of GI Number: 78101807 NR Desc: TPA: troponin H isoform 1
MVARATATFLPVLSLLLLRAGADDDSAFVYAGCSQGRYDAGTQYESGVDSVLTSLANSAPYAPYANITSPSALPPVAGLYQCRSDLPASVCTGCVRSAISRLSSLCSWSAGGAVQLRSCFVRYGNDSFVGKPNTAVLFKKCGGSPGDAGGAAMRDSALGGLASSVAPAGGGYRAGGAGGVQAMSQCVGDLDAKACSDCVSAAAAQLKAGCGYATAGEVYLGKCYARFWSNGGGFVSGASSGSAYGFVPRMHGERLALAVAGFFASLAYFSVLLV

SEQ ID NO: 3769 - DNA, 502 bp, Triticum aestivum
  misc_feature: Ceres CLONE ID no. 781448
  misc_feature: Ceres CDNA ID no. 40351354
  CDS (16)..(375): REFERENCED BY SEQ ID NO: 3770
aataagtaagtatcaatggcttccgaagaatcccagaacaagccccccagcgagcagtccactaccgaactcatcacgagcgcgaagctggtggcggaggcggcgcagtcggctctgaagagcgacagcgacaaagtggacaaggccaaggtggctgacgctgccggcgatcttctcgacgcggcggggaagtatggaaaacttgatgacaaacaaggcatagggcaatatgttgacaaggctgctgattatctgcataattaccagggtgataataccactgctccttcacagcctgcagagtctaaaggtgaagaaagtggtggtgggttaggtggtcttgcaaacttggctggaggcttcttcaaaaagtagttacaaagcaactaaataagaccttaattgagtccttattctcggtctagtagtggggtttgggtaatatgcaccagatcatagatttaaatcttgttattgtaaaaaaagaaaaagaaaaaaaaaa

SEQ ID NO: 3770 - protein, 119 aa, Triticum aestivum
  misc_feature: Ceres CLONE ID no. 781448
  misc_feature: Ceres CDNA ID no. 40351354
MASEESQNKPPSEQSTTELITSAKLVAEAAQSALKSDSDKVDKAKVADAAGDLLDAAGKYGKLDDKQGIGQYVDKAADYLHNYQGDNTTAPSQPAESKGEESGGGLGGLANLAGGFFKK

SEQ ID NO: 3771 - DNA, 603 bp, Triticum aestivum
  misc_feature: Ceres CLONE ID no. 781650
  misc_feature: Ceres CDNA ID no. 25891717
  CDS (73)..(411): REFERENCED BY SEQ ID NO: 3772
acttgcggctgcagtagagaagcactcttcgttcttcgactgtctacgatctgctttctctgaattgtgaaaatgtcgctcgtagaaactgcttgttcatacgcagctctcatccttcatgaagatggaattagtgtaactgctgacaagatcagcaccttgttgaaaactgcaaaggttccagtagactcttattggccaaccttgtttgctaaacttgctgagaagaaaaatcttggcgatttgatagcaaatgcggcaggcggtggtgcaccagttgctgttgcagctgccccagttgctgctgctgctggtggtgctgctgccgcagctccagctgctgaggagaaaaagaaggaagaaccggaagaagagagtgatgatgatatgggattcggcttgtttgattagggacattctcaatgatttggttaaattttgtggttctttaccttttaaggttactctggatattgtaggttttatttttgtgctggttatttatatttgtatacgacttgattttgtagtgttatatgaacttcggaatgtgggttttatgtccatttgagaaaaaaaaaaaaaataaaaaaaaaaaaaaaa

SEQ ID NO: 3772 - protein, 112 aa, Triticum aestivum
  misc_feature: Ceres CLONE ID no. 781650
  misc_feature: Ceres CDNA ID no. 25891717
  misc_feature (21)..(111): Pfam Name: Ribosomal_60s PFAM Desc: 60s Acidic ribosomal protein
  misc_feature: Homolog of GI Number: 78191426 NR Desc: acidic ribosomal protein P1a
  misc_feature: Homolog of GI Number: 20465333 NR Desc: putative 60S acidic ribosomal protein P1
  misc_feature: Homolog of GI Number: 21553441 NR Desc: 60S acidic ribosomal protein P1
  misc_feature: Homolog of GI Number: 20258887 NR Desc: putative acidic ribosomal protein
  misc_feature: Homolog of GI Number: 21592477 NR Desc: acidic ribosomal protein
  misc_feature: Homolog of GI Number: 21554797 NR Desc: acidic ribosomal protein p1
  misc_feature: Homolog of GI Number: 50940517 NR Desc: putative acidic ribosomal protein P1a
  misc_feature: Homolog of GI Number: 62857531 NR Desc: LOC549958
  misc_feature: Homolog of GI Number: 38382736 NR Desc: MGC68562 protein
  misc_feature: Homolog of GI Number: 2431769 NR Desc: acidic ribosomal protein P1a
MSLVETACSYAALILHEDGISVTADKISTLLKTAKVPVDSYWPTLFAKLAEKKNLGDLIANAAGGGAPVAVAAAPVAAAAGGAAAAAPAAEEKKKEEPEEESDDDMGFGLFD

SEQ ID NO: 3773 - DNA, 1327 bp, Triticum aestivum
  misc_feature: Ceres CLONE ID no. 783023
  misc_feature: Ceres CDNA ID no. 25893191
  CDS (85)..(1044): REFERENCED BY SEQ ID NO: 3774
gatcccaacacgctcgcggcggagaagagcacagcagtcgtcgacggagcatcgctaaccaagcgaagcgaggaggaggaagccatgggtgaacagggggagctcgccgcggagaagcacgtccgctacatcgtcaccgcggagaagaagaaggactcgttcgagtcgctggtgatggagcacctccgggccagcggcgcctactggggcctcaccacgctcgacctcctccacaagcttcacgccgtggacgccgccgaggtcgtcgactggatcatgtcgtgctaccacccggaatctggtgggttcggggggaacgtggggcacgacccgcatgtcctctacacgctcagcgccgtgcaggtcctctgcctcttcgatcggctcgatgttcttgatgcagacaaaattgctgactatattactggacttcaaaatgaggatggatcattttctggtgatatttggggtgaagttgatactaggttctcgtatatttccatatgcaccttgtcattactgcatcgtctgcacaaaattaatgtggaaaaggctgtagaatatattgttagctgtaagaacttggacggcggatttggagctatgccaggaggggagtctcacgctgggcagatattctgctgtgttggtgctctcgcaatcaccggctctttgcatcacattgatagagatctccttggatggtggctctgtgagcgccagtgtagagatggagggctcaatgggcgtcctgagaaacttgctgatgtgtgctactcatggtgggtgttatcaagcttgataattattgatagagtgcactggattgacaaggaaaaacttgcaaagttcatattgaactgtcaggacaaggaaaatggtggaatttcagatagaccagataatgcggtcgatatctaccacacgtactttggagttgcagggctttcattgatggagtatcctggagtgaagcctatcgatcctgcctacgccctccctttagatgttgtcaacaggttcttcttgacaaaacaacagtagtgtgccttagctaggaagatcatgttgtgactgcgttggcgtcaggtcagcacgagtggagagcttacccctccttcggtagctcgcactgatgtttctgatcactcccatgcatgagatcatggctttgaacgttagtgcagacctcatatttaccatgaaatccggacacttggttatgtagaagagtgtaacgtccaaggactgagaatcaaattcaatcaagattattcttgttggaatagtataatctttcaatattaaaaaaaaaaaaaaaaaaaaa

SEQ ID NO: 3774 - protein, 319 aa, Triticum aestivum
  misc_feature: Ceres CLONE ID no. 783023
  misc_feature: Ceres CDNA ID no. 25893191
  misc_feature (248)..(292): Pfam Name: Prenyltrans PFAM Desc: Prenyltransferase and squalene oxidase repeat
  misc_feature: Homolog of GI Number: 28466951 NR Desc: At4g26580
  misc_feature: Homolog of GI Number: 21594047 NR Desc: Rab geranylgeranyltransferase
  misc_feature: Homolog of GI Number: 42573347 NR Desc: geranylgeranyl transferase type II beta subunit
  misc_feature: Homolog of GI Number: 34148075 NR Desc: putative Rab geranylgeranyl transferase type II beta subunit
  misc_feature: Homolog of GI Number: 50947569 NR Desc: putative Rab geranylgeranyltransferase
  misc_feature: Homolog of GI Number: 21536826 NR Desc: geranylgeranyl transferase type II beta subunit
  misc_feature: Homolog of GI Number: 12322017 NR Desc: geranylgeranyl transferase type II beta subunit
  misc_feature: Homolog of GI Number: 21359854 NR Desc: Rab geranylgeranyltransferase
  misc_feature: Homolog of GI Number: 1216504 NR Desc: geranylgeranyl transferase type II beta
  misc_feature: Homolog of GI Number: 1552549 NR Desc: rab geranylgeranyl transferase
MGEQGELAAEKHVRYIVTAEKKKDSFESLVMEHLRASGAYWGLTTLDLLHKLHAVDAAEVVDWIMSCYHPESGGFGGNVGHDPHVLYTLSAVQVLCLFDRLDVLDADKIADYITGLQNEDGSFSGDIWGEVDTRFSYISICTLSLLHRLHKINVEKAVEYIVSCKNLDGGFGAMPGGESHAGQIFCCVGALAITGSLHHIDRDLLGWWLCERQCRDGGLNGRPEKLADVCYSWWVLSSLIIIDRVHWIDKEKLAKFILNCQDKENGGISDRPDNAVDIYHTYFGVAGLSLMEYPGVKPIDPAYALPLDVVNRFFLTKQQ

SEQ ID NO: 3775 - DNA, 675 bp, Triticum aestivum
  misc_feature: Ceres CLONE ID no. 783242
  misc_feature: Ceres CDNA ID no. 40351355
  CDS (1)..(444): REFERENCED BY SEQ ID NO: 3776
aatcccgtccttttcgcactcaattctgcgccaggcaagggccctgctgcagcgatctcgttggaaatccgtcttgttctgcggtgcttcctagtttccacgatgaagctgatcgcagcctaccttctcgcctacctgggcgggaactcttccccaagtgccgctgacgtcaagaacatccttgactcagttggtgctgaggctgatgaagaaaagcttgagttccttcttgctgaactcaaaggcaaggacatcacagaagtgattgcatctggaagggagaagtttgccgctgtgccttcaggtgggggtgccattgctgtgggagctccagctgctgcatctggtggtgccgcagcacctgctgctgagtcaaagaaggaggagaaggttgaagagaaggaagaatctgatgaagacatgggtttcagtctgttcgactaagcgcttcagttcctcccccctaccctctgtttaccctagtatctgtcgtgtgtggcctgccacaacagcgcctgcataatatctagagacctgaagttcgtgctattttgcttgggacaatgtatatgtttagtaccttcgtatgtgagtgtgttactgcttccgcagccttgagaagttgattgataaatcgctggagttatgtttctcgcacgaaaaaaaaaaaaaaaa

SEQ ID NO: 3776 - protein, 113 aa, Triticum aestivum
  misc_feature: Ceres CLONE ID no. 783242
  misc_feature: Ceres CDNA ID no. 40351355
  misc_feature (17)..(112): Pfam Name: Ribosomal_60s PFAM Desc: 60s Acidic ribosomal protein
MKLIAAYLLAYLGGNSSPSAADVKNILDSVGAEADEEKLEFLLAELKGKDITEVIASGREKFAAVPSGGGAIAVGAPAAASGGAAAPAAESKKEEKVEEKEESDEDMGFSLFD

SEQ ID NO: 3777 - DNA, 2376 bp, Triticum aestivum
  misc_feature: Ceres CLONE ID no. 783521
  misc_feature: Ceres CDNA ID no. 40041325
  CDS (86)..(2206): REFERENCED BY SEQ ID NO: 3778
acaccacaaccgatctcatctgtattcacgaaaccgatctcatctattcgcgatcgttcttctcgtcggcgactagctcgatatcatggcgagcgcaggccagcggtgcgccggctgctacggcggcatcggacgctcggaggccgccttctcgtcggagtgcgcccacactttccacccgctatgcgtctccggcgcccactcgtgtccgtcctgttccgcgttctggagcttcacgccgaccttccagctgtctcccttgcacccgcagcctgcccggatgccgaccgtgcaccacggcgctgctacgtcgaggttagcgtgcggcgtatgcaagcgcgcctttggatacggcacccccaccttcacgtccgagtgtcagcacaggttccatctcgcctgcgtcaatggctgcgtctgcccggtctgcaacgcccgctggccataccaggtgtcctcgtacccttacttacacccgtaccagttcccgccgccgccgccgctgccgaggccgatgccgatgtggacgtctcccttcgtggaccagccatcgccagccgtgtacgacgacgacgagccgttggagcctctggcggcgccgctcgacgactgggatctcgtccaggacgcggccaacggcggaggcaggctcgtcctcgacgcgcactgcgagcacccagccgtcgcgaggggggagccgcacgacagcttcgtggtgctggtccacgccaaggcccctggcgcagccaccgcggcggcggcggagcaagcgcgcacgccgcttgacctcgtcaccgtgctggacgtcagcggcagcatgactgacctcaagatcgcgctgctgaagaaggctatggagttcgtcgtggaccagctcggccctgctgaccgtctcagcgtcgtggcattctcaacggacgcgcgtcgggtcatcccgctgacgcgcatgtcggacgccgggaaggtcaaggccaaggacgccgtgcagttgctcatggctgatggtggaacaaatatcctcaagggccttaccgaagctgccaaggtgctcgacggccgccggcacaagaacgccgtcgccagcgtcatccttctctcggacggccaggacacgtacaacctgggaggaggaggttacggctacggctcggtctcctactcgaagaactaccgtgctctcgtgccaggctccttgctgagtagcgccggccaccgatcgacaccgatacacacgtttggctttggcggcgaccacgactcgtcagccatgcacactatcgcggaggagacaggtggcactttctctttcatcgaggacgagacggtggtgcaggactcgttcgcgcagtgcatcggcgggctcctctccgtcgtcgtgcaggaggcgctcatcaccgtcaagtgcgtgcacccggtgcgcgtccgggcagtcaagtccggccgctacgacagcagcatcgacgcgtacgcgcgctccgcctctgtggacgtcggcgagctctacgcggacgaggagaggcgcttcctgctgctggtggatgtgcccaaggccggcgaagctgacgaagtgacgcagatcatgaaggtgacctgcacctaccgcgacacggcgacagggcaggtggtggacgtggccggcgaggacgtggcggtgcagaggccggtggaggtggccaaggaccagcagccgtccatggaggtcgcgcgggagaagttccgcgtggaggcaaccgaggacatcgcggcggcccgtgcggccgcggagcgcggcgagtacacggaggccgcgaggatactggaccgcaggcaggaggcgctgctgccggcgctggccgacgacgcgaggtgcaaggcgctggtggaggagctgcgcgagctgagcacccgcgtggcgagccggcgggagtacgagaagtcggggcgcgcgtgcatcctgacaggctacagctcccacgcgcagcagcgcgccgcgtcggcctgcgtggccggtgccggaggaggataccgttgcccaccgccgcccgggggggctgggggcatgggcatgggcggggcggcgtcggtttttggtttcggtgcggcgggggcgtatgcgacgccggcgatgcagatgatggtgggcgcgtcgaggcaagtacgtgagcagcagcagcaacagcagccatcgacgttgaagaggaagagcggaagcgacggcggcaactaaaatcgggcggccggtggatccaagtttcgctactgagtcttcgaccttcgaccgatattattatcttgcaattttatgtctcatattttatatatatcgggtagttattgagaacaatagtctaagttattgagaacatatattttagtactataaaaaaaaaaaaaaaa

SEQ ID NO: 3778 - protein, 706 aa, Triticum aestivum
  misc_feature: Ceres CLONE ID no. 783521
  misc_feature: Ceres CDNA ID no. 40041325
  misc_feature (234)..(422): Pfam Name: VWA PFAM Desc: von Willebrand factor type A domain
  misc_feature (80)..(115): Pfam Name: zf PFAM Desc: Zinc finger
  misc_feature: Homolog of GI Number: 50940729 NR Desc: zinc finger
  misc_feature: Homolog of GI Number: 50940731 NR Desc: zinc finger
  misc_feature: Homolog of GI Number: 50910591 NR Desc: zinc finger
  misc_feature: Homolog of GI Number: 50926352 NR Desc: OSJNBa0043L24.22
  misc_feature: Homolog of GI Number: 30694117 NR Desc: zinc finger
  misc_feature: Homolog of GI Number: 9759335 NR Desc: retroelement pol polyprotein
  misc_feature: Homolog of GI Number: 3928084 NR Desc: putative retroelement pol polyprotein
  misc_feature: Homolog of GI Number: 30687725 NR Desc: zinc finger
  misc_feature: Homolog of GI Number: 18700173 NR Desc: At2g38970/T7F6.14
  misc_feature: Homolog of GI Number: 8778841 NR Desc: T6D22.13
MASAGQRCAGCYGGIGRSEAAFSSECAHTFHPLCVSGAHSCPSCSAFWSFTPTFQLSPLHPQPARMPTVHHGAATSRLACGVCKRAFGYGTPTFTSECQHRFHLACVNGCVCPVCNARWPYQVSSYPYLHPYQFPPPPPLPRPMPMWTSPFVDQPSPAVYDDDEPLEPLAAPLDDWDLVQDAANGGGRLVLDAHCEHPAVARGEPHDSFVVLVHAKAPGAATAAAAEQARTPLDLVTVLDVSGSMTDLKIALLKKAMEFVVDQLGPADRLSVVAFSTDARRVIPLTRMSDAGKVKAKDAVQLLMADGGTNILKGLTEAAKVLDGRRHKNAVASVILLSDGQDTYNLGGGGYGYGSVSYSKNYRALVPGSLLSSAGHRSTPIHTFGFGGDHDSSAMHTIAEETGGTFSFIEDETVVQDSFAQCIGGLLSVVVQEALITVKCVHPVRVRAVKSGRYDSSIDAYARSASVDVGELYADEERRFLLLVDVPKAGEADEVTQIMKVTCTYRDTATGQVVDVAGEDVAVQRPVEVAKDQQPSMEVAREKFRVEATEDIAAARAAAERGEYTEAARILDRRQEALLPALADDARCKALVEELRELSTRVASRREYEKSGRACILTGYSSHAQQRAASACVAGAGGGYRCPPPPGGAGGMGMGGAASVFGFGAAGAYATPAMQMMVGASRQVREQQQQQQPSTLKRKSGSDGGN

SEQ ID NO: 3779 - DNA, 843 bp, Triticum aestivum
  misc_feature: Ceres CLONE ID no. 783575
  misc_feature: Ceres CDNA ID no. 35383290
  CDS (112)..(594): REFERENCED BY SEQ ID NO: 3780
accaagcagccgctgcaacatactgcaactactttgcactagcaacacaacgctctgactgagctcatagccttcgcgcctgcccgtcttaactagttgatcgccgcagcaatggcctccaccaacagctggacccacgagattgagtcctcagtcgcggcaccccgcctgttccgtgccggcgtcatggactggcacactctggcacccaagctcgcgccccacatcgtcgccagcgcccatcccgtcaacggcgaaggcggcatcggcagcgtcaggcagttcaactttacctcagccatgccctttagcgtcatgaaggagaggctagagttcctggacgaggagaagtgcgagtgcaagtcaaccctcatcgagggcggcggcatcggctcggccatcgagaccgcaacgtcgcacatcaaggtggagccggcggccaacggcgggagcgtcgtgaaagtggactcgacgtacaagctgctgccaggcgtggaggtgaatgacgaaatcaccaaggccaaggaatccgtcaccgccatcttcaaggccgccgaggcctacctcatcgccaaccccgacgcctacaactgaatctgttgagagatatcatacatgattatgatgtccctagtttgaattccgtgtgttttcttcccgatgtaataaagctgctccaatctctaagctataatagtgacgccgagcgcgagagcaccgccagagtgtggacgtgagaagttaaaaggttgagtatttgtaactaccaaagggttctgttgtttgatgatattggtgcttgcttatgtgaaatacctaaacactctaaaaaaaaaaaaaaaa

SEQ ID NO: 3780 - protein, 160 aa, Triticum aestivum
  misc_feature: Ceres CLONE ID no. 783575
  misc_feature: Ceres CDNA ID no. 35383290
  misc_feature (2)..(155): Pfam Name: Bet_v_I PFAM Desc: Pathogenesis
  misc_feature: Homolog of GI Number: 18539471 NR Desc: JIOsPR10
  misc_feature: Homolog of GI Number: 58978027 NR Desc: pathogenesis
  misc_feature: Homolog of GI Number: 58978057 NR Desc: pathogenesis
  misc_feature: Homolog of GI Number: 58977980 NR Desc: pathogenesis
  misc_feature: Homolog of GI Number: 58978001 NR Desc: pathogenesis
  misc_feature: Homolog of GI Number: 1408222 NR Desc: pathogenesis
  misc_feature: Homolog of GI Number: 1572683 NR Desc: early flowering protein 1
  misc_feature: Homolog of GI Number: 42565393 NR Desc: pathogenesis
  misc_feature: Homolog of GI Number: 939857 NR Desc: pathogenesis related protein
  misc_feature: Homolog of GI Number: 4210626 NR Desc: intracellular pathogenesis
MASTNSWTHEIESSVAAPRLFRAGVMDWHTLAPKLAPHIVASAHPVNGEGGIGSVRQFNFTSAMPFSVMKERLEFLDEEKCECKSTLIEGGGIGSAIETATSHIKVEPAANGGSVVKVDSTYKLLPGVEVNDEITKAKESVTAIFKAAEAYLIANPDAYN

SEQ ID NO: 3781 - DNA, 2036 bp, Triticum aestivum
  misc_feature: Ceres CLONE ID no. 783849
  misc_feature: Ceres CDNA ID no. 25447254
  CDS (41)..(1537): REFERENCED BY SEQ ID NO: 3782
accgttttagtggatttatcccttaagtgctaatttagctatgattttatatactagccggaggagcagtaggagtgtcggcaacccgatggcgtccggcttcgggttcccgatactgtcaccagcggagatcgcggagcagctgttccagtacgggatcgcccccgtcgccaacctccgccccgagaacatcgccagcccgctccctggcgtcctcgcccgctccttcgactccttcgtcgatgcccccggggacggcgaggacgggctgctagggttcagcgacctggaggtgctggacaacccggagcaccacgcagaggccatccgggtgctacgcctctacaacaagtcgcaggccttcctcgactccatccagttcaaggacttcacgctcgccgacttcagccgccccaccccgcgccgcgtcgtcgaggtcctcagcgccctcatcaacttcctcttctacagggaggagaaggtcaccctcctgcagccaatcgtcagcgagacccccgactaccacgagcgcactctggagctcaaggccaggatggcccagcttcagaaggagatcggggatcatgagctcgcggagcagatggaggagcccatggcccagcagctggaagcggacgtcaatgctctgcagcagaaagttcaggtttacaacaagcagcaactggccctgcgagcaaaggccgcagtcatcaatgacaagaaagaggagattcacaggaagataacccaggctgattttgagttgactaaacatgcccaagaaaactccagattgatgtccaaattagtgaagtccccagaaaaagttcagagggccttggaagagaagaaatcagcccgtgctaagttgaaagagtctgagaaaatagcaatgcaaaatgatcaagagaaatctgccgctttggagatacgcaacaaggctcatgaaaaactgacgaaacaacactctaaaatccaggatgtacatgaacagcttgttgctgctaaaacagttgaaaaggaagttaaagctcgcaaagcaaagcttaatgatgaaagtgtatcagttatgtcattcgacgcacagattgttgattggcaaggaaaagtacatgaaatggaggagcgtctcaaggggaaagtgaaagaaaggaatcaaataatagcagatgaaaatcagaagctgggtgctttgagctccgagactgagggtaaactgcggtgccttgaacctagagaaaagaaagtagaggcaacgatcgctaaggcttcaaatttgtgttcggaagctgcttcatcaaggactgctgccacagcagaacagcagaaaattcgtgcaaaattcaacagcattgtgaaggcgttcaacacctacatggatagcgtcgaccctttcctcgagcgagttgaggaggttggcaggcaatcggcgggggaaggcgcctctgcccccgatccatctgctgctgtcacaacaaaaaccacaccgagagccagcgcaatgagcaagaagtcgagggctaggaaaaggacatgagctgtgcttcttgccagtgcatggatggaatacccagtactcccttggtctcggtgcataggacatgcgcgtagttctagggtgaatttgactaactaaaaatgtgatatatctcatcaaaagcagatcattggatacatatatgaatgtagtttctaaatatttttttgttaaatataatacatattagctagttaaattgatgacctagaactacgcacttgcccttgcaccgggacagagggagtacatatctttgtttatgtgtgcatgatgctgtagtagtgcctctagctgctattcatgtgctgaattatgtatgcgctggttggttcggatcggggctagttattgattgaggtgaccgaatgctacgggctaatgttatcttcaatgtaaatatacaccgcatttctgacactttcatttttgctttggttgtgacttgtcatcagatacgattactttgtatgtctaaacttcaaaaaaaaaaaaaaaa

SEQ ID NO: 3782 - protein, 482 aa, Triticum aestivum
  misc_feature: Ceres CLONE ID no. 783849
  misc_feature: Ceres CDNA ID no. 25447254
  misc_feature (2)..(140): Pfam Name: Nuf2 PFAM Desc: Nuf2 family
  misc_feature: Homolog of GI Number: 41053469 NR Desc: similar to cell division cycle associated 1
  misc_feature: Homolog of GI Number: 19173290 NR Desc: putative COIL
  misc_feature: Homolog of GI Number: 24584810 NR Desc: CG5020
  misc_feature: Homolog of GI Number: 45552035 NR Desc: CG5020
  misc_feature: Homolog of GI Number: 24584806 NR Desc: CG5020
  misc_feature: Homolog of GI Number: 28574245 NR Desc: CG5020
  misc_feature: Homolog of GI Number: 37051137 NR Desc: Nuf2 protein
  misc_feature: Homolog of GI Number: 2773363 NR Desc: microtubule binding protein D
  misc_feature: Homolog of GI Number: 11359723 NR Desc: proteophosphoglycan
  misc_feature: Homolog of GI Number: 72547018 NR Desc: proteophosphoglycan ppg3
MASGFGFPILSPAEIAEQLFQYGIAPVANLRPENIASPLPGVLARSFDSFVDAPGDGEDGLLGFSDLEVLDNPEHHAEAIRVLRLYNKSQAFLDSIQFKDFTLADFSRPTPRRVVEVLSALINFLFYREEKVTLLQPIVSETPDYHERTLELKARMAQLQKEIGDHELAEQMEEPMAQQLEADVNALQQKVQVYNKQQLALRAKAAVINDKKEEIHRKITQADFELTKHAQENSRLMSKLVKSPEKVQRALEEKKSARAKLKESEKIAMQNDQEKSAALEIRNKAHEKLTKQHSKIQDVHEQLVAAKTVEKEVKARKAKLNDESVSVMSFDAQIVDWQGKVHEMEERLKGKVKERNQIIADENQKLGALSSETEGKLRCLEPREKKVEATIAKASNLCSEAASSRTAATAEQQKIRAKFNSIVKAFNTYMDSVDPFLERVEEVGRQSAGEGASAPDPSAAVTTKTTPRASAMSKKSRARKRT

SEQ ID NO: 3783 - DNA, 669 bp, Triticum aestivum
  misc_feature: Ceres CLONE ID no. 784121
  misc_feature: Ceres CDNA ID no. 40041326
  CDS (87)..(395): REFERENCED BY SEQ ID NO: 3784
acctccgctttcctccctctcgcgccgccgccgccgctgccgccacctccgcaggcagcccaccgcgaagcgaggtcgaatcagccatggcagacgccaaggccacgacggcggtcaccctccgcacccgcaagttcatgaccaaccgcctgctcgcccgtaagcagttcgtgctcgaggtcatccacccgggccgcgccaacgtctccaaggcggagctgaaggagaggctcgccaaggtgtacgaggtgaaggaccccaagtaccgcctcatcaggaatggccttgctaccaaggtagagaagtcacgcaagcagatcaaggaaaggaagaacaggacaaagaagatccgtggtgtgaagaagaccaaggccggagatgccaagaagaaataagaacatttctgtcttcatcttttcactatcagcctttgcttggtttaggacggtatccctgtggcaatgttgctgagtgcttaattatgactagaaaagactatgccatttgtgtcatctcccgctatgttaagaggcattttgtagtatcttatgctaagattttgaagaacttggtcagactatctcatatacacctgttgtcgttgttcttggtttcggccattaatcagtcaaaatgcattgtgtgctttatttaaaaaaaaaaaaaaaa

SEQ ID NO: 3784 - protein, 102 aa, Triticum aestivum
  misc_feature: Ceres CLONE ID no. 784121
  misc_feature: Ceres CDNA ID no. 40041326
  misc_feature (28)..(76): Pfam Name: Ribosomal_S24e PFAM Desc: Ribosomal protein S24e
  misc_feature: Homolog of GI Number: 10803047 NR Desc: 40S ribosomal protein S24
  misc_feature: Homolog of GI Number: 34910730 NR Desc: putative 40S ribosomal protein S24
  misc_feature: Homolog of GI Number: 50906559 NR Desc: putative 40S ribosomal protein S24
  misc_feature: Homolog of GI Number: 53792560 NR Desc: putative 40S ribosomal protein S24
  misc_feature: Homolog of GI Number: 21554374 NR Desc: putative ribosomal protein s19 or s24
  misc_feature: Homolog of GI Number: 21555157 NR Desc: 40S ribosomal protein S19
  misc_feature: Homolog of GI Number: 445612 NR Desc: ribosomal protein S19
  misc_feature: Homolog of GI Number: 69608485 NR Desc: ribosomal protein S24e
  misc_feature: Homolog of GI Number: 15294059 NR Desc: 40S ribosomal protein S24
  misc_feature: Homolog of GI Number: 55634045 NR Desc:  similar to ribosomal protein S24
  misc_feature: Useful for making ornamental plants with modified flowers
  misc_feature: Useful for making ornamental plants with modified leaves
  misc_feature: Useful for making plants with altered leaf shape eg curled leaves
  misc_feature: Useful for making plants with altered leaf shape eg curled leaves
  misc_feature: Useful for making shorter plants
  misc_feature: Useful for making taller plants and plants with longer inflorescences
  misc_feature: Useful for sterility
MADAKATTAVTLRTRKFMTNRLLARKQFVLEVIHPGRANVSKAELKERLAKVYEVKDPKYRLIRNGLATKVEKSRKQIKERKNRTKKIRGVKKTKAGDAKKK

SEQ ID NO: 3785 - DNA, 1461 bp, Triticum aestivum
  misc_feature: Ceres CLONE ID no. 784222
  misc_feature: Ceres CDNA ID no. 25892654
  CDS (261)..(1097): REFERENCED BY SEQ ID NO: 3786
gaggaggaggaggaggccggagcccgcaccaggccgctgggagttctacccccgaaaggtggacctcgaatatttggtgcctcttatctctcgccaaggacgctggtgcctccttgtggaaataggaaaatttcttcatccacttcataattgttgaattgacactaagatttatttagcaatcagatttccggactctgagcagatctaacaggatctttaaaagagttcttttgtttgaaatttgttacttagtagcaatggtgaaggatcatctaatgctcaatgttgaccgcctaatggtgcctgaacccattgaggtcactggagcacccaaaagctcctcatcgagggacaccgctgcactgcccattacagggcattccttttttgcagttggagacagcatggttcctgaagaagaaccccttctgcagattacagagtgccgtatttgtcaggaggaagatgacattaagaatctagagagcccctgtgcttgcaccggcagtgtaaagtatgcgcatagggcttgtgtacaaagatggtgcaatgagaaaggagatgtgacatgtgaaatctgccatgagccgtatgaacatgggtacactgcacctcccagaccccatcctgatgaaactaccatcgatataagtggtggctggaccattactggtacagcatttgacttgcgtgatcctaggatcctggcagtagcacaaaaccacattatggaagctgaatatgatgattattcagccacgaatgccagcactgctgccttttgccgttctgctgctcttgtcttaatggctctcctactactgaggcatgcattgactctaactgatgaagatgatgatgacacttcagcaatgttttcacttttcttactgcgtgcggctggttttcttctcccattctatataatggcttgggctattagtatattgcagcgtcgcagacatcgacaggaggcagctgcgttggcagcaactgaggtggcattcatccttcagtctgggcaaggaagaggagtgcatttcaccatagcaccagattctcctgccacgccccagcacgaaccacaaccttgaagatggcagctgtggcgacatcggattgctggcttgcgcgaatcaccaaaggagttatggtttgctgccactgcagagccatgttatttacgtactttacgtcattgccctgagtgtaacgttctgagacgtgtcccagtttgtgcttccggattctgttagggttggcgttggccagggagtctcggtgagtggtgtgtataaagtaagaaagccattaggaccgtgtatgccggtcccaactgttaacttgaaagataccaagcagacggcttctctgaaggccactgtttcgcctatagtctttacatgcttgttgttttaaaaaaaaaaaaaaaaaaaaaaaagaaaaaaaaaaaaaaaa

SEQ ID NO: 3786 - protein, 278 aa, Triticum aestivum
  misc_feature: Ceres CLONE ID no. 784222
  misc_feature: Ceres CDNA ID no. 25892654
  misc_feature (63)..(108): Pfam Name: zf PFAM Desc: Zinc finger
  misc_feature: Homolog of GI Number: 50946099 NR Desc: zinc finger protein
  misc_feature: Homolog of GI Number: 77551787 NR Desc: Zinc finger
  misc_feature: Homolog of GI Number: 49533771 NR Desc: putative zinc finger protein
  misc_feature: Homolog of GI Number: 50909823 NR Desc: zinc finger
  misc_feature: Homolog of GI Number: 30692888 NR Desc: zinc finger
  misc_feature: Homolog of GI Number: 21537046 NR Desc: nucleoside triphosphatase
  misc_feature: Homolog of GI Number: 15223693 NR Desc: zinc finger
  misc_feature: Homolog of GI Number: 42570667 NR Desc: zinc finger
  misc_feature: Homolog of GI Number: 15217818 NR Desc: zinc finger
  misc_feature: Homolog of GI Number: 61866828 NR Desc:  similar to membrane
MVKDHLMLNVDRLMVPEPIEVTGAPKSSSSRDTAALPITGHSFFAVGDSMVPEEEPLLQITECRICQEEDDIKNLESPCACTGSVKYAHRACVQRWCNEKGDVTCEICHEPYEHGYTAPPRPHPDETTIDISGGWTITGTAFDLRDPRILAVAQNHIMEAEYDDYSATNASTAAFCRSAALVLMALLLLRHALTLTDEDDDDTSAMFSLFLLRAAGFLLPFYIMAWAISILQRRRHRQEAAALAATEVAFILQSGQGRGVHFTIAPDSPATPQHEPQP

SEQ ID NO: 3787 - DNA, 985 bp, Triticum aestivum
  misc_feature: Ceres CLONE ID no. 784894
  misc_feature: Ceres CDNA ID no. 25891275
  CDS (123)..(845): REFERENCED BY SEQ ID NO: 3788
aaagaaacaaaacgattggagacacaagccccgcgagagacctggctccgtcccccgcgcgaccaaaagcttcaggaggcggcggcggcggcggcggtcggcggcgcaggtattagttaatcatggtgttcagcaaggtggaagtgaacctgaaaaggctgcttgaggcggccccccgccagcagaatcaggctaagcttgtccattacataaccacagccagggagctgttggagcagcttggagctgaaattacaccagaaggaatatcaagtatttcaaaagctaagctgagtgagtattcagaaaagattgaagcactagctgccacgcttgcttctctagtgccagaaaatgaaaatctggttgatcagagtagagagcaagacaactcttatgaaagagaaagagaaaaggttgggagtccaatatccttatcatcaggattgcgaaggagatcgacggctcagatggaggttggaccaagcagtcatgaaagaaaagaaaaagacactggagcacctattaaattggatgcagaagctcaggctcatattgagaagcataggaagctgcaagaagatctgactgacgaaatggttgacttagcacgccagctgaaggagagtagccttttaatgaaccaatccgtgcaagatacagagaagatcctcgattccaccgagagagccgtggagcatagcctggcgagcactggtcgtgcaacggcgcgagcctcggaggtctactcgctggcctccaagacaacctgcttccagtggttgctcatctttctgatgacctgcatgtttgtcatggtggttctgctcatacggatcacctgatatcgccatggcgtgtcaccagtagccgttaagatagtactgcagtcttgtaaacagtccttttacgaagataaacttgaacatgctatgttccagacggagacgagtattgctgctcaccaacaaaaaaaaaaaaaaaa

SEQ ID NO: 3788 - protein, 240 aa, Triticum aestivum
  misc_feature: Ceres CLONE ID no. 784894
  misc_feature: Ceres CDNA ID no. 25891275
  misc_feature: Homolog of GI Number: 50947961 NR Desc: cation exchanger
  misc_feature: Homolog of GI Number: 50899258 NR Desc: cation exchanger
  misc_feature: Homolog of GI Number: 50947971 NR Desc: cation exchanger
MVFSKVEVNLKRLLEAAPRQQNQAKLVHYITTARELLEQLGAEITPEGISSISKAKLSEYSEKIEALAATLASLVPENENLVDQSREQDNSYEREREKVGSPISLSSGLRRRSTAQMEVGPSSHERKEKDTGAPIKLDAEAQAHIEKHRKLQEDLTDEMVDLARQLKESSLLMNQSVQDTEKILDSTERAVEHSLASTGRATARASEVYSLASKTTCFQWLLIFLMTCMFVMVVLLIRIT

SEQ ID NO: 3789 - DNA, 661 bp, Triticum aestivum
  misc_feature: Ceres CLONE ID no. 785234
  misc_feature: Ceres CDNA ID no. 40351356
  CDS (3)..(458): REFERENCED BY SEQ ID NO: 3790
tagctcattcctccccttccccacggccgatcccctcgatcccgagctcggttgtcgcccgcaccttcgtcgatcccgcaaccatcgactccccatcgctgcatcgccatgtccatgaggttcttcgtcgtctgattcatcgtctccaccaccggatcgaccccgggaaccacacggacgatgcccacgtcttcttcttcacccacggccgccgcgaccaacgccgtcgatctccaccaccggcacctcccggcctcgccgagctcgtccacggcctcctcaggacaccgagaccgacgccgctgctacccagtacgactacggtgttgacgacccctctctcttgtcagagcaaccagatgttggagcccaggatccagacgccaccgtcgactactactactcgggaggtgcctactactacgtgcagcccgctgacggcgaccaggagtagttaggaggatcccaggcaggaggcctacgcctctttcgatctgtatcccactttgtgctagccttcttaaggcacacttgtttaacttatgtctgtactcagatattgttgcttccgctaactcgtctatgatcgagctcttgtattcgagcctttgagccccctagcttgtaatatgatgcttctttgacaaaaaaaaaaaaaaaa

SEQ ID NO: 3790 - protein, 49 aa, Triticum aestivum
  misc_feature: Ceres CLONE ID no. 785234
  misc_feature: Ceres CDNA ID no. 40351356
MPTSSSSPTAAATNAVDLHHRHLPASPSSSTASSGHRDRRRCYPVRLRC

SEQ ID NO: 3791 - DNA, 1037 bp, Triticum aestivum
  misc_feature: Ceres CLONE ID no. 785235
  misc_feature: Ceres CDNA ID no. 24766518
  CDS (139)..(888): REFERENCED BY SEQ ID NO: 3792
accgaagcccaacccgaaacaccacttctcccccaaagccgccgagcttgcctgcgcgcacacaatcgagcaacccagcacctccgccgcccgggaagcccaaaccaaaccctaagcctccgcgaccggccgccggcgatggcccgctacgaccgcgcgatcaccgtcttctcccccgacggccacctcttccaggtcgagtacgccctcgaggccgtccgcaagggcaacgccgccgtcggcgtccgcggcaccgacaccgtcgtcctcggcgtcgagaagaagtccacccccaagctccaggactccaggtccgtgcgcaagatcgcgagcctggacacgcacgtcgcgctggcgtgcgcggggctcaaggcggacgcgcgggtgctcatcaaccgcgcccgcgtcgagtgccagagccaccgcctcaccgtcgaggaccccgtcaccgtcgagtacatcacccgctacatcgccggcctgcagcagaagtacacccagagcggcggggtacgccccttcggcctctccaccctcatcgtcggcttcgatccatacacggacaagcccgccctgtaccagaccgacccctccggcaccttctccgcctggaaggccaacgccaccgggaggaactccaactccatgcgggagttcctggagaagaactacaaggacacatccggcaaggagaccatcaagctcaccatccgagcccttctagaggttgttgagagtggtgggaagaacatcgagattgcagtgatgacaaagaaggatggccttcggcaactcgaggagactgaaattgatgaatatgttgccgagattgaggcagagaaggccgcggctgaggctgcaaagaagagcggcccgaaggatacctaattactgggtgtgctatatcttcattctgtcggccgaaaccttttagtgtgtcactgttacgttccataactttctttaaactgctttaacaagatattgaagtcattcgtaaatgaattgccttgttttcttgaaaaaaaaaaaaaaaa

SEQ ID NO: 3792 - protein, 249 aa, Triticum aestivum
  misc_feature: Ceres CLONE ID no. 785235
  misc_feature: Ceres CDNA ID no. 24766518
  misc_feature (27)..(210): Pfam Name: Proteasome PFAM Desc: Proteasome A
  misc_feature: Homolog of GI Number: 50726660 NR Desc: Proteasome subunit alpha type 7
  misc_feature: Homolog of GI Number: 76160964 NR Desc: proteasome
  misc_feature: Homolog of GI Number: 12229936 NR Desc: Proteasome subunit alpha type 7
  misc_feature: Homolog of GI Number: 77999287 NR Desc: proteasome
  misc_feature: Homolog of GI Number: 82621184 NR Desc: proteasome
  misc_feature: Homolog of GI Number: 10177129 NR Desc: 20S proteasome subunit PAD2
  misc_feature: Homolog of GI Number: 2315211 NR Desc: proteasome alpha subunit
  misc_feature: Homolog of GI Number: 21593040 NR Desc: multicatalytic endopeptidase complex  alpha chain
  misc_feature: Homolog of GI Number: 79314743 NR Desc: PAD1
  misc_feature: Homolog of GI Number: 2511582 NR Desc: multicatalytic endopeptidase
  misc_feature: Useful for delaying flowering time
  misc_feature: Useful for increasing chlorophyll and photosynthetic capacity
  misc_feature: Useful for increasing increasing anthocyanin content
  misc_feature: Useful for making bigger plants
  misc_feature: Useful for making ornamental plants with modified flowers
  misc_feature: Useful for making ornamental plants with modified leaves
  misc_feature: Useful for making plants with increased biomass
  misc_feature: Useful for making shorter plants
  misc_feature: Useful for sterility
MARYDRAITVFSPDGHLFQVEYALEAVRKGNAAVGVRGTDTVVLGVEKKSTPKLQDSRSVRKIASLDTHVALACAGLKADARVLINRARVECQSHRLTVEDPVTVEYITRYIAGLQQKYTQSGGVRPFGLSTLIVGFDPYTDKPALYQTDPSGTFSAWKANATGRNSNSMREFLEKNYKDTSGKETIKLTIRALLEVVESGGKNIEIAVMTKKDGLRQLEETEIDEYVAEIEAEKAAAEAAKKSGPKDT

SEQ ID NO: 3793 - DNA, 765 bp, Triticum aestivum
  misc_feature: Ceres CLONE ID no. 786247
  misc_feature: Ceres CDNA ID no. 25891256
  CDS (247)..(612): REFERENCED BY SEQ ID NO: 3794
cttgatctcatcccctcccctgtccgccgcagcgtcatctctcccaccctcccctccgttctccacccgccgtgccgtcgccgttctcctccccgtacctcccgtgcgccaccgccccatccctcccgtgcgccaccgccccatccctcccgtgcgccaccgccccatccctcctgaatccagactaggcccgactgaactcacgtgcgaacgagccggacgtctcctgctccgcctacgcgcgggatggccaacccgatgtacggctccgggccgcttcgatccaggaacgcgccgagctcggacgagatccagctgcggatcgacccggtgcatggcgatcttgacgaggagatcgatgggctgcactcgagggttcgcatgttgaaaggcgtcgcccaagagataaactccgaggccaagttccagaatgatttcctcaaccaactgcaactgacccttacgaaagctcaggctggagtgaagaataacatgcgaaggatgaacaaaagcatcatccagcagggctccaatcatattgtccatgttgtcctatttgctctgttatgcttctttgttgtgtatcttttgtcaaagttctctagaagatagctcttctgttgttaggtgaagccaaatcgaaacaactgaaatgtaccatgtgttgtatttagtctgaaaaaagtgtcgcgagtaacgaaatcgaatggaaaatgggactggactgtttacatggtatatttgacttgaaaaaaaaaaaaaaaa

SEQ ID NO: 3794 - protein, 121 aa, Triticum aestivum
  misc_feature: Ceres CLONE ID no. 786247
  misc_feature: Ceres CDNA ID no. 25891256
  misc_feature: Homolog of GI Number: 67083881 NR Desc: golgi vesicular membrane trafficking protein p18
MANPMYGSGPLRSRNAPSSDEIQLRIDPVHGDLDEEIDGLHSRVRMLKGVAQEINSEAKFQNDFLNQLQLTLTKAQAGVKNNMRRMNKSIIQQGSNHIVHVVLFALLCFFVVYLLSKFSRR

SEQ ID NO: 3795 - DNA, 588 bp, Triticum aestivum
  misc_feature: Ceres CLONE ID no. 786284
  misc_feature: Ceres CDNA ID no. 25891721
  CDS (59)..(457): REFERENCED BY SEQ ID NO: 3796
agtgttagtgttcctcaagccaccgtaccgtgttgcctctctgcaatctacagccaaaatgcctttcaagaggtacgttgagatcgggagggttgcccaaatcaactacggcaaggaatatggcaggctcgtcgtcattgtcgacgtcattgaccagaacagagctcttgtcgatgcccctgatatggtgaggtcccaagtcaatttcaaaaggctttccctaaccgatattaagattgacattaagagggtccctaagaagaaagatcttgtcaaagccatggaggatgctgatgttaagaccaagtgggagaagagttcatggggcaggaaactcattgtcagaaagagaagggcatccctcaatgattttgataggttcaagataatgttggccaagatcaagaaggcagcggttgtaaggcaagagcttgctaagctgagaaagagcgcttaggcatagcttcacattatagtcttcaaatttttgttatgaatttgcttaccttggttgttgtgagatttcatgtatcattgaaccgcttgatttaatgttagtactccaagtttccaaaaaaaaaaaaaaaa

SEQ ID NO: 3796 - protein, 132 aa, Triticum aestivum
  misc_feature: Ceres CLONE ID no. 786284
  misc_feature: Ceres CDNA ID no. 25891721
  misc_feature (44)..(120): Pfam Name: Ribosomal_L14e PFAM Desc: Ribosomal protein L14
  misc_feature: Homolog of GI Number: 7488810 NR Desc: hydroxyproline
  misc_feature: Homolog of GI Number: 76161008 NR Desc: glycoprotein
  misc_feature: Homolog of GI Number: 50910649 NR Desc: putative hydroxyproline
  misc_feature: Homolog of GI Number: 50926450 NR Desc: OSJNBb0070J16.13
  misc_feature: Homolog of GI Number: 48596905 NR Desc: glycoprotein
  misc_feature: Homolog of GI Number: 2500365 NR Desc: Probable 60 ribosomal protein L14
  misc_feature: Homolog of GI Number: 5762251 NR Desc: Csf
  misc_feature: Homolog of GI Number: 7269562 NR Desc: ribosomal protein L14
  misc_feature: Homolog of GI Number: 20465571 NR Desc: putative 60S ribosomal protein L14
  misc_feature: Homolog of GI Number: 41323492 NR Desc: 60S ribosomal protein L14
MPFKRYVEIGRVAQINYGKEYGRLVVIVDVIDQNRALVDAPDMVRSQVNFKRLSLTDIKIDIKRVPKKKDLVKAMEDADVKTKWEKSSWGRKLIVRKRRASLNDFDRFKIMLAKIKKAAVVRQELAKLRKSA

SEQ ID NO: 3797 - DNA, 472 bp, Triticum aestivum
  misc_feature: Ceres CLONE ID no. 786345
  misc_feature: Ceres CDNA ID no. 40351357
  CDS (53)..(292): REFERENCED BY SEQ ID NO: 3798
gctaccaactccggcttgttcagtctttcttggaactttgttactctcacacatgtctcgctccgtgcctttggtttcaaccatttttgtcttgcttctgcttctggtggccactgagatgatggggccaacaatggtggcagaagcaagaacttgtgagtctcagagccaccgtttcaaggggccatgtttgagtgacaccaactgtggctctgtttgccgaaccgaacgtttcactggaggacactgccgtggcttccgtcgcagatgcttctgcaccaaacattgttaattttaaaaaattaattaagagtgctttgatagaagatgatagatctatcatctttctactcgtgttgttaattaaccactttgtgtttgagaataagggttacccattctactatgggtttctttgtttgcctcttattttatctagttagagatccttttatgaaaaaaaaaaaaaaaa

SEQ ID NO: 3798 - protein, 79 aa, Triticum aestivum
  misc_feature: Ceres CLONE ID no. 786345
  misc_feature: Ceres CDNA ID no. 40351357
  misc_feature (33)..(79): Pfam Name: Gamma PFAM Desc: Gamma
MSRSVPLVSTIFVLLLLLVATEMMGPTMVAEARTCESQSHRFKGPCLSDTNCGSVCRTERFTGGHCRGFRRRCFCTKHC

SEQ ID NO: 3799 - DNA, 854 bp, Triticum aestivum
  misc_feature: Ceres CLONE ID no. 786506
  misc_feature: Ceres CDNA ID no. 40351358
  CDS (20)..(592): REFERENCED BY SEQ ID NO: 3800
acacttactagtagtaagcatggagtcctcaaagatctatgcttacctcttcctctgcatgatctttctctcttccgccactcccattctcggttgtggctactgtggcaaaccccccaaaaagcacaagcctggtaaaacaccaaagacacccaaaacacccgttgttaagccaccagtcaccatccctcccattaatgttcctcccgttgttcttccaccaatagtgaagcccccaggtattctccctccaattccaattattaacccaccaaccacaccagggaagggagggaacactccatgcccaccaccaaagtctcctgcgcaggctacgtgccccattgacacgctcaaacttggtgcctgtgtggatcttcttggagggttggttcacattggtttgggtgaccctgttgcgaaccagtgctgccccgtgcttcaagggcttgttgaggttgaagctgcggtgtgtctttgcaccactcttaaactgaagcttctcaacctcaacatttatgtcccacttgcccttcagctccttgtgacttgtggcaagtctcctcctcctggttacacgtgctccctctaaactaggtggaaaggattgaggaatatatggtcaaaatcgacatgagaggatgtcgagccacactatctctcttctcttctgattggaactgctgttgtttgttttgctattatttgtaaaaccatttgtttttaattgagatcgttgcatgtatggtttaatataatcttaggcaagtagcagcaaagatgcttctctgtgacatgttcaattattaatttatatgaattgcgctttaatttgtcgaaaaaaaaaaaaaaaa

SEQ ID NO: 3800 - protein, 190 aa, Triticum aestivum; identical to SEQ ID NO: 3426
  misc_feature: Ceres CLONE ID no. 786506
  misc_feature: Ceres CDNA ID no. 40351358
  misc_feature (107)..(188): Pfam Name: Tryp_alpha_amyl PFAM Desc: Protease inhibitor/seed storage/LTP family

SEQ ID NO: 3801 - DNA, 740 bp, Triticum aestivum
  misc_feature: Ceres CLONE ID no. 787094
  misc_feature: Ceres CDNA ID no. 40351359
  CDS (89)..(517): REFERENCED BY SEQ ID NO: 3802
gttagggttttacactgcggcagctacttcggctccatcttcttcgatctctcaaactctatcggcgcagaaccaatcctatatcactatggggaagacacatggaatgggagctgcccgcaagctgaagtctcaccgtaggagacaaaggtgggctgacaagtcatacaaaaagtctcatcttggaaatgaatggaagaagccttttgctggttcatcccatgcaaagggtattgttcttgaaaagataggtattgaggctaagcagcccaactctgccattcgaaaatgtgccagggttcaactcatcaaaaatgggaagaagattgctgcattcgtgccaaatgatggttgcttaaattacattgaagagaatgatgaagtcttgatagctggatttggacgaaagggtcatgccgtgggtgatattcctggagtcagattcaaggtcgtgaaggtttctggtgtgtctctcctggctctcttcaaggagaagaaagagaagcctaggtcttagtcttgtgggacgtgtcctctctagtttctccaaaaaattattatgaattttacttcatgagactggatgagttctatggacaattttgtatctctctggtagcaatttttctgaactaaatttggttcatatctcatacttgggctccatttttatagagaatgctttgtgtgaagttcggtcaattttacctcatttggtactgtcaaaaaaaaaaaaaaaa

SEQ ID NO: 3802 - protein, 142 aa, Triticum aestivum
  misc_feature: Ceres CLONE ID no. 787094
  misc_feature: Ceres CDNA ID no. 40351359
  misc_feature (9)..(141): Pfam Name: Ribosomal_S12 PFAM Desc: Ribosomal protein S12
MGKTHGMGAARKLKSHRRRQRWADKSYKKSHLGNEWKKPFAGSSHAKGIVLEKIGIEAKQPNSAIRKCARVQLIKNGKKIAAFVPNDGCLNYIEENDEVLIAGFGRKGHAVGDIPGVRFKVVKVSGVSLLALFKEKKEKPRS

SEQ ID NO: 3803 - DNA, 668 bp, Triticum aestivum
  misc_feature: Ceres CLONE ID no. 787105
  misc_feature: Ceres CDNA ID no. 40351360
  CDS (37)..(441): REFERENCED BY SEQ ID NO: 3804
ttagagagacagagagagaatccaattccggcgacgatgacggtactaccggcggcgaccaccgacgccgtcgacgtcgacgcgcagatcgccttcttctgcattccgtgcttcccctccgaaacgacgtcgtcgtcgtcgtggtggtggcagagtctgcggtcgccggcgaacaacaagggccggtactggtggcgtcggcggtggaacgccgttattcgccgcttcaaaagcaacaacaactacaagaagcactgctccttccgctacgatccgctcagttacgcgctcaacttcgacgacggaatcgccgaagaggacggttgcggatacaaaggcttctccgcgcgcttcgtctccgttccgccaccggagaaggccgtcgacggcgaggagtcacgtggggagcacgtgccgccggtttcgaaaatccagatatgatgcagcgctaatcagcggaatgcgccgcgttgttcatagttaggtttttttctatttcgtttttttattagtattgttttgttgtatattctgaaaacaagaaacaaaaaaagtataataacacatttagctgtttttaaattaattacttttatttttttaattatttttaaatttttacactcattatgttacttgttttttctattctaaaaaaaaaaaaaaaa

SEQ ID NO: 3804 - protein, 134 aa, Triticum aestivum
  misc_feature: Ceres CLONE ID no. 787105
  misc_feature: Ceres CDNA ID no. 40351360
MTVLPAATTDAVDVDAQIAFFCIPCFPSETTSSSSWWWQSLRSPANNKGRYWWRRRWNAVIRRFKSNNNYKKHCSFRYDPLSYALNFDDGIAEEDGCGYKGFSARFVSVPPPEKAVDGEESRGEHVPPVSKIQI

SEQ ID NO: 3805 - DNA, 481 bp, Triticum aestivum
  misc_feature: Ceres CLONE ID no. 787152
  misc_feature: Ceres CDNA ID no. 25446638
  CDS (48)..(359): REFERENCED BY SEQ ID NO: 3806
atcacaatccctaattccccaaaattttctctgaagaagaagcaacaatgtctggtcgcggaaagggaggcaagggtttgggaaagggtggagcgaagaggcatcgcaaggtgctccgcgacaacatccagggaatcacgaaacccgcgattcggaggctagccagaagaggcggcgtgaaaagaatcagcggcttgatctacgaggaaaccaggggtgtgctcaagatcttcctcgagaacgtcattcgcgacgccgtcacctacaccgagcacgctaggagaaagaccgtcacggccatggacgtcgtttacgcgctcaagaggcagggaagaaccctctacggtttcggaggctgagggcttgggctttttctgggcctggatttgttcttcgctgggctttaaaatgttgttgggaatttgtgttttgtttaatggttatgtatattatcttctgctcggtaaaaaaaaaaaaaaaa

SEQ ID NO: 3806 - protein, 103 aa, Triticum aestivum; identical to SEQ ID NO: 8
  misc_feature: Ceres CLONE ID no. 787152
  misc_feature: Ceres CDNA ID no. 25446638
  misc_feature (66)..(92): Pfam Name: TAF PFAM Desc: TATA box binding protein associated factor
  misc_feature: Homolog of GI Number: 62663604 NR Desc:  similar to Histone H2B 291B
  misc_feature: Homolog of GI Number: 34858262 NR Desc: similar to germinal histone H4 gene
  misc_feature: Homolog of GI Number: 74004215 NR Desc:  similar to germinal histone H4 gene
  misc_feature: Homolog of GI Number: 57110415 NR Desc:  similar to germinal histone H4 gene
  misc_feature: Homolog of GI Number: 76651053 NR Desc:  similar to germinal histone H4 gene
  misc_feature: Homolog of GI Number: 74004256 NR Desc:  similar to germinal histone H4 gene
  misc_feature: Homolog of GI Number: 27692960 NR Desc: Hist1h4h protein
  misc_feature: Homolog of GI Number: 37590121 NR Desc: Hist1h4h protein
  misc_feature: Homolog of GI Number: 61835903 NR Desc:  similar to germinal histone H4 gene
  misc_feature: Homolog of GI Number: 61871726 NR Desc:  similar to germinal histone H4 gene

SEQ ID NO: 3807 - DNA, 808 bp, Triticum aestivum
  misc_feature: Ceres CLONE ID no. 787195
  misc_feature: Ceres CDNA ID no. 40351361
  CDS (80)..(631): REFERENCED BY SEQ ID NO: 3808
aacaaagggataacagtgtggaagtattcgcagaactttgtttcccaatttccattgcctccgcttccacctcgcaaccatgatcatcccggagaagaaccgcaaggagatctgcaaatacctcttccaagagggagtttgcttcgcgaagaaggacttcaatttggccaagcaccctgagatcgacgtgccgaatctgcaggtgattaagctgatgcagagtttcaagtctcgcgagtacgtgagagaaacttttgcttggatgcactattactggttcctcaccaacgatggcatcgagtttctcagaacttaccttaaccttccttccgaaattgtccctgctactttgaagaagcaagccaagccacctggcaggccctttggaggcccatccggtgatcgccctagaggtccaccacgctttgaaggggagcgtaggtttggtggtgatcgtgatggataccgtggaggtccccgaggaggacctggtggtgactttggaggagacaagggaggagctcctgctgactacaggccctcttttgggggtcctggcggaaggcccggctttggtcgtggatctggtggttttggagcgccaaccagctcaaatcttccccaagtataatgttttctgctttattttttgtttagttttctagaaagacgtgtctgtagttggaatcaatgataattttccatctcttatagatcgttttatcggcctgatctttactttatattcagtttttcgttcaatgaagattttgaattttgagtgtttctaccaaaaaaaaaaaaaaaa

SEQ ID NO: 3808 - protein, 183 aa, Triticum aestivum
  misc_feature: Ceres CLONE ID no. 787195
  misc_feature: Ceres CDNA ID no. 40351361
  misc_feature (3)..(98): Pfam Name: S10_plectin PFAM Desc: Plectin/S10 domain
MIIPEKNRKEICKYLFQEGVCFAKKDFNLAKHPEIDVPNLQVIKLMQSFKSREYVRETFAWMHYYWFLTNDGIEFLRTYLNLPSEIVPATLKKQAKPPGRPFGGPSGDRPRGPPRFEGERRFGGDRDGYRGGPRGGPGGDFGGDKGGAPADYRPSFGGPGGRPGFGRGSGGFGAPTSSNLPQV

SEQ ID NO: 3809 - DNA, 467 bp, Triticum aestivum
  misc_feature: Ceres CLONE ID no. 787248
  misc_feature: Ceres CDNA ID no. 40351362
  CDS (1)..(261): REFERENCED BY SEQ ID NO: 3810
attctcgttctgtacgtgcagccgcagcaagtgatcgaagcgaaaagagagaaattcatcgtcgcagtaatcatgggtaaggttcatggatcacttgcacgtgctggtaaggttagagggcaaaccccgaaggtggccaagcaggataagaagaagaagccacgtggccgcgcccacaagaggatgcagtacaatcgccgattcgtcaccgccgtggtgggattcggcaagaagaggggacccaactcgtctgagaagtgaggccgaggcttgaggaatatgttgctactctatttgatttatctttgttgttttttatttatttttaatttgtatgttttgattgtgttctgtgaacggtttttgttagctttatatcaaacttgaaattttgcatacaatatctaactatctaagttcattgctcctttcaactgggaaaggatttggcaaaaaaaaaaaaaaaa

SEQ ID NO: 3810 - protein, 62 aa, Triticum aestivum; identical to SEQ ID NO: 38
  misc_feature: Ceres CLONE ID no. 787248
  misc_feature: Ceres CDNA ID no. 40351362
  misc_feature (3)..(61): Pfam Name: Ribosomal_S30 PFAM Desc: Ribosomal protein S30

SEQ ID NO: 3811 - DNA, 770 bp, Triticum aestivum
  misc_feature: Ceres CLONE ID no. 787416
  misc_feature: Ceres CDNA ID no. 25445745
  CDS (89)..(430): REFERENCED BY SEQ ID NO: 3812
gaagtcgcccgcagccagaaaggcgagcaaaagtttcacttggcctccccaacctcgtgtcctccggcgagtctctgcggcggcggcgatggcttccttctccgaggctccccccggcaaccccgacgccggcgccaagatcttcaagaccaagtgcgcgcagtgccacaccgtcgacgcgggcgccggccacaagcaaggtccaaacttgcatggtctgtttgggaggcagtcgggtaccaccgctggttactcctactctgcggcaaacaagaacaaggctgtggagtgggaggagaacactctgtatgactacttgcttaatcctaagaagtacatccctggaaccaagatggtcttccctgggctgaagaagccacaggaccgtgctgatctcattgcgtacctgaagaaagccacctcctcttgaaagggcatgatgatgctgtgatcttgtcatggcgagtgaattcattttgcagtaaaataagaagattagacattaatagtcacttgtttgatggggtgtgatccacgagacaattatcttgcgaatttcgttttcatgatatgggtttcatatcactaggtttagttggaaatcttcgtcaatcttttgattcagttgctggaaaaccccagtacgcatgttttgaccaccaggtggcggtgggactagaatgcacacccatgttgatgaacatgagatctttaaaattgatataaagctttctgcctgtgttatggagtcgtcaaaaaaaaaaaaaaaa

SEQ ID NO: 3812 - protein, 113 aa, Triticum aestivum
  misc_feature: Ceres CLONE ID no. 787416
  misc_feature: Ceres CDNA ID no. 25445745
  misc_feature (13)..(111): Pfam Name: Cytochrom_C PFAM Desc: Cytochrome c
  misc_feature: Homolog of GI Number: 118040 NR Desc: Cytochrome c
  misc_feature: Homolog of GI Number: 20137614 NR Desc: Cytochrome c
  misc_feature: Homolog of GI Number: 476418 NR Desc: cytochrome c
  misc_feature: Homolog of GI Number: 65495 NR Desc: cytochrome c
  misc_feature: Homolog of GI Number: 53982673 NR Desc: putative cytochrome c
  misc_feature: Homolog of GI Number: 21592717 NR Desc: putative cytochrome C
  misc_feature: Homolog of GI Number: 118004 NR Desc: Cytochrome c
  misc_feature: Homolog of GI Number: 118018 NR Desc: Cytochrome c
  misc_feature: Homolog of GI Number: 117953 NR Desc: Cytochrome c
  misc_feature: Homolog of GI Number: 229737 NR Desc: Cytochrome c
MASFSEAPPGNPDAGAKIFKTKCAQCHTVDAGAGHKQGPNLHGLFGRQSGTTAGYSYSAANKNKAVEWEENTLYDYLLNPKKYIPGTKMVFPGLKKPQDRADLIAYLKKATSS

SEQ ID NO: 3813 - DNA, 664 bp, Triticum aestivum
  misc_feature: Ceres CLONE ID no. 787489
  misc_feature: Ceres CDNA ID no. 40351363
  CDS (57)..(446): REFERENCED BY SEQ ID NO: 3814
acatttttttgttttgcaactacattgtagcaatcgacaaaacacaacacggagtaatggggaggttgtttgtggtgaatctggaaggaaagatctatagctgcaaacactgtcatacccatcttgcgctttacgatgacatctactccaggacattccattgcagacatgggaaagcttatctcttcaataatgttgtgaatgtttctgttggcgaaatggaggacagaccgatgatgaccgggttacatacggtggctgacattttctgtgtgggttgtggatcgattgtgggttggaaatatgaaactgcatatgaaaaaaaccagaagtacaaggaaggaaaatcggtgcttgaacggtacaaagtgtcaggtcctgatggaagcaattatttgatcagcaatgaggcacatgttggtggaagtgatgcagatgatgcttagtcatcctaccattctcaatttttgtagcaccgtatttggatgaagaaagcctttcaagtgccctgtctctgactctctcttacttttttaaatgaaatgtattgaaataaaagactgatgaaaaaaaaatgtaatataaccaaaactttgttggttgaatttactcaagtttcttgaaatggattttcatcaattctgatgtaaaaaaaaaaaaaaaa

SEQ ID NO: 3814 - protein, 129 aa, Triticum aestivum
  misc_feature: Ceres CLONE ID no. 787489
  misc_feature: Ceres CDNA ID no. 40351363
  misc_feature (1)..(108): Pfam Name: Yippee PFAM Desc: Yippee putative zinc
MGRLFVVNLEGKIYSCKHCHTHLALYDDIYSRTFHCRHGKAYLFNNVVNVSVGEMEDRPMMTGLHTVADIFCVGCGSIVGWKYETAYEKNQKYKEGKSVLERYKVSGPDGSNYLISNEAHVGGSDADDA

SEQ ID NO: 3815 - DNA, 535 bp, Triticum aestivum
  misc_feature: Ceres CLONE ID no. 787690
  misc_feature: Ceres CDNA ID no. 40351364
  CDS (32)..(349): REFERENCED BY SEQ ID NO: 3816
atactgtgcttccgccttgatctccgcagcaatggtgaacgttccgaagacaaagaagacctactgcaagagcaaggagtgcaggaagcacacgctccacaaggtcacccaatacaagaagggcaaggacagcatcgccgctcagggaaaacgccgttatgaccgcaaacagtccggttacggtggccagactaagcctgttttccacaaaaaggccaaaaccaccaagaaaattgtgttgaggctccagtgtcagggatgcaagcatgtctcgcagcacgctatcaagaggtgcaagcattttgagatcggtggtgacaagaagggaaaaggaacctctctgttctagatggaatattagaatttgccatttcacacactctctctacctctctcagtttttattgtcatcttcggcttttgattttgcagaaatgttttgtgtttgaggatattagaatttgcaatttcgttttgtttaagcactgattatagtattaattactagtttctcttcctaaaaaaaaaaaaaaaa

SEQ ID NO: 3816 - protein, 105 aa, Triticum aestivum; identical to SEQ ID NO: 3358
  misc_feature: Ceres CLONE ID no. 787690
  misc_feature: Ceres CDNA ID no. 40351364
  misc_feature (19)..(95): Pfam Name: Ribosomal_L44 PFAM Desc: Ribosomal protein L44

SEQ ID NO: 3817 - DNA, 696 bp, Triticum aestivum
  misc_feature: Ceres CLONE ID no. 787861
  misc_feature: Ceres CDNA ID no. 40351365
  CDS (90)..(515): REFERENCED BY SEQ ID NO: 3818
atatcagaagctcagacctagggatttcggccgtttgctccccaaaaaggaaagaagcagattctgtcctttgaaatcaacaagaaaagatgtcaggtgaagaggtagctgttgcagttgaggtacctgctacttcaattccaggtgagccaatggacatcatgactgctctacagcttgtgctgagaaaatctctggcctatggtggtcttgcacgaggtcttcatgaaggtgccaaggtgatcgagaagcatgctgcacagctctgtgttctagcagaagattgtgaccaacctgattatgtgaaactggtgaaggctctttgtgcagagcacaatgttagtcttttgacagttccaagtgcaaagacccttggagaatgggctggtttgtgtaagattgattcagagggaaaggctcggaaggtaactggttgctcatgtgtggttgtcaaggatttcggggaggaacatgaagcatataatgttgttctgcagcatgtgaaagccaactgaggagttgctgcagcatgcctagatttgtgggttttagtttgaagttattgtatgagtctatttttgcctctatcatagggatattgatggtttagtacaattatacccgttctcattgttgctgagtgaatgcttttttaattactattggttttctgtgtttttaaaaaaaaaaaaaaaa

SEQ ID NO: 3818 - protein, 141 aa, Triticum aestivum
  misc_feature: Ceres CLONE ID no. 787861
  misc_feature: Ceres CDNA ID no. 40351365
  misc_feature (26)..(121): Pfam Name: Ribosomal_L7Ae PFAM Desc: Ribosomal protein L7Ae/L30e/S12e/Gadd45 family
MSGEEVAVAVEVPATSIPGEPMDIMTALQLVLRKSLAYGGLARGLHEGAKVIEKHAAQLCVLAEDCDQPDYVKLVKALCAEHNVSLLTVPSAKTLGEWAGLCKIDSEGKARKVTGCSCVVVKDFGEEHEAYNVVLQHVKAN

SEQ ID NO: 3819 - DNA, 668 bp, Triticum aestivum
  misc_feature: Ceres CLONE ID no. 787882
  misc_feature: Ceres CDNA ID no. 40351366
  CDS (71)..(487): REFERENCED BY SEQ ID NO: 3820
gttctatctaattcagtttttttctcccatcataaaaaaccgaccctctcctttccctcttcaccaaccaatggctcccccaaaggccgagaagaagcccgcggagaaaaagcccgcagagaaggctccggcggagaagaagcccaaggccgagaagaagatatcgaaggaaggaggaagcgagaagaagaagaagagaacaaagaagagcgtggagacctacaagatttacatcttcaaggtgctgaagcaggttcaccccgacatcggaatctcaagcaaggccatggggatcatgaacagtttcataaacgacatcttcgagaagctcgcccaggagtcgtcgcgattggctaggtataacaagaagcctaccattacttccagggagatccaaacggcggtgcgtttggtcctccctggggagttggccaaacacgctgtctctgaaggtaccaaggccgtcaccaagttcaccagctcttgattcgttttgtttcctgtgtttcgattagggttttctgttgaccccgatttgattcgcatttttaaattagggttttattttcctttttgttgcttttgagggtgtagatgtaaaattaaagctttatttttaaataatataaatgccgttttttaaaaaaaaaataaaaaaaaaaaaaaaa

SEQ ID NO: 3820 - protein, 138 aa, Triticum aestivum; identical to SEQ ID NO: 3746
  misc_feature: Ceres CLONE ID no. 787882
  misc_feature: Ceres CDNA ID no. 40351366
  misc_feature: No seed is being produced by the plant
  misc_feature: The plant flowers significantly late compared to wild-type.
  misc_feature: Useful for biocontainment applications
  misc_feature: Useful for making plants with modulated flowering time
  misc_feature (45)..(117): Pfam Name: Histone PFAM Desc: Core histone H2A/H2B/H3/H4

SEQ ID NO: 3821 - DNA, 738 bp, Triticum aestivum
  misc_feature: Ceres CLONE ID no. 787885
  misc_feature: Ceres CDNA ID no. 40351367
  CDS (114)..(482): REFERENCED BY SEQ ID NO: 3822
aatgagaatttcagctattctatctcttactttttgtttttggaggttgattcctgtcctccaatttaggaatattcctatccttatcaatcggtgttttcattgaccctcccatgacagacaatactcgtggccacaccctctcacgtctagaagagacagtcaccctcctcacccagaaccaaaataccctcaccgctatccaaaactctcttcactcccgactcgacaaggttatctctcgttttcaatcactcgaagtttcttccccatccatgtcaccacgaccttcccctccacacatgaaccttgatatacctcgatttgatggtaccaatgccctggcctggatcttcaagatcactcagttttttgactttcaccgcaccctgaaggacgagcgtcttcaggctaaaggcccaagtggagaaggacgaaggcccaagtggagaaggacaaagcccccgagtggagaaggatgaaggcccaagtggagaaggatgaaggcccagaggcagagacactatcaagactattaattgttgctgaaggcccaaactaatttgaaggcccaagttaaataagtttttagttataatttatttttattgtaattttggcccaaactgtttaaaaggcccatgtctatttttatctttttgtttagctacactataagtatgggtttttgttttgaataaaaaaacttttggcattttcataaaaaaaaaaaaaaaa

SEQ ID NO: 3822 - protein, 122 aa, Triticum aestivum
  misc_feature: Ceres CLONE ID no. 787885
  misc_feature: Ceres CDNA ID no. 40351367
MTDNTRGHTLSRLEETVTLLTQNQNTLTAIQNSLHSRLDKVISRFQSLEVSSPSMSPRPSPPHMNLDIPRFDGTNALAWIFKITQFFDFHRTLKDERLQAKGPSGEGRRPKWRRTKPPSGEG

SEQ ID NO: 3823 - DNA, 571 bp, Triticum aestivum
  misc_feature: Ceres CLONE ID no. 787913
  misc_feature: Ceres CDNA ID no. 40351368
  CDS (21)..(299): REFERENCED BY SEQ ID NO: 3824
acacagccttaaacaccaaaatgaattccatccactccttccttaacactaaaattaactccctcatagaccaaatcgcagccatcaccaccaaccccagctcaccttccccttcctctcagccatctccttctccgattcaccgtcctcacatgaaactggacgcacctcgtttcaatggtcacgacccgcttggatggatatttaaaatatcccaattctttgactaccagacaattctggagcaagagcctctcactgttgcgtctttctacatggatgggtcggcgcttcactgatatcagtggatgtctcgacaggttcttttcatcgtggcctgtgatgtggtgcatcacatgtcaggatggaatattatctcaatttttattgttccttttttgtatttattgttattgattgtagtctgatcattcatactcatacatctatttagaatttagatattgaaaagtgtaaatagataaattaagctcttttcatcgtggcctgtgatgtggtgcatcaggtcaggatggaatattatcttattgttacaaaaaaaaaaaaaaaa

SEQ ID NO: 3824 - protein, 92 aa, Triticum aestivum
  misc_feature: Ceres CLONE ID no. 787913
  misc_feature: Ceres CDNA ID no. 40351368
MNSIHSFLNTKINSLIDQIAAITTNPSSPSPSSQPSPSPIHRPHMKLDAPRFNGHDPLGWIFKISQFFDYQTILEQEPLTVASFYMDGSALH

SEQ ID NO: 3825 - DNA, 712 bp, Triticum aestivum
  misc_feature: Ceres CLONE ID no. 788065
  misc_feature: Ceres CDNA ID no. 40351369
  CDS (86)..(520): REFERENCED BY SEQ ID NO: 3826
aattccacaacgcgatctctctctattctttgaaaccaaagttcaaactctgtcttccctgggttctatttcgaaatcaacgacgatgagttccacagaggcagcagccacagagaagaaaggtggaagagggaaaccgaagacttcaaagtccgtttcccgttcctccaaagctggccttcagtttcccgtcggccgtgtcgctcgctacctcaaggccggtcgctacgcccagcgcgttggctccggttcccctgtttatctctccgcggttctcgaatacctcgctgccgaggttttggagcttgcggggaacgctgcgagggacaacaagaagacgaggatcgttccgaggcacattcaactggcggttaggaacgacgaggagttgagcaagctgatgggatctgtgaccattgccaacggtggtgttctgcctaacattcaccagaatttgttgcccaagaaggtcgctggcaaggggaagaccgagattggatctgctagtcaggagttttagatttaaggctcttgttttcgtatgtagttggttgccttatatagtaagattaggattgacattggatgatgtatagtcctttaacatttgaaaataattagttgttttctaacatggttcctgcatagttttcatttatttgagtttctcgtgaatcgagatatctattctcttctaaaaaaaaaaaaaaaa

SEQ ID NO: 3826 - protein, 144 aa, Triticum aestivum
  misc_feature: Ceres CLONE ID no. 788065
  misc_feature: Ceres CDNA ID no. 40351369
  misc_feature (26)..(101): Pfam Name: Histone PFAM Desc: Core histone H2A/H2B/H3/H4
MSSTEAAATEKKGGRGKPKTSKSVSRSSKAGLQFPVGRVARYLKAGRYAQRVGSGSPVYLSAVLEYLAAEVLELAGNAARDNKKTRIVPRHIQLAVRNDEELSKLMGSVTIANGGVLPNIHQNLLPKKVAGKGKTEIGSASQEF

SEQ ID NO: 3827 - DNA, 534 bp, Triticum aestivum
  misc_feature: Ceres CLONE ID no. 788119
  misc_feature: Ceres CDNA ID no. 40351370
  CDS (60)..(329): REFERENCED BY SEQ ID NO: 3828
attaggcagagcaaagtaatcgcaaaatctagggtttgttcgttcgctcgttcgcaacaatggcgctgaggagattctacaacgagatcaaggggaagagggtgagcgaggtccctgagcacgtgaagccgatgctgtccctgagctacatcaagaaagcgattcagagaggcttcgacaattaccatgccaagtacattgaaaccagttcccctgatcccatcttccatgtctgctacggcggcatgatcttctcctacctcgtcgctctcccccacgagcgccgccacctcctccacgcccaggagcacgctcagcagcatcactgattccatccaccttcaggatcctggttgaattggaggtggttggcttgcttgatctttgttttaaaatctgaaaaatcaaggcagaaagatactgtcagcttctgtgtatttcatcatttggatgataaaataagttctatttgatacaattctcaattttcttgcagttaaatgtttaattgaatgtgcaaaaaaaaaaaaaaaa

SEQ ID NO: 3828 - protein, 89 aa, Triticum aestivum; identical to SEQ ID NO: 3482
  misc_feature: Ceres CLONE ID no. 788119
  misc_feature: Ceres CDNA ID no. 40351370

SEQ ID NO: 3829 - DNA, 1971 bp, Triticum aestivum
  misc_feature: Ceres CLONE ID no. 788130
  misc_feature: Ceres CDNA ID no. 25892843
  CDS (117)..(1370): REFERENCED BY SEQ ID NO: 3830
agtctagggcttcctcgcccccgccgccggcgagagcagcagcctccgcaacaagacctaccgccctaacgtctcagctcaggttccggcttcgtttttcgacctctcctccatccatggcgctccggttcgaggtgttaggaagatttaatcgtgctcgcgcagctcggttaactctgccacactttacttgtcaaacgccactttttatgcctgttggtacccaaggtacaataaaaggcttgactacagaccagttagagactataggttgtcagattatacttggaaatacctaccatcttgaacttcgtcctggctctcaacttattgatgacttgggtggccttcacaagtttatgaattggaaaagggcattgctgactgactctggtggtttccaaatggtttctttgctgcatttggctgacattactgaggaaggagttacatttcagtcacctgttgatgggaaacccatgctcttgacgcctgaggaatcaatccatattcagaacaacattggagctgatataatcatggctcttgacgatgttgttaagacaacaattaccggcctgaggatagaggaagctatgtatcgtacccttcgttggattgataggtgcatagctgctcacaagaaacctgatgttcaaaacttatttgggattgtgcaaggaggattagatccggttctgagagatatttgcgtgaggggcttggttgagcggaaccttcccggatatgccattggtggtcttgcaggtggtgaagataaagactcgttttggcgtgttgttgcccagtgcaccgctggattgcctgaagataaaccacgatatgttatgggtgttggttatccacttgatattgtagtatgcagtgctttgggtgcagatatgtatgactgtgtctatccaacacgcactgctcgctttgggagcgcacttgtgcctgagggtgttctgaagttgaaacaaaatgcaatggcaactgacgaacggcccattgatccttcctgtccatgtatggtctgcaaaaactatacccgtgcatacttgcattgtctggtcacgaaagatcctatgggttctcaactgctgtcatatcacaatttatcatttatggcgcggttaagtagagatctccacatgtcgattcttgaagggcgatttccagaattcgtgagaggattcttgagggtgcagttcccaaagggcgacgtgccaaagtgggttcgcaatgcaatggaggttgccggcatcgacatatcggagtgctgcaccccgaccaactgccagcatgacgcaatggaggctgccggcgtcgacatttcggacttctgccctcccaccaaatgcccctgacgcgcaacgctcgggggcattcattacggataccacgataccggttgacgatagggaagggttgtcgcgtggaagtgatccctcatagtacttaacatgacgcgttttcacgaggttttttttttggggtcatagactgtaggcctggctctcatccattgcttcagcatagaattttccaacagtatgctgaagctagccgcccataggttttgatagtctccaaggtgttatagggggtgtttggtttagaagtcctaggactttttctagtcccagggactaatcaaaaaagactctccagtagagtttttttctagtccctgtagaaaaagtctctcccgtttggtttctagggactttttagggattttttctagtctctgggactaaaaagtccctgaaccaaacaccaccatagtatctgtcattgattgtttgcaagctgctgcaaatggttttgctgcaaggacaagtctacggagagttgtaacagcgtcattattttatactcacgaaaattgttgctgtgacgcaggtcattttgtctcactgattatattatatggcttctccagtcttcacaaaaaaaaaaaaaaaa

SEQ ID NO: 3830 - protein, 417 aa, Triticum aestivum
  misc_feature: Ceres CLONE ID no. 788130
  misc_feature: Ceres CDNA ID no. 25892843
  misc_feature (127)..(363): Pfam Name: TGT PFAM Desc: Queuine tRNA
  misc_feature: Homolog of GI Number: 50900348 NR Desc: putative queuine tRNA
  misc_feature: Homolog of GI Number: 41055978 NR Desc: similar to queuine tRNA
  misc_feature: Homolog of GI Number: 32451852 NR Desc: Similar to queuine tRNA
  misc_feature: Homolog of GI Number: 58384646 NR Desc: ENSANGP00000011864
  misc_feature: Homolog of GI Number: 66556485 NR Desc:  similar to ENSANGP00000011864
  misc_feature: Homolog of GI Number: 55648287 NR Desc:  similar to queuine tRNA
  misc_feature: Homolog of GI Number: 20455307 NR Desc: Queuine tRNA
  misc_feature: Homolog of GI Number: 12597314 NR Desc: tRNA
MALRFEVLGRFNRARAARLTLPHFTCQTPLFMPVGTQGTIKGLTTDQLETIGCQIILGNTYHLELRPGSQLIDDLGGLHKFMNWKRALLTDSGGFQMVSLLHLADITEEGVTFQSPVDGKPMLLTPEESIHIQNNIGADIIMALDDVVKTTITGLRIEEAMYRTLRWIDRCIAAHKKPDVQNLFGIVQGGLDPVLRDICVRGLVERNLPGYAIGGLAGGEDKDSFWRVVAQCTAGLPEDKPRYVMGVGYPLDIVVCSALGADMYDCVYPTRTARFGSALVPEGVLKLKQNAMATDERPIDPSCPCMVCKNYTRAYLHCLVTKDPMGSQLLSYHNLSFMARLSRDLHMSILEGRFPEFVRGFLRVQFPKGDVPKWVRNAMEVAGIDISECCTPTNCQHDAMEAAGVDISDFCPPTKCP

SEQ ID NO: 3831 - DNA, 542 bp, Triticum aestivum
  misc_feature: Ceres CLONE ID no. 788212
  misc_feature: Ceres CDNA ID no. 40351371
  CDS (1)..(312): REFERENCED BY SEQ ID NO: 3832
acggcactcgttttcgttctcgttctgatctttgcgaaggaggtttacagcgctcaaccaaagatgcagaacgaggaaggacagatcactgagctttacattcctaggaagtgctccgccacaaacagattgattaccgctaaggaccatgcttcggttcagatcaacattgggcatgtggatgagaatggcgtctacaatggccatttctccacttttgccctctgcggattcatccgtgctcagggtgatgctgacagtgctctagaccgcttgtggcagaagaagaaagttgaagttaagcaacagtagacacccatgatagtttgttacttcgttatgtattaatttctactcttgctagagatatttgagtactatgattgtcgttttgagcacaaatactcattctgaattttcgtcggcatttggtgcctccagctaaggtggttacttttttgacagtttgccagtgcgttgataaatattctgtcatatttcaatcatataaattttgttaccgtggaaaaaaaaaaaaaaaa

SEQ ID NO: 3832 - protein, 82 aa, Triticum aestivum
  misc_feature: Ceres CLONE ID no. 788212
  misc_feature: Ceres CDNA ID no. 40351371
  misc_feature (1)..(81): Pfam Name: Ribosomal_S21e PFAM Desc: Ribosomal protein S21e
MQNEEGQITELYIPRKCSATNRLITAKDHASVQINIGHVDENGVYNGHFSTFALCGFIRAQGDADSALDRLWQKKKVEVKQQ

SEQ ID NO: 3833 - DNA, 529 bp, Triticum aestivum
  misc_feature: Ceres CLONE ID no. 788227
  misc_feature: Ceres CDNA ID no. 40351372
  CDS (168)..(347): REFERENCED BY SEQ ID NO: 3834
gtacttctctgcgacttgaggctagggttaccggattcttgcgttttaatatctgcaattcagaagcatggggcactccaatgtgtggaattctcaccctaagaactacggacctggttctcgcacttgccgtgtgtgtgggaatcctcatggattgatcaggaaatatgggcttatgtgttgcaggcagtgcttccgaagcaatgccaaggaaattggcttcatcaagtatcggtgaaagattagttttccacctgccccacccggtttggattcttgcatcaggctatgatgacgtggggatgattttactgtttgaagaacttaaaattttttgtgacatttagcaaagttaattatcaaactcaagttgtggaactaagaatatttttgttttttatataattgttttgagctatcttcatctttctccttgagccatttagcattctgcaattctttccttgtgtttgctcaagttgtgaaagttaggtctgaatggttcttaacctcaaaaaaaaaaaaaaaa

SEQ ID NO: 3834 - protein, 56 aa, Triticum aestivum; identical to SEQ ID NO: 3206
  misc_feature: Ceres CLONE ID no. 788227
  misc_feature: Ceres CDNA ID no. 40351372
  misc_feature (3)..(56): Pfam Name: Ribosomal_S14 PFAM Desc: Ribosomal protein S14p/S29e

SEQ ID NO: 3835 - DNA, 1677 bp, Triticum aestivum
  misc_feature: Ceres CLONE ID no. 788260
  misc_feature: Ceres CDNA ID no. 24766963
  CDS (351)..(1514): REFERENCED BY SEQ ID NO: 3836
atcctcattcatcttcgatctccttgcttgctagctagcttgctcccccggacctcgctttcttgaccgctcgctccgacgcaacgcgccgccggtaaagctcgcagcttctccctctggcccccgctcgaatccgcttccccggcccccgggttttcttgcgagggttctgtgggctcctgccaatgctcgccggtctgatccgtcctgcttgctgaggcgctcctcgattcggtcctgggacgcgtcgtgctcctgatctgctgctgattcctcgaaatccggtggaagtccgtccgtccatcctgggtctgatttgcgggtgccaccggccatcttcgcctccggcaatgggaaacaccagcagcagcagcgccggcggcagcaggccccaccggccgacgacctcgtcggactcggggctgccgcacgccgcggcggcggaggagctcagctcgtacgaggcggcgtgccggcacgacccggaggtgcgcaccttcgactccacgctgcagcgccgcaccagccgcgccatctccacgctcgcggtgggggtcgaggtgcgctccatgtcgctcgactccctccgcggggtcaccggctgcctcctggacatgaaccaggaggtggtcaaggtcatcctcgactgcaagaaggacatctggaagagccccgagctgttcgacctcgtcgaggactacttcgagagcagcctccacaccctcgacttctgcaccgcgctcgacaagtgcctcaagcgcgcccgcgactcccagctcctcctccacgtcgccctccagcgcttcgacgacgaggacgacaacgacggcgacgccgccgccgccgcgcccgccgcccggtacgcgcgcacgctgcacgagctgcgccagttcaaggcggccggggaccccttcacggacgagttcttcgaggccttccaggccgtgtaccggcagcagctggccatgctggagaaactgcagcagcgcaagcaccggctggacaagaaaatcaagaccatcaaagcgtggcgccgggtgtcgagcgtcatcttcgcgagcaccttcgcggcggtgctcatctgctcggtggtcgccgcggccatagccgcgccgcctgtcgcagcggcattggccgcggcggccgcgattccgatagggtccatggggaagtggatcgactcgctgctcaaagggtaccaggacgctgtccgtgggcagaaggaggtggtgagcgcaatgcaggtcgggacgttcatcgccatcaaggatttggacaacatcagggtgctcatcaaccgggtggagatggagatcagctcaatggtcgactgtgtggacttcgcggagcgggacgaggaggcggtcaggttcggggtggaggagatcaagaagaagctggaggccttcatgaagagcgtcgaggacctcggggagcaggcagaccggtgtagccgagacatccgccgagcaaggaccgtcgtgctgcaaaggatcatccggcatcccaactgagaggccaggatgatgaagaatgtaaggtatggaatgataagttatagccgtgtactctttgatcatgttgtggttgcaatgtacataagagatgctccttgtagacactatgaacgggtcagtttgatataaattattgtttggctcaaaaaaaaaaaaaaaa

SEQ ID NO: 3836 - protein, 387 aa, Triticum aestivum
  misc_feature: Ceres CLONE ID no. 788260
  misc_feature: Ceres CDNA ID no. 24766963
  misc_feature: Homolog of GI Number: 16226583 NR Desc: AT3g28270/MZF16_5
  misc_feature: Homolog of GI Number: 62320803 NR Desc: At14a
  misc_feature: Homolog of GI Number: 72547041 NR Desc: proteophosphoglycan ppg1
  misc_feature: Homolog of GI Number: 72547018 NR Desc: proteophosphoglycan ppg3
  misc_feature: Homolog of GI Number: 72547036 NR Desc: proteophosphoglycan 5
  misc_feature: Homolog of GI Number: 72547023 NR Desc: proteophosphoglycan ppg4
  misc_feature: Homolog of GI Number: 13592175 NR Desc: ppg3
  misc_feature: Homolog of GI Number: 67987177 NR Desc: 4Fe
  misc_feature: Homolog of GI Number: 56283929 NR Desc: CG3047
  misc_feature: Homolog of GI Number: 5420387 NR Desc: proteophosphoglycan
MGNTSSSSAGGSRPHRPTTSSDSGLPHAAAAEELSSYEAACRHDPEVRTFDSTLQRRTSRAISTLAVGVEVRSMSLDSLRGVTGCLLDMNQEVVKVILDCKKDIWKSPELFDLVEDYFESSLHTLDFCTALDKCLKRARDSQLLLHVALQRFDDEDDNDGDAAAAAPAARYARTLHELRQFKAAGDPFTDEFFEAFQAVYRQQLAMLEKLQQRKHRLDKKIKTIKAWRRVSSVIFASTFAAVLICSVVAAAIAAPPVAAALAAAAAIPIGSMGKWIDSLLKGYQDAVRGQKEVVSAMQVGTFIAIKDLDNIRVLINRVEMEISSMVDCVDFAERDEEAVRFGVEEIKKKLEAFMKSVEDLGEQADRCSRDIRRARTVVLQRIIRHPN

SEQ ID NO: 3837 - DNA, 1187 bp, Triticum aestivum
  misc_feature: Ceres CLONE ID no. 788424
  misc_feature: Ceres CDNA ID no. 25446238
  CDS (131)..(673): REFERENCED BY SEQ ID NO: 3838
aaaaaggagtcgaaaaaacgcggaccttctttccgttccagtcctcgcaaccgtgagttctccgccgccccctcccctcggaagaaacgtcgccgggagagagatccccgccgagagccagccgggcgagatggggttcatcggcgaccaggtggagtcgatccggtcgatgcaggtccgccaggtcgtcacgcagatcatcagcctcggtatgattgttacctcagcattgatcatatggaagggattgatggtcgcgacagggagcgaatcgccagttgtggtggttctttctggtagcatggagcctggatttaaaaggggtgatattctgtttttgcacatgagcaaagaacctatccgcactggagaaatagttgtttttaatattgatggccgtgaaattccaattgtccaccgtgtgatcaaggttcatgaacggcaagaaagtggagaagttgacatcctcacaaaaggcgataataattttggggatgaccgacttctgtatgcacaagggcagctttggcttcagaagcatcacattatggggcgggctgtaggctatctaccatatgttgggtgggttacgattgtgatgactgagaagccgatcattaagtaccttctgattggtgcactgggccttcttgtcataacatcaaaagagtgaagctgtcaaccttagcacatagcttgatcttgtagtgcaaatgtaatccagggcagaccaagtttttttgcaccgtgtaccgaatggaagatgtatttttatctgttttgactgttgcctctgccctaaagaagcctaaacccgtctcttatgcaacagtcatcttctcatggtcttaactaatgattttgatctttatattgcattgggtgcaacagttgatattttcaggaaaaggaaaatcaaattcgtcgatggcaggaggcgttctgttaggtcaaacccgctgtggtttgctgcaatctggttgttcctatttttgattgagcctagagtttgggaattggaactggaacttgtaaatatgtgctacatgcacaaatctacagtttgatctatgctggcaagtaacttgcaaactattgctgccatctcctggatggaaatgtactgtttcagatggatttgataaccagcgagcgttctctgaggagcttgaaaaaaaaaaaaaaaa

SEQ ID NO: 3838 - protein, 180 aa, Triticum aestivum
  misc_feature: Ceres CLONE ID no. 788424
  misc_feature: Ceres CDNA ID no. 25446238
  misc_feature (52)..(115): Pfam Name: Peptidase_S24 PFAM Desc: Peptidase S24
  misc_feature: Homolog of GI Number: 55296017 NR Desc: putative signal peptidase 18K chain
  misc_feature: Homolog of GI Number: 20465737 NR Desc: putative signal peptidase subunit
  misc_feature: Homolog of GI Number: 51972110 NR Desc: At3g15710
  misc_feature: Homolog of GI Number: 55642557 NR Desc:  similar to SPC18 protein
  misc_feature: Homolog of GI Number: 58383727 NR Desc: ENSANGP00000020448
  misc_feature: Homolog of GI Number: 34784421 NR Desc: Spc18 protein
  misc_feature: Homolog of GI Number: 62898009 NR Desc: signal peptidase complex
  misc_feature: Homolog of GI Number: 32484220 NR Desc: MGC64284 protein
  misc_feature: Homolog of GI Number: 38511785 NR Desc: Signal peptidase complex
  misc_feature: Useful for making ornamental plants with modified flowers
  misc_feature: Useful for making ornamental plants with modified flowers
  misc_feature: Useful for making ornamental plants with modified flowers
  misc_feature: Useful for making plants with increased biomass and foliage
  misc_feature: Useful for making plants with increased biomass and foliage
  misc_feature: Useful for making smaller plants
MGFIGDQVESIRSMQVRQVVTQIISLGMIVTSALIIWKGLMVATGSESPVVVVLSGSMEPGFKRGDILFLHMSKEPIRTGEIVVFNIDGREIPIVHRVIKVHERQESGEVDILTKGDNNFGDDRLLYAQGQLWLQKHHIMGRAVGYLPYVGWVTIVMTEKPIIKYLLIGALGLLVITSKE

SEQ ID NO: 3839 - DNA, 725 bp, Triticum aestivum
  misc_feature: Ceres CLONE ID no. 788755
  misc_feature: Ceres CDNA ID no. 40351373
  CDS (39)..(653): REFERENCED BY SEQ ID NO: 3840
accgatcaattaacaaccatatctatctattgagaaacatgaagaaggtttcacccttggcattttccattctctttttggccttcaccatagaaccctttattggcattgctgcagcagcaccagaagcagtgcttgacacctcaggccagaagctgagaacaggtgtcaagtactacattctgccagtgttcagaggcaaaggtggaggcctaacagtttcaagcagtggcaacaacacatgccccctctttgtggtgcaagagaagcttgaagtctcaaagggcaccccagttaccttcacaccctacaatgccaaaagtggtgtcatactaacctcaaccgatctcaacatcaagtcttatgggaaaaccaccacttgtgacaaacccccagtgtggaagctcctcaaggtgctaactggggtgtggtttttgagcactggtggtgttgaagggaatccaggggttaacactgttgtcaattggttcaagattgagaaggctgagaaagactatgtgctttctttctgtccctcgtttgcacagactttgtgcagggaacttgggttgtatgttggtgatgatgggaacaagcatttgtctttgagtgataaagttccatccttcaaggttatgttcaagagggcttaataagttccaaccaaattaacgctagaatgaataaaactagtcaaattaatcagactaaaaaaaaaaaaaaaa

SEQ ID NO: 3840 - protein, 204 aa, Triticum aestivum
  misc_feature: Ceres CLONE ID no. 788755
  misc_feature: Ceres CDNA ID no. 40351373
  misc_feature (31)..(203): Pfam Name: Kunitz_legume PFAM Desc: Trypsin and protease inhibitor
MKKVSPLAFSILFLAFTIEPFIGIAAAAPEAVLDTSGQKLRTGVKYYILPVFRGKGGGLTVSSSGNNTCPLFVVQEKLEVSKGTPVTFTPYNAKSGVILTSTDLNIKSYGKTTTCDKPPVWKLLKVLTGVWFLSTGGVEGNPGVNTVVNWFKIEKAEKDYVLSFCPSFAQTLCRELGLYVGDDGNKHLSLSDKVPSFKVMFKRA

SEQ ID NO: 3841 - DNA, 546 bp, Triticum aestivum
  misc_feature: Ceres CLONE ID no. 788770
  misc_feature: Ceres CDNA ID no. 25891150
  CDS (56)..(313): REFERENCED BY SEQ ID NO: 3842
attaggcaaagcaaagcaatcgcataatctagggtttgttcgttggttcgcaacaatggcgatgaggagattctacaacgagatcaaggggaagagggtgagcgaggttccggagcacgtgaagccgatgctgtcgctgaactacatcaagaaggcgattcagagaggcttcgataattaccatgccaagtacattgaaaccagctcccccgatcccatcttccatgtctgctacggcggcatgatcttctcctacctcgttgctctcccccacgagcgccgccacctccagcacgcccagcagcaccactgatccatccccttcagctggatcctggttgaattggaggtggttggcttgcttgatctttgttttaaaatctgaaaaatcaaggcagaaagatactgacagcttctttgtatttcatcatttgggtgataaaataagttgtatttgatacgattctcaattttcttgcacttaaatattaattgaatctgtgaaaagtaaacatactttttgatttggtaaaaaaaaaaaaaaaa

SEQ ID NO: 3842 - protein, 85 aa, Triticum aestivum; identical to SEQ ID NO: 3028
  misc_feature: Ceres CLONE ID no. 788770
  misc_feature: Ceres CDNA ID no. 25891150
  misc_feature: Homolog of GI Number: 30841448 NR Desc: fiber protein Fb15
  misc_feature: Homolog of GI Number: 42565482 NR Desc: fiber protein
  misc_feature: Homolog of GI Number: 50251207 NR Desc: putative fiber protein Fb15

SEQ ID NO: 3843 - DNA, 625 bp, Triticum aestivum
  misc_feature: Ceres CLONE ID no. 788808
  misc_feature: Ceres CDNA ID no. 25891151
  CDS (85)..(474): REFERENCED BY SEQ ID NO: 3844
ttctaaccctagccgcctgcgcgccgccacacgaacccccacccaacccgagcgagcgccggccgaggaggaagagaaggtgagatggctcgcggcgcggcggcggcggcagcggccgcgaagggcaagaagaaggggtccgtctccttcgtgatcgactgcaccaagcccgtggaggacaagatcatggagatcgcgtcgctggagaagttcctccaggagcgcatcaaggtcgccggcggcaaggccgggaacctcggcgactccgtcaccgtcacgcgcgacaagagcaaggtcaccgtcacctcggacggcgccttctccaagaggtacctcaagtacttgaccaagaagtacttgaagaagcacaacgtgcgggactggcttcgtgtgatcgcagccaacaaggagcgcaacgtgtacgagctccggtacttcaacatcgctgagaatgagggcgaggaggaggattagagtgcattgttatattgtagtgcttgttgagttttgatacttgatctgagtacctcctagttatccacctatcttatgttgtgccccgttgaacctggatggtttaatttgaagaatccttatattttgtctcccaaaaaaaaaaaaaaaa

SEQ ID NO: 3844 - protein, 129 aa, Triticum aestivum
  misc_feature: Ceres CLONE ID no. 788808
  misc_feature: Ceres CDNA ID no. 25891151
  misc_feature (13)..(129): Pfam Name: Ribosomal_L22e PFAM Desc: Ribosomal L22e protein family
  misc_feature: Homolog of GI Number: 50939919 NR Desc: putative 60S ribosomal protein L22
  misc_feature: Homolog of GI Number: 42733478 NR Desc: BRI1
  misc_feature: Homolog of GI Number: 6714454 NR Desc: putative 60S ribosomal protein  L22
  misc_feature: Homolog of GI Number: 12642842 NR Desc: putative 60S ribosomal protein L22
  misc_feature: Homolog of GI Number: 6056419 NR Desc: 60S ribosomal protein  L22
  misc_feature: Homolog of GI Number: 57086899 NR Desc:  similar to ribosomal protein L22
  misc_feature: Homolog of GI Number: 33150766 NR Desc: heparin
  misc_feature: Homolog of GI Number: 13592059 NR Desc: ribosomal protein L22
  misc_feature: Homolog of GI Number: 73956651 NR Desc:  similar to 60S ribosomal protein L22
MARGAAAAAAAAKGKKKGSVSFVIDCTKPVEDKIMEIASLEKFLQERIKVAGGKAGNLGDSVTVTRDKSKVTVTSDGAFSKRYLKYLTKKYLKKHNVRDWLRVIAANKERNVYELRYFNIAENEGEEED

SEQ ID NO: 3845 - DNA, 595 bp, Triticum aestivum
  misc_feature: Ceres CLONE ID no. 788849
  misc_feature: Ceres CDNA ID no. 35383291
  CDS (107)..(406): REFERENCED BY SEQ ID NO: 3846
gaactgagggaaccctagctcgctcgctcgctcgtctccggccgccctcgattcgattcgattctaccagcgccgccgccgccgccgaagcccaaagaggggagggatggcatccgtggggccgacgctcgagtccctcgtcgaccaggtgatctccgtcatcaccaacgacggccgcaacatcgtggggactctgcgggggttcgaccaggccaccaacatcatccttgacgagtcccacgagagggtctactccactaaggagggagtacagcagcttgtcctcggtctgtacatcatcaggggtgacaacataggcgtggtgggtgaggtggacgaggagctggacgcggcgctggacatgtcgaagctgagagcgcagcccctcaagccggtcatccactgaatatgatgaaaccttgtatcgatctgatcctgatcgcgcaagacgaagctgatgttgctcagtcaacctgtaccgtaggttaatcaattgatccctcactcatatctcatatcatggaccgagagcatgtgtcttgttgtatgatgaaaaaaacagggtttgctgcgttgacgaaaaaaaaaaaaaaaa

SEQ ID NO: 3846 - protein, 99 aa, Triticum aestivum
  misc_feature: Ceres CLONE ID no. 788849
  misc_feature: Ceres CDNA ID no. 35383291
  misc_feature (6)..(75): Pfam Name: LSM PFAM Desc: LSM domain
  misc_feature: Homolog of GI Number: 21592627 NR Desc: small nuclear ribonucleoprotein
  misc_feature: Homolog of GI Number: 25404943 NR Desc: protein F1E22.8
  misc_feature: Homolog of GI Number: 66533783 NR Desc:  similar to CG2021
  misc_feature: Homolog of GI Number: 50728156 NR Desc:  similar to U6 snRNA
  misc_feature: Homolog of GI Number: 68358714 NR Desc:  similar to U6 snRNA
  misc_feature: Homolog of GI Number: 27709054 NR Desc: similar to U6 snRNA
  misc_feature: Homolog of GI Number: 31240533 NR Desc: ENSANGP00000020162
  misc_feature: Homolog of GI Number: 46329906 NR Desc: MGC82379 protein
  misc_feature: Homolog of GI Number: 24655606 NR Desc: CG2021
  misc_feature: Homolog of GI Number: 55629264 NR Desc:  similar to U6 snRNA
MASVGPTLESLVDQVISVITNDGRNIVGTLRGFDQATNIILDESHERVYSTKEGVQQLVLGLYIIRGDNIGVVGEVDEELDAALDMSKLRAQPLKPVIH

SEQ ID NO: 3847 - DNA, 569 bp, Triticum aestivum
  misc_feature: Ceres CLONE ID no. 789071
  misc_feature: Ceres CDNA ID no. 40351374
  CDS (61)..(393): REFERENCED BY SEQ ID NO: 3848
aattgctattctctctctttcacagcacactcctcccagggtttctccaccaagagggaaatggctcccaaaccgcctagtacgggtctgtttgttggactgaacaagggacatgtcgtcaccaagaaggaattgcccccacgcccctcggatcgtaaggggaaaacaagcaagagggtgcactttgtgaggaacctcataagagaggttgctggttttgcaccctatgaaaagcgtataactgagttgctgaaggttgggaaggataagagggcacttaaggttgcaaagagaaagcttggaacccacaaacgtgcaaagaagaagcgtgaggaaatgtccaatgttcttaggaagatgagggctggtggggctggagacaagaagaaataagtcttatttactcttttctagtttcactagatggacctgtgtattgatggacgaactttcatatttttgctttggatcaattagtttacttcaacattttgtttgagaaatgtgttttgcttaactgagacatgatttatggaagaagctagattggatcaaaaaaaaaaaaaaaa

SEQ ID NO: 3848 - protein, 110 aa, Triticum aestivum
  misc_feature: Ceres CLONE ID no. 789071
  misc_feature: Ceres CDNA ID no. 40351374
  misc_feature (5)..(103): Pfam Name: Ribosomal_L36e PFAM Desc: Ribosomal protein L36e
MAPKPPSTGLFVGLNKGHVVTKKELPPRPSDRKGKTSKRVHFVRNLIREVAGFAPYEKRITELLKVGKDKRALKVAKRKLGTHKRAKKKREEMSNVLRKMRAGGAGDKKK

SEQ ID NO: 3849 - DNA, 629 bp, Triticum aestivum
  misc_feature: Ceres CLONE ID no. 789297
  misc_feature: Ceres CDNA ID no. 40351375
  CDS (82)..(342): REFERENCED BY SEQ ID NO: 3850
accttattctctccttctcccgccgcaactcactgtcttccttctctagggtttttagctcccccaatttcttcgctcaacatggttcttcaaaatgatattgatttgctaaatcctccggttgagcttgagaagaggaaacacaagctcaagcgtcttgttcagtcaccaaactctttcttcatggatgttaagtgccagggttgcttcaacataaccactgtctttagccactctcagactgttgttgtatgcggaaactgccagactgtcttgtgtcaaccaaccggtggccgggcaaggctaaccgagggatgctcctttaggaagaagggagactgagtggattgccatctttttttgtttgtgattggagagtttcagtaatgccttcttttgttttggttatgatgatatgttaattttgttaaatttgtaagacttgagtctacaagcttatccaagacattagggattacacctaattttgcatttctctttactgcaattgggttcatgtggctatgttagatgcttacttttatattaaattagactgcatgttatggtaaatgtatctttgtttcttcagtatggtagatatttttctgacaaaaaaaaaaaaaaaa

SEQ ID NO: 3850 - protein, 86 aa, Triticum aestivum; identical to SEQ ID NO: 2356
  misc_feature: Ceres CLONE ID no. 789297
  misc_feature: Ceres CDNA ID no. 40351375
  misc_feature (30)..(84): Pfam Name: Ribosomal_S27e PFAM Desc: Ribosomal protein S27

SEQ ID NO: 3851 - DNA, 957 bp, Triticum aestivum
  misc_feature: Ceres CLONE ID no. 789476
  misc_feature: Ceres CDNA ID no. 25891153
  CDS (94)..(753): REFERENCED BY SEQ ID NO: 3852
actagtcaatagtaagtagatctgcgatccgatccgatccgatccggccggcgatcccgcgcggcgcggcggagggcgggatcgatctcagccatggactcttcttcctcgtcgacggcgtcgtcttcccaggcgcaggcgcagccggacttcgactacctgttcaagctcctcctcatcggcgactccggcgtggggaagagcagcctgctcctccgattcacatcggactccttcgaggacctatccccgaccatcggcgtcgacttcaaggtgaagatggtcaacattgccggcaagaagctcaagctcgccgtctgggacaccgctggacaggaacgatttaggaccttgaccagctcttactacagaggggcacaagggatcatcatggtgtacgatgttactcgccgagaaacattcacgaatctctctgacatatgggccaaggaaattgacctgtattcgacaaaccaggactgtataaagatgcttgtcggaaacaaagtggacaaggaaagtgagagggctgtcaccaagaaggaaggcattgactttgccagggagtatgggtgtttatttctggaatgcagtgcgaaaaccaaagtgaacgtggagcagtgctttgaggagctcgtgctgaagatattggacactccgagcctgctggcggatgcgtcgtcgggggcgaagaagaacatcttcaagcagaaggcgccagaggctgatgctgcggcgagcggctgctgttgatttcattcacgcacgctaatcccgggcatctatctatgatctatctttatctttgtggaggatggatgaaaacgtttgttgtttgacgaagtgacatctaagcagctcgtttgtgtcgttttcttttgcttgtgttgctgtatatgatatgaatcagtgggtcagttgatgctcctcatgttgaatctaaaaaaaaaaaaaaaa

SEQ ID NO: 3852 - protein, 219 aa, Triticum aestivum
  misc_feature: Ceres CLONE ID no. 789476
  misc_feature: Ceres CDNA ID no. 25891153
  misc_feature: null
  misc_feature: Useful for making plants with altered Lignin content
  misc_feature (35)..(108): Pfam Name: Arf PFAM Desc: ADP
  misc_feature: Homolog of GI Number: 1370174 NR Desc: RAB1Y
  misc_feature: Homolog of GI Number: 17104731 NR Desc: putative GTP
  misc_feature: Homolog of GI Number: 8778652 NR Desc: F9C16.3
  misc_feature: Homolog of GI Number: 1370172 NR Desc: RAB1X
  misc_feature: Homolog of GI Number: 50919703 NR Desc: Putative GTP
  misc_feature: Homolog of GI Number: 31432458 NR Desc: putative GTP
  misc_feature: Homolog of GI Number: 6681328 NR Desc: putative Ras
  misc_feature: Homolog of GI Number: 549810 NR Desc: GTP
  misc_feature: Homolog of GI Number: 62859745 NR Desc: RAB18
  misc_feature: Homolog of GI Number: 37360618 NR Desc: mKIAA3012 protein
  misc_feature: Useful for increasing chlorophyll and photosynthetic capacity
MDSSSSSTASSSQAQAQPDFDYLFKLLLIGDSGVGKSSLLLRFTSDSFEDLSPTIGVDFKVKMVNIAGKKLKLAVWDTAGQERFRTLTSSYYRGAQGIIMVYDVTRRETFTNLSDIWAKEIDLYSTNQDCIKMLVGNKVDKESERAVTKKEGIDFAREYGCLFLECSAKTKVNVEQCFEELVLKILDTPSLLADASSGAKKNIFKQKAPEADAAASGCC

SEQ ID NO: 3853 - DNA, 527 bp, Triticum aestivum
  misc_feature: Ceres CLONE ID no. 789863
  misc_feature: Ceres CDNA ID no. 25891154
  CDS (1)..(324): REFERENCED BY SEQ ID NO: 3854
attaccattcacaatgagttattacaaccagcagcaaccgccggtcggagttccgccgccgcaaggttatccgccggaggggtacggaaaggagggatatccaccgccgggatacccgccagcgggatacccaccgccgggatatccgccacaacaaggctatcctccgccgccctacccggcgcaggggtatcctccgccctacgctcctcaatacgctcagcctccgccccgtcaacaaaattcaactggccctggttgtttggaaggctgtttggctgctctctgctgctgctgtctattggatgcgtgcttctgagatgagatgacaaattcaaattggaattagacggaatcaactcaataaaatttgtttctacttctctatttcctttgctttatcttgccccttgttgactttttatttttaataataatactatgaaactattgttgcttccaaaggccaaactgcctgatttgtttattgttaagaaatttagaccttcataaaaaaaaaaaaaaaa

SEQ ID NO: 3854 - protein, 101 aa, Triticum aestivum; identical to SEQ ID NO: 3492
  misc_feature: Ceres CLONE ID no. 789863
  misc_feature: Ceres CDNA ID no. 25891154
  misc_feature: Homolog of GI Number: 50938779 NR Desc: adhesive/proline
  misc_feature: Homolog of GI Number: 42565788 NR Desc: proline
  misc_feature: Homolog of GI Number: 21618167 NR Desc: adhesive/proline
  misc_feature: Homolog of GI Number: 41529812 NR Desc: PGYRP protein
  misc_feature: Homolog of GI Number: 3337330 NR Desc: rhodopsin
  misc_feature: Homolog of GI Number: 2290717 NR Desc: rhodopsin
  misc_feature: Homolog of GI Number: 45511081 NR Desc: rhodopsin
  misc_feature: Homolog of GI Number: 45511087 NR Desc: rhodopsin

SEQ ID NO: 3855 - DNA, 1569 bp, Triticum aestivum
  misc_feature: Ceres CLONE ID no. 789967
  misc_feature: Ceres CDNA ID no. 40041327
  CDS (45)..(1391): REFERENCED BY SEQ ID NO: 3856
aacaagacaggccttctagcagctcggcttacgctacgttggacatggccggagtttccaatgaccaacactctccccatgcttcgatccgtccgccgcccgccatggacgcggcccagcgctccccccgcccgcctatatataggccacgcgtcctccttgcaactcccctggttggtcgcggtgatgagcagcgagcgcgtcgacaagtgattgagatcgccatggggtccctggaaggcgacgtggccacctcgccctcgctgtccagcactggcagcagcggcaccggcgccggcaacgacaaccatggcggcggcggcggcgaggtgaggatatacgcctgcttcgcgcacggcgcgtccaacagcctcgagtgctacgagccgggcgccaacacgtggcgccgcgtcggcggcctcccgggggtgccccacggccacgtgctcaagggcttcgccgtcgtcgcggtcgccgagtccgtctacgtcatcggcggccgcctctgccgccgggaggccgcggccggcggcgattaccgcgacacggacgtgggcgtgcgcgccgacgtgctccgctacgacgtgcgccgcggggagtggcgctgctgcgcgccgctgctggtcccgcgcgtcgacttcgcatgcgcgccgtgccgcggcaggatctgcgtcgccggcgggctctgctccctctccggcgcgcggggcacggccgccgccgaggtgtacgacccggagaccggccgctggtcgccgctcccggacatgagcacgctgcggtacaagtgcgtgggcgtgacgtggcagggcgggttccacgtggtgggcggcttcgccgagagcaccacgccggcggccgcgcccggggaggcgcagtcgtcggcgctggagcggagctccgccgaggtgttcaactgcgcccgcggcgtgtgggagatcatcccggggatgtggcagctggacgtgccgcccaaccagatcgtggcggtggccggccggctcttcagctccggcgactgcctcaacagctggaagggccacgtcgaggtctacgacggcgagctcaacatctggagcgtcatggaccactcagcactatcagacctggcgctgctcgccagcaacctgccgccatcggcgcagcagctgtacctcaccatggccgtggtcgggacgcggctcttcttcctcgccgggtacgagatcgccggcgacgacgacgagagcttcaggacggtctcgctggtgcacagctacgacaccagcgccgcgccggggctggcgccggcgtggagcagcttccagcccaagatggaccatgacaacaacgtggaggacggcagcaaggagctcttcagccagtgctgctccgtgcagctctccagctgatcacttgcaggcctcagtccagtccagtacacacagtcagtccgtctgtatcatggtttttattaccatgaaaaaaattgctacttgtgctgttgtggtaaattcgtgtgactgtatttttcctttctttgtggagtggacaatggagaatatatacacatgaaaaaaaaaaaaaaaa

SEQ ID NO: 3856 - protein, 388 aa, Triticum aestivum
  misc_feature: Ceres CLONE ID no. 789967
  misc_feature: Ceres CDNA ID no. 40041327
  misc_feature (135)..(183): Pfam Name: Kelch_2 PFAM Desc: Kelch motif
  misc_feature (74)..(133): Pfam Name: Kelch_1 PFAM Desc: Kelch motif
  misc_feature: Homolog of GI Number: 72547036 NR Desc: proteophosphoglycan 5
  misc_feature: Homolog of GI Number: 72547023 NR Desc: proteophosphoglycan ppg4
  misc_feature: Homolog of GI Number: 72547018 NR Desc: proteophosphoglycan ppg3
  misc_feature: Homolog of GI Number: 66779508 NR Desc: Aspartate/glutamate/uridylate kinase
  misc_feature: Homolog of GI Number: 42562086 NR Desc: kelch repeat
  misc_feature: Homolog of GI Number: 82957823 NR Desc:  mucin 19
  misc_feature: Homolog of GI Number: 30313663 NR Desc: sublingual apomucin
  misc_feature: Homolog of GI Number: 82958562 NR Desc:  similar to mucin 19
  misc_feature: Homolog of GI Number: 4966346 NR Desc: Contains two PF01344 Kelch motif domains.
  misc_feature: Homolog of GI Number: 48374047 NR Desc: mucin 19
MGSLEGDVATSPSLSSTGSSGTGAGNDNHGGGGGEVRIYACFAHGASNSLECYEPGANTWRRVGGLPGVPHGHVLKGFAVVAVAESVYVIGGRLCRREAAAGGDYRDTDVGVRADVLRYDVRRGEWRCCAPLLVPRVDFACAPCRGRICVAGGLCSLSGARGTAAAEVYDPETGRWSPLPDMSTLRYKCVGVTWQGGFHVVGGFAESTTPAAAPGEAQSSALERSSAEVFNCARGVWEIIPGMWQLDVPPNQIVAVAGRLFSSGDCLNSWKGHVEVYDGELNIWSVMDHSALSDLALLASNLPPSAQQLYLTMAVVGTRLFFLAGYEIAGDDDESFRTVSLVHSYDTSAAPGLAPAWSSFQPKMDHDNNVEDGSKELFSQCCSVQLSS

SEQ ID NO: 3857 - DNA, 953 bp, Triticum aestivum
  misc_feature: Ceres CLONE ID no. 790806
  misc_feature: Ceres CDNA ID no. 40351376
  CDS (55)..(732): REFERENCED BY SEQ ID NO: 3858
aaaaataaatcttttgaattgattgttgtaagactttgtaattgaggtgctgcaatggcttcaagtcaggaagaggtgactcttttgggagtaattggaagcccatttgcttgcagggtgaagattgcccttaagttgaagggagttgaatacaaatatgtggaagaaaatttggccaacaagagtgatttgcttctcaaatccaacccagttcacaagaaagttccagtttttattcacaatgagaagcccatagcagagtctcttgtgattgttgagtacattgatgagacatggaagaacaaccccatcttgccttctgatccttaccaaagagccttggctcgtttctggtccaaattcattgatgacaagattgtgggtgctgcatggaatgctgttttcacggttgatgagaaagagcgtgagaagaatgttgtagaaacatatgaggctctgcagtttcttgagaatgagatcaaggacaagaaattctttggaggagaagaggttgggttggtagatatagctggtgtctacatagcattttgggtccctttgattcaagaaattgcagggttggagctattaagcagtgagaaatttcctaagctttacaagtggagccaagaatttgtgaaccatccaattgtcaaagaaggtcttccccctagagacccagtttttgcctttttcaaaggacgctatgaaagcctttctgcttcaagatagatttgatgtagtgtgagactctcagaatttctaaaggaaaattatgtgcactacttgtttgacattgagttgttgctgttaggatttcgtttcaaaaggatatgcttgtaagttgtaatccaggatttctccatgtcaaagaaatccaaggttgttcctgacatttcgctgtttcgataaataaattatgtggcatctttctattaaaaaaaaaaaaaaaa

SEQ ID NO: 3858 - protein, 225 aa, Triticum aestivum
  misc_feature: Ceres CLONE ID no. 790806
  misc_feature: Ceres CDNA ID no. 40351376
  misc_feature (8)..(79): Pfam Name: GST_N PFAM Desc: Glutathione S
  misc_feature (87)..(198): Pfam Name: GST_C PFAM Desc: Glutathione S
MASSQEEVTLLGVIGSPFACRVKIALKLKGVEYKYVEENLANKSDLLLKSNPVHKKVPVFIHNEKPIAESLVIVEYIDETWKNNPILPSDPYQRALARFWSKFIDDKIVGAAWNAVFTVDEKEREKNVVETYEALQFLENEIKDKKFFGGEEVGLVDIAGVYIAFWVPLIQEIAGLELLSSEKFPKLYKWSQEFVNHPIVKEGLPPRDPVFAFFKGRYESLSASR

SEQ ID NO: 3859 - DNA, 621 bp, Triticum aestivum
  misc_feature: Ceres CLONE ID no. 790978
  misc_feature: Ceres CDNA ID no. 40351377
  CDS (34)..(474): REFERENCED BY SEQ ID NO: 3860
aggaagcagcagcggcggcaacagggagagaagatgaagttcaatccacgtgtgtcgagcagccgccgcaagagccgaaaggctcatttcacggcgccatcgagcgtgcggcgggtgcttatgagcgcccctctgtcggcggagctgcggtctaagtacaacgtgaggtcgatcccagtacggaaggaggacgaggtgcaggtgatgcgaggaacatacaagggtcgcgaggggaaggtgactcaggtctaccgtcgaaagtgggtgattcacattgagcgcataacccgcgagaaggtgaatggttccaccgtcaacgttgggattcacccctccaaggttgtgctgaccaagctcaaattggacaaggaccgtaaggccattctcgatcgcaaggccaagggtcgcgccgccgccgataaggagaagggtaccaagttcgctcccgaagatatcatgcaaaccgttgattagtctcttttgcccccttatcatacaaacaaattttctctatgggttttgctaccctttttctattgcaggattttgtttttcttgtgttagtcgaacttttttatccttttattttccatctgcttattattaaaaaaaaaaaaaaaa

SEQ ID NO: 3860 - protein, 146 aa, Triticum aestivum
  misc_feature: Ceres CLONE ID no. 790978
  misc_feature: Ceres CDNA ID no. 40351377
  misc_feature: The plant is abnormally small.
  misc_feature: Useful for making plants with modulated biomass
  misc_feature (49)..(82): Pfam Name: KOW PFAM Desc: KOW motif
MKFNPRVSSSRRKSRKAHFTAPSSVRRVLMSAPLSAELRSKYNVRSIPVRKEDEVQVMRGTYKGREGKVTQVYRRKWVIHIERITREKVNGSTVNVGIHPSKVVLTKLKLDKDRKAILDRKAKGRAAADKEKGTKFAPEDIMQTVD

SEQ ID NO: 3861 - DNA, 587 bp, Triticum aestivum
  misc_feature: Ceres CLONE ID no. 790988
  misc_feature: Ceres CDNA ID no. 40351378
  CDS (14)..(334): REFERENCED BY SEQ ID NO: 3862
gagttgagagagaatgggaaggaagaaggggtatgttgagttcgaggagtcgccgccggacgatttcgatccggcgcatccgtacaaggacccggtggcgatgctggagatgagggagcacatcgtgagggagaagtggatccaaatcgagaaggccaagatcattagggagaagctccgatggtgctaccgcatcgaaggcgtcaaccacctccagaagtgccgccacctcgtcaaccagtatctcgagtccacccgcggcatcggttggggcaaggacggtcgtcatccttctctccacgctcccaaggttgagcctgttgaatctgattgactgtcctgtggataaataaataaaaaagaagggaagactgtttatccaactgatcatattgctaaatcggaaactgggttggaggagtgcttattttgcagttattgtgttcatgttgtttttatttagttgaactttctgcaaactacaactgtattttgacttagcctcggctatttttccttggcttattagtcttatttttgcttgttaccatttaaatgtaaacaagtatggaaaaaaaaaaaaaaaa

SEQ ID NO: 3862 - protein, 106 aa, Triticum aestivum
  misc_feature: Ceres CLONE ID no. 790988
  misc_feature: Ceres CDNA ID no. 40351378
MGRKKGYVEFEESPPDDFDPAHPYKDPVAMLEMREHIVREKWIQIEKAKIIREKLRWCYRIEGVNHLQKCRHLVNQYLESTRGIGWGKDGRHPSLHAPKVEPVESD

SEQ ID NO: 3863 - DNA, 780 bp, Triticum aestivum
  misc_feature: Ceres CLONE ID no. 791010
  misc_feature: Ceres CDNA ID no. 40351379
  CDS (25)..(468): REFERENCED BY SEQ ID NO: 3864
ttcatttcctttccccaaacaaacatggctcttctctctttcaattccttcacactctcccctctccattcaccattactcccctcttcttccacttttgctcttcccaccacctctgcttcaagagcaaacgtgattctgcccccgaagcccttgaatggagttcgaatctcgacacccaaaaggaggactgagtcggtgattgtctccgccgccgcggaggacgcgagttcggctgtggagggtgggtcgccgccgcctcctccggcggagagcgagaaagagagcggcgcctccgtggagaagcttccgttggagtcgaaggtgaaggagagagaggagcaaaagctgaggatgaagctggcgaagaagataaggttgaggcggaaaaggcttcttcggaaacgcaagttgagaaagaagggtagatggccaccttctaagatgaagaagttgaagaatgtatgattgtcaatttcaatgtgctttttttttttgcaggtttatttaagcttcattgttcattttctcattttattttcaaattaatgtgtattgtgtattgtgtattttgataatttccttaattttcgatcaaggatgctgtccccaatttggtgaataagggttttgatttggaatccatgttaacatgattgccatatcaccaaaatggatggaacttaatatgaacacaaaatggatgatcaaatgccccctttatgaaatccctggtgttttagattgcttgggaatttgttttcaaaaaaaaaaaaaaaa

SEQ ID NO: 3864 - protein, 147 aa, Triticum aestivum
  misc_feature: Ceres CLONE ID no. 791010
  misc_feature: Ceres CDNA ID no. 40351379
MALLSFNSFTLSPLHSPLLPSSSTFALPTTSASRANVILPPKPLNGVRISTPKRRTESVIVSAAAEDASSAVEGGSPPPPPAESEKESGASVEKLPLESKVKEREEQKLRMKLAKKIRLRRKRLLRKRKLRKKGRWPPSKMKKLKNV

SEQ ID NO: 3865 - DNA, 816 bp, Triticum aestivum
  misc_feature: Ceres CLONE ID no. 791048
  misc_feature: Ceres CDNA ID no. 35389164
  CDS (1)..(480): REFERENCED BY SEQ ID NO: 3866
ctcttcctctgctccggacaccccatctccgtcgaaccggacgccccatccacctctggacggccctccacctctacgggtggcggcggcgtcggcgtcggcgtcggcgtagcaaggtcagtgagaaatggcgccgcccgggtcgcgccggtgggcgtacgtgcggatcatggccggcaccatcctcggcggcggcctcggcttctacgtcatgcaccgcatcgagacctcctacaaggtgaggatggaggagaggctgcggaggtacgaggcgcacacgctcgccaaggagaaggaggcgcagcagctccaggacgaggggcgccgcgaggaccaggcgcaggtcttgccggactcgtgatttcctctcaactctcatcctcatgctcaggctcgccttcccgagctgtttgcaccaatttcagaaatgcaagacatgaccaagctgaagatgaacttggcatcgtgaacctccattgaagcttcaatggcacggaggaaacacacgcctctggaagaatgggcaaccaaattcattaagctccttcctcgacgatctgtccaagcatcagtcattatagagcatccagtagcaacccatgcctccttttggaccttcaacatttcatctaccttgctaacttgtatcttcaacaaagggttggcaagctgataaggtgtcggtggcttcaatcctggaccaaactgtccaattgcttccaccattcgagcaaatgatttaagactagcaagattatgtgcaagggcaccctcaatgaagaactcgcagatataatcagaaaaaaaaaaaaaaaa

SEQ ID NO: 3866 - protein, 77 aa, Triticum aestivum
  misc_feature: Ceres CLONE ID no. 791048
  misc_feature: Ceres CDNA ID no. 35389164
MAPPGSRRWAYVRIMAGTILGGGLGFYVMHRIETSYKVRMEERLRRYEAHTLAKEKEAQQLQDEGRREDQAQVLPDS

SEQ ID NO: 3867 - DNA, 689 bp, Triticum aestivum
  misc_feature: Ceres CLONE ID no. 791239
  misc_feature: Ceres CDNA ID no. 40351380
  CDS (216)..(512): REFERENCED BY SEQ ID NO: 3868
ggttacggatggttcctcttcttcctctcacatggcatgacaccagtaataataacacattccactttcccatctctggtttttacattacaatacaaccttaacgctcttgttcacgaaacacgcgctttttcacaaccttcgaagtctttttcgcaaccttcgaagtcaaaagattcaggcattctagtcccgagtaagtcattgtagaagccatggttctcgactccattttgtcgtcttctccttgtctgaagtcaccatctttcagtaggcagtttgcaaggcatgaactgggaagttggtcaacactcgtcaagagacactgcttcctcttatctgctcttgctctactaactgtcctctgtaccatttatctatattttgcagttacattcgcagccaatgactcctgctctgggttgagtggatctctgagagattcctgtcatatggagcatgttatggattctgaagccaagagtaaactgaaaggtctgagacatttatgatttccaattcaagttgtgccggagagtttttttatcttttcctttagtataatatgtactatttatccatactgtttatcttagtatttgtgagccaaaatgtacaatgtatgtagaaagcaatttcttgaatgctcatttgggggctgctttctggggtcaaaaaaaaaaaaaaaa

SEQ ID NO: 3868 - protein, 98 aa, Triticum aestivum
  misc_feature: Ceres CLONE ID no. 791239
  misc_feature: Ceres CDNA ID no. 40351380
MVLDSILSSSPCLKSPSFSRQFARHELGSWSTLVKRHCFLLSALALLTVLCTIYLYFAVTFAANDSCSGLSGSLRDSCHMEHVMDSEAKSKLKGLRHL

SEQ ID NO: 3869 - DNA, 1245 bp, Triticum aestivum
  misc_feature: Ceres CLONE ID no. 791360
  misc_feature: Ceres CDNA ID no. 25445809
  CDS (494)..(865): REFERENCED BY SEQ ID NO: 3870
cttctccattttccttcacgccgcaatcaagagaacgaaggcgcctagggttgcggcttccatcttgccactccagcggctcatcccagccagccacgccccattgacggcctcctccattcttctctgcaccggccttgtccccgtcttccccgccctgttccagctcccctcctgccgtgcgccttgaactcctcggatcaaacccagcttcccctctgcgtaatcgtcctgagtggtaactacggtctgacttcccgttgcctgaccagacggccctgccaccgagcagcgtccccgcgcccgcacgctaccacctcgcgctcgcctcgtcctcggctgctcggcacttcggcaggcacgaccaggaccgcgctcggagcacgctgaccgccgtccatcgcaacggcccgggtcgcaacaggcagcacgcaggggccaacgccagtccactgggcctagcttgttacatttgcaaaggacaaattctggcatgaataccactcagaaagttgatccaggggaaccagctgctaagattgctcaacaagcctctcagttcaaacgatggggacgcagacatccatttgttcgatatggtcttccactcatttcgttgacagtgtttggtgcggttggtctagctcatcttatacagggaagcaaagaagtaacaaaggaaaaggaggatatggaatgggaggtcgtagagaaaacaaaagctctgagccgaacaggaccggttgaaggggcctataagcctaagaagctctcactagaggatgaactcaaggctttgcagcaaaaggtggacataaacagctacgactacaagagaattcccaaacaaaatgaaaacaagtgaagtaaagcaccggttatcatgctaaggagtgggagattttcttaaaagctctgaagtagtttcttcatattgttacttcataagttccttgggatgctgtcgaagtgttaaaatgagattatggagacattatcatcagagaactctgtgcttcatcagccaccagcagtcgagacttaggtcgatgatccttatgaaggcttgaaccgtaggaatcatctttgtagcaataggagatggacgttttcacagtccgcccaagtgagtttctttttttgagttgatcgaataccgccttcattatcaaggggccaataaattgtaacagagtactctgacgtgtgaacaatcagattttgtatgcaaaaaaaaaaaaaaaa

SEQ ID NO: 3870 - protein, 123 aa, Triticum aestivum; identical to SEQ ID NO: 2550
  misc_feature: Ceres CLONE ID no. 791360
  misc_feature: Ceres CDNA ID no. 25445809
  misc_feature: Homolog of GI Number: 7268120 NR Desc: kinesin like protein
  misc_feature: Homolog of GI Number: 26453208 NR Desc: putative kinesin

SEQ ID NO: 3871 - DNA, 744 bp, Triticum aestivum
  misc_feature: Ceres CLONE ID no. 791724
  misc_feature: Ceres CDNA ID no. 40351381
  CDS (84)..(533): REFERENCED BY SEQ ID NO: 3872
attcacaactccaatccctcttcgctttagcaaattccaattcccaatccaaaaccctaatttcgttcaaagaaccaattgtgatggcaccaaaggcagagaagaagccagcggagaagaagcccgcggaggagaagaagtcgacggtgggagacaaggctccggcggagaagaagccgaaggccggaaagaagcttcctaaggagggaggagccggcggagaaggggggaagaagaagaagaggaacaagaagagcgtggagacatacaagatatacatattcaaggtgctgaagcaggtccaccctgacattggtatctcaagcaaggccatgggaatcatgaacagcttcatcaacgacatcttcgagaagcttgctcaggaatcttccagacttgcccgctacaacaagaagcccaccatcacttcaagggaaatccagaccgcggtcaggcttgtgctgcccggtgaattggccaagcacgccgtttctgagggtaccaaggccgtcaccaagttcaccagctcttgaactaactatatcttatcgattttctcaggctcttgtttctgtatctatggctgttaggcctatgcttagatttgaatcagtaggttttttggggggtttgggggttagcatttgtaattgaaggaatgttagtggttgagttgtttatggaagtggtaggattcattgatgatataggaatgcagtaattttagcaaaaaaaaaaaaaaaa

SEQ ID NO: 3872 - protein, 149 aa, Triticum aestivum
  misc_feature: Ceres CLONE ID no. 791724
  misc_feature: Ceres CDNA ID no. 40351381
  misc_feature: No seed is being produced by the plant
  misc_feature: The plant flowers significantly late compared to wild-type.
  misc_feature: Useful for biocontainment applications
  misc_feature: Useful for making plants with modulated flowering time
  misc_feature (56)..(128): Pfam Name: Histone PFAM Desc: Core histone H2A/H2B/H3/H4
MAPKAEKKPAEKKPAEEKKSTVGDKAPAEKKPKAGKKLPKEGGAGGEGGKKKKRNKKSVETYKIYIFKVLKQVHPDIGISSKAMGIMNSFINDIFEKLAQESSRLARYNKKPTITSREIQTAVRLVLPGELAKHAVSEGTKAVTKFTSS

SEQ ID NO: 3873 - DNA, 909 bp, Triticum aestivum
  misc_feature: Ceres CLONE ID no. 792368
  misc_feature: Ceres CDNA ID no. 25445746
  CDS (169)..(690): REFERENCED BY SEQ ID NO: 3874
acgagcccactgcccaggcccatttttcactttgctgctcgctcctacactaacccacacgcacggtcgcacccgcacctcacctcatctcaccagagagagaaagagagagagagagagagagagagagagagagagagagagtccgaagaaaaagacggcggcgggatgtttctgcggcggatcctgagcggcgggggcgggctggcggccctgcgctctgcgcgggcggtgaaggagacgacggggatcgtgggtctggacgtggtgcccgaggcgcggaatgtgctcatcgggctctacacgcgcaccctcaaggagatcgaggccgtccccaaggacgagggctaccgcaaggccgtcgagtccttcacccgccaccgcctccagatctgccaggaggaggaggactggaagcgcatcgaggaccgcctcggctgcggccaggtcgaggagctcatcgaggaggccgaggacgagctcaagctcatcggcaagatgatcgagtgggatccctggggtgttcctgatgactacgaatgcgaggtgattgaagatgacacacctattcccaagcatgttccgcagcaccggcccgttgcactacctgaggagttcttcaagacattagatgccatcaaatcagatccagctctgcagggcgactctcctccgcaagtgaagtcatgaaactagaactcttcaagatgcatcatttttcacctgttgcagtgtgtagttgagactagtctcatgggtcctttgcctgcagtttgcttgttgtcccgagcagaataaatttgtttctgtgaatgtgaatgcgtttttaacgcagtgcttcaacacagtaaaatactgtttctgttttctattaatcgatgttgacaaaagatcaaaaaaaaaaaaaaa

SEQ ID NO: 3874 - protein, 173 aa, Triticum aestivum
  misc_feature: Ceres CLONE ID no. 792368
  misc_feature: Ceres CDNA ID no. 25445746
  misc_feature (35)..(91): Pfam Name: ETC_C1_NDUFA5 PFAM Desc: ETC complex I subunit conserved region
  misc_feature: Homolog of GI Number: 16930745 NR Desc: NADH
  misc_feature: Homolog of GI Number: 28829489 NR Desc: similar to NADH
  misc_feature: Homolog of GI Number: 57095956 NR Desc:  similar to NADH dehydrogenase
  misc_feature: Homolog of GI Number: 233598 NR Desc: 13 kDa
  misc_feature: Homolog of GI Number: 28461281 NR Desc: NADH dehydrogenase
  misc_feature: Homolog of GI Number: 50728132 NR Desc:  similar to NADH dehydrogenase
  misc_feature: Homolog of GI Number: 55629282 NR Desc:  similar to NADH
MFLRRILSGGGGLAALRSARAVKETTGIVGLDVVPEARNVLIGLYTRTLKEIEAVPKDEGYRKAVESFTRHRLQICQEEEDWKRIEDRLGCGQVEELIEEAEDELKLIGKMIEWDPWGVPDDYECEVIEDDTPIPKHVPQHRPVALPEEFFKTLDAIKSDPALQGDSPPQVKS

SEQ ID NO: 3875 - DNA, 637 bp, Triticum aestivum
  misc_feature: Ceres CLONE ID no. 792381
  misc_feature: Ceres CDNA ID no. 40351382
  CDS (52)..(492): REFERENCED BY SEQ ID NO: 3876
atacagccactctttcattctcattgccgtcacacagagagagaagagacaatgaagtttaacccaagggtttcctcaagccgtcgaaagagccgcaaggctcacttcaccgctccgtcgagcgtgcgtcgcgtcctgatgagcgcgcctctctcgaccgatctccggtcgaagtacaacgtgcggtccattccggttcgcaaggacgacgaggtgcaggtggtgaggggaacctacaagggccgcgagggcaaagtggtccaggtctatcgccgcaagtgggtcatccacatcgagcgcatcacccgcgagaaggttaacggctccaccgtcaacgttggcattcacccttccaaggttgtcgtcaccaagcttcgaatggacaaggaccgcaaatccttgctcgatcggaaggccaagggtcgcgccgccgccgacaaggaaaagggtaccaagttcgctcctgaggatgtcatgcagaccgtcgattaatttctctctttacttttttgccctctctgtactttcttatttgctgcttttgtttgtggtttggatctcaagggttccgctattgtgaggcctttctgttttgtttaatttaatcaaatgcttgacactaaaaaaaaaaaaaaaa

SEQ ID NO: 3876 - protein, 146 aa, Triticum aestivum
  misc_feature: Ceres CLONE ID no. 792381
  misc_feature: Ceres CDNA ID no. 40351382
  misc_feature: The plant is abnormally small.
  misc_feature: Useful for making plants with modulated biomass
  misc_feature (49)..(82): Pfam Name: KOW PFAM Desc: KOW motif
MKFNPRVSSSRRKSRKAHFTAPSSVRRVLMSAPLSTDLRSKYNVRSIPVRKDDEVQVVRGTYKGREGKVVQVYRRKWVIHIERITREKVNGSTVNVGIHPSKVVVTKLRMDKDRKSLLDRKAKGRAAADKEKGTKFAPEDVMQTVD

SEQ ID NO: 3877 - DNA, 687 bp, Triticum aestivum
  misc_feature: Ceres CLONE ID no. 792382
  misc_feature: Ceres CDNA ID no. 40351383
  CDS (76)..(492): REFERENCED BY SEQ ID NO: 3878
actcgttctatctaattcagttttttttctcccatcataaaaaaccgaccctctcctttccctcttcaccaaccaatggctcccccaaaggccgagaagaagcccgcggagaaaaagcccgcagagaaggctccggcggagaagaagcccaaggccgagaagaagatatcgaaggaaggaggaagcgagaagaagaagaagagaacaaagaagagcgtggagacctacaagatttacatcttcaaggtgctgaagcaggttcaccccgacatcggaatctcaagcaaggccatggggatcatgaacagtttcataaacgacatcttcgagaagctcgcccaggagtcgtcgcgattggctaggtataacaagaagcctaccattacttccagggagatccaaacggcggtgcgtttggtcctccctggggagttggccaaacacgctgtctctgaaggtaccaaggccgtcaccaagttcaccagctcttgattcgttttgtttcctgtgtttcgattagggttttctgttgaccccgatttgattcgcatttttaaattagggttttattttcctttttgttgcttttgagggtgtagatgtaaaattaaagctttatttttaaataatataaatgccgttttttaaaaaaaaaaaaaaaaaaaaaaaacaaaaaaaaaaaaaaaa

SEQ ID NO: 3878 - protein, 138 aa, Triticum aestivum; identical to SEQ ID NO: 3746
  misc_feature: Ceres CLONE ID no. 792382
  misc_feature: Ceres CDNA ID no. 40351383
  misc_feature: No seed is being produced by the plant
  misc_feature: The plant flowers significantly late compared to wild-type.
  misc_feature: Useful for biocontainment applications
  misc_feature: Useful for making plants with modulated flowering time
  misc_feature (45)..(117): Pfam Name: Histone PFAM Desc: Core histone H2A/H2B/H3/H4

SEQ ID NO: 3879 - DNA, 740 bp, Triticum aestivum
  misc_feature: Ceres CLONE ID no. 792774
  misc_feature: Ceres CDNA ID no. 40351384
  CDS (165)..(437): REFERENCED BY SEQ ID NO: 3880
aatcatcaactatttaaaacaatggtcagaggctaacttctccactagtttttctgtgtagagccctttggacacaccctctaaaccaatctatcaagtcctgaatctggtgagcaaatatggagctttgttggcaaacatccatccatggttcttgaagaagcatggagataaaggggtgtgagagggtcctcaccactcacactcctccacttaaaacagtttgttttggcttagctttggcttctctaatcaacaagggatgtgttctaacattctctcttgagtggcagaagcagatatgcattctccaaaggaggagaggctttggctacagcctggcaaaccggcaagtcacgaaaaggcaatggactccattggggtctctatggctatctattgctcatctatgtagttcttcttgctgtagaatgtaataaaacaaagttggccttcctttgagaagttaccaacttttgctgtccaaattactcaatttgcagctgactagaattcctttctctctgatcagtttctgcagatgagtaggtaggtaatttgtgatcactcccttcccttcatgtctgtgttcccttttccatgcttgtttgtgttgttagttataaccttatgaggaataaaagaatagtacaattctagtccctcaaagtttaggattgtattctattgaactttaatagaaaagcttcagagtcttctttccaaaaaaaaaaaaaaaa

SEQ ID NO: 3880 - protein, 90 aa, Triticum aestivum
  misc_feature: Ceres CLONE ID no. 792774
  misc_feature: Ceres CDNA ID no. 40351384
MEIKGCERVLTTHTPPLKTVCFGLALASLINKGCVLTFSLEWQKQICILQRRRGFGYSLANRQVTKRQWTPLGSLWLSIAHLCSSSCCRM

SEQ ID NO: 3881 - DNA, 602 bp, Triticum aestivum; identical to SEQ ID NO: 3295
  misc_feature: Ceres CLONE ID no. 792786
  misc_feature: Ceres CDNA ID no. 36699990
  CDS (93)..(332): REFERENCED BY SEQ ID NO: 3882

SEQ ID NO: 3882 - protein, 79 aa, Triticum aestivum; identical to SEQ ID NO: 1962
  misc_feature: Ceres CLONE ID no. 792786
  misc_feature: Ceres CDNA ID no. 36699990
  misc_feature (1)..(78): Pfam Name: Metallothio_2 PFAM Desc: Metallothionein
  misc_feature: Homolog of GI Number: 47076854 NR Desc: type 2 metallothionein
  misc_feature: Homolog of GI Number: 541943 NR Desc: metallothionein
  misc_feature: Homolog of GI Number: 47076858 NR Desc: type 2 metallothionein
  misc_feature: Homolog of GI Number: 47076850 NR Desc: type 2 metallothionein
  misc_feature: Homolog of GI Number: 71040685 NR Desc: metallothionein
  misc_feature: Homolog of GI Number: 2815246 NR Desc: class I type 2 metallothionein
  misc_feature: Homolog of GI Number: 71040683 NR Desc: type 2 metallothionein
  misc_feature: Homolog of GI Number: 74476676 NR Desc: type 2 metallothionein
  misc_feature: Homolog of GI Number: 47076870 NR Desc: type 2 metallothionein
  misc_feature: Homolog of GI Number: 747906 NR Desc: metallothionein

SEQ ID NO: 3883 - DNA, 518 bp, Triticum aestivum
  misc_feature: Ceres CLONE ID no. 792847
  misc_feature: Ceres CDNA ID no. 40351385
  CDS (95)..(337): REFERENCED BY SEQ ID NO: 3884
aaacacggtcgcctggatcagaagccctagcttgttccacctaaagagaaccaaaggctttgctccatccacccacctacccccacagaagcaaatggagttcaagccgaaggcgaccgtgtgcgcggtgatgctggtgctgctcctgctttcctcatacgacagcggcggcgtcggcgtggcggaggcgcgcatttgcacggggaagagccagcaccactcgttcccgtgcatctcggacaagagctgcaccaagacgtgcctcagcgagcacggcgcaaaatggacggccggctactgcaaattcaggcgctgcacctgccagagggagtgctagggcagacgctccgcgcgcgagctccaccacacccggcccgtccatggcgccgccagtcacctatgtatcttaattaccatgtacccactcgccgcctctgtaaggagatgtaataaaacgtggcgcgcacccgccggcgcgtcaccggtgtacgtagcatgatgcaaaaaaaaaaaaaaaa

SEQ ID NO: 3884 - protein, 80 aa, Triticum aestivum
  misc_feature: Ceres CLONE ID no. 792847
  misc_feature: Ceres CDNA ID no. 40351385
  misc_feature (33)..(80): Pfam Name: Gamma PFAM Desc: Gamma
MEFKPKATVCAVMLVLLLLSSYDSGGVGVAEARICTGKSQHHSFPCISDKSCTKTCLSEHGAKWTAGYCKFRRCTCQREC

SEQ ID NO: 3885 - DNA, 709 bp, Triticum aestivum
  misc_feature: Ceres CLONE ID no. 793139
  misc_feature: Ceres CDNA ID no. 40351386
  CDS (57)..(512): REFERENCED BY SEQ ID NO: 3886
tcaccctccctcgccgtccaaacccaatcagaaatctcaagcttagcacagcaccaatggcgtcggagcagaccttcatcatgatcaagcctgatggcgtccagaggggcctcatcggtgaggtcatcagccgcttcgagaagaagggcttctacctcaaaggtctgaagctccagaacgtggagaagtcgttcgccgagcagcactacgccgatctgtcctccaagcccttcttcgctgggctcgtggagtacatcgtctccggccctgtcgtcgctatggtctgggagggcaagagcgtcgtctccactggacgcaagataattggcgccaccaaccccctggcctctgagcccggcaccatccgtggtgactttgccgtcgacatcggcaggaacgtcatccatggaagcgactcagttgagagtgcgaggaaggagatcgccctgtggttccctgagggcattgcagagtggaggagcagccagcacaactggatctatgaggcctaagatgtgtcatgagtggttgagtgcaggtttcattaagcatctaccaaactagtctttggttgtttacagttttgagatttgtatcttgggaaccttgtttgtgtgaactgaagttatctccttgtgcttgggcatccaagcggtatctgctgctctatatttgatatatggtattgctttgaaaaaaaaaaaaaaaa

SEQ ID NO: 3886 - protein, 151 aa, Triticum aestivum
  misc_feature: Ceres CLONE ID no. 793139
  misc_feature: Ceres CDNA ID no. 40351386
  misc_feature (4)..(137): Pfam Name: NDK PFAM Desc: Nucleoside diphosphate kinase
MASEQTFIMIKPDGVQRGLIGEVISRFEKKGFYLKGLKLQNVEKSFAEQHYADLSSKPFFAGLVEYIVSGPVVAMVWEGKSVVSTGRKIIGATNPLASEPGTIRGDFAVDIGRNVIHGSDSVESARKEIALWFPEGIAEWRSSQHNWIYEA

SEQ ID NO: 3887 - DNA, 743 bp, Triticum aestivum
  misc_feature: Ceres CLONE ID no. 793148
  misc_feature: Ceres CDNA ID no. 40351387
  CDS (67)..(477): REFERENCED BY SEQ ID NO: 3888
atttttttgattcttttcccctagattcagccacagtttcggaggagaagaaaatagtcgttcgagatggcccgtacgaagcaaactgctcgtaagtccacaggaggaaaggctcctaggaagcagcttgcaaccaaggctgcacgtaagtctgcaccaactactggtggtgtgaagaagccacatcgttaccgtcctggtaccgttgctcttcgtgagattaggaaataccagaagagtaccgagcttttgatcaggaagctccccttccagaggctggttcgtgaaattgctcaggacttcaagactgatctgcgtttccagagccacgccgtgcttgcattgcaagaagctgctgaggcataccttgttgggctctttgaggacactaacctgtgtgccattcacgctaagcgggtaaccattatgcccaaggatatccagctggcaagaaggattcgcggtgaacgtgcttgaggtggtggttgtgaagatgaagatgaagatgggttgctgcgggtggtgtttttgttgttcagattcctttttttttttttttcaatggatagggttgttagggagtgtaggtgttttacggtattacccattaattgtgatacaggcaaatactgccaagtgtccgtgactgtgttttcttccttttagaaaattggcttgtaattgatttttggacatgtgtgtcataatgtttctgtttttagtttttaaaaaaaaaaaaaaaa

SEQ ID NO: 3888 - protein, 136 aa, Triticum aestivum; identical to SEQ ID NO: 30
  misc_feature: Ceres CLONE ID no. 793148
  misc_feature: Ceres CDNA ID no. 40351387
  misc_feature (58)..(134): Pfam Name: Histone PFAM Desc: Core histone H2A/H2B/H3/H4

SEQ ID NO: 3889 - DNA, 1625 bp, Triticum aestivum
  misc_feature: Ceres CLONE ID no. 793610
  misc_feature: Ceres CDNA ID no. 24766519
  CDS (275)..(1306): REFERENCED BY SEQ ID NO: 3890
gttaaccacacgcagcagccggagggaggagcgagcgaggaagccaccagtataaaaccaacgccgcgtccttggcagccagcgatcccgcgactcagccgacggttttctgttcccccctctgacctgtccctccatcctcctcaattctcctccccggcgcccgccgttgacgaggcctcggaggaggaggactcgagcgcgccgctgtctcctgctccgccggctgccctcgcgttgagtttcacagggttgagttaggaggactgcgaccatgaaggccctcattcttgtgggaggattcggcacccgcctgcggccgctgacgctcagcgtgcccaagccgctcgtcgatttcgccaacaagcccatgatcctgcatcagatcgaggctctgaaagatgtgggagttacagaagttgtcctagccatcaattaccagccagaggtcatgctcaactttctcaaggacttcgagagcaagcttggcatcaagatcacctgctcccaggagacagagccaatgggaaccgctggaccgctggccctggcccgcgacaagctcgacgacggatccggcgagcctttcttcgtcctcaacagtgacgtgatcagcgagtacccgttcgcagagctcatcgagttccacaagtcccatggcggcgaggccacgatcatggtcaccaaggtggagcggttcgtggagaagcccaaggtgttcgtgggcaacaagatcaacgccggcatctacctgctgagcccgtccgtgctggaccgcatcgagctgaagccgacgtccatcgagaaggaggtgttcccgcgcatcgccgccgacaagggcctgttcgccatggtgctgccggggttctggatggacatcgggcagccgagggactacatcacggggctgaggctctacctggagtccctgaggaagagggcgccggcgaggctggcggcgggcgcgcacgtgctgggcaacgtgctggtacacgagacggcgacgatcggggaggggtgcctgatcgggccggacgtggccgtcggccccgggtgcgtggtggaggccggggtgcggctgtcgaggtgcaccgtgatgcggggcgcccgcgtgaagaagcacgcgtgcatctccggcagcatcgtggggtggcactcgacggtgggcaagtgggcgcgcgtggagaacatgaccatcctcggcgaggacgtgcacgtctgcgacgaggtgtacagcaacggcggcgtcgtgctcccgcacaaggagatcaagtccagcatcctcaagcccgagatcgtcatgtgatcgggaccatcgcccgcgccacatggtgaaaaagggtcgtatatttcttcatgcgtttgttggtttatttgtctgtctgtctgcaagtgtaaccagaggtgtccaccaaactgccaagtgtctatcaagctctatgtatgtctagacgtgtcgcaagtttttttttctttcttttttgaagacaaaatgcgtctcggttaaatttaagccccgggcttcaatttgtagataggtgtcagatgcatgggaataaagcatcagttttacaaaaaaaaaaaaaaaaaaaaaaaaaaaaaaaaaaagaaaaaaaaaaaaaaaa

SEQ ID NO: 3890 - protein, 343 aa, Triticum aestivum
  misc_feature: Ceres CLONE ID no. 793610
  misc_feature: Ceres CDNA ID no. 24766519
  misc_feature (2)..(135): Pfam Name: NTP_transferase PFAM Desc: Nucleotidyl transferase
  misc_feature (248)..(265): Pfam Name: Hexapep PFAM Desc: Bacterial transferase hexapeptide
  misc_feature: Homolog of GI Number: 14971013 NR Desc: GDP
  misc_feature: Homolog of GI Number: 47681456 NR Desc: GDP
  misc_feature: Homolog of GI Number: 57340416 NR Desc: GDP
  misc_feature: Homolog of GI Number: 4103324 NR Desc: GDP
  misc_feature: Homolog of GI Number: 7269958 NR Desc: GDP
  misc_feature: Homolog of GI Number: 7076802 NR Desc: mannose
  misc_feature: Homolog of GI Number: 23296504 NR Desc: putative GDP
  misc_feature: Homolog of GI Number: 51258398 NR Desc: MGC84017 protein
  misc_feature: Homolog of GI Number: 56605870 NR Desc: MGC89813 protein
MKALILVGGFGTRLRPLTLSVPKPLVDFANKPMILHQIEALKDVGVTEVVLAINYQPEVMLNFLKDFESKLGIKITCSQETEPMGTAGPLALARDKLDDGSGEPFFVLNSDVISEYPFAELIEFHKSHGGEATIMVTKVERFVEKPKVFVGNKINAGIYLLSPSVLDRIELKPTSIEKEVFPRIAADKGLFAMVLPGFWMDIGQPRDYITGLRLYLESLRKRAPARLAAGAHVLGNVLVHETATIGEGCLIGPDVAVGPGCVVEAGVRLSRCTVMRGARVKKHACISGSIVGWHSTVGKWARVENMTILGEDVHVCDEVYSNGGVVLPHKEIKSSILKPEIVM

SEQ ID NO: 3891 - DNA, 724 bp, Triticum aestivum
  misc_feature: Ceres CLONE ID no. 793624
  misc_feature: Ceres CDNA ID no. 40351388
  CDS (70)..(465): REFERENCED BY SEQ ID NO: 3892
atcccaagctcacacacactaaaccaaagtaagaggtatagtgttctaagagtgagcaacttgtgagaaatggcttccaaggctgcacttctcttgtgtctcaatgttctctttttcactgtggttagttccacatatgtgccatgtaatccaccccccaaaactcccaaacacccacctgtcccaaagccaccatccccaaagcaagcaagctgccccaaagacactattaagttcggtgtgtgtactgatgtgttaggtttgattaatgtgcaacttgggaagccaccaaagaccccatgctgcaacctaattcagggtcttgctgatcttgaagctgcagtgtgcctttgcactgctctcaaggctaatgtgttgggcatcaacctcaatgttccagtgaacttgagcttgcttctaaactactgtggaaagggtgttcccaagggattcgtctgctattaaatcaaacacttataatgtgtagcttcctattgctatattcgtcattcatcattattctgtgtatttcagtatttgtgcccggcacgtgccaattagccaacgaacatttcgttcatacttggttactattactgttgtgatgcgctgaaactttaaaggcttcttggtcttccttgtcgcagcctcactaaagtcgtttgtattctaagtgaaatttctactaataaataatctacattatttaaaaaaaaaaaaaaaa

SEQ ID NO: 3892 - protein, 131 aa, Triticum aestivum
  misc_feature: Ceres CLONE ID no. 793624
  misc_feature: Ceres CDNA ID no. 40351388
  misc_feature (49)..(130): Pfam Name: Tryp_alpha_amyl PFAM Desc: Protease inhibitor/seed storage/LTP family
MASKAALLLCLNVLFFTVVSSTYVPCNPPPKTPKHPPVPKPPSPKQASCPKDTIKFGVCTDVLGLINVQLGKPPKTPCCNLIQGLADLEAAVCLCTALKANVLGINLNVPVNLSLLLNYCGKGVPKGFVCY

SEQ ID NO: 3893 - DNA, 1553 bp, Triticum aestivum
  misc_feature: Ceres CLONE ID no. 793663
  misc_feature: Ceres CDNA ID no. 25892844
  CDS (71)..(1174): REFERENCED BY SEQ ID NO: 3894
tcacctccatcctctgttcttcacttttttccatctgagccgtccgagtctctccaaatttccggccagaatgggggaatcgagcgcgcttcagtccatcctctacgaccgcggcgcgcttcgcctcctcgatcagaggaagctgcccctggaggaggtctacatcgatgtcaaggactccgcggatggatggaatgcgatcagagacatggttgtccgtggtgctcctgccatagccatagcggcagcactatcattggctgtggaagttaatgatcacgatttcactggtacacctgtggaagcagccttattcgtttccaagaagttggaataccttgtatccagccggcccacagcagtgaacctgtctgatgctgctacaaagcttcagaacttagtgtcaagaacagctgaaacagcaaaagatgccaaatctatctttcaggtctttattgaagctgcagaggctatgctagttgatgatgtggccgataataaggcaattggctcgcatggagctgaattccttcaacggcagcttggaagttcgagaaacatctctgttctaacccattgtaatactggcagcctagcaaccgctggttacggaactgccctaggggtcattcgtgctcttcactctggaggagttttggaaaaggccttctgcactgaaactcgtccatttaaccagggttccaggcttacagctttcgagttagttcatgacaaaatacctgcgacgctgatagcagactctgctgcagctgcacttatgaataatggacaagttcaagctgtaattgtgggtgctgatcgtatagctgcaaatggtgacactgccaacaagattggcacatacaacctctcaatttctgcaaagcatcacggcgtgcagttttacgtggccgcaccagtaacttcgattgatctctcccttccgtctgggaagcaaatcgtcatagaagaaagatcttcaaaggaattgttgaactctgaaggtggtctaggaaagcaagttgccgcgtcaggtatacaagtctggaaccccgccttcgacgttactccagcaagtctaattactgcaatcattacagaaaagggtgtaatcacaaagtctgatcctaatggaagtttcgacatcaaaggtttcatcgagtgtgccaagtgatgctctctccagtgagcataggttggcatgaatgcagtggaacatccttctcacacaattgatgataggatgctcatgttgtactcccgacaataagatctttcgaagtgagagaaaaataaagttgcgtacgagatgtattacgaggatgagtgtttgttatccaaaaatatatataaaaagatgcatcttttgctagtgaaatttaatgtattttctagcaatgaaccaaaactcggtttgagatggaagacgagcagtcgctatctgaagaacagaggtgggaatactgaaaatttacgtgcagtagtggtctttaccttctagttgaagttgctccaattttcgtatgctgtttatatgaaaaaaaaaaaaaaaa

SEQ ID NO: 3894 - protein, 367 aa, Triticum aestivum
  misc_feature: Ceres CLONE ID no. 793663
  misc_feature: Ceres CDNA ID no. 25892844
  misc_feature (34)..(352): Pfam Name: IF PFAM Desc: Initiation factor 2 subunit family
  misc_feature: Homolog of GI Number: 15216226 NR Desc: CIG2
  misc_feature: Homolog of GI Number: 12407304 NR Desc: IDI2
  misc_feature: Homolog of GI Number: 77549270 NR Desc: IDI2
  misc_feature: Homolog of GI Number: 52699545 NR Desc: isopentenyl
  misc_feature: Homolog of GI Number: 20197503 NR Desc: putative translation initiation factor eIF
  misc_feature: Homolog of GI Number: 21593194 NR Desc: putative translation initiation factor eIF
  misc_feature: Homolog of GI Number: 22136322 NR Desc: putative translation initiation factor eIF
  misc_feature: Homolog of GI Number: 66849875 NR Desc: IDI2
  misc_feature: Homolog of GI Number: 54637683 NR Desc: GA10928
  misc_feature: Homolog of GI Number: 72129442 NR Desc:  similar to CG11334
MGESSALQSILYDRGALRLLDQRKLPLEEVYIDVKDSADGWNAIRDMVVRGAPAIAIAAALSLAVEVNDHDFTGTPVEAALFVSKKLEYLVSSRPTAVNLSDAATKLQNLVSRTAETAKDAKSIFQVFIEAAEAMLVDDVADNKAIGSHGAEFLQRQLGSSRNISVLTHCNTGSLATAGYGTALGVIRALHSGGVLEKAFCTETRPFNQGSRLTAFELVHDKIPATLIADSAAAALMNNGQVQAVIVGADRIAANGDTANKIGTYNLSISAKHHGVQFYVAAPVTSIDLSLPSGKQIVIEERSSKELLNSEGGLGKQVAASGIQVWNPAFDVTPASLITAIITEKGVITKSDPNGSFDIKGFIECAK

SEQ ID NO: 3895 - DNA, 940 bp, Triticum aestivum
  misc_feature: Ceres CLONE ID no. 793818
  misc_feature: Ceres CDNA ID no. 40351389
  CDS (75)..(812): REFERENCED BY SEQ ID NO: 3896
attactactagtgacttcttcattccatttcctctttctctttccattgttctactttttcagtcccaccaccaatggcactccatgatctacccttcacacccatgaccaccatttccctcttcatcattctattttctctattttccaccccttcccattctgccctcacttgtgcttcccagaagctcaaccgcacctacgccaactgcaccaacctccccaccctcggcgccaccctccacttcaccttcaacgccaccaaccgcaccctctccgtcgccttctccgcctctcctccctccccctccggctgggtcgcctggggcctcaaccttgccggcggcggaatggccggcgccgaagccctcctcgccctcccctccacctccggctccgccgtcaccctccgccgctacaacctcacctcctacaagagcatcgacgtagtcaaggccttcaccttcgaatcgtgggacctctccgccgaagagaccaacggcgccataacgatctacggcaccgtcaagatccccgattcggcggagaacgtcagccacgtgtggcaggtgggtcccgttgcggcgggggtgcccgcggtgcacggcttcaaggacgacaacattcacgccaaggccgctctccccgtcgcgcttgcggggagcagcggatcgtcagcagcgagtggcgaaaacgcgaccacacccgcgagtggggacaagaagaacggtgctgctgctgcggagaggcttgggttgggttttcacttttggttggttttcgcattgatggttggtgttgttgctctttgatgtgattttatttcaccttttacccttcgagaagggtcattcaataattttcactgtactgggacatttgcattttttaaaatatttattgtattgtaaaaaaaaaaaaaagaaaaaaaaaaaaaaaa

SEQ ID NO: 3896 - protein, 245 aa, Triticum aestivum
  misc_feature: Ceres CLONE ID no. 793818
  misc_feature: Ceres CDNA ID no. 40351389
MALHDLPFTPMTTISLFIILFSLFSTPSHSALTCASQKLNRTYANCTNLPTLGATLHFTFNATNRTLSVAFSASPPSPSGWVAWGLNLAGGGMAGAEALLALPSTSGSAVTLRRYNLTSYKSIDVVKAFTFESWDLSAEETNGAITIYGTVKIPDSAENVSHVWQVGPVAAGVPAVHGFKDDNIHAKAALPVALAGSSGSSAASGENATTPASGDKKNGAAAAERLGLGFHFWLVFALMVGVVAL

SEQ ID NO: 3897 - DNA, 2035 bp, Triticum aestivum
  misc_feature: Ceres CLONE ID no. 794195
  misc_feature: Ceres CDNA ID no. 24766520
  CDS (72)..(1694): REFERENCED BY SEQ ID NO: 3898
accctcaccaccaccaccgcccatccatcggtcggctcgccgccaccagtcgagcccgcccgaccccggccatggcgcgggaggagctgtcgacggagatcgtgaaccgcggcgtggagccgtcgggcccggacgccgggtcgccgaccttctcggtgcgcgtgcgccgccggctgcccgacttcttgcagtcggtgaacctcaagtacgtgcggctcggctaccactacctgctgagccacggcgtgtacctggccaccatcccggtgatcgtgctggtgtgcggcgccgaggtgggcagcctcagccgcgacgagctgtggcgcaaggtgtgggacgaggccacctacgacctcgccaccgtgctcgccttcctcgccgtcctcgccttcaccatctccgtctacatcatgtcccgccccaggcccatctacctcatcgacttcgccacctacaagcccgccgacgaactcaaggtgtccaaggcggagttcatcgagctggcgcgcaagtcgggcaagttcgacgaggagagcctggcgttccaggcgcggctgctggccaagtccggcatcggggacgagtcctacatgccgcgctgcgtcttccagcccgacgccaactgcgccaccatgaaggagggccgcgccgaggcctccgccgccatgttcgccgcgctcgacgagctcttcgacaagtgccgcgtccgccccaaggacgtcggcgtgctcgtcgtcaactgcagcctcttcaaccccaccccctccctctccgccatgatcgtcaaccactacaagatgcgcggcaacatcctcagctacaatctggggggcatgggctgcagcgcgggcgtcatctccatcgacctggcgcgtgacatgctccaggccagcggcgctgggctcgccgtcgtggtgagcaccgaggccgtgtcattcacgtggtacgccgggaagcgccggtccatgctcatccccaacgccttcttccgcgcgggcgccgccgccgtgctgctgtcgaaccgccgcagggacttccgccgcgccaagtaccagctggagcacgtggtgcgcacgcacaagggcgccgacgaccgcgccttccgctccgtgtaccaggaggaggacgagcagcggatcaagggcctgtccatcagccgcgacctggtggaggtcggcggccacgcgctcaagaccaacatcaccaccctcggcccgctggtgctgcccttctcggagcagctcctcttcttcgccggcgtgctgttccgccacctctacccgtccaagacgtccaccccgccgccgccggccgccaacggggacacctcggccgccgcgccctacatcccggacttcaagcgcgcgttcgagcacttctgcatgcacgcggccagccgcgacgtgctggagcacctgcagcgcaacctgggcctccgcgacgccgacctggaggcctcccgcgccgcgctgcaccgcttcggcaacacctccagcagcagcatctggtacgagctggcctacctggaggccaagggccgcgtccgccgcggcgaccgcgtgtggcagctcgccttcggctccgggttcaagtgcaacagcgccgtgtggcgcgccgtccgccgcgtgcgccgcccgtccaggagcccgtggctggactgcgtcgaccagtacccggcgcgcatggacgcctgacccgatcgagatggcgaagcaggcgcacgtgctaataattaagcgaggtaaaggaacacgtccgtcgtcgtcgcgcccgcgttgggtaagtgcaggctaatggagatggtgctatcgatttgcatgtaactgcatgcatgcagtgccgctggtttaaggtttgagctttgcttaatttgtgctggtgttgtagcggttatctattgttaaggggtttaatcatagactacgtaccataatgcgcaagtgtgtgtgcgcgctcttgtgaaacttatgtgaacttgattatctacgtgcaatttcattaaaaaaaaaaaaaaaaaagaaaaaaaaaaaaaaaa

SEQ ID NO: 3898 - protein, 540 aa, Triticum aestivum
  misc_feature: Ceres CLONE ID no. 794195
  misc_feature: Ceres CDNA ID no. 24766520
  misc_feature (438)..(517): Pfam Name: Chal_sti_synt_C PFAM Desc: Chalcone and stilbene synthases
  misc_feature: Homolog of GI Number: 23506207 NR Desc: At2g26250/T1D16.11
  misc_feature: Homolog of GI Number: 32172502 NR Desc: FAE1
  misc_feature: Homolog of GI Number: 50920373 NR Desc: Putative fiddlehead
  misc_feature: Homolog of GI Number: 8177711 NR Desc: fiddlehead protein
  misc_feature: Homolog of GI Number: 8177719 NR Desc: fiddlehead protein
  misc_feature: Homolog of GI Number: 8177723 NR Desc: fiddlehead protein
  misc_feature: Homolog of GI Number: 8177727 NR Desc: fiddlehead protein
  misc_feature: Homolog of GI Number: 18447765 NR Desc: fiddlehead
  misc_feature: Homolog of GI Number: 30144607 NR Desc: fiddlehead
  misc_feature: Homolog of GI Number: 19351907 NR Desc: putative beta
  misc_feature: Useful for delaying flowering time
  misc_feature: Useful for making ornamental plants with modified leaves
  misc_feature: Useful for making plants with increased biomass and foliage
  misc_feature: Useful for making shorter plants
MAREELSTEIVNRGVEPSGPDAGSPTFSVRVRRRLPDFLQSVNLKYVRLGYHYLLSHGVYLATIPVIVLVCGAEVGSLSRDELWRKVWDEATYDLATVLAFLAVLAFTISVYIMSRPRPIYLIDFATYKPADELKVSKAEFIELARKSGKFDEESLAFQARLLAKSGIGDESYMPRCVFQPDANCATMKEGRAEASAAMFAALDELFDKCRVRPKDVGVLVVNCSLFNPTPSLSAMIVNHYKMRGNILSYNLGGMGCSAGVISIDLARDMLQASGAGLAVVVSTEAVSFTWYAGKRRSMLIPNAFFRAGAAAVLLSNRRRDFRRAKYQLEHVVRTHKGADDRAFRSVYQEEDEQRIKGLSISRDLVEVGGHALKTNITTLGPLVLPFSEQLLFFAGVLFRHLYPSKTSTPPPPAANGDTSAAAPYIPDFKRAFEHFCMHAASRDVLEHLQRNLGLRDADLEASRAALHRFGNTSSSSIWYELAYLEAKGRVRRGDRVWQLAFGSGFKCNSAVWRAVRRVRRPSRSPWLDCVDQYPARMDA

SEQ ID NO: 3899 - DNA, 1778 bp, Triticum aestivum
  misc_feature: Ceres CLONE ID no. 794681
  misc_feature: Ceres CDNA ID no. 24766521
  CDS (86)..(1450): REFERENCED BY SEQ ID NO: 3900
ataaaatccattcccctataacaaaccgacccaatcgcattcgccagcccccgaatcgcgatcccctccgcacctcggccccgccatggaggtgttctactacctcgtcttcggcggcctcgccgccgtcgtggcggcgctggagctcggcaagtccggcaaggaccgcgtcgccaccccgacggccttcaactccttcaagaacaactacgtcctcgtctactccctcatgatgtctggggactggctgcaggggccctacgtgtactacctctacagccagtacgggttcgacaagggcgacatcggccgcctcttcatcgccggcttcggctcctccatgctcttcggcaccatcgtcgggtcgctcgccgacaagcagggaaggaagagggcgtgcatcacctactgtatcacctacatcctcagctgcatcacgaagcactccccgcagtacaggattctgatgattggccgtgtgcttggaggcattgcaacatcgctgctcttctcggcgttcgagtcgtggctcgtcgcggagcacaacaagagaggttttgatccgcagtggctgtcaataacattctccaaggctatatttcttgggaatggcctagttgccattgtcgcagggctatttgcaaatctactggctgataacttgggttttggccctgtcgctccatttgatgctactgcttgcttcctagcaataggcatggcaatcatcttatcgtcgtggggtgagaactatggagatgcatctgaaggaaaggacttgatggcccagttcaaggttgcagctaaagccattgcttccgatgaaaagattgcattgcttggagccatacagtcattgtttgagggttcaatgtacacttttgttttcttgtggactcctgctttgagcccaaatgaagaagacattcctcatggcttcatatttgccacattcatgctctcctcgatgttgggtagctcaattgcatctcgtctattagctcggaagatgaaggtcgaaggttatatgcagattgtgttctcaatatcagctttcactcttttcctccctgttgttaccaatttcatagtacccccctcagagaaaggtggaagcatctccttcggaggctgtgtacagcttcttggtttctgcatattcgagtcatgtgttggcatattctggccctcaatcatgaagatgagatctcaatatatccccgaggaggcgagaagcactatcatgaacttcttccgcataccacttaacctgtttgtatgtgtggtgctttacaatgtgaatgccttcccaatcgctgtcatgtttggcatgtgctccattttcctattcatcgcagcaattttgcagaggcggctgatgtccgtgtccgaccttcacagatcaactaccgcagagatgacagcagaagatgagccactaaacccttgaaacacaccagcagccattgacgtgaaccgggcatggaacggtctccaacttcatctgcttctctgcagggctgctgaataagatgggaaaccgaaggctgcaacaaaacctcgtttagtttgctttgttaggtgctctcacggtattcagttttgtcgggagagaggacacggctcggcatgtattgagatatatgcactgcacagtagagctttggcatagtaccggatctgtactttccctcctattcttacgtttgctaataggatgatggtatttgtatttaaatccaaccagtctcttgatgaaagcaaaaaacaaaaaaaaa

SEQ ID NO: 3900 - protein, 454 aa, Triticum aestivum
  misc_feature: Ceres CLONE ID no. 794681
  misc_feature: Ceres CDNA ID no. 24766521
  misc_feature: Homolog of GI Number: 6633826 NR Desc: F1N19.22
  misc_feature: Homolog of GI Number: 34902182 NR Desc: Putative transporter
  misc_feature: Homolog of GI Number: 21536852 NR Desc: putative transporter
  misc_feature: Homolog of GI Number: 37536124 NR Desc: putative transporter
  misc_feature: Homolog of GI Number: 78708918 NR Desc: transporter
  misc_feature: Homolog of GI Number: 50540496 NR Desc: zgc:91807
  misc_feature: Homolog of GI Number: 111978 NR Desc: mucin
  misc_feature: Homolog of GI Number: 50933659 NR Desc: putative high
  misc_feature: Homolog of GI Number: 11359723 NR Desc: proteophosphoglycan
  misc_feature: Homolog of GI Number: 67987177 NR Desc: 4Fe
MEVFYYLVFGGLAAVVAALELGKSGKDRVATPTAFNSFKNNYVLVYSLMMSGDWLQGPYVYYLYSQYGFDKGDIGRLFIAGFGSSMLFGTIVGSLADKQGRKRACITYCITYILSCITKHSPQYRILMIGRVLGGIATSLLFSAFESWLVAEHNKRGFDPQWLSITFSKAIFLGNGLVAIVAGLFANLLADNLGFGPVAPFDATACFLAIGMAIILSSWGENYGDASEGKDLMAQFKVAAKAIASDEKIALLGAIQSLFEGSMYTFVFLWTPALSPNEEDIPHGFIFATFMLSSMLGSSIASRLLARKMKVEGYMQIVFSISAFTLFLPVVTNFIVPPSEKGGSISFGGCVQLLGFCIFESCVGIFWPSIMKMRSQYIPEEARSTIMNFFRIPLNLFVCVVLYNVNAFPIAVMFGMCSIFLFIAAILQRRLMSVSDLHRSTTAEMTAEDEPLNP

SEQ ID NO: 3901 - DNA, 1723 bp, Triticum aestivum
  misc_feature: Ceres CLONE ID no. 794921
  misc_feature: Ceres CDNA ID no. 35389165
  CDS (323)..(1399): REFERENCED BY SEQ ID NO: 3902
aattactgtaagattaaacaacgccggagggagcggagaggggaaacaaaacaaaagccttgccttgctcctcctccgggcgggcgattcggctccggcgccgcaaggtgcttcgcttcgcttctcgccttgctccgatccttggcctgcccgcctcctccggccgtcgccgtcgtccccagggttcgctgctcggctccaagcaagctaggcgccattcctgggctccgccgctcgatttccccacctacgccggaccaggtcaattgctatatcagccacacttttaagcgttgaaggtcaccactagcccattggcttgatgggcgtcgaggagcaacatgtgcagcaaccagacagtgggggaaagcctgatgccgtcaagccaccaactccggtacacggtcataaaccgagcaacccccgtatatcaacctgcagcgccgacaaggacgacggcctctctctttgccgggtgtgccactgcgtggagcctgatctgagaggcgagtctgctctgggtttcctaggcattgtaccgccttcgccagacccctcggtcgacaaggacccaagcaatgacaccaccaaaacttccaccaccaaggatgctcccaagtttctcgagttcataagccccgagggggagatcttcaagtgcgccaccgacatcgaatcaggccatttgcagcggcaagacgatgtcgtgaacctcggatgctcttgcaagaatgagctcgccctcgcgcactacgcgtgcgcgctcaagtggttcatcagccacgggtccaccgtgtgcgagatttgcggaaatgtcgctacaaacgtgaggcccgaggatttcaacatggtgctcgcctccttgaaggactacgaagctctgagggaaaggacgtctaccggggatctctcctacttgcactacagggcggacgcgttcgtcgatccggtcgcccttgccgcagtacggagacagcggctttgtgagatatcatcatggttcaaccctcacaatacacatttcgtgttttctcagaggcacaatgaagaagtgccagttagcccaagtaataattctgtagactatagtgttacggctgcaagggcagcacatgcgaggcggaagtttgggagtagtggagcttttgttgctatcgctctgggttttgttcttcttgcatggtttgttgctccacatgttggcaagagagcggctgcaatcattcttcatatgcttctgggaggcctctgctcactgactataataatctcactaagatttgtcttcccgaggatccagtttgggtcgatacgatgctgggcgatcctgttcgtgtcctggttcctcgtgtttggagtgtgggcctctcgaacccgcaccgcccgccgcgcgtcatgatgatatcgagtgtgccctcagtcagtcgtcgtgaggaattaggaccgcgtcgcaagagtagcgtccacgagagcgttaggtaccgcacccctgtctatattcgccgcgagctataccatggacgtactattttttctttagctggagtatgtgagatgtacaacatgtttgggcaagaaaacaaggggagttatgttactgagtgttgtggtttcagacatagctggagtggtactggtctggccagtgttgcaaaacaatacagtaatgtgtgtatatatttagctttttcttgattgaaaacctccaaaaaaaaaaaaaaaa

SEQ ID NO: 3902 - protein, 358 aa, Triticum aestivum
  misc_feature: Ceres CLONE ID no. 794921
  misc_feature: Ceres CDNA ID no. 35389165
  misc_feature (131)..(162): Pfam Name: zf PFAM Desc: Zinc finger
  misc_feature: Homolog of GI Number: 50929907 NR Desc: OSJNBb0020J19.13
  misc_feature: Homolog of GI Number: 16209722 NR Desc: AT5g63780/MBK5_26
  misc_feature: Homolog of GI Number: 50905467 NR Desc: zinc finger
MGVEEQHVQQPDSGGKPDAVKPPTPVHGHKPSNPRISTCSADKDDGLSLCRVCHCVEPDLRGESALGFLGIVPPSPDPSVDKDPSNDTTKTSTTKDAPKFLEFISPEGEIFKCATDIESGHLQRQDDVVNLGCSCKNELALAHYACALKWFISHGSTVCEICGNVATNVRPEDFNMVLASLKDYEALRERTSTGDLSYLHYRADAFVDPVALAAVRRQRLCEISSWFNPHNTHFVFSQRHNEEVPVSPSNNSVDYSVTAARAAHARRKFGSSGAFVAIALGFVLLAWFVAPHVGKRAAAIILHMLLGGLCSLTIIISLRFVFPRIQFGSIRCWAILFVSWFLVFGVWASRTRTARRAS

SEQ ID NO: 3903 - DNA, 734 bp, Triticum aestivum
  misc_feature: Ceres CLONE ID no. 795931
  misc_feature: Ceres CDNA ID no. 40351390
  CDS (51)..(545): REFERENCED BY SEQ ID NO: 3904
aattaggtttttagggtttacaccgagcagccacacctcccgcagcagccatggttctcaaaactgaactatgccgattcagtggtgccaagatctacccaggaaagggcatcagatttgttcgtggtgattctcaggttttcctgtttgcaaactcaaaatgtaagaggtatttccacaatcgcctgaagccttcaaagctcacctggactgcaatgtacagaaagcaacacaaaaaggacattgctcaagaagctgtgaggaagaggagacgtgctgccaaaaagccttactctaggtccattgttggtgcgaccttggaagtaatccagaaaaagagagctgagaagccagaagttcgagatgcagctagggaagctgctcttcgtgaaattaaggagaggatcaagaaaacaaaggatgagaagaaggctaagaaagcagaagttgcttccaagtcgcaaaaagcaggagggaaaggcaatgtttctaagggtgctatgcccaaaggtcccaaacttggcggtggaggcgggaaacgctgagcttttagttttgttcctaattttggctacaatttaaatagttgttttgacactgctgtactgatatttcatttggaagattaatcttttattttactgttttactaaacctgtgtttggatattcagaaggtacttggttattgaatggatttcgcaatctgtgctagttttaaaaaaaaaaaaaaaa

SEQ ID NO: 3904 - protein, 164 aa, Triticum aestivum
  misc_feature: Ceres CLONE ID no. 795931
  misc_feature: Ceres CDNA ID no. 40351390
  misc_feature (3)..(73): Pfam Name: Ribosomal_L24e PFAM Desc: Ribosomal protein L24e
MVLKTELCRFSGAKIYPGKGIRFVRGDSQVFLFANSKCKRYFHNRLKPSKLTWTAMYRKQHKKDIAQEAVRKRRRAAKKPYSRSIVGATLEVIQKKRAEKPEVRDAAREAALREIKERIKKTKDEKKAKKAEVASKSQKAGGKGNVSKGAMPKGPKLGGGGGKR

SEQ ID NO: 3905 - DNA, 824 bp, Triticum aestivum
  misc_feature: Ceres CLONE ID no. 799084
  misc_feature: Ceres CDNA ID no. 40351391
  CDS (71)..(478): REFERENCED BY SEQ ID NO: 3906
gatctgcccggtgcggcttgctcgatgtgcggcggctcagatcggcggcgacccgtgcgcacaatacgtgatggaggttcttcgagcggatccgggtgaaaaccttgtgctcggcttgttgccaagaccggcgttggtggcaccctgtggtgtcattaccttcttgaaggcatcgccgtggagaagctctagacctctatccgctacctccgggggaaaccctagatcagttgatcggatgatggcgacgcgttggtgtcgtttcctccttgggggcgtcattcttggaggcgtacacgggatcgagggaccagcgggtgccttattggtggagcggtacttcatccttcacattgatgacggcgaatctcggcggcgtggtgcagtggagacccggcgcccgatgcgcggggatggactcgcgcaggtggaggtagttgtttggcgtcaaggtggcgtcgatgacggagtggcctgacaaggtagaagcctcaatatctgctctgaagacggacctgtgaaagttggcggcgacgacacatgtgagtgcgtcagaccagtttatgccccagacccggtatgtggctaggctggagcttctggcttttgatgataggtttaggtgagtagaccgggtatgtggcccaggtagcaccccttcatcatatggataggagtagtggcatatgttgccaagatggcggattcaggcatattgttgtaatactttgtaaggtcctcgagaataatcaataaagtggccgtatgcatctcccagatgcagaggccgggggtcatcctcctttttaaaaaaaaaaaaaaaa

SEQ ID NO: 3906 - protein, 135 aa, Triticum aestivum
  misc_feature: Ceres CLONE ID no. 799084
  misc_feature: Ceres CDNA ID no. 40351391
MEVLRADPGENLVLGLLPRPALVAPCGVITFLKASPWRSSRPLSATSGGNPRSVDRMMATRWCRFLLGGVILGGVHGIEGPAGALLVERYFILHIDDGESRRRGAVETRRPMRGDGLAQVEVVVWRQGGVDDGVA

SEQ ID NO: 3907 - DNA, 1803 bp, Triticum aestivum
  misc_feature: Ceres CLONE ID no. 799096
  misc_feature: Ceres CDNA ID no. 36582742
  CDS (155)..(1648): REFERENCED BY SEQ ID NO: 3908
caaatcttccccatcgcccccggccggttctcttctcctcccgtccccttcccccacacccgtccccccagatcgcgccgcgcgccgctcctgaccgccgccggaaccccaccccgccgccgacgaggtccgaccccccgggggcccagccaagatggtgctcgcgcagctgggcgggagcatctcccgcgcgctcgcgcagatgagcaacgccacggtgatcgacgagaaggtgctcggggagtgcctcaacgagatctcccgcgcgctcctgcagtccgacgtccagttcaagatggtccgcgacatgcagaccaacatcaggaagatcgtcaacctcgagaccctcgccgccggcaccaacaagcgacgcatcatacagcaggccgtcttcaccgagctttgcaacatgctcgatcccgggaagccggccttcacccccaagaagggcaagcccagcgtcgtcatgttcgtcggattgcaggggtctggaaaaactactacctgtaccaaatacgcatattatcatcagcgtaagggattcaaaccgtcgctggtttgtgccgatacattccgagctggtgcttttgatcagttgaaacagaatgcaaccaaggcgaagatacctttttacggaagctacatggagtcagatcctgtgaaaattgctgttgagggtctggaaaggttcaggaaagaaaattctgatctcatcattattgacacaagtggacgccataagcaagaggctgcactcttcgaagaaatgcgtcaagttgcagaagcaacgaaaccagacctggtgatatttgtgatggatggcagtattggtcaggctgcgtttgatcaggcacaagcatttaaacaaagtgcttctgttggtgctgtcatcgttacgaaattggatggtcatgcaaaaggaggcggtgcacttagcgcggttgcagctacaaaaagtccagtgatatttattggaactggagaacacattgatgaatttgagatttttgatgtgaaaccatttgtcagccgtctgttaggtatgggagacttgtctggcttaatggacaagatccaggatgttatgcctgctgatcaacagcctgagcttctggcaaagctggctgacggaaccttcactctcagacttttgtatgagcaattccagaatcttctgaaaatgggtcctattggccaggtcttctccatgttgcctggatttagttcagagttgatgccaaaaggacatgagaaagaaggccaagcgaagattaagcgctacatgacgattatggattccatgacagcagcagagctcgacagtacaaacccgaagctgatgacagagtcgcgaatcatccggatcgctcgagggtctggcaggcaaatcagagacgtgatggacatgctggaagagtacaagaggctagccaagatgtggagcaagatgaaggggctaaagatgccgaagaacggaaagatgagtgacctgtcccagaaccttaacatccagcagatgaccaaggcgctcccgccgcaagtgctgaagcagatgggtggcatgggtggcctgcaggctcttatgaaacaaatgggcggcaaggacatgagcaaaatgctcggtggcatggggctgggcggtgattagcctggcaaatgtaggtagagtttcctctgggcataggtggtgtgcttgctgcgttgtggagtttgttatatttatatagatctcaaaagatttccatcctgacaaatatagtccccaactcctgacaaatttatttgaaattccaaaaaaaaaaa

SEQ ID NO: 3908 - protein, 497 aa, Triticum aestivum
  misc_feature: Ceres CLONE ID no. 799096
  misc_feature: Ceres CDNA ID no. 36582742
  misc_feature (100)..(296): Pfam Name: SRP54 PFAM Desc: SRP54
  misc_feature (2)..(88): Pfam Name: SRP54_N PFAM Desc: SRP54
  misc_feature (327)..(429): Pfam Name: SRP_SPB PFAM Desc: Signal peptide binding domain
  misc_feature: Homolog of GI Number: 556900 NR Desc: 54
  misc_feature: Homolog of GI Number: 556902 NR Desc: 54
  misc_feature: Homolog of GI Number: 20151307 NR Desc: AT23778p
  misc_feature: Homolog of GI Number: 17386102 NR Desc: At1g48900/F27K7_8
  misc_feature: Homolog of GI Number: 50932299 NR Desc: putative signal recognition particle  54 KD protein
  misc_feature: Homolog of GI Number: 34909956 NR Desc: putative signal recognition particle 54K protein
  misc_feature: Homolog of GI Number: 515681 NR Desc: signal recognition particle 54 kDa subunit
  misc_feature: Homolog of GI Number: 1020000 NR Desc: signal recognition particle 54 kDa subunit
  misc_feature: Homolog of GI Number: 1020002 NR Desc: signal recognition particle 54 kDa subunit
  misc_feature: Homolog of GI Number: 1020004 NR Desc: signal recognition particle 54 kDa subunit
MVLAQLGGSISRALAQMSNATVIDEKVLGECLNEISRALLQSDVQFKMVRDMQTNIRKIVNLETLAAGTNKRRIIQQAVFTELCNMLDPGKPAFTPKKGKPSVVMFVGLQGSGKTTTCTKYAYYHQRKGFKPSLVCADTFRAGAFDQLKQNATKAKIPFYGSYMESDPVKIAVEGLERFRKENSDLIIIDTSGRHKQEAALFEEMRQVAEATKPDLVIFVMDGSIGQAAFDQAQAFKQSASVGAVIVTKLDGHAKGGGALSAVAATKSPVIFIGTGEHIDEFEIFDVKPFVSRLLGMGDLSGLMDKIQDVMPADQQPELLAKLADGTFTLRLLYEQFQNLLKMGPIGQVFSMLPGFSSELMPKGHEKEGQAKIKRYMTIMDSMTAAELDSTNPKLMTESRIIRIARGSGRQIRDVMDMLEEYKRLAKMWSKMKGLKMPKNGKMSDLSQNLNIQQMTKALPPQVLKQMGGMGGLQALMKQMGGKDMSKMLGGMGLGGD

SEQ ID NO: 3909 - DNA, 1038 bp, Triticum aestivum
  misc_feature: Ceres CLONE ID no. 801831
  misc_feature: Ceres CDNA ID no. 25445790
  CDS (123)..(884): REFERENCED BY SEQ ID NO: 3910
gtaaagggtgataaggctgtttggacggtcacacgcagttgtattgtagaactgaacaagggtttctctttctctttctctgtctgcttcttcactttctctcgtttcaatcgaaaaaaatcatgggcagaaaattcttcgtcggtggcaactggaaatgcaatgggaccactgaggaggtgaagaagattgttactactttaaatgaagctaaagtccctggagaagatgttgtagaagttgttgtgagccctccttttgtgttccttccttttgtaaaaagtttgctgcgccctgatttccatgtctcggcccaaaattgttgggttcgcaaaggtggtgcttatactggagaggttagtgctgaaatgcttgttaatttgggaattccttgggttattattggtcactctgaacggaggcagcttttgaatgaatcaaatgagtttgtgggagataaagttgcctatgcacttcaacaaggtctgaaagttatagcatgcattggggaaactcttgaacagcgtgaagctggtacaacaacggctgttgttgctgagcaaacaaaagcaattgcagctaaaatatcaaattgggacaatgtcgttttggcctatgagccagtttgggccattggaacaggaaaggttgcaactcctgctcaggctcaagaggttcatgctgatttaaggaaatgggttcatgacaatgtgagtgctgaagttgctgcatctgtaagaattatctatggaggctctgtaaatggaggaaactgcaaagaattggcagcacagcccgatgttgatggatttttggttggtggtgcatccctcaaggcggaatttgtggacatcataaacgctgctactgtgaagaagaattgaaattcgtagttaggaactgataatgctgcctttcaagctgcttcggaaattgctgtttttgagttttggttctgtgctttgtggccaatgtattgaactctgtttagtacctgaataaacatgctttcctttgatctcaaaaaaaaaaaaaaaa

SEQ ID NO: 3910 - protein, 253 aa, Triticum aestivum
  misc_feature: Ceres CLONE ID no. 801831
  misc_feature: Ceres CDNA ID no. 25445790
  misc_feature (5)..(245): Pfam Name: TIM PFAM Desc: Triosephosphate isomerase
  misc_feature: Homolog of GI Number: 48773765 NR Desc: triosephosphate isomerase
  misc_feature: Homolog of GI Number: 77540216 NR Desc: triosephosphate isomerase
  misc_feature: Homolog of GI Number: 57283985 NR Desc: triose
  misc_feature: Homolog of GI Number: 556171 NR Desc: triosephosphate isomerase
  misc_feature: Homolog of GI Number: 76573375 NR Desc: triosphosphate isomerase
  misc_feature: Homolog of GI Number: 602590 NR Desc: triosephosphate isomerase
  misc_feature: Homolog of GI Number: 77745458 NR Desc: triose phosphate isomerase cytosolic isoform
  misc_feature: Homolog of GI Number: 38112662 NR Desc: triose phosphate isomerase cytosolic isoform
  misc_feature: Homolog of GI Number: 168647 NR Desc: triosephosphate isomerase 1
  misc_feature: Homolog of GI Number: 14030671 NR Desc: AT3g55440/T22E16_100
  misc_feature: Useful for making lethal plants for genetic confinement systems
  misc_feature: Useful for making plants with increased biomass and foliage
  misc_feature: Useful for sterility
MGRKFFVGGNWKCNGTTEEVKKIVTTLNEAKVPGEDVVEVVVSPPFVFLPFVKSLLRPDFHVSAQNCWVRKGGAYTGEVSAEMLVNLGIPWVIIGHSERRQLLNESNEFVGDKVAYALQQGLKVIACIGETLEQREAGTTTAVVAEQTKAIAAKISNWDNVVLAYEPVWAIGTGKVATPAQAQEVHADLRKWVHDNVSAEVAASVRIIYGGSVNGGNCKELAAQPDVDGFLVGGASLKAEFVDIINAATVKKN

SEQ ID NO: 3911 - DNA, 1793 bp, Triticum aestivum
  misc_feature: Ceres CLONE ID no. 802195
  misc_feature: Ceres CDNA ID no. 40041328
  CDS (108)..(1616): REFERENCED BY SEQ ID NO: 3912
aaataaattaataaaaataaaactcgtcgtcgtcgccgcctccctcgccgtcgacgagtcactgcggcggcatcggtggcggccggacacctcgtccccggcccaccatgccggagcccaccaagcccctctccccccgcgcaagccgcggccgctgccgcctctgcggcctctgcctcggctccgccctcctcgccatcgtcgtctccaccctcgtccacctcctctccccgccgcctcagccggccccctccccgagcttctccatcatcatagacggcggcagcaccggtacccgggcccacgtgttctccttagggcccgacggccggccggatctggcgcgctccgccgtgatgcgcgtctccccggggctctcctctttcgccgcggacacggcgtgcgcaggggagtcgctgcggccgctgttggaatttgccaaggagaaggtagggagcgagggggccgccgcagcaacagaggtgcggctgatggcaaccgctggcctgcggctgctcgaggagagcgttcgagaggcgatattggtgtcctgcaggaacgccctcagggcctccgggttccggttcgaggactcatgggcaaaggtgatcccaggttctgatgaaggcgtctatgcttgggttgcggcaaactatgctctgggcacacttggaggggatcctcacaaaacaattggaataattgaactcgggggtgcttcagctcagctgacgtttgtttccgacgaagtacttcctctggaactatcaactaattttacttttgggggaacaacatacactctctatagcaacagctttctaaactttggacaaaatgcagcacaagactcataccgtgaaatactgaagtcaagaggatctttcaaaaacggtacacttgttgatccttgtgcccctaaaggattttctcacaaacggaaagtattggcgagaacaagcggtgcatcaagatcaaatttagagaaccaatatgttgataatggaagcggaaactataaagaatgtagatcttcttcactgatgatgatgcaagaaggaaaggaaaggtgtgagtatcagcaatgtcacctaggatctaatttcgtccctgagctgcttgggcatttcctagcaactgaaaatttctattttacgtccaagttctttggactaggccggtcttcatcactgtctgattttgtggttgctggagagcaactttgcaacaaggacttgtccacactaagacaaaagtatctcaatcattcagatgaagatttctctcggtattgcttctcgtcggcatacattgtagctctactgcacgacagccttggtgtaccattggatgacaagaggatcgagtattcaaatcaggtcggcgacactcatattgagtgggccctaggagctttcattgcaaatacaaaacataggattctaggggcatcaggggctgtggcaacacggtcacctaagcacagaccactgctcgccgtgctgggagcgtttcttgcttgtggaatatatttggtgttgagatggaggaagcccaagacaaagattatatatgatttagagaaaggccgatacattatgacacgcatcagctgacgctgagcgttgtgcaggtggtggagcatgaaaggtagcacacttgtatgtggcatgtattgaaatgctgtagaacattttgttacatactaatcgttttactggcatatactgtacaattttgtactaaatcagcgacacttgttttgggaaggaggagcaaaaaaaaaaaaaaaa

SEQ ID NO: 3912 - protein, 502 aa, Triticum aestivum
  misc_feature: Ceres CLONE ID no. 802195
  misc_feature: Ceres CDNA ID no. 40041328
  misc_feature (51)..(455): Pfam Name: GDA1_CD39 PFAM Desc: GDA1/CD39
  misc_feature: Homolog of GI Number: 50920731 NR Desc: putative apyrase
  misc_feature: Homolog of GI Number: 14423550 NR Desc: putative nucleoside triphosphatase
  misc_feature: Homolog of GI Number: 20197095 NR Desc: putative nucleoside triphosphatase
  misc_feature: Homolog of GI Number: 50946097 NR Desc: putative ectonucleoside triphosphate diphosphohydrolase
  misc_feature: Homolog of GI Number: 49533770 NR Desc: putative apyrase
  misc_feature: Homolog of GI Number: 23297737 NR Desc: putative nucleoside triphosphatase
  misc_feature: Homolog of GI Number: 15028065 NR Desc: putative nucleoside triphosphatase
  misc_feature: Homolog of GI Number: 7262666 NR Desc: Strong similarity to ecto
  misc_feature: Homolog of GI Number: 79604945 NR Desc: hydrolase
  misc_feature: Homolog of GI Number: 79317964 NR Desc: hydrolase
MPEPTKPLSPRASRGRCRLCGLCLGSALLAIVVSTLVHLLSPPPQPAPSPSFSIIIDGGSTGTRAHVFSLGPDGRPDLARSAVMRVSPGLSSFAADTACAGESLRPLLEFAKEKVGSEGAAAATEVRLMATAGLRLLEESVREAILVSCRNALRASGFRFEDSWAKVIPGSDEGVYAWVAANYALGTLGGDPHKTIGIIELGGASAQLTFVSDEVLPLELSTNFTFGGTTYTLYSNSFLNFGQNAAQDSYREILKSRGSFKNGTLVDPCAPKGFSHKRKVLARTSGASRSNLENQYVDNGSGNYKECRSSSLMMMQEGKERCEYQQCHLGSNFVPELLGHFLATENFYFTSKFFGLGRSSSLSDFVVAGEQLCNKDLSTLRQKYLNHSDEDFSRYCFSSAYIVALLHDSLGVPLDDKRIEYSNQVGDTHIEWALGAFIANTKHRILGASGAVATRSPKHRPLLAVLGAFLACGIYLVLRWRKPKTKIIYDLEKGRYIMTRIS

SEQ ID NO: 3913 - DNA, 1621 bp, Triticum aestivum
  misc_feature: Ceres CLONE ID no. 802390
  misc_feature: Ceres CDNA ID no. 40351393
  CDS (89)..(1411): REFERENCED BY SEQ ID NO: 3914
atctctcttttatctctctcttccaaaaagcaccgatttttgcgcacgccaacgcgaatcgcgaagagggtctcaccgagaacaaaaaatgggtgtttgtgggtcgaggcccaaagtgaacgaagaagacctctcatcaaagaagaagaacaacaacaacaacaatcatcgaagaagaagaaggagaatcctcagaagacgcgtatcttctagaaagatcgaagccaacaacgtttctcactctaattcagctcttcaagcttctaatcgcgcttctgatgctgcttggtttgattctacttcggcgttggattctgagtgtgatgacgaattttacagtgtctatgatggagaagtgtctacaggtcatgcagatgaaattggagaggacagaaagctgtcccttgaccattgtgggattctgccaaataactgtttgccttgcctcacttccaatgcaattgctgttgaaaaaagaaggccaatgagtcctgatacaccaagttcacggagaaagtcactttctaaactctccttcaaatggagagaagggtcttcagatatgactttactttcccccaaggcatttaaacaaaaacatttggcaggttcatctgttccattctgtcctctagagaagcaaacccctggttcttggtcacaaattgagccaagttccttcagagtcagaggcaaaaactaccttagggataagaagaaagagtttgcttcaagcagtgctgctttttatcctcttggtgctgacctctttttgtcttctcgaaaaattgatcatattgctcgttttatacaaattccttcaataaacatacctggggacgccccttctattcttattgtaaatattcagataccattgtatcctgccgctatcttccaaagtgaaaatgatggtgaaggaatgaatgtggttttgtactttaaactatctgaaaaatactctaaagaccttccagaccaattccgggaaagcattagtaaattgatcaatgatgaagtggagagagtaaaaggcttccctctagacacaattgcaccctttagggagagattaaaaattttaggcagagtggcaaatttggagaatctgtctttaagcacaactgaaaagaagcttatgaatgcttacaacgaaaaaccagttctctcacgtcctcagcacgaatttttcttgggagaaaactatctcgagatagatttggatgtacacagatttagctatattgcaagaaagggatttgaaggcttcattgaaagactgaagctatgtaacctagatttcggtctgacaattcagggaaacaaggccgaagacttgccagagcatttattatgtgcaatacggttgaataaacttgactacagcaacttcaaccagtttggcttttaagtctaagctttaacataaagcgttttaaccgtattatatctcataatgattacaagtgttgaaatgagattcggtagctaaccgcaatgtatctttgaatttcttgattcattgatataaaatttgttcaatgtacagtaatgagaataatcaaattagaaattatcaatgtgcaatttatctttctcaaatacaaaaaaaaaaaaaaaa

SEQ ID NO: 3914 - protein, 440 aa, Triticum aestivum
  misc_feature: Ceres CLONE ID no. 802390
  misc_feature: Ceres CDNA ID no. 40351393
MGVCGSRPKVNEEDLSSKKKNNNNNNHRRRRRRILRRRVSSRKIEANNVSHSNSALQASNRASDAAWFDSTSALDSECDDEFYSVYDGEVSTGHADEIGEDRKLSLDHCGILPNNCLPCLTSNAIAVEKRRPMSPDTPSSRRKSLSKLSFKWREGSSDMTLLSPKAFKQKHLAGSSVPFCPLEKQTPGSWSQIEPSSFRVRGKNYLRDKKKEFASSSAAFYPLGADLFLSSRKIDHIARFIQIPSINIPGDAPSILIVNIQIPLYPAAIFQSENDGEGMNVVLYFKLSEKYSKDLPDQFRESISKLINDEVERVKGFPLDTIAPFRERLKILGRVANLENLSLSTTEKKLMNAYNEKPVLSRPQHEFFLGENYLEIDLDVHRFSYIARKGFEGFIERLKLCNLDFGLTIQGNKAEDLPEHLLCAIRLNKLDYSNFNQFGF

SEQ ID NO: 3915 - DNA, 701 bp, Glycine max
  misc_feature: Ceres CLONE ID no. 806756
  misc_feature: Ceres CDNA ID no. 40351395
  CDS (22)..(579): REFERENCED BY SEQ ID NO: 3916
aaaaatccatcgcagcataaaatgtcaaatacaagtttgcttgatttccaatacagcctctcaaggaaaaaatacttgaggaagccatcacgtctgttctcatgggaccggcagaactcggggccgaagaatgtatttcctcagcctaaggctgatgagatgaagcaggtgtttgacaagtttgattccaataaagatgggaaaatttctcaacaggagtacaaagccaccatgaaggctctaggcatgggggactcggttcatgaagtgccgaatattttcagggtggttgatttgaatggagatggattcatcaacttcaaggaatttatggaagctcagagcaagggtggcggggttaggatgatggatatacagagtgcatttcggacatttgataagaatggcgacggtagaataagtgctgaagaagttaaagaaatgctgggaaagctgggagaaaggtgcagcattgaggacagtcggcgaatggtgagagctgtagacactgatggagacggcatggttgacatggacgagttcacaaccatgatgacacagtccctgaggcatgtttgaatgtttatggctatcatgtttattgaggttgtatttagggtcatctcaatgaaagctatctctgttgtatttagatttgtgcatgtgtttaataaactggattttaaaaccaaaaaaaaaaa

SEQ ID NO: 3916 - protein, 185 aa, Glycine max
  misc_feature: Ceres CLONE ID no. 806756
  misc_feature: Ceres CDNA ID no. 40351395
  misc_feature (153)..(181): Pfam Name: efhand PFAM Desc: EF hand
MSNTSLLDFQYSLSRKKYLRKPSRLFSWDRQNSGPKNVFPQPKADEMKQVFDKFDSNKDGKISQQEYKATMKALGMGDSVHEVPNIFRVVDLNGDGFINFKEFMEAQSKGGGVRMMDIQSAFRTFDKNGDGRISAEEVKEMLGKLGERCSIEDSRRMVRAVDTDGDGMVDMDEFTTMMTQSLRHV

SEQ ID NO: 3917 - DNA, 805 bp, Glycine max
  misc_feature: Ceres CLONE ID no. 806762
  misc_feature: Ceres CDNA ID no. 40351396
  CDS (61)..(456): REFERENCED BY SEQ ID NO: 3918
atacaccaaaccaaagtaagtgttctaagagtgagcaacttcaaaacaccatagtgagaaatgacttccaagggtgcaattctcttgtgtctcaatgttctcttcttcactgtggttagttccacatatgttccatgcaacccaccccccaaaactcccaaacacccacctgtcccaaagccaccttccccaaagcaagtttcttgccccaaggacactgttaagtttggtgtgtgtgctgatgtgttaggtttgattaacgtgcaactagggaagccaccaaaaaccccatgctgcagcctcattcagggtcttgctgatcttgaagctgcagtgtgcctttgcactgctctcaaggctaatgtgttgggcatcaacctcaatgttccagtgaacttgagcttgcttctcaactactgtggaaagggtgttcccaagggattcgtctgctactaaatcaacacttctaatgtgtagtttcttaatgttaagtatgtcttaaggttctatattttgctatattcgtcattcatcaatctatgaactttgttgttttgtttttccgtctggcacgtgccatttatagccaacgaacatttcgttcgcaattggttattattattattattattattgtgatggttgaaacttgaaagtcttctcgtggtctttcttgtagcctccctcacactactccttttgtattctaagtgaaaatttatactaataaaaattctacatttaagctaaaaaaaaaaaaaaaaaaaaaaaaaaaaaaaaaaaaaaaagaaaaaaaaaaaaaaaa

SEQ ID NO: 3918 - protein, 131 aa, Glycine max; identical to SEQ ID NO: 3410
  misc_feature: Ceres CLONE ID no. 806762
  misc_feature: Ceres CDNA ID no. 40351396
  misc_feature (49)..(130): Pfam Name: Tryp_alpha_amyl PFAM Desc: Protease inhibitor/seed storage/LTP family

SEQ ID NO: 3919 - DNA, 531 bp, Glycine max
  misc_feature: Ceres CLONE ID no. 807083
  misc_feature: Ceres CDNA ID no. 40351394
  CDS (36)..(392): REFERENCED BY SEQ ID NO: 3920
aagtaatctcttcacagaagaaaaaagagaagaagatgggtttgaagaacaacatggtggtgctaaaggtgtgtttggtgctacttttccttgtggggggtactactagtgccagcttgaggctgagtgagcttggcctgctcatgaaaagtgatcatcatcaacactcaaatgatgatgagtcttcaaaaccatgctgtgatcaatgcgcatgcacaaagtcaaaccctcctcaatgccgctgttcagatatgaggctgaattcgtgccattcagcttgcaaatcttgtatttgcgcattatcgtatcctgcacagtgtttttgtgttgacataaccgatttctgctatgaaccttgcaagcccagtgaggatgacaaggaaaactactaatgaacaagtgttatgcatgtaagctctctctccaatggacaaagccccctttatgctttgtttgttatgtaaggaatgactaaataaacttggaataaaacttcctctcttttcgtggcccaaaaaaaaaaaaaaaaaa

SEQ ID NO: 3920 - protein, 118 aa, Glycine max
  misc_feature: Ceres CLONE ID no. 807083
  misc_feature: Ceres CDNA ID no. 40351394
  misc_feature (81)..(105): Pfam Name: Bowman PFAM Desc: Bowman
MGLKNNMVVLKVCLVLLFLVGGTTSASLRLSELGLLMKSDHHQHSNDDESSKPCCDQCACTKSNPPQCRCSDMRLNSCHSACKSCICALSYPAQCFCVDITDFCYEPCKPSEDDKENY

SEQ ID NO: 3921 - DNA, 690 bp, Glycine max
  misc_feature: Ceres CLONE ID no. 807405
  misc_feature: Ceres CDNA ID no. 25445761
  CDS (117)..(548): REFERENCED BY SEQ ID NO: 3922
atataagatcgattatactcacaagttttgttctttcctagcaattcggcgcaatcgtcttctgcttcaaggaaggagagcttgttattctctatcaacaaggaaaatgtcagggtatgattgtttttctctctgaagaggttgttgttgcagctgagccagctgctgccatcccaggcgagcctatggatatcatgactgccttgcaacttgtgctcagaaaatctctggcttatggtggtcttgcacgaggccttcacgaaggggcaaaagtgattgagaagcatgctgcacaactctgtgttctagcagaagactgtgaccagcctgactatgttaaactggttaaggccctttgtgcagagcacaatgttagcctgctgacagttccgagtgcaaagacccttggagaatgggctggcttgtgcaagattgattccgaaggaaaagctaggaaggttactggttgctcctgtgtggttgtgaaggattttggtgaggagcatgaagcctataacgtcgttctgcagcatgtgaaatctcaatgagttgcaagattcatagattttatgcatttcattttgggttattccatgagaatgaattttgccttgtagctggattatatctaccttgggttttgattgtttaatatgactgccacattccaaaaagaaaaaaaaaaaaaaa

SEQ ID NO: 3922 - protein, 143 aa, Glycine max
  misc_feature: Ceres CLONE ID no. 807405
  misc_feature: Ceres CDNA ID no. 25445761
  misc_feature (28)..(123): Pfam Name: Ribosomal_L7Ae PFAM Desc: Ribosomal protein L7Ae/L30e/S12e/Gadd45 family
  misc_feature: Homolog of GI Number: 50935291 NR Desc: putative 40S ribosomal protein S12
  misc_feature: Homolog of GI Number: 50934241 NR Desc: putative ribosomal protein S12
  misc_feature: Homolog of GI Number: 5106775 NR Desc: ribosomal protein S12
  misc_feature: Homolog of GI Number: 21537373 NR Desc: 40S ribosomal protein S12
  misc_feature: Homolog of GI Number: 21536844 NR Desc: 40S ribosomal protein S12
  misc_feature: Homolog of GI Number: 30025643 NR Desc: 40S ribosomal protein S12
  misc_feature: Homolog of GI Number: 67083929 NR Desc: ribosomal protein S12
  misc_feature: Homolog of GI Number: 18845074 NR Desc: 40S ribosomal protein S12
  misc_feature: Homolog of GI Number: 24266978 NR Desc: ribosomal protein S12
  misc_feature: Homolog of GI Number: 66548338 NR Desc:  similar to ribosomal protein S12
MIVFLSEEVVVAAEPAAAIPGEPMDIMTALQLVLRKSLAYGGLARGLHEGAKVIEKHAAQLCVLAEDCDQPDYVKLVKALCAEHNVSLLTVPSAKTLGEWAGLCKIDSEGKARKVTGCSCVVVKDFGEEHEAYNVVLQHVKSQ

SEQ ID NO: 3923 - DNA, 587 bp, Glycine max
  misc_feature: Ceres CLONE ID no. 807479
  misc_feature: Ceres CDNA ID no. 24766522
  CDS (154)..(342): REFERENCED BY SEQ ID NO: 3924
acaattacttaattaccctcctcaaactcaaaagtcagaacctccaaagttaagttagggtttttgggggtgaagttgcgcttccggcacttccacttccacttcttcatcaccatgagcaggtcaggccaaccaccggatttgaagaagtacatggacaagaagcttcagattaaactgaatggaaatcgcatgattgttggcactctccgtggctttgaccagtttatgaatttagttgttgacaacactgtggaagtgaatggcaatgagaaaaatgacatagggatggtggtaatcagaggaaatagtgtggtcactgaacccgtgaacagggcctgattactatttcttgtaaacatttataagtagattttctggtttctgtgtttgaacaacgtagctattgagagtaacatgtaattgtgaatcttaagagtgtcatgttggctgctaatttggggttctttttcaggctaaattgtcaaggcgggatgccttctattgttttagtgtgttgcctgtgtgacttgactcaattgaatatatcccttttagctgatttctccgcaaaaaaaaaaaaaaaa

SEQ ID NO: 3924 - protein, 75 aa, Glycine max
  misc_feature: Ceres CLONE ID no. 807479
  misc_feature: Ceres CDNA ID no. 24766522
  misc_feature (8)..(72): Pfam Name: LSM PFAM Desc: LSM domain
  misc_feature: Homolog of GI Number: 30102776 NR Desc: At2g23930
  misc_feature: Homolog of GI Number: 17065484 NR Desc: putative small nuclear ribonucleoprotein polypeptide G
  misc_feature: Homolog of GI Number: 50939161 NR Desc: putative small nuclear ribonucleoprotein E
  misc_feature: Homolog of GI Number: 37991869 NR Desc: putative small nuclear ribonucleoprotein polypeptide G
  misc_feature: Homolog of GI Number: 7451052 NR Desc: small nuclear ribonucleoprotein E homolog
  misc_feature: Homolog of GI Number: 19573 NR Desc: snRNP
  misc_feature: Homolog of GI Number: 14192871 NR Desc: Putative small nuclear ribonucleoprotein G
  misc_feature: Homolog of GI Number: 47026939 NR Desc: small nuclear ribonucleoprotein polypeptide G
  misc_feature: Homolog of GI Number: 23484203 NR Desc: putative small nuclear ribonucleoprotein polypeptide G
  misc_feature: Homolog of GI Number: 18860007 NR Desc: CG9742
MSRSGQPPDLKKYMDKKLQIKLNGNRMIVGTLRGFDQFMNLVVDNTVEVNGNEKNDIGMVVIRGNSVVTEPVNRA

SEQ ID NO: 3925 - DNA, 430 bp, Glycine max
  misc_feature: Ceres CLONE ID no. 808068
  misc_feature: Ceres CDNA ID no. 35383292
  CDS (82)..(234): REFERENCED BY SEQ ID NO: 3926
gagtcaacaacaacctaggtcacaaccgaggcagtcttttattttatagtataattcattctgtcatatatctgtgtagcaatggtggtctttctttgcaaggaagaatatggtgtgctcttgggcaatgactgggctgcaactcatgaatttggccacaacttttgtatctcaaatgaaggtgacgatgacgatgatgataatggcgtcattgatgtggccccagcggcatagaagaatttcgcaaaacatgcataaatgaggaggatgaggagggatatagtagtagtcagtgtaagcttcattctgtggtcttgcttagtaattacattacatttgtgtttactcttggaataggttctagtgttatgcttaattacggtcactataaatttgagacataatacatgttttattagcaaaaaaaaaa

SEQ ID NO: 3926 - protein, 50 aa, Glycine max
  misc_feature: Ceres CLONE ID no. 808068
  misc_feature: Ceres CDNA ID no. 35383292
MVCSWAMTGLQLMNLATTFVSQMKVTMTMMIMASLMWPQRHRRISQNMHK

SEQ ID NO: 3927 - DNA, 1439 bp, Glycine max
  misc_feature: Ceres CLONE ID no. 808445
  misc_feature: Ceres CDNA ID no. 40351392
  CDS (89)..(1258): REFERENCED BY SEQ ID NO: 3928
aaaaccacagcttaattctctctactactgctagctgtgacttgttttgagttcaatcaaatcgcattggtatctgaaatcaggaaagatggttagcgtagctgagatcaggcaggcacaaagggcagaaggcccagcaaccatccttgccattggaactgcaaacccaccaaaccgtgttgatcagagcacctatcctgattactacttcagaatcaccaacagtgaccacatgaccgagctcaaagagaaatttcagcgcatgtgtgacaagtctatgatcaagacgagatatatgtacctaaacgaagagatcttgaaagagaatccaaacatgtgtgcttacatggcaccttctttggatgctaggcaagacatggtggtggtagaggtaccaaagctagggaaagaggctgcagtaaaggccataaaggagtggggccagccaaagtcaaagattacccacttgatcttctgcaccactagcggtgtggacatgcctggtgctgattaccaactcaccaaacaattgggccttcgcccttatgtgaagaggtacatgatgtaccaacaaggttgctttgcaggtggcacggttcttcgtttggccaaggatttggctgagaacaacaagggtgcacgtgtgcttgttgtctgctctgagatcactgcagtcacattccgtgggccaagtgacactcaccttgatagtcttgtgggccaagcattgtttggagatggagctgctgcagtcattgttggttctgacccaattccacaagttgagaagcctttgtatgagcttgtttggactgcacaaacaattgctccagacagtgaaggtgctattgatggacaccttcgtgaagttggactcacatttcacctcctcaaggatgttcccgggattgtctcaaagaacattgataaggcactttttgaggctttcaacccattgaacatctctgattacaactccatcttttggattgcacaccctggtgggcctgcgattttagaccaagttgagcaaaagttgggtctcaaacctgagaagatgaaggccactagagatgtgcttagtgaatatgggaacatgtcaagtgcttgtgttcttttcatcttggatgagatgaggaggaaatctgctgaaaatggacataaaaccacaggtgaaggacttgaatggggtgtgttgttcggttttggacctggacttaccattgaaactgttgttttgcatagtgtggccatctgagatgcctcatatattatttcattattgtgtaccacttttcaaacttgcttggggtttgtaacaacaacaaccaccaaaaaaaaaaaactcgtttagagtttgtttgtgtacgtttatattaaaataataatacgtgtttggtggctttttagcctaattatcaataaaaaaaaaaaaaaaa

SEQ ID NO: 3928 - protein, 389 aa, Glycine max
  misc_feature: Ceres CLONE ID no. 808445
  misc_feature: Ceres CDNA ID no. 40351392
  misc_feature (2)..(228): Pfam Name: Chal_sti_synt_N PFAM Desc: Chalcone and stilbene synthases
  misc_feature (238)..(388): Pfam Name: Chal_sti_synt_C PFAM Desc: Chalcone and stilbene synthases
MVSVAEIRQAQRAEGPATILAIGTANPPNRVDQSTYPDYYFRITNSDHMTELKEKFQRMCDKSMIKTRYMYLNEEILKENPNMCAYMAPSLDARQDMVVVEVPKLGKEAAVKAIKEWGQPKSKITHLIFCTTSGVDMPGADYQLTKQLGLRPYVKRYMMYQQGCFAGGTVLRLAKDLAENNKGARVLVVCSEITAVTFRGPSDTHLDSLVGQALFGDGAAAVIVGSDPIPQVEKPLYELVWTAQTIAPDSEGAIDGHLREVGLTFHLLKDVPGIVSKNIDKALFEAFNPLNISDYNSIFWIAHPGGPAILDQVEQKLGLKPEKMKATRDVLSEYGNMSSACVLFILDEMRRKSAENGHKTTGEGLEWGVLFGFGPGLTIETVVLHSVAI

SEQ ID NO: 3929 - DNA, 713 bp, Glycine max
  misc_feature: Ceres CLONE ID no. 809659
  misc_feature: Ceres CDNA ID no. 25891758
  CDS (94)..(516): REFERENCED BY SEQ ID NO: 3930
atctgcgcctgatttctcagttctcacactcattccgtgctctaaatctcaaattctagggttagggttcccaatttctccgccaatcagaagatgagttccaccggtggttctaccaagggcggaaggggcaagcccaaagcctccaaatccgtttcaagatcgcagaaagctggtctccaattccccgttggaagaatcgctcgattccttaaggctgggaaatacgctgagcgtgttggtgctggtgctcctgtgtacctctctgcagtgctcgagtatctcgctgctgaggttttggaattggctgggaatgctgctagggataacaagaagaatcgtattgttcctaggcacattcagcttgctgtgaggaacgatgaggagctgagcaagcttttgggatctgttaccattgccaatggaggtgtcttgccgaatattcatcagactctgcttcccaagaaggttggcaaggggaagggcgaaattggatcagcttctcaagagttttagggtttttgttaggcctatttggactatagtttttattttattgcggttgtaatatacatgttttggttaatttttagatatctgctctgaggaattaagtgtttctcagtcttttgaactggatggtgtaatctcacttttgaatcggatgcgaatatgaagtggtatttggattatttttaaaaaaaaaaaaaaaa

SEQ ID NO: 3930 - protein, 140 aa, Glycine max
  misc_feature: Ceres CLONE ID no. 809659
  misc_feature: Ceres CDNA ID no. 25891758
  misc_feature (29)..(93): Pfam Name: CBFD_NFYB_HMF PFAM Desc: Histone
  misc_feature: Homolog of GI Number: 3204129 NR Desc: histone H2A
  misc_feature: Homolog of GI Number: 21553797 NR Desc: histone H2A
  misc_feature: Homolog of GI Number: 20334750 NR Desc: At1g08880/F7G19_24
  misc_feature: Homolog of GI Number: 21593507 NR Desc: putative histone H2A
  misc_feature: Homolog of GI Number: 297871 NR Desc: histone H2A
  misc_feature: Homolog of GI Number: 77555982 NR Desc: histone h2a.
  misc_feature: Homolog of GI Number: 685035 NR Desc: histone H2A homolog
  misc_feature: Homolog of GI Number: 1708102 NR Desc: Histone H2A
  misc_feature: Homolog of GI Number: 29824201 NR Desc: putative histone H2A
  misc_feature: Homolog of GI Number: 121985 NR Desc: Histone H2A
MSSTGGSTKGGRGKPKASKSVSRSQKAGLQFPVGRIARFLKAGKYAERVGAGAPVYLSAVLEYLAAEVLELAGNAARDNKKNRIVPRHIQLAVRNDEELSKLLGSVTIANGGVLPNIHQTLLPKKVGKGKGEIGSASQEF

SEQ ID NO: 3931 - DNA, 602 bp, Glycine max; identical to SEQ ID NO: 3295
  misc_feature: Ceres CLONE ID no. 810239
  misc_feature: Ceres CDNA ID no. 40351397
  CDS (93)..(332): REFERENCED BY SEQ ID NO: 3932

SEQ ID NO: 3932 - protein, 79 aa, Glycine max; identical to SEQ ID NO: 1962
  misc_feature: Ceres CLONE ID no. 810239
  misc_feature: Ceres CDNA ID no. 40351397
  misc_feature (1)..(78): Pfam Name: Metallothio_2 PFAM Desc: Metallothionein

SEQ ID NO: 3933 - DNA, 1218 bp, Glycine max
  misc_feature: Ceres CLONE ID no. 810282
  misc_feature: Ceres CDNA ID no. 40041329
  CDS (109)..(879): REFERENCED BY SEQ ID NO: 3934
agggcgattctggaaaataagatggaaggattacaaagagtatagagggaagggagggcaaagccaaaggggatttcgttgtgttgtgttcctccgccagcgttagagatgagttccgccgataccgtcaatgcgagttctgctgagtctgtcaaagaacctgtcatagggtcaagtctggaagcaaaacaggatgatactgaaataaaatctcaagttgatgccatgtgggaacaaatgaataaaggagtatctaataagaccctcaacagatttacaagcaagcctaattctgctccaaaaaaaactgcaaagaagacatcatctaactggatgtcttatttggccttggcaccgaaggcaactgaatcccttgggcaaggtgcttccaagaatggacctggcattctgcagagcagtacaagcgatgaagccaagaagcttgctgctgctgctcttgcagcagtgaaagatgatgctgccatggctgcctcaagcagggggaaacttgtgattactgaggttcgggactttgctggtcaagaaattgaagttaaaaagcttgtagattctgactcaaaggaggcaatggaaagagccaaagctcctccaccttctgcagtggatactgtccttgaacaaatcaagaagaaacagaagctcagtgtactggataagaccaaaaaggactggggtgaatttaaggaagaaaagagactggaagaagagcttgatgcttataagaagagttctaaccagtatttggacaaggtttctttcttacagcgagcagattaccgtgagtttgagcgtgagagagatgcgcgactggctttgcaatccaggaagcgaccagataatatgcaagaggatgactgaaggtagttgaagactggagttactacctttggagaattatgtatggttttgtagtgagttatagttcctgggaaggtcttggtctctcaaaagagataaaagacctttgatcacattaaatggggtattgatggattttgaggtttgagatttgaaatgcttttcaatgacatggtactatatgtggggggtaaaaatagggtgctagagagaaacaagtataaattttagactgacattagttcattcccgttccttgagagcctcagaagacattcactactcgctgaaggtagttgcaaagaactcattttgtgtctgtccaaaaaaaaaaaaaaa

SEQ ID NO: 3934 - protein, 256 aa, Glycine max
  misc_feature: Ceres CLONE ID no. 810282
  misc_feature: Ceres CDNA ID no. 40041329
  misc_feature (168)..(244): Pfam Name: BCNT PFAM Desc: Bucentaur or craniofacial development
  misc_feature: Homolog of GI Number: 34894794 NR Desc: P0537A05.24
  misc_feature: Homolog of GI Number: 21618133 NR Desc: bcnt
  misc_feature: Homolog of GI Number: 47027075 NR Desc: BCNT
  misc_feature: Homolog of GI Number: 66499462 NR Desc:  similar to GA11414
MSSADTVNASSAESVKEPVIGSSLEAKQDDTEIKSQVDAMWEQMNKGVSNKTLNRFTSKPNSAPKKTAKKTSSNWMSYLALAPKATESLGQGASKNGPGILQSSTSDEAKKLAAAALAAVKDDAAMAASSRGKLVITEVRDFAGQEIEVKKLVDSDSKEAMERAKAPPPSAVDTVLEQIKKKQKLSVLDKTKKDWGEFKEEKRLEEELDAYKKSSNQYLDKVSFLQRADYREFERERDARLALQSRKRPDNMQEDD

SEQ ID NO: 3935 - DNA, 778 bp, Glycine max
  misc_feature: Ceres CLONE ID no. 811557
  misc_feature: Ceres CDNA ID no. 24766523
  CDS (117)..(470): REFERENCED BY SEQ ID NO: 3936
agcagaagaaaacgaaactctcaaaccaagcgaaactatgggcatataactgagagaagaatatatcaatatcatctccaaatacgacgtcgttcaggttggggttttagcacaagatgtcgctgcgaataaaggcggtagtagataagtttgtccaagagttgcaggaagcgttggatgctgatattcaggataggatcatgaaggacagagaaatgcaaagttacattgaggagcgggaacgagaggttgctgagcgtgaagctgcttggaaggctgatctttctcgtcgtgaggcagaaattgctcgtcaagaagcaaggctgaagatggagagagacaatctagagaaagagaaaagtgtcttaatgggaactgcatcaaatcaagataaccaagatggagctcttgaaattacagtaagtggtgaaaagtaccgttgcctcagatttgccaaggcaaaaaaataaggctttgctggggtgacaaaaaggaaaagtatgattttgacttctctcccccagggctagtgctgtcgaggaatcacctgaaatgccaagctcagtttaagtacttctaggattaattattgaaatttaactgtttagttgtggtttataattcctgttagatttgagttaagtgtcatgacttcctcaattaaatttttatttcattcttttctgtgatggtgttgatgctgtttgctgaaattatgtttccgggtaaattatttatgacattagctaaatttagttaccaaaaaaaaaaaaaaaaa

SEQ ID NO: 3936 - protein, 117 aa, Glycine max
  misc_feature: Ceres CLONE ID no. 811557
  misc_feature: Ceres CDNA ID no. 24766523
MSLRIKAVVDKFVQELQEALDADIQDRIMKDREMQSYIEEREREVAEREAAWKADLSRREAEIARQEARLKMERDNLEKEKSVLMGTASNQDNQDGALEITVSGEKYRCLRFAKAKK

SEQ ID NO: 3937 - DNA, 438 bp, Glycine max
  misc_feature: Ceres CLONE ID no. 811964
  misc_feature: Ceres CDNA ID no. 35383293
  CDS (82)..(234): REFERENCED BY SEQ ID NO: 3938
gagtcaacaacaacctaggtcacaaccgaggcagtcttttattttatagtataattcattctgtcatatatctgtgtagcaatggtggtctttctttgcaaggaagaatatggtgtgctcttgggcaatgactgggctgcaactcatgaatttggccacaacttttgtatctcaaatgaaggtgacgatgacgatgatgataatggcgtcattgatgtggccccagcggcatagaagaatttcgcaaaacatgcataaatgaggaggatgaggagggatatagtagtagtcagtgtaagcttcattctgtggtcttgcttagtaattacattacatttgtgtttactcttggaataggttctagtgttatgcttaattacggtcactataaatttgagacataatacatgttttattagcaaaaaaaaaaaaaaaaaa

SEQ ID NO: 3938 - protein, 50 aa, Glycine max; identical to SEQ ID NO: 3926
  misc_feature: Ceres CLONE ID no. 811964
  misc_feature: Ceres CDNA ID no. 35383293

SEQ ID NO: 3939 - DNA, 444 bp, Glycine max
  misc_feature: Ceres CLONE ID no. 811994
  misc_feature: Ceres CDNA ID no. 35383294
  CDS (92)..(262): REFERENCED BY SEQ ID NO: 3940
aaaagatagatagaaattaagaggccccaaaagctgcacacattgcccttcctgtccaggaatttgagatctagcaactaacaaggcaataatgaagttcttgttccagtgcccttgctgctcttgcttttgcttcatgaagccaaagcaagggaaggcaaaggtcaaggaagtcaaagaaaccaaggtggaagaaaaaaggttgaagaaaagaaagactgaccatgtaactccatttcaagctttctttggttattattagtattatataagcatgcacaacaaatttgtgtctacttaatttgtgcttctttgttcctttaattaccactgctatgatgccttcctactacaattagtttgaaaatgtacaatgcgtttgcaagtaacttcttaaaaatggaaaataaaaaataaattgtcattccgaaaaaaaaaaaaaaa

SEQ ID NO: 3940 - protein, 56 aa, Glycine max
  misc_feature: Ceres CLONE ID no. 811994
  misc_feature: Ceres CDNA ID no. 35383294
MKFLFQCPCCSCFCFMKPKQGKAKVKEVKETKVEEKRLKKRKTDHVTPFQAFFGYY

SEQ ID NO: 3941 - DNA, 571 bp, Triticum aestivum
  misc_feature: Ceres CLONE ID no. 814425
  misc_feature: Ceres CDNA ID no. 40351398
  CDS (66)..(377): REFERENCED BY SEQ ID NO: 3942
acagcacccatcaccaccgctccctcaatcccactcgcgcagcagctccaagaggatcgtcagccatgtctgggcgcggcaagggaggcaaggggctcggcaagggcggcgccaagcgccaccggaaggttcttcgcgacaacatccagggcatcaccaagccggccatccggcgcctggcgaggaggggcggcgtgaagcgcatctccggcctcatctacgaggagacccgcggcgtgctcaagatcttcctcgagaacgtcatccgtgacgccgtcacctacacggagcacgcccgccgcaagaccgtcaccgccatggacgtcgtctacgcgctcaagcgccagggccgcaccctctacggcttcggcggctaggccgcgccagatggtcgtcagtcctcgtcgccgcctgcagattccgctgtgttagtccgcccgttcctagtagtgttgcgctcaagaaatctcagatggaaaccgccttgtttcccatttcctctgtctgtttagctggatcatgaaattatgtactgtaatgaagatgtttgcatccaaaaaaaaaaaaaaaa

SEQ ID NO: 3942 - protein, 103 aa, Triticum aestivum; identical to SEQ ID NO: 8
  misc_feature: Ceres CLONE ID no. 814425
  misc_feature: Ceres CDNA ID no. 40351398
  misc_feature (66)..(92): Pfam Name: TAF PFAM Desc: TATA box binding protein associated factor

SEQ ID NO: 3943 - DNA, 1509 bp, Triticum aestivum
  misc_feature: Ceres CLONE ID no. 815158
  misc_feature: Ceres CDNA ID no. 25401677
  CDS (404)..(1135): REFERENCED BY SEQ ID NO: 3944
gattcactgcactgcaccatttgttttgctgccccctgcctctccctccccttcagttcgagtcttctttctccttccctcttctttgattgcttccactgttgctcatcctctccttcttcttcttctcctctccgtatgtccatgtgtctcctgccctgattgactccttgcctccgactccccactcactcttcttggtggcagagcttcttctttctgttacgtgtcagcttcttccgttcatcggtccgagctttctagattcaacatcgcttctgctcgtctgagtgggaggagtatcgatgctttgcttggcctcccaccaatggtgaatccgagttagtttgccgacttgccgtggaagaaaggaagagaaaccgccggcgaggggcagaaaaagatgcggggtttgagtaggcttggcgtcgggctcacggtggtgtccgcgctcctcctcctcgcgctcgccgcggagctctactacctcctcgtgcacaagcgccgccagcgacgacgcgccgccgccgtctccgacgcggcctcctcgccctcctcctcctcccgcgagctgctccagctcttctgcttcaagaagccgcccgcactcgcctccacctacgcgcaggagccgaccgaagccgtggccgaggtcgtcgtcgtcgacgacgacgacgagacggtggaggcgcagctgatgcggctcggcagcctcgtcggcccgccgcggctgctcttcaccatcaaggaggagaccaaggaggacctcgagtccgagggcggccggagcaggtgcgggaggagccggagcctcggcgacctgctgcattgctccgagacgccgtacctcacgcccgcctcctcgcccctcccgccggccatggagaaatcgtacaaccccctgttcgagtcgccggcggcgagcccagccgcggtggcggcgtcgccgccgcccaagctccagttcctcaaggacgcggaggagaagctgtaccggcgggcactggccgaggaggcgaagagggcgcgggggtcgccggcggccggcgaggaggactgcggcgggtacatcaccatcgtggtggggaagaacacccgagtcatccccttgccctcgcctcccggcagcgcttgaaaaaaaggtggcttttgttaactcgtctgatgctgatgcagatgcagagtcagtcagtgttccgttctagcgtagcctctgtgctgtcatctttttttgatcattccaattggatgattggatgtacataacatgaacatggcgaggaactgagaacttgggatcaatattttcttttactatctgtatctgtagtctctagtctctagtctgtgacttgtgactttaaggtgcaagttaattacagtactgtaattttgttgttgtaggaggcaaaacattgcactcttatgttatgtatgatgagcataaatggaccatcatcccagatcagaatatcattaatcctaatattaacaaaaaaaaaaaaaaaa

SEQ ID NO: 3944 - protein, 243 aa, Triticum aestivum
  misc_feature: Ceres CLONE ID no. 815158
  misc_feature: Ceres CDNA ID no. 25401677
  misc_feature: Homolog of GI Number: 67987177 NR Desc: 4Fe
  misc_feature: Homolog of GI Number: 55643233 NR Desc:  similar to splicing coactivator subunit SRm300
  misc_feature: Homolog of GI Number: 5821151 NR Desc: RNA binding protein
  misc_feature: Homolog of GI Number: 66776813 NR Desc: Phosphoribosylaminoimidazole
  misc_feature: Homolog of GI Number: 6634015 NR Desc: KIAA0324 protein
  misc_feature: Homolog of GI Number: 6649242 NR Desc: splicing coactivator subunit SRm300
  misc_feature: Homolog of GI Number: 19923466 NR Desc: splicing coactivator subunit SRm300
  misc_feature: Homolog of GI Number: 61826057 NR Desc:  similar to serine\/arginine repetitive matrix 1
  misc_feature: Homolog of GI Number: 47087423 NR Desc: serine/arginine repetitive matrix 1
MRGLSRLGVGLTVVSALLLLALAAELYYLLVHKRRQRRRAAAVSDAASSPSSSSRELLQLFCFKKPPALASTYAQEPTEAVAEVVVVDDDDETVEAQLMRLGSLVGPPRLLFTIKEETKEDLESEGGRSRCGRSRSLGDLLHCSETPYLTPASSPLPPAMEKSYNPLFESPAASPAAVAASPPPKLQFLKDAEEKLYRRALAEEAKRARGSPAAGEEDCGGYITIVVGKNTRVIPLPSPPGSA

SEQ ID NO: 3945 - DNA, 929 bp, Triticum aestivum
  misc_feature: Ceres CLONE ID no. 815412
  misc_feature: Ceres CDNA ID no. 25891759
  CDS (79)..(753): REFERENCED BY SEQ ID NO: 3946
gatcctcactgaatctaaaaaccttcccttctcttctcacccccacactcccatctcacacacccctcgcatccaacaatgtctctcaccattccctccaacctctccaagcccgccgccctccgccccaaactaagcccaaagctaaggtccgccgccacaaccaccatcgtctgcagcaccaccaacaacaacaacaacaacaacgtgtcctccgacctgaaggcgttctccgccgcgctggccctctcctccatcctcctctccgcccctctccccgccggcgccgacatctcggggctcaccccatgcaaggagtcgaagcagttcgcgaagcgtgagaagcagtcgataaagaagctggagtcgtcgctgaagctctacgaggcgggcagcgcccccgcactggccattaaggcgagcgtggagaagacgaagaggaggttcgacaactacgcgaagcaggggttgctgtgcggcggcgatgggttgccgcacctgatcgtgagcggagaccagaggcactggggtgagttcatcacacccggaatactattcctgtacatctcgggatggatcggctgggtgggtcggagctacctgattgcgatcagggacgagaagaaacccaccatgaaggagatcatcatcgatgttcctctggcttctcgcttgctcttcaggggtttcagctggcccgttgctgcctacagagaactcatcaacggcgacctcattgccaaggatgtctagataagagagggtggatggctacattggaggaaagcctggagaatttgtatgtggatgggatctttacgcgctctttttgtaattacttttttttataaatggtacatgatatgatgtaatctaatgcatgtgaaccacaatcaacctcatcttccaattcaaaaaaaaaaaaaaaa

SEQ ID NO: 3946 - protein, 224 aa, Triticum aestivum; identical to SEQ ID NO: 3424
  misc_feature: Ceres CLONE ID no. 815412
  misc_feature: Ceres CDNA ID no. 25891759
  misc_feature (50)..(224): Pfam Name: PSI_PsaF PFAM Desc: Photosystem I reaction centre subunit III
  misc_feature: Homolog of GI Number: 8954295 NR Desc: photosystem I reaction center subunit III
  misc_feature: Homolog of GI Number: 30013659 NR Desc: putative photosystem I subunit III precursor
  misc_feature: Homolog of GI Number: 21593588 NR Desc: photosystem I subunit III precursor
  misc_feature: Homolog of GI Number: 23397082 NR Desc: putative photosystem I reaction centre subunit III precursor
  misc_feature: Homolog of GI Number: 1172664 NR Desc: Photosystem I reaction centre subunit III
  misc_feature: Homolog of GI Number: 15450361 NR Desc: At1g31330/T19E23_1
  misc_feature: Homolog of GI Number: 21303 NR Desc: PSI subunit IV preprotein
  misc_feature: Homolog of GI Number: 1076728 NR Desc: photosystem
  misc_feature: Homolog of GI Number: 3885892 NR Desc: photosystem
  misc_feature: Homolog of GI Number: 34897038 NR Desc: photosystem

SEQ ID NO: 3947 - DNA, 527 bp, Triticum aestivum
  misc_feature: Ceres CLONE ID no. 815509
  misc_feature: Ceres CDNA ID no. 36701271
  CDS (87)..(353): REFERENCED BY SEQ ID NO: 3948
agtcgtctgcaacagagtaagagggcaaaaccctagctttagtgtcttcccgcccatctcttgcaatctcatagattttagcagccatggcgagtaccaaagttcagagggttatgacccaacctattaacttgattttcaggtttcttcagagcaaagcgcgcatccagatttggctctttgagcaaaaggatttgaggattgaaggccgaatcattggttttgatgaatacatgaatttggttcttgatgatgctgaagaagtgaacgtcaagaagaaaaacagaaagacattagggaggatccttcttaaaggagacaacataaccttgatgatgaacacggggaaatgatgaacaacgctggcacagttgtaaacactgttcctatccaacaagagagaaaaaaatatctttccttttccagtttaattactgtttctcttgttgaaatcttgaatatgttgtgagagaaatattatcatgcatgaatctgtgaatttttaatacacaaaaaaaaaaaaaaaa

SEQ ID NO: 3948 - protein, 88 aa, Triticum aestivum
  misc_feature: Ceres CLONE ID no. 815509
  misc_feature: Ceres CDNA ID no. 36701271
  misc_feature (19)..(85): Pfam Name: LSM PFAM Desc: LSM domain
  misc_feature: Homolog of GI Number: 50904957 NR Desc: putative small nuclear ribonucleoprotein polypeptide E
  misc_feature: Homolog of GI Number: 21592486 NR Desc: putative small nuclear ribonucleoprotein E
  misc_feature: Homolog of GI Number: 21593343 NR Desc: small nuclear ribonucleoprotein homolog
  misc_feature: Homolog of GI Number: 7269933 NR Desc: small nuclear ribonucleoprotein homolog
  misc_feature: Homolog of GI Number: 72111474 NR Desc:  similar to small nuclear ribonucleoprotein E isoform 2
  misc_feature: Homolog of GI Number: 41055945 NR Desc: similar to small nuclear ribonucleoprotein E
  misc_feature: Homolog of GI Number: 54645039 NR Desc: GA15004
  misc_feature: Homolog of GI Number: 50603823 NR Desc: MGC89991 protein
  misc_feature: Homolog of GI Number: 55242718 NR Desc: ENSANGP00000022836
  misc_feature: Homolog of GI Number: 61827651 NR Desc:  similar to small nuclear ribonucleoprotein E
MASTKVQRVMTQPINLIFRFLQSKARIQIWLFEQKDLRIEGRIIGFDEYMNLVLDDAEEVNVKKKNRKTLGRILLKGDNITLMMNTGK

SEQ ID NO: 3949 - DNA, 437 bp, Triticum aestivum
  misc_feature: Ceres CLONE ID no. 815512
  misc_feature: Ceres CDNA ID no. 40351399
  CDS (69)..(251): REFERENCED BY SEQ ID NO: 3950
aaagagaactctcactgcccccaacgaaacaaaccccaaaccctaaacagtttcagcaaaattcatcaatggctttctccaaagcattgttcctcgccgtcgtaatgtcggtgttcgtcgccgtcatctccgccgctgaagctccggctccgagccctacctctcccgctgccgccgtgtcgccgtcattcgtcgccggtgttctcgccgccggagccgctctcgcgttcggatctacactccggatctgagcgtagctcatggattttatttgtggatttttagtagaagccgagatttgagtagcattagtatataattctctctattgatattgctatgtagcgattattgctagatatgttgatttctggatctatattgcttttatggtttgactagtattcttattgttgttaccaaaaaaaaaaaaaaaa

SEQ ID NO: 3950 - protein, 60 aa, Triticum aestivum
  misc_feature: Ceres CLONE ID no. 815512
  misc_feature: Ceres CDNA ID no. 40351399
MAFSKALFLAVVMSVFVAVISAAEAPAPSPTSPAAAVSPSFVAGVLAAGAALAFGSTLRI

SEQ ID NO: 3951 - DNA, 761 bp, Triticum aestivum
  misc_feature: Ceres CLONE ID no. 815519
  misc_feature: Ceres CDNA ID no. 40351400
  CDS (78)..(572): REFERENCED BY SEQ ID NO: 3952
aattctctctcatcatctttgctattacctctttttccaaactctaaaaatttttagttccacaaaaccaaaccaaaatggcagcagcctcggcctcatccaccatgatatcaacaccagccttatctccaagcacaagcatccaaaagcaccatcatttgaagccatccaacgtgtgctttcaaggccttagacccctcacaaggttcacaaccaaagtgagcagcaccaccaaaagggttattccaaagggtggtgtcggtgttagagctgaactcaactcagcacttgtcataagcctcagcactgggctctccctcttcttggggaggtttgtgttcttcaacttccaaagggagaacgtggcaaagcaagtgcctgagcagaacggactcacacactttgaggctggtgacacacgtgccaaggagtatgtcagcctcctcaaatccaatgaccctgttggattcaacattgttgatgtcttggcttggggctccattggccatgttgttgcttactatatcttggccaccactagcaatggctatgaccctgcattctttggctgattttcatcacgttccattgtctttctttgcttactttttactatgttataatgtaatcaatgtcatcatgtataggttctctctaagatccaacaagttcagcatatgctaatttggtcactcttttcgcctgctatttggttaatggaaaatggattctctttattatcatgaacaaaaaaaaaaaaa

SEQ ID NO: 3952 - protein, 155 aa, Triticum aestivum
  misc_feature: Ceres CLONE ID no. 815519
  misc_feature: Ceres CDNA ID no. 40351400
  misc_feature (57)..(151): Pfam Name: PSI_PSAK PFAM Desc: Photosystem I psaG / psaK
MISTPALSPSTSIQKHHHLKPSNVCFQGLRPLTRFTTKVSSTTKRVIPKGGVGVRAELNSALVISLSTGLSLFLGRFVFFNFQRENVAKQVPEQNGLTHFEAGDTRAKEYVSLLKSNDPVGFNIVDVLAWGSIGHVVAYYILATTSNGYDPAFFG

SEQ ID NO: 3953 - DNA, 718 bp, Triticum aestivum
  misc_feature: Ceres CLONE ID no. 815603
  misc_feature: Ceres CDNA ID no. 40351401
  CDS (51)..(545): REFERENCED BY SEQ ID NO: 3954
aattaggtttttagggtttacaccgagcagccacacctcccgcagcagccatggttctcaaaactgaactatgccgattcagtggtgccaagatctacccaggaaagggcatcagatttgttcgtggtgattctcaggttttcctgtttgcaaactcaaaatgtaagaggtatttccacaatcgcctgaagccttcaaagctcacctggactgcaatgtacagaaagcaacacaaaaaggacattgctcaagaagctgtgaggaagaggagacgtgctgccaaaaagccttactctaggtccattgttggtgcgaccttggaagtaatccagaaaaagagagctgagaagccagaagttcgagatgcagctagggaagctgctcttcgtgaaattaaggagaggatcaagaaaacaaaggatgagaagaaggctaagaaagcagaagttgcttccaagtcgcaaaaagcaggagggaaaggcaatgtttctaagggtgctatgcccaaaggtcccaaacttggcggtggaggcgggaaacgctgagcttttagttttgttcctaattttggctacaatttaaatagttgttttgacactgctgtactgatatttcatttggaagattaatcttttattttactgttttactaaacctgtgtttggatattcagaaggtacttggttattgaatggatttcacaaaaaaaaaaaaaaaa

SEQ ID NO: 3954 - protein, 164 aa, Triticum aestivum; identical to SEQ ID NO: 3904
  misc_feature: Ceres CLONE ID no. 815603
  misc_feature: Ceres CDNA ID no. 40351401
  misc_feature (3)..(73): Pfam Name: Ribosomal_L24e PFAM Desc: Ribosomal protein L24e

SEQ ID NO: 3955 - DNA, 615 bp, Triticum aestivum
  misc_feature: Ceres CLONE ID no. 815615
  misc_feature: Ceres CDNA ID no. 36699840
  CDS (50)..(436): REFERENCED BY SEQ ID NO: 3956
agttctctggaagaggagtgaagcagcagagggaggagcggcattaaaaatgcagatcttcgtgaaaaccctaacggggaagaccataaccctcgaggtcgaaagcagcgacaccattgacaatgtcaaggctaagattcaagacaaggaaggcatccctccggatcagcagcgtttgattttcgccggaaagcaacttgaagatggaaggaccttggccgattacaacatccagaaggaatcaacccttcaccttgtcctcaggcttcgtggtggcatcatcgagccttccctcatggctttggctcgcaaatacaaccaggacaagatgatttgccgcaaatgctatgctcgtctgcaccctagggctgtgaactgccgtaagaagaagtgcggtcatagtaaccagttgaggcctaagaagaagatcaagtaaattctgggtgggatattgttggtctctactttcgttttgtttgtcttagaacagtgacttgtttggtatttatcgtttctggttttgattaatgttaattgttttgagacaatagttttgaactagtcaattatatttttatgatgccattttggtcttagtcaaaaaaaaaaaaaaaa

SEQ ID NO: 3956 - protein, 128 aa, Triticum aestivum
  misc_feature: Ceres CLONE ID no. 815615
  misc_feature: Ceres CDNA ID no. 36699840
  misc_feature (1)..(74): Pfam Name: ubiquitin PFAM Desc: Ubiquitin family
  misc_feature (77)..(128): Pfam Name: Ribosomal_L40e PFAM Desc: Ribosomal L40e family
  misc_feature: Homolog of GI Number: 71040673 NR Desc: ubiquitin fusion protein
  misc_feature: Homolog of GI Number: 322750 NR Desc: ubiquitin / ribosomal protein CEP52
  misc_feature: Homolog of GI Number: 16323384 NR Desc: putative ubiquitin extension protein UBQ1
  misc_feature: Homolog of GI Number: 52077170 NR Desc: ubiquitin / ribosomal protein CEP52
  misc_feature: Homolog of GI Number: 395079 NR Desc: ubiquitin/ribosomal protein
  misc_feature: Homolog of GI Number: 76559884 NR Desc: TPA: ubiquitin
  misc_feature: Homolog of GI Number: 50920549 NR Desc: Putative ubiquitin / ribosomal protein CEP52
  misc_feature: Homolog of GI Number: 73954303 NR Desc:  similar to ubiquitin A
  misc_feature: Homolog of GI Number: 73986078 NR Desc:  similar to ubiquitin A
  misc_feature: Homolog of GI Number: 13569612 NR Desc: ubiquitin A
MQIFVKTLTGKTITLEVESSDTIDNVKAKIQDKEGIPPDQQRLIFAGKQLEDGRTLADYNIQKESTLHLVLRLRGGIIEPSLMALARKYNQDKMICRKCYARLHPRAVNCRKKKCGHSNQLRPKKKIK

SEQ ID NO: 3957 - DNA, 504 bp, Triticum aestivum
  misc_feature: Ceres CLONE ID no. 815654
  misc_feature: Ceres CDNA ID no. 40351402
  CDS (36)..(266): REFERENCED BY SEQ ID NO: 3958
attggaataatatctagagaagaagctatatagccatggcctctaagtgtgaaagttggatgattttgggtttgttgattgctatttcgttctcaagcatgcatatggacatggcattcgcagcaaggaatctcctgcagacagaattgatacctgagctgcagccagtagtgccacctgtcatacagcctagagagatagacatctctgacttgccgccactgctaccagtaccatcaccaccaattacccttcccatcccctaagcacttggatttggattcataaataatcactcatctccactctccattttcattcagttccctgttgttattgttgctttcaataagtgatcttttttcacatctgtcttgttcaatttcttctgttacacatgcttgttttcttttcaatcttcctttgcactttttcatgtacctggactagtggagaccagttgttgttataatatatacaatctattctaaaaaaaaaaaaaaa

SEQ ID NO: 3958 - protein, 76 aa, Triticum aestivum
  misc_feature: Ceres CLONE ID no. 815654
  misc_feature: Ceres CDNA ID no. 40351402
MASKCESWMILGLLIAISFSSMHMDMAFAARNLLQTELIPELQPVVPPVIQPREIDISDLPPLLPVPSPPITLPIP

SEQ ID NO: 3959 - DNA, 2271 bp, Triticum aestivum
  misc_feature: Ceres CLONE ID no. 816297
  misc_feature: Ceres CDNA ID no. 40041330
  CDS (301)..(2076): REFERENCED BY SEQ ID NO: 3960
gttgttgctctccggtttgaatgagaaattcgtcgccggttgttgaaaacagtgcaatttcctcttactcctcctcccaggaaggtattctacccttgcttgtgtctggggtttcgctcgttgcttcccaactgtccaaggttttgccaagtttgggtgaccaaggattcctggtgaggaggattttggttcccctgaagctccttggtgctccgaatttggggggttttggaggaaagctctaagtcttggcctcctgctccttggttagtccgaccaaggccgaagaagaagctgccaatggagccgcctagcagtagcaggctctgggcttctctctggaccttcatcaagttcctgccctacttctgcggcctcttcatccttgggctcattaaaggtattctgctatgcccttgggcatgccttattatggcaatcggaatatctgcactaattcttgggttatggcctatgcatctgatttggacatactactgcatcatcagaaccagaatggttggacctgtagtaaagcttctacttcttgttgctgccactgtgatcttgatcttatggttgatagttggcatcccgggaagcgttttggctggattattatatggctttctagcaccaataatggccacgttcgatgcagttggcgaaggcaaagaaaatacatttgttcattgctttgtggatggaacatggagcactattactggtagttgtacagtggtcagagatttgaaagacatgcttttccactcctatttctcaattatggatgaccttcgtcttcagacaccttgtggaaagccatatgagataagattgcttgatattcccggggcgttgttgtctgctgcttgtggactcatactggatgtaataatgttcacactaattgccatctacaagtgccctgtgatgcttttcaaaggatggaaacgactgattcaggatttgattgggagagaaggaccttttctggagacagcgtgtgtgccattcgcaggtcttgctattcttctctggccatttgcggtactaggggctgttcttgcatctatcctgtccagtattcctttaggcctatttggtgcagttgtagcttaccaggaatcctctgtagtcatgggactctcttatgctgtctcatctgtgtccatctttgatgagtacacgaatgatgtgcttgacatggcaccgggatcttgcttcccaaggttgaaatatcggaaacagaaaaatgaagattcttcacatggtggtcaactatctaagccaggctcattcgacaaggagaaccaagaaggaaagaaacctctaaaccgtgtcacatcatttaagaacagcatggatgagttcaatccattcaagatgctggaccacttatttgctgaatgcaagcggcagggagaggttttggtgaatgaaggagtgataacaatgaaagacatccaagaaacgaagtcaggcaaagttggcagtggggttcttaacgttggtttaccggcatatgtaatccttaatgcactccttcgatctgcaaaatctaactctaatggcctaatcttgagtgatggcactgagattacatctcataataggcctaaaagcactctctttgactggttcttcgaccctcttatgatcatcaaggaacaaattaaagccgaaaatttcacagaagaagaggaagaatgcctcaaaatgcgagtcttgatggttggtgagcccagtaacctcaaggtcactcttcctcatgtgccatcactgaatgagcggaaaaaagcagaaatcgacgcatttgctcgaagattgcaaggaatcacaaagtcgatatcgagatatcctacatccaagcgtcgtttcgatgttcttgtgaagtctctcttgtcggagctcgagaggacgatgggtggcagcgcgcctgtcaatggatcccaagcgttaaggttgagaggcggtattgcccgaatgcttagccagaaatccgttgggaagacggcaaacatcatggatgaagatccagaagcgcaagtggcaaggaaggctctcactccatgataactttgatgatgtattgtgtagctgacaagctagcgagaggccaactctgtaaaaaatgtgtaaaagagaagcagctatgagctactagtatgaacgttcttaggtgtagcttgggttgttgtaagttttgttgtgcaaacatttattgcagatctcgctagtatgttggcatttacaaaaaaaaaaaaaaaa

SEQ ID NO: 3960 - protein, 591 aa, Triticum aestivum
  misc_feature: Ceres CLONE ID no. 816297
  misc_feature: Ceres CDNA ID no. 40041330
  misc_feature: Homolog of GI Number: 50925251 NR Desc: OSJNBa0081L15.3
  misc_feature: Homolog of GI Number: 50900472 NR Desc: OSJNBa0064H22.21
MEPPSSSRLWASLWTFIKFLPYFCGLFILGLIKGILLCPWACLIMAIGISALILGLWPMHLIWTYYCIIRTRMVGPVVKLLLLVAATVILILWLIVGIPGSVLAGLLYGFLAPIMATFDAVGEGKENTFVHCFVDGTWSTITGSCTVVRDLKDMLFHSYFSIMDDLRLQTPCGKPYEIRLLDIPGALLSAACGLILDVIMFTLIAIYKCPVMLFKGWKRLIQDLIGREGPFLETACVPFAGLAILLWPFAVLGAVLASILSSIPLGLFGAVVAYQESSVVMGLSYAVSSVSIFDEYTNDVLDMAPGSCFPRLKYRKQKNEDSSHGGQLSKPGSFDKENQEGKKPLNRVTSFKNSMDEFNPFKMLDHLFAECKRQGEVLVNEGVITMKDIQETKSGKVGSGVLNVGLPAYVILNALLRSAKSNSNGLILSDGTEITSHNRPKSTLFDWFFDPLMIIKEQIKAENFTEEEEECLKMRVLMVGEPSNLKVTLPHVPSLNERKKAEIDAFARRLQGITKSISRYPTSKRRFDVLVKSLLSELERTMGGSAPVNGSQALRLRGGIARMLSQKSVGKTANIMDEDPEAQVARKALTP

SEQ ID NO: 3961 - DNA, 1671 bp, Triticum aestivum
  misc_feature: Ceres CLONE ID no. 816550
  misc_feature: Ceres CDNA ID no. 35383295
  CDS (158)..(1399): REFERENCED BY SEQ ID NO: 3962
tcctttcctctcctttgccgtcccctccccaacacgcgttccccacaaattctcccaccgaatccccaaatcgcgcgagctcctccacgaatccccctccccgatcgattcggttcggcccgactgatcgccgccggagaagaggatcaccgccaccatgtgggccgcgtcgtgcctggcgtcctgctgcgccgcgtgcgcctgcgaggcgtgccgcaccgccgtcggcagcatcggccgccgctccgcgcggatcgcctactgcggcctcttcgcgctctccctcctcgcctcctgggtgctccgcgaggtcgccgcgccgctcctccagtccatcccatggatcaaccacttccacaagacgccggaccgcgagtggttcgagacggacgccgtgctcagggtcagcctcggcaacttcctcttcttcaccatcctcgccgccatcatggccggcatcaaggaccagaaggacccgcgcgacaaggtccaccacggcggctggatggccaagatcttctgctgggtcgtcatcgtcttcctcatgttcttcgtccccaacggcgtcgtcagcttctacgaatcgatttccaagtttggatctggactgttccttctcgttcaggttgttcttctgttggacttcgtgcacggatggaatgagaactgggttgctaaagatgaacagttctggtacatggcactgctggttgtctcagttgtttgttatattggctcattcgctttctctggtctactctttcactggttcactccatcgggacaggactgcggactcaatatgttcttcattgtctccacactgattcttgtttttgtgttcgctattgttgcgctgcacccaaaggtcaatggaagcttgctgcctgcatcagttataggcctctactgcacatacttgtgctacagcggactctccagtgagccaagggattatgagtgcaacgggcttcacaatcactccaaagctatgtcaactggtagccttacgttgggattatgtaccaccatcctttctgtggtctactctgctgttcgtgctggctcttctgcaactgtgctctcagcaccagactcaccacacgctggttccgacaagcccctgctccccttcagcaaggctgatgaggaggaaaccaaggacgtgcccaagccggtgacatactcctactcgttcttccacctcatcttctccctggcgagcatgtactcggcgatgctcctgactggctggtcgacctcggttggcgagagcggcaagcttgtcgatgtcgggtggccgtctgtctgggtcaggatcgcgacccagtgggcaacggcaggtctgttcatctggtccctcgtcgctcccctcctgttcccagacagggagttctagatcgacctggttacctgctagtgcatcatccgtttggagccacctacgtatcgtatcgaacgtgtttcggctgtgatggctaagctgactatctgtatctggtctgtaatattgtgtgagcaaacccatggcaaggagctggtgtttgtgtgacgttgtcgagtctggtctgcatgatgtgtgacctaaggcattgttgccagtatttcaacagtgaagatatggtctttggttgtatatatattgaagttgatctaaaaaaaaaaaaaaaa

SEQ ID NO: 3962 - protein, 413 aa, Triticum aestivum
  misc_feature: Ceres CLONE ID no. 816550
  misc_feature: Ceres CDNA ID no. 35383295
  misc_feature (8)..(413): Pfam Name: TMS_TDE PFAM Desc: TMS membrane protein/tumour differentially expressed protein
  misc_feature: Homolog of GI Number: 6587821 NR Desc: Contains similarity to gbAF181686 membrane protein TMS1d from Drosophila melanogaster. ESTs gbR64994
  misc_feature: Homolog of GI Number: 42563541 NR Desc: TMS membrane family protein / tumour differentially expressed
  misc_feature: Homolog of GI Number: 50917137 NR Desc: putative membrane protein
  misc_feature: Homolog of GI Number: 37201996 NR Desc: At3g24470/MXP5_4
  misc_feature: Homolog of GI Number: 51339027 NR Desc: Tumor differentially expressed 2
  misc_feature: Homolog of GI Number: 28279601 NR Desc: Tde2 protein
  misc_feature: Homolog of GI Number: 5853323 NR Desc: membrane protein TMS1d
  misc_feature: Homolog of GI Number: 21357219 NR Desc: CG4672
  misc_feature: Homolog of GI Number: 45478222 NR Desc: LRRGT00191
  misc_feature: Homolog of GI Number: 4960204 NR Desc: transmembrane protein SBBI99
MWAASCLASCCAACACEACRTAVGSIGRRSARIAYCGLFALSLLASWVLREVAAPLLQSIPWINHFHKTPDREWFETDAVLRVSLGNFLFFTILAAIMAGIKDQKDPRDKVHHGGWMAKIFCWVVIVFLMFFVPNGVVSFYESISKFGSGLFLLVQVVLLLDFVHGWNENWVAKDEQFWYMALLVVSVVCYIGSFAFSGLLFHWFTPSGQDCGLNMFFIVSTLILVFVFAIVALHPKVNGSLLPASVIGLYCTYLCYSGLSSEPRDYECNGLHNHSKAMSTGSLTLGLCTTILSVVYSAVRAGSSATVLSAPDSPHAGSDKPLLPFSKADEEETKDVPKPVTYSYSFFHLIFSLASMYSAMLLTGWSTSVGESGKLVDVGWPSVWVRIATQWATAGLFIWSLVAPLLFPDREF

SEQ ID NO: 3963 - DNA, 995 bp, Triticum aestivum
  misc_feature: Ceres CLONE ID no. 816772
  misc_feature: Ceres CDNA ID no. 40351403
  CDS (141)..(827): REFERENCED BY SEQ ID NO: 3964
atcactcagtggtgctccgctctgctcagctcagcgccctccaccagtccgccccactccatcccgagctgagctgagccgccaccagcactagcggccaagctctagacgccggctgcctcaccgacgaggagaggataatggaggcgcggcggcggacgttgctggtggcgctggcggtgctggccctggccgccgacgccgacgcctacagcaccatcaacgccaccaaggacaacgggctcaccctcttctgccccgtcgactccgccgtcgcctccttcatgcccaagtacaagaacctgacggccaagggccggacggccatcctgctctaccacgccgtgccggactactactcgctgcagctgctcacctccaacagcggcaaggtcagcacgctcgccacctccaacgtcgccaagaaggactacagcttcgacgtcgagaaggacggcgagaccgccgagctggacaccaaggtgaactcggcctcggtcacctacaccatcaaggacgacgacccgctcgccgtctacgccatctccaagttcctgcagcccaaggagctgtacaagatcgccaaggacatcgcccccgcgccggcgcccgaggcccccaagaagaagaagaccaccaagaagaagccctccgcggccgcctcgccctcggacgacgacgacgacgatgactccgccgcggactcgcccgacgactcctcatccgacgacgccaccgctgacaaggacggcgccgcgccgtccgcggtggccgggtgggtgacggccgccgtggccgtggcctcggcgctggcattggcagcttaataaggtgtgtgaactagtgtgtttttgtgctgagttctcccaaaattcgtggcccttgttatttagcgcgaaaaacaagaagggccatttcattcatatttattaccgcatgtcctgaagaaaaagaagggaaaagacaggaatttccttggaaaaaaaaaaaaaaaa

SEQ ID NO: 3964 - protein, 228 aa, Triticum aestivum
  misc_feature: Ceres CLONE ID no. 816772
  misc_feature: Ceres CDNA ID no. 40351403
  misc_feature (11)..(141): Pfam Name: Fasciclin PFAM Desc: Fasciclin domain
MEARRRTLLVALAVLALAADADAYSTINATKDNGLTLFCPVDSAVASFMPKYKNLTAKGRTAILLYHAVPDYYSLQLLTSNSGKVSTLATSNVAKKDYSFDVEKDGETAELDTKVNSASVTYTIKDDDPLAVYAISKFLQPKELYKIAKDIAPAPAPEAPKKKKTTKKKPSAAASPSDDDDDDDSAADSPDDSSSDDATADKDGAAPSAVAGWVTAAVAVASALALAA

SEQ ID NO: 3965 - DNA, 1458 bp, Triticum aestivum
  misc_feature: Ceres CLONE ID no. 818172
  misc_feature: Ceres CDNA ID no. 36582625
  CDS (168)..(1253): REFERENCED BY SEQ ID NO: 3966
agacacccaacttgtcaccaccatcctctcctcctcctcctcctctatccagtgagctcgagtcggcactgcactctctctgccagctccggatcgatctcggcttcttgatcgatccatcgtttgttgtctggcctagcacactcgggttcttggtccagtcgatcatggtgcagccggtgttcgacgcggcggtgctgagcggccgggcggacatcccgtcgcagttcatctggcccgagggcgagagcccgaccccggacgccgccgaggagctgcacgtcccgctcatcgacatcggcggcatgctctccggcgaccccgccgcggccgccgaggtgacgcgcctcgtgggcgaggcctgcgagcggcacggcttcttccaggtcgtgaaccacggtatcgacgccgagctgctggccgacgcgcaccgctgcgtggacaacttcttcacgatgcccctcccggagaagcagcgcgcgctgcgccaccccggcgagtcgtgcggctacgccagcagcttcaccggccggttcgcgtccaagctgccgtggaaggagaccctgtccttccgctcctgcccctccgaccccgccctcgtcgtcgactacatcgtcgccaccctcggcgaggaccaccgccgcctcggggaggtgtacgctcggtactgctcggagatgagccgtctgtcgctggagatcatggaggtgctcggggagagcctgggcgtcggccgcgcccactaccggcgcttcttcgagggcaacgactccatcatgcgcctcaactactacccgccgtgccagcggccgttggagacgctgggcacgggcccgcattgcgacccgacgtccctgaccatcctccaccaggacaacgtcggcggcctgcaggtgcacacggagggccggtggcgctccatccgaccccgcgccgacgccttcgtggtcaacatcggcgacaccttcatggcgctgtctaacggacggtacaagagctgcctccacagagcggtggtgaacagccgggtcccgaggaagtcgctggccttcttcctgtgcccggagatggacaaggtggtggcgccgccggggacgctggtggacgccgccaacccgcgcgcctacccggacttcacgtggcggtcgctgctggacttcacgcagaagcactaccgggccgacatgaagaccctcgaggtcttctcctcctggatcgtccagcagcagcagccccagcccgccaggacatgatggattgctctgctcctcccaccattagccagccattgattcagcttagctgctgagactgagaaaagagagacatcgtcatccgtcgatcgaatgttattattacagcttaattggttgatctagtggtagcacgtacgtacgaagaagcatggatggatggcaggatttcctagatgataatttcctaaaaaaaaaaaaaaaa

SEQ ID NO: 3966 - protein, 361 aa, Triticum aestivum
  misc_feature: Ceres CLONE ID no. 818172
  misc_feature: Ceres CDNA ID no. 36582625
  misc_feature (200)..(299): Pfam Name: 2OG PFAM Desc: 2OG
  misc_feature: Homolog of GI Number: 49065946 NR Desc: GA 20
  misc_feature: Homolog of GI Number: 67462129 NR Desc: gibberellin 20
  misc_feature: Homolog of GI Number: 13625519 NR Desc: gibberellin 20
  misc_feature: Homolog of GI Number: 13625521 NR Desc: gibberellin 20
  misc_feature: Homolog of GI Number: 13625523 NR Desc: gibberellin 20
  misc_feature: Homolog of GI Number: 13625525 NR Desc: gibberellin 20
  misc_feature: Homolog of GI Number: 2222796 NR Desc: gibberellin 20
  misc_feature: Homolog of GI Number: 2222800 NR Desc: gibberellin 20
  misc_feature: Homolog of GI Number: 2222798 NR Desc: gibberellin 20
  misc_feature: Homolog of GI Number: 50920237 NR Desc: putative gibberelin 20
MVQPVFDAAVLSGRADIPSQFIWPEGESPTPDAAEELHVPLIDIGGMLSGDPAAAAEVTRLVGEACERHGFFQVVNHGIDAELLADAHRCVDNFFTMPLPEKQRALRHPGESCGYASSFTGRFASKLPWKETLSFRSCPSDPALVVDYIVATLGEDHRRLGEVYARYCSEMSRLSLEIMEVLGESLGVGRAHYRRFFEGNDSIMRLNYYPPCQRPLETLGTGPHCDPTSLTILHQDNVGGLQVHTEGRWRSIRPRADAFVVNIGDTFMALSNGRYKSCLHRAVVNSRVPRKSLAFFLCPEMDKVVAPPGTLVDAANPRAYPDFTWRSLLDFTQKHYRADMKTLEVFSSWIVQQQQPQPART

SEQ ID NO: 3967 - DNA, 2324 bp, Triticum aestivum
  misc_feature: Ceres CLONE ID no. 818379
  misc_feature: Ceres CDNA ID no. 25445517
  CDS (211)..(2040): REFERENCED BY SEQ ID NO: 3968
actccaaacccaaaccaactcaacgcgcacacgcgcccccgagacgccaccagaccgccaccatccgcagctcaggcccgaccgacgcggctcggctcagcagtcggcgtcgtctcctctcccccgctcccccgctcccccctccaccgcctcgatcccgcccgcccgcggccgcgcgatcggatccggccagatcccgcgccggcggccatggagaacctgatctcgctcgtcaacaagctgcagcgcgcctgcacggcgctcggcgaccacggcgaggagagcgccctccccaccctctgggactcgctgccgtccatcgccgtcgtcggcggccagagttcgggcaaatcttcggtgctggagagcgttgttggaaaggatttcctgcccaggggctcaggcattgtcacccgtcgcccgctggttctgcaactccataggattgatggagacagggagtatgcagagttcatgcatgtccccaggaagagattcaccgattttgccatggtgaggaaggagatagctgacgaaactgacagacaaactggccatggaaagggaatatcatctgttcccatccatctaagcatattttctccaaacgttgtgaatttgactcttattgatcttcctgggcttactaaagttgctgttgagggtcagccggagagtatcgttcaggaaattgaaaacatggttcgagcattcattgaaaagcccaactgcatcattctggctgtttctccagccaatcaggatcttgcaacttctgatgctatcaagatttcacgggaagttgacccaaaaggtgaacggacctttggtgtgctcacgaaaattgatttaatggacaagggtactgatgctgttgatatactggaaggaagagcttacaggctccaatttccatggattggtgttgtcaatcgatcccagcaagatatcaacaagagtgtggacatgattgctgctaggcgtagagagcgtgactatttcgcaaacacaccagaatacaagcatctcgctcataggatgggatcagaacatttagcaaagagtctatcaaagcatttggagtctgttattaaatcaagaatcccgggtctccagtctcttataacgaagacagttgcagagctggaaactgaacttactcgtcttggaaagcccattgctaatgatgctggaggaaagctgtacacgattatggaaatatgccgcatgtttgatggcatctacaaagagcatctggatggagtgcgccctggtggtgagaaaatttaccatgtctttgacaatcagtttcctgtggcaattaaacggttgcagtttgataagcaactgtcaatggaaaatgtgaggaagctcataacggaagctgatggataccagcctcacttgatagctccagagcaaggatatcggcgcctcatagaatcttgtcttgttagtatcagaggtcctgccgaggcagctgttgacacggtccatggaatcctaaaggaactagtccacaaggctataaatgaaactcatgagctcaagcagttccccactcttcgtgtggaagttggcaatgcagcttttgagtcgttggaaagaatgagggacgaaagcaagaagaacacattaaagctagttgatatggaaacaagctacttaactgtagattttttcaggaagcttcctcaggatgttgagaagggtggaaatccaagccactctatttttgatagatataatgattcttatctaagacgaattgggacaactgttctggcatatgttaacatggtatcttcaacattgaggaactccatcccaaaatctattgtgtactgccaagtccgtgaggcaaagcgctcattgctcgaccacttctttactgagctgggagcaagagagattaggcaactttcgaagctccttgacgaggaccccgcggtcatggagcggaggacaaacctcgccaagaggctggagctataccggagcgcccaagcagagatcgacgcagttgcatggtcaaaataattttttgtcgacttatcgttccgtagtgtgtgttcacctttactccttgtttggtgacatgtctccccttattctgagggtcatatatagctgattctttcttcccgttctaggtcatattatattcttattagatgacagcagctgtgaggtgtgtcatgtgtttgtgcttttgctccttgtgcttgaggatctctctctaggggggacacctttctgctgtaccttgtctgtatcacgtacgagttcatgttattatgatttccataaaaaaaaaaaaaaaa

SEQ ID NO: 3968 - protein, 609 aa, Triticum aestivum
  misc_feature: Ceres CLONE ID no. 818379
  misc_feature: Ceres CDNA ID no. 25445517
  misc_feature (221)..(507): Pfam Name: Dynamin_M PFAM Desc: Dynamin central region
  misc_feature (37)..(212): Pfam Name: Dynamin_N PFAM Desc: Dynamin family
  misc_feature (512)..(605): Pfam Name: GED PFAM Desc: Dynamin GTPase effector domain
  misc_feature: Homolog of GI Number: 24111387 NR Desc: At5g42080/MJC20_19
  misc_feature: Homolog of GI Number: 1218004 NR Desc: SDL5A
  misc_feature: Homolog of GI Number: 2267213 NR Desc: dynamin
  misc_feature: Homolog of GI Number: 27543504 NR Desc: dynamin
  misc_feature: Homolog of GI Number: 6850867 NR Desc: dynamin
  misc_feature: Homolog of GI Number: 9757953 NR Desc: dynamin
  misc_feature: Homolog of GI Number: 2129825 NR Desc: phragmoplastin 12
  misc_feature: Homolog of GI Number: 5931765 NR Desc: phragmoplastin
  misc_feature: Homolog of GI Number: 50932725 NR Desc: putative dynamin
  misc_feature: Homolog of GI Number: 34911188 NR Desc: putative dynamin
MENLISLVNKLQRACTALGDHGEESALPTLWDSLPSIAVVGGQSSGKSSVLESVVGKDFLPRGSGIVTRRPLVLQLHRIDGDREYAEFMHVPRKRFTDFAMVRKEIADETDRQTGHGKGISSVPIHLSIFSPNVVNLTLIDLPGLTKVAVEGQPESIVQEIENMVRAFIEKPNCIILAVSPANQDLATSDAIKISREVDPKGERTFGVLTKIDLMDKGTDAVDILEGRAYRLQFPWIGVVNRSQQDINKSVDMIAARRRERDYFANTPEYKHLAHRMGSEHLAKSLSKHLESVIKSRIPGLQSLITKTVAELETELTRLGKPIANDAGGKLYTIMEICRMFDGIYKEHLDGVRPGGEKIYHVFDNQFPVAIKRLQFDKQLSMENVRKLITEADGYQPHLIAPEQGYRRLIESCLVSIRGPAEAAVDTVHGILKELVHKAINETHELKQFPTLRVEVGNAAFESLERMRDESKKNTLKLVDMETSYLTVDFFRKLPQDVEKGGNPSHSIFDRYNDSYLRRIGTTVLAYVNMVSSTLRNSIPKSIVYCQVREAKRSLLDHFFTELGAREIRQLSKLLDEDPAVMERRTNLAKRLELYRSAQAEIDAVAWSK

SEQ ID NO: 3969 - DNA, 1385 bp, Triticum aestivum
  misc_feature: Ceres CLONE ID no. 818483
  misc_feature: Ceres CDNA ID no. 25892849
  CDS (99)..(1112): REFERENCED BY SEQ ID NO: 3970
cacccaccactagcagctttcctcacgagctcgaccgatcgatcgaatccttccgtcgcgttcgcgtttccgtttcgtgcgtttagaccaagcttccaatggctcctctcggtgacgctgttgcccccgcggcggccgccgccgcccctggcctcgtcgtctctttcggcgagatgctgatcgacttcgtgcctgacgttgccggcgtttccctcgccgagtccggcggtttcgtcaaggcccccggcggcgcccccgccaacgtcgcctgcgccatctccaagctcggcggctcctccgccttcatcggaaagtttggcgacgacgagttcggccacatgctggtggagatcctgaagcagaacggcgtaaacgccgagggctgcctgttcgaccagcacgcgcgcaccgcgctggccttcgtcacgctcaagtccaacggcgagcgcgagttcatgttctaccgcaactcgtcggccgacatgttgctcaccgaggccgagctcaacctggacctgatccgccgcgcccgcatcttccactacggctccatctcgctcatcaccgagccctgccgctcggcccacgtcgccgccacgcgtgccgccaagtcggccggcatcctttgttcgtacgaccccaacgtgcgcctgccgctctggccctctgcgcaggccgcccgcgacggcatcatgagcatctggaaggaggctgacttcatcaaggtgagcgacgaggaggtagccttcctcacccagggcgacgccactgacgagaagaacgtgctctccctctggttcgagggcctcaagctgctcatcgtcaccgatggtgagaaggggtgcaggtacttcaccaaggacttcaagggctcggtgcccggctactctgtcaacaccgtggacaccaccggcgccggcgacgccttcgtcggctccctcctcgtcagcgtctccaaggacgactccatcttctacaatgaggccaagctgagggaggtgctgcagttctcgaacgcttgcggcgccatctgcaccaccaagaagggagccatcccggcgctgcccaccaccgccaccgccctggagctcatcagcaagggcagtaactagagactcattgtgtcgcgccatcggggttgaatcttaggagttttagctgcacttttattattattattagggatgaattgagtttagttcgtgagtcaagtgtgtgtgacctcgtgggcgcttaataaaaagcaagcatgtgtggtgattttggttgcggtctttgtgtaaggaggctactgattgttgtagccttcacccaaactttatcagagtctttaatgaatggacaagttcatcaaaatcttgttctgctgaaaaaaaaaaaaaaaa

SEQ ID NO: 3970 - protein, 337 aa, Triticum aestivum
  misc_feature: Ceres CLONE ID no. 818483
  misc_feature: Ceres CDNA ID no. 25892849
  misc_feature (19)..(325): Pfam Name: PfkB PFAM Desc: pfkB family carbohydrate kinase
  misc_feature: Homolog of GI Number: 31652276 NR Desc: fructokinase 2
  misc_feature: Homolog of GI Number: 50940457 NR Desc: putative fructokinase
  misc_feature: Homolog of GI Number: 4538955 NR Desc: fructokinase
  misc_feature: Homolog of GI Number: 1052973 NR Desc: fructokinase
  misc_feature: Homolog of GI Number: 33329200 NR Desc: putative fructokinase 2
  misc_feature: Homolog of GI Number: 33329198 NR Desc: putative fructokinase 2
  misc_feature: Homolog of GI Number: 1915974 NR Desc: fructokinase
  misc_feature: Homolog of GI Number: 32765547 NR Desc: fructokinase 2
  misc_feature: Homolog of GI Number: 21592495 NR Desc: fructokinase
  misc_feature: Homolog of GI Number: 6996284 NR Desc: fructokinase
MAPLGDAVAPAAAAAAPGLVVSFGEMLIDFVPDVAGVSLAESGGFVKAPGGAPANVACAISKLGGSSAFIGKFGDDEFGHMLVEILKQNGVNAEGCLFDQHARTALAFVTLKSNGEREFMFYRNSSADMLLTEAELNLDLIRRARIFHYGSISLITEPCRSAHVAATRAAKSAGILCSYDPNVRLPLWPSAQAARDGIMSIWKEADFIKVSDEEVAFLTQGDATDEKNVLSLWFEGLKLLIVTDGEKGCRYFTKDFKGSVPGYSVNTVDTTGAGDAFVGSLLVSVSKDDSIFYNEAKLREVLQFSNACGAICTTKKGAIPALPTTATALELISKGSN

SEQ ID NO: 3971 - DNA, 1747 bp, Triticum aestivum
  misc_feature: Ceres CLONE ID no. 819250
  misc_feature: Ceres CDNA ID no. 24766524
  CDS (162)..(1442): REFERENCED BY SEQ ID NO: 3972
ctttccttcgcttcttcctctcccgactcttcccgactccttcggttcctcaccggtcacccccacccctcaggtctgaaaccctctcgcgccgccgccgtcgccgtccccgtcctccctctcgtcgcgcctccgccggcctttcagtttagggtgggatcatgtcttctgcaatggagtcatcgtaccttcctgctactactgagtcaattgaaaaggctcaggaggctaaggatgcttcagagtcaatttcaatcctttaccgtgtgatccaagacccgtcttcatctgcagatgcactgagaataaaagagcttgcgattaccaaccttacaaactacctcactaaagagaaccgtgctgaggatctgcgtaatctcttgacccagctgaggccatttttctcactgattcccaaggccaagactgcaaaaattgtccgtggaatcattgatgccgtcgccaagattcctggaacatctgatcttcagatctcgctctgcaaggagatggtggaatggacgcgtgcagagaaacgtacgttcctcaggcagcgtgtggaggcaaggttagcggcccttcttttggagaatcaagagtacactgaagccctgaccctccttactggacttatcaaggaagtcaggagacttgatgacaagttgcttcttgtggacattgaccttttggaaagcaaactccacttctctctgagaaacctgcctaaggccaaagcttcactgaccgctgcaagaacagcggcgaatgccatttatgttccaccagctcagcagggcactattgatctgcagagtggaatccttcatgcggaagagaaggactacaaaactgcttacagctacttctttgaagcattcgaggctttcaacgcactggacgacccaagagctatcttcagcttgaagtacatgctcttgtgcaagataatggtcaaccatgctgacgatgttgctggaataatctcatctaaggccagcctgaagtatgtgggtcctgatgttgatgctatgaaagccgtagcggatgcctactctaagagatctctcaagtactttgaaaccgcccttcgtgattacaaagcccagcttgaggaggaccctattgtccacaggcatctttcatctctgtatgatacccttctggagcagaacctctgcaggttgattgagccctactcgagggtggagattgagcatgttgctcagatgattgaattgccagttgaccatgtggagaagaagctgtcacaaatgatccttgacaagaaatttgctggtactctagatcaaggtgctggttgcctcattatctttgaggagatgaaaacagaggccatcttccctgccacactcgaaactatttcaaacgttgggaaggttgtggacagtctttacatgaggtctgcgaagatcatggcttgaacactagtacccacatgatagtttatctgttggctatggtttcatcttttaaaagttatattagtgtctttcaagacatttaatcctgtcagtttgacactttaatctgcaatgttgggttttttagttaaaaaaatctaccttgctatgattggcgtgtaccttgaaaactagatggttcaagatgaaccatgttatgctgccgcgacattcttttgtgataattttccattagctttttttttggcctgtgtattgctgaatatacaatgctgaaaaaaaaaaaaaaaaaaaaaaaaaaaaaa

SEQ ID NO: 3972 - protein, 426 aa, Triticum aestivum
  misc_feature: Ceres CLONE ID no. 819250
  misc_feature: Ceres CDNA ID no. 24766524
  misc_feature (288)..(392): Pfam Name: PCI PFAM Desc: PCI domain
  misc_feature: Homolog of GI Number: 3450889 NR Desc: 19S proteosome subunit 9
  misc_feature: Homolog of GI Number: 32700022 NR Desc: 26S proteasome subunit RPN6a
  misc_feature: Homolog of GI Number: 32700028 NR Desc: 26S proteasome subunit RPN6a
  misc_feature: Homolog of GI Number: 15810545 NR Desc: putative 19S proteosome subunit 9
  misc_feature: Homolog of GI Number: 38093742 NR Desc: putative proteosome subunit
  misc_feature: Homolog of GI Number: 72057611 NR Desc:  similar to 26S proteasome non
  misc_feature: Homolog of GI Number: 48097764 NR Desc: similar to CG10149
  misc_feature: Homolog of GI Number: 34872897 NR Desc: similar to 26S proteasome non
  misc_feature: Homolog of GI Number: 68437955 NR Desc:  similar to 26S proteasome non
  misc_feature: Useful for increasing chlorophyll and photosynthetic capacity
  misc_feature: Useful for making plants with altered leaf shape eg curled leaves
MSSAMESSYLPATTESIEKAQEAKDASESISILYRVIQDPSSSADALRIKELAITNLTNYLTKENRAEDLRNLLTQLRPFFSLIPKAKTAKIVRGIIDAVAKIPGTSDLQISLCKEMVEWTRAEKRTFLRQRVEARLAALLLENQEYTEALTLLTGLIKEVRRLDDKLLLVDIDLLESKLHFSLRNLPKAKASLTAARTAANAIYVPPAQQGTIDLQSGILHAEEKDYKTAYSYFFEAFEAFNALDDPRAIFSLKYMLLCKIMVNHADDVAGIISSKASLKYVGPDVDAMKAVADAYSKRSLKYFETALRDYKAQLEEDPIVHRHLSSLYDTLLEQNLCRLIEPYSRVEIEHVAQMIELPVDHVEKKLSQMILDKKFAGTLDQGAGCLIIFEEMKTEAIFPATLETISNVGKVVDSLYMRSAKIMA

SEQ ID NO: 3973 - DNA, 2002 bp, Triticum aestivum
  misc_feature: Ceres CLONE ID no. 819490
  misc_feature: Ceres CDNA ID no. 40351404
  CDS (79)..(1836): REFERENCED BY SEQ ID NO: 3974
gcaaaaaacacccatcctctttcagaagcacagagagagatcttctagctacacactgttgccgtcgatccagcaaaaatgtgcggcatactggcggtgctgggctgcgccgatgacacccaggggaagagagtgcgcgtgctcgagctctcgcgcaggctcaagcaccgcggccccgactggagcggcatgcaccaggtcggcgactgctacctctcccaccagcgcctcgccatcatcgaccctgcctctggcgaccagcccctctacaacgaggacaagtccatcgtcgtcactgtgaatggagagatctacaaccatgaacagctccgggcgcagctctcctcccacacgttcaggacaggcagcgactgcgaggtcatcgcgcacctgtacgaggagcacggggagaacttcatcgacatgctggatggtgtcttctccttcgtcttgctcgacacacgcgacaacagcttcattgctgcccgtgatgccattggcgtcacacccctgtatattggctggggaattgatgggtcggtgtggatatcatcagagatgaagggcctgaatgatgattgtgagcactttgagatctttcctcctggccatctctactccagcaagcagggaggcttcaagagatggtacaacccaccttggttctccgaggtcattccttcagtgccatatgatccacttgctctcaggaaggcttttgaaaaggctgtcatcaagaggcttatgacggacgttccattcggtgttctactctctggtggcctagactcatcattggttgcagccgttacagttcgtcacctggcagggacaaaggctgcaaagcgctgggggactaagcttcattctttttgtgtcggacttgaggggtcacctgatctgaaggccgcaaaggaggtagccaattacctggggaccatgcaccatgagttcaccttcactgttcaggacggcattgatgcaattgaggatgtgatttatcacaccgaaacatatgatgtgacgacaatcagggcaagcacgccaatgttcctgatgtcaagcaagatcaagtcacttggcgtcaagatggtcatctctggtgagggttccgatgagattttcggagggtacctctacttccacaaggcacccaacaaagaggagctccaccgtgagacatgtcaaaagatcaaagctctgcatcagtacgattgcttgagggccaacaaggcaacatctgcatggggactcgaagcacgtgtgccattcctggacaaggagtttatcaatgaggcaatgagcatagatcctgagtggaagatgatccgacctgatcttggaagaattgagaagtgggtgctgaggaaagcatttgatgacgaggagcaaccattcctgccaaagcacattctgtacaggcagaaagagcagttcagtgatggtgttggctatagctggattgatggcctaaaggctcacgcagaatcaaatgtgaccgataagatgatgtcaaatgcaaagttcatctacccgcacaacaccccgactacaaaagaggcctactgttacaggatgatatttgagaggttcttcccccagaactcggcgatcctgacggtgccaggcgggccaagcgttgcatgcagcacggcaaaggcggtagagtgggatgctcagtggtcggggaacctggatccctcagggagagcagcacttggagtccatctctcggcctatgaacaggagcatctcccagcaaccatcttgacaggaaccagcaagaagccgaggatgatcgaggttgcagcgcctggtgtcgcaattgagagttgatggtgtcctgtcctgcttgccgtttctgataagaaataagatgtacctggtcttgccattagagtggtgcagacctaaggtttgagtgaagattgtgcattaatgtatctattgttcttatgaaatcggagaccggatgatttctaatccgaaaaaaaaaaaaaaa

SEQ ID NO: 3974 - protein, 585 aa, Triticum aestivum
  misc_feature: Ceres CLONE ID no. 819490
  misc_feature: Ceres CDNA ID no. 40351404
  misc_feature (2)..(37): Pfam Name: GATase_2 PFAM Desc: Glutamine amidotransferases class
  misc_feature (209)..(450): Pfam Name: Asn_synthase PFAM Desc: Asparagine synthase
MCGILAVLGCADDTQGKRVRVLELSRRLKHRGPDWSGMHQVGDCYLSHQRLAIIDPASGDQPLYNEDKSIVVTVNGEIYNHEQLRAQLSSHTFRTGSDCEVIAHLYEEHGENFIDMLDGVFSFVLLDTRDNSFIAARDAIGVTPLYIGWGIDGSVWISSEMKGLNDDCEHFEIFPPGHLYSSKQGGFKRWYNPPWFSEVIPSVPYDPLALRKAFEKAVIKRLMTDVPFGVLLSGGLDSSLVAAVTVRHLAGTKAAKRWGTKLHSFCVGLEGSPDLKAAKEVANYLGTMHHEFTFTVQDGIDAIEDVIYHTETYDVTTIRASTPMFLMSSKIKSLGVKMVISGEGSDEIFGGYLYFHKAPNKEELHRETCQKIKALHQYDCLRANKATSAWGLEARVPFLDKEFINEAMSIDPEWKMIRPDLGRIEKWVLRKAFDDEEQPFLPKHILYRQKEQFSDGVGYSWIDGLKAHAESNVTDKMMSNAKFIYPHNTPTTKEAYCYRMIFERFFPQNSAILTVPGGPSVACSTAKAVEWDAQWSGNLDPSGRAALGVHLSAYEQEHLPATILTGTSKKPRMIEVAAPGVAIES

SEQ ID NO: 3975 - DNA, 2099 bp, Triticum aestivum
  misc_feature: Ceres CLONE ID no. 819521
  misc_feature: Ceres CDNA ID no. 25891276
  CDS (172)..(1728): REFERENCED BY SEQ ID NO: 3976
aacaaacagaacacaaggaggggagcgggcggggaggccgttgcgtttcccgctattccctccttgcccaccgctccctatacaacctccacgccggctgcgtcgccttccccctgaggctccgcatcccccgcattcttgacctccccggcgcccacccgccggctcgccatgggcaactgctgcgcgggatccggggatgcggagcccgaggccgccgccgacccctccacgcgccgcgccggcgcctccgtccaggccggcggcgcctcgccctcctccgcgcccgcccagaacaagccgccggccgccatcggccccgttctcggccgccccatggaggacgtgcgcagcatctacaccgtcggcaaggagcttggccgcggccagttcgggatcaccagcctctgcacgcacaaggccacgggccagaagttcgcctgcaagaccatcgccaagcgcaagctgtccaccaaggaggacgtggaggacgtgcggcgcgaggtgcggatcatgtaccacctcgcggggcagcccaacatcgtggagctcaagggcgcctacgaggacaagcagtccgtgcacctcgtcatggagctctgcgccggcggcgagctcttcgaccggatcatcgccaagggcaaatacacggagcgcgccgccgcagccctgctccgcaccatcgtcgagatcatccacacctgccactccctcggcgtcatccaccgcgacctcaagcccgagaacttcctcctgctcagcaaggaggaggacgcgccgctcaaggccaccgacttcgggctatccgtcttctacaagcaaggggaggtgttcaaggacatcgtgggcagcgcctactacatcgcgccggaggtcctgaagcggaactacgggccggaggcggacatatggagcgtcggcgtcatcgtctacatccttctctgcggtgtccctcccttctgggcagaatcggagcacggcatcttcaattccatcctgagggggcagatcgacttcagcagcgacccatggccacgcatttcgcccggcgccaaggacctcgtcagaaagatgctcaactctgaccccaagaaaaggatatcagcctacgacgtcctcaaccatccatggatcaaggaagacggagaggcgcctgacacgccgctggacaacgccgtcatgaacaggctcaagcagttcaaggctatgaaccagttcaagaaagctgcgctaagggtcatcgccggatgcctgtcggaggaagagatcaggggtctcaaggagatgttcaagagcatggactcggacaacagcggcaccatcaccgtcgacgagctccggaagggtctgggaaaacaggggaccaagctcacggaggccgaagtggagcagctcatggaagccgccgacgccgacgggagcgggacgatcgactacgaggagttcatcacagcgacgatgcacatgaacaggatggaccgggaagagcacctctacaccgccttccagtacttcgacaaggacaacagcggctacatttccaaggaggagctcgagcaggcccttcgggagaaggggctcctggacggcagagacatgaatgaaatcgtgtcggaagtcgacgccgacaacgacgggaggatcgactacagcgagttcgtggcgatgatgaggaaaggggcccccgagggggccaaccccaagaaacggcgcgacgtcatgctataggagacggcgggttggtggaggaagccgccggccgatcggcgacagaacagcaagcgatcgagcgcgcgtgcgaggccgctcgcaacgacgacgacgatgggctcgtgtacatttttcacagaaggggtcgagtagcaaatgttcatatatataccgtgggattgggaatcgaaaatgttcgtacgctgtcgggcgctcatcttcttcttctctggttctgctggttcccttgacttgttagtatgtatacatcagttgagtaagttggcattttttagcctgaatttgtacacggtttcaggcttggaaatgtacaggtatgtaacttgagtgaactaacgagtgtgtttttgacaaaaaaaaaaaaaaaa

SEQ ID NO: 3976 - protein, 518 aa, Triticum aestivum
  misc_feature: Ceres CLONE ID no. 819521
  misc_feature: Ceres CDNA ID no. 25891276
  misc_feature (404)..(432): Pfam Name: efhand PFAM Desc: EF hand
  misc_feature (63)..(319): Pfam Name: Pkinase_Tyr PFAM Desc: Protein tyrosine kinase
  misc_feature: Homolog of GI Number: 29028976 NR Desc: At5g04870
  misc_feature: Homolog of GI Number: 53850561 NR Desc: At5g12180
  misc_feature: Homolog of GI Number: 4336426 NR Desc: Ca2+
  misc_feature: Homolog of GI Number: 50948895 NR Desc: ESTs C22369
  misc_feature: Homolog of GI Number: 23306121 NR Desc: Putative calcium dependent protein kinase
  misc_feature: Homolog of GI Number: 6721111 NR Desc: T4O12.25
  misc_feature: Homolog of GI Number: 23491794 NR Desc: calcium dependent protein kinase 13
  misc_feature: Homolog of GI Number: 2944385 NR Desc: calcium dependent protein kinase
  misc_feature: Homolog of GI Number: 15289758 NR Desc: calcium dependent protein kinase
  misc_feature: Homolog of GI Number: 15289760 NR Desc: calcium dependent protein kinase
MGNCCAGSGDAEPEAAADPSTRRAGASVQAGGASPSSAPAQNKPPAAIGPVLGRPMEDVRSIYTVGKELGRGQFGITSLCTHKATGQKFACKTIAKRKLSTKEDVEDVRREVRIMYHLAGQPNIVELKGAYEDKQSVHLVMELCAGGELFDRIIAKGKYTERAAAALLRTIVEIIHTCHSLGVIHRDLKPENFLLLSKEEDAPLKATDFGLSVFYKQGEVFKDIVGSAYYIAPEVLKRNYGPEADIWSVGVIVYILLCGVPPFWAESEHGIFNSILRGQIDFSSDPWPRISPGAKDLVRKMLNSDPKKRISAYDVLNHPWIKEDGEAPDTPLDNAVMNRLKQFKAMNQFKKAALRVIAGCLSEEEIRGLKEMFKSMDSDNSGTITVDELRKGLGKQGTKLTEAEVEQLMEAADADGSGTIDYEEFITATMHMNRMDREEHLYTAFQYFDKDNSGYISKEELEQALREKGLLDGRDMNEIVSEVDADNDGRIDYSEFVAMMRKGAPEGANPKKRRDVML

SEQ ID NO: 3977 - DNA, 1139 bp, Triticum aestivum
  misc_feature: Ceres CLONE ID no. 819553
  misc_feature: Ceres CDNA ID no. 29191558
  CDS (88)..(834): REFERENCED BY SEQ ID NO: 3978
cttcccaaaccctccccgaccgccgaccccgttcgcctccgccgccgcctagccaccacgcgccaggagaaccccgcgccgccggccatggcggaggaggagggcacgcagcagctgccgttcgtgcgggagacggtcctcaagaagaggaaggacaacgaggagtgggccaccaagaaccgggagcgcaaggcggccaagaggcagcgccgccgccacgacgccaagggcgccatcaagcgtcccgaggacttcgtcagggagttccgcaacaaggagctcgacttcctgcggatgcggacgcgcctcaaggtccggaacctgcgccccgccgaggccatcgacgccaagctgctcttcgccatccgcatcccaggcaccgctgacttgcacccgcaaatcaggaagatcttggccaggctgcggctcacccaggtcctcaccggcgtcttcctcaaggccaccgagacaaacctcaagaggcttgctgctgtcggaccgtttgtcacctatgggttccccaatttgaagaatgtgaaggagctaatttacaagaagggtcgcggatatttcgacaaggagcctttcccccttaccagcaatgatctaatcgagaaggcacttggagaacacggcgtcatatgtttggaagacgtggtgcatgaaatctccactgtcgggccgcacttcagagaaacggcgagctttctcatgcccttcaagctcaagtgtccagagaggaggctgcagatgaagaagaaacccttcaaggatggtggcgactcgggcaaccgtggggacaagatcaacgagctactcgagaagctgaactgaggcagtcctcagacaagcgatggatccgttattaccttgtcggttttgtaatagcatagctgaatgtacctttgtttcggaaaccctgcccgagtgtttgggatcagatcacgaaatagcagaaactgttcttctcccctgcccttggttgtgtgcacgctctgcgcttcgtgatcgatcagccgtgctttgctgaaactagctgttcacagtgtttacttgtaccaacaggcttgcctgggtagttgattcgtgaggttggatgatattgcaacaaaacatcaggttcaaaaaaaaaaaaaaaa

SEQ ID NO: 3978 - protein, 248 aa, Triticum aestivum
  misc_feature: Ceres CLONE ID no. 819553
  misc_feature: Ceres CDNA ID no. 29191558
  misc_feature (16)..(84): Pfam Name: Ribosomal_L30_N PFAM Desc: Ribosomal L30 N
  misc_feature (88)..(140): Pfam Name: Ribosomal_L30 PFAM Desc: Ribosomal protein L30p/L7e
  misc_feature: Homolog of GI Number: 50948123 NR Desc: putative 60S ribosomal protein L7
  misc_feature: Homolog of GI Number: 83283989 NR Desc: putative 60S ribosomal protein L7
  misc_feature: Homolog of GI Number: 27765020 NR Desc: At1g80750
  misc_feature: Homolog of GI Number: 19310657 NR Desc: putative ribosomal protein L7
  misc_feature: Homolog of GI Number: 50942629 NR Desc: putative 60S ribosomal protein L7
  misc_feature: Homolog of GI Number: 445613 NR Desc: ribosomal protein L7
  misc_feature: Homolog of GI Number: 77999275 NR Desc: thaliana 60S ribosomal protein L7
  misc_feature: Homolog of GI Number: 11994560 NR Desc: 60S ribosomal protein L7
  misc_feature: Homolog of GI Number: 21593176 NR Desc: 60S ribosomal protein L7
  misc_feature: Homolog of GI Number: 3212879 NR Desc: 60S ribosomal protein L7
MAEEEGTQQLPFVRETVLKKRKDNEEWATKNRERKAAKRQRRRHDAKGAIKRPEDFVREFRNKELDFLRMRTRLKVRNLRPAEAIDAKLLFAIRIPGTADLHPQIRKILARLRLTQVLTGVFLKATETNLKRLAAVGPFVTYGFPNLKNVKELIYKKGRGYFDKEPFPLTSNDLIEKALGEHGVICLEDVVHEISTVGPHFRETASFLMPFKLKCPERRLQMKKKPFKDGGDSGNRGDKINELLEKLN

SEQ ID NO: 3979 - DNA, 1635 bp, Triticum aestivum
  misc_feature: Ceres CLONE ID no. 820001
  misc_feature: Ceres CDNA ID no. 36699933
  CDS (69)..(1421): REFERENCED BY SEQ ID NO: 3980
acacgcgattccacgacaacggccccgcccccgccccccgaccaaccggatccaaatcgccgcccgccatggatttcctcttcaactcgctcgccgcgcccgacccggcctccccgccgccggagccggaggccgccgcggggtcctcctcgtcctccccgcccgccgactccggcgacgggggcgggtggggcggcttcggcgggctgctcaagaccctcacctcccagtccgagaccgtgctggacgcctaccgccgcgacctcgccgagttcagcaccggcctgcgccgcgagaccgacgcgctccgcgaggccgccgcccaggcggcccgggacctcccctcctcggccctcgcgctcgacggcctcgccgacatcgtcgcccagggcaagggcgccatcgcccaggtcgccgccaccgccgccgcctccgcagcctccccgcccgcgccctccgacgccggcggccccgactccgaccccggccccgcctcgggccacctgcggtactacagccgcttcgaggcgcagctgcgcgcgctccagtcggatccggccaccttcacagccgatcccgaggacgccgaggacttcgcggcctggggcgcggggtttagcctccaggagaggcaggacgagatcgaggcgctctgctacgagagcgacgccgtggaagggatggtggacaggctcgtccccgacgccgtggacggcgaggtgttctgggccaggtacttctaccgcgtccacaagctcaagcagcaggaggacgccagggccaagctcgtcaagcgggtcatcgcgcaggaggaagaggaggatttgagctgggaggtggatgacgaggttgaggaggaggagccggcaaaagaggaggcgatcaagcaagcaccgatcaaagaagaaccgaaacctgaagtacaggaaagagaaaatgagaaactggaggcagaaggcagagtcaatgcagttgaagaggccggtgctctggataaggaatggaagaaggctgattcaccgcagccggatgttttcggtagctctatggtggtagtcgacaaggaggagaaagaagatgcatcgaaattgaatgttgaagaatcaagtgacaagaaaactgctgctgaggaaccacattctaccactggagatgctgcggtgaaagaagggacaaagcatgagacaagtgactcgagcaaggatagcgactactccatggtgtctagacagcgaacagcgaccgaggaggatctcgaatgggacgagattgaggatctcggggagcatgaggagaagaaggggagcgctcatggctcaagctctgctccaaaggaggagctacgtaagaggctcagtgtcgcagaagacgacgaggatttgagttgggacattgaggatgatgatgatgataaggcctgaaaagccattctggtatggtagtgtcgattgtattgtctacattttttatataccattactgtgcaagatactatcatgtgaccaataaacattggtttagctgcgctgcttatgttatggatacgtgtgtaaactcaagtttgatgttatcaagtggcatttggcaatgcgtcaatttgctagtaatatgtttgtgtcaaaaaaaaaaaaaaaa

SEQ ID NO: 3980 - protein, 450 aa, Triticum aestivum
  misc_feature: Ceres CLONE ID no. 820001
  misc_feature: Ceres CDNA ID no. 36699933
  misc_feature (172)..(237): Pfam Name: BSD PFAM Desc: BSD domain
  misc_feature: Homolog of GI Number: 18413928 NR Desc: BSD domain
  misc_feature: Homolog of GI Number: 6523547 NR Desc: hydroxyproline
  misc_feature: Homolog of GI Number: 14253159 NR Desc: VMP3 protein
  misc_feature: Homolog of GI Number: 51871597 NR Desc: zgc:100785
  misc_feature: Homolog of GI Number: 72072165 NR Desc:  similar to BSD domain containing protein
  misc_feature: Homolog of GI Number: 12018147 NR Desc: vegetative cell wall protein gp1
  misc_feature: Homolog of GI Number: 60678627 NR Desc: plus agglutinin
MDFLFNSLAAPDPASPPPEPEAAAGSSSSSPPADSGDGGGWGGFGGLLKTLTSQSETVLDAYRRDLAEFSTGLRRETDALREAAAQAARDLPSSALALDGLADIVAQGKGAIAQVAATAAASAASPPAPSDAGGPDSDPGPASGHLRYYSRFEAQLRALQSDPATFTADPEDAEDFAAWGAGFSLQERQDEIEALCYESDAVEGMVDRLVPDAVDGEVFWARYFYRVHKLKQQEDARAKLVKRVIAQEEEEDLSWEVDDEVEEEEPAKEEAIKQAPIKEEPKPEVQERENEKLEAEGRVNAVEEAGALDKEWKKADSPQPDVFGSSMVVVDKEEKEDASKLNVEESSDKKTAAEEPHSTTGDAAVKEGTKHETSDSSKDSDYSMVSRQRTATEEDLEWDEIEDLGEHEEKKGSAHGSSSAPKEELRKRLSVAEDDEDLSWDIEDDDDDKA

SEQ ID NO: 3981 - DNA, 1700 bp, Triticum aestivum
  misc_feature: Ceres CLONE ID no. 820065
  misc_feature: Ceres CDNA ID no. 40041331
  CDS (150)..(1553): REFERENCED BY SEQ ID NO: 3982
gcaacacagcacgccccaacaaccccaccgcccaagaacacgccacaggaaagagaagaatctccggcccgtcctgtcctaatcgcaccggcgagaacgcgggcgggctagctagctagctccggcgaggccggagacgggagacgcccatggagtacaagaggtcatcgcatgtggaggaggacgaggagctggaggaggaggaagaggaagaggaggacgatgaggaggaggaggacgaggagggggcgatgcgggaccgtcggcaccagcaccagcaccagcacccgcaccatcatcgccaccactacaccatggcgccggccgcggccgcgcccccgcagcacctgcacatgcagggccaggctccgcaggttcttggctcgcctgccgcggctgcctcctcgccctcctccttgatggaggccgcggctttctccaggcccctcctgcctcccaactcctccctcgtctcctcgccgccgccaccgcaggcgccgcccggcttcctccagccccagcaccagcatccccaccggagaagggtggaccgcgagagggagcgggagaggacggtggaggcgcctggggaggcccaccgtcagcagcagcagcagccgcagccgcagcaccagcagcgccatcaggagccggcgaggaatggcgtgcttggcggtggcaccatgcctcccccgccgcctacgcttgccatcgtgaccggcggcgccacaagggcgccgggcgagcacggtggcgcctcgggcccggagcccctgccgtggaggtacagggagtgcctgcggaaccacgccgcgcggatgggcgcgcacgtgctcgacggctgcggcgagttcatgccgtccccgggcgacgggcccgccgcgctggcctgcgccgcgtgcggctgccaccgcagcttccaccgccgcgagccggtggtgctgctcccctcgccctctccgtcccccgcctccgccgtggtgtccccctccgcgaccccggccggcgccaactcccggctcatgccgctcctcctcgccccgccgcacatgcagcagaagcgcccgcacgtcccggcgtccccgatgtccgcgcccgccgcgctggccgagtcgtcgagcgaggagctgcgcgccccgccgccgccgccccctccgccgcaggcgcaggcgcaggcggccgcgggcgggtcggcctccgcgcccccggcgccgagcaagaagcggttccggaccaagttcacgccggagcagaaggagcgcatgctggagttcgcgcaccgcgtgggctggcgcgtgcagaagcccgacggcggcgtggtggacgccttctgcgcgcaggtcggcgtgccccgccgcgtcctcaaggtgtggatgcacaacaacaagcacctcgccaagacctcggccacgtccccgccgccgctgccgccgctccaccacgaccccagtcctcctcctccccaccagcaccagcaccagcaccagcaccagcaccaccccgcgccgccgccccaccatcagcagcagcagcagcagcagcacggcgcatgagcgagcgagcgggcagcagcagcagcacaacgctagaggatgcattagccattagcagcatttttatcatttgtcccgtgtaattcccgtaacctcatcgtcgtcaggtgttaactcgtgcgtcggcagtcaaaaaaaaaaaaaaaa

SEQ ID NO: 3982 - protein, 467 aa, Triticum aestivum
  misc_feature: Ceres CLONE ID no. 820065
  misc_feature: Ceres CDNA ID no. 40041331
  misc_feature: Useful for making plants with modulated growth and phenotype characteristics
  misc_feature: The sequence is a functional homolog of  SEQ ID NO 126 in the  10/714,887 US patent application
  misc_feature: The sequence is a functional homolog of  SEQ ID NO 126 in the  11/435,388 US patent application
  misc_feature (208)..(266): Pfam Name: ZF PFAM Desc: ZF
  misc_feature: Homolog of GI Number: 50900288 NR Desc: putative ZF
  misc_feature: Homolog of GI Number: 77553350 NR Desc: ZF
  misc_feature: Homolog of GI Number: 50924422 NR Desc: OSJNBa0088K19.15
  misc_feature: Homolog of GI Number: 13277220 NR Desc: ZF
  misc_feature: Homolog of GI Number: 70727923 NR Desc: zinc finger homeodomain protein 1
  misc_feature: Homolog of GI Number: 53689757 NR Desc: ZF
  misc_feature: Homolog of GI Number: 48057668 NR Desc: putative ZF
  misc_feature: Homolog of GI Number: 62733875 NR Desc: ZF
  misc_feature: Homolog of GI Number: 13277222 NR Desc: ZF
  misc_feature: Useful for making ornamental plants with modified flowers
MEYKRSSHVEEDEELEEEEEEEEDDEEEEDEEGAMRDRRHQHQHQHPHHHRHHYTMAPAAAAPPQHLHMQGQAPQVLGSPAAAASSPSSLMEAAAFSRPLLPPNSSLVSSPPPPQAPPGFLQPQHQHPHRRRVDRERERERTVEAPGEAHRQQQQQPQPQHQQRHQEPARNGVLGGGTMPPPPPTLAIVTGGATRAPGEHGGASGPEPLPWRYRECLRNHAARMGAHVLDGCGEFMPSPGDGPAALACAACGCHRSFHRREPVVLLPSPSPSPASAVVSPSATPAGANSRLMPLLLAPPHMQQKRPHVPASPMSAPAALAESSSEELRAPPPPPPPPQAQAQAAAGGSASAPPAPSKKRFRTKFTPEQKERMLEFAHRVGWRVQKPDGGVVDAFCAQVGVPRRVLKVWMHNNKHLAKTSATSPPPLPPLHHDPSPPPPHQHQHQHQHQHHPAPPPHHQQQQQQQHGA

SEQ ID NO: 3983 - DNA, 1676 bp, Triticum aestivum
  misc_feature: Ceres CLONE ID no. 820402
  misc_feature: Ceres CDNA ID no. 40041332
  CDS (198)..(1493): REFERENCED BY SEQ ID NO: 3984
gaaaaaacagaatctcaccgatttctaaaaaaaaaacagaatctcaccggtgcgtaccggaggttgagaggagtcgtggccgccgtgtcaagagtattcccgtgtcagaaagccacaccggcgccgcctccccccgccccatctccatccccgtctccgggaagcggcgaggagccttgcgctgcatcgccgtagagatggatctcctgaggaaggagctggagaagaagcggaaggcggcgacggccgacttcggcggtaagaactttgtccggcggtcggagctggaggacaagcagctccagaagcgccgccagatccccgccaaggttccttctgtgcccacccccaactcctccgccgcctccgaccctaccaactccaacgccgacccagcccaggccgggggcgggaaccctaaccctagctcctccgccgccgcggcctctgttccgcccgccctcgcggggaagaaggccacgccggaggatacgctccactccgaggagcgccgcattgatgagctcgtcctcccgcggaacgaggtcatgcggcgcctccgggtgctccgcgagccggtcacgttatttggggaggacgacgccgaccgccttgatcgcctcaagctcgtgctcaagtccggagccatcgacgacattgacgacctcgagatgacagaggggcagaccaacgatttcctccgtgacatgattgagctccgcatgcggcagaaggctggtcgagatgcctacggcaagggtaaaggcaagcgtgtaggtgctggtgatggcggcgagggtggcgccctgggagatgatgtggatgaaggggatggggatgcccggaggagtggggatgatgctgacgcagacaaggactcgaagcgaatgaagaccaagtttgaggagctttgtgatgaagacaagatcttagtcttcttcaagaggttgctcaatgagtggaaccaggagctggatgatatgacagagctggagaagcgttcggcaaagggaaagtcaatgtttgcaacattcaagcagtgtgcgcggtatctcagtcccctgtttgagttctgcaggaagaaggttcttcccgatgacatccgtaaagcattgctctttattgtggactgctgcatgaagcgtgattatttgcaagcaatggaccaatacatcaagctggccattggcaacgcgccatggcctattggagtcactatggttggtatccacgagcgttctgcccgagagaagatttacacgaacagtgtggctcatatcatgaatgacgagaccactcgcaagtaccttcagtcgatcaagaggctcatgaccctttgccagcggcgttatcctgctctgccctccaaatcagtggagttcaacagcctggcaaatgggagtgacctgcaggcccttctatcggaggagaagaatccaacgaaaggtccttctgaggacaggctccggctgatgccagcctcaaaagagtgaggcttcaacccacaagcttggatcagcaatataagtttggggtctttgtgtaatctaaactaaatgcgacatttcctgttatgtttccatttttgtactgacgcggaacaacagaagaatcatgtatgttagtcaaaattgctaaagaagctatgattatcagtgccaaaaaaaaaaaaaaaa

SEQ ID NO: 3984 - protein, 431 aa, Triticum aestivum
  misc_feature: Ceres CLONE ID no. 820402
  misc_feature: Ceres CDNA ID no. 40041332
  misc_feature (244)..(388): Pfam Name: Prp18 PFAM Desc: Prp18 domain
  misc_feature: Homolog of GI Number: 50938507 NR Desc: putative potassium channel regulatory factor
  misc_feature: Homolog of GI Number: 50918041 NR Desc: putative potassium channel regulatory factor
  misc_feature: Homolog of GI Number: 3776560 NR Desc: Similar to gbU51990 hPrp18
  misc_feature: Homolog of GI Number: 50918043 NR Desc: putative potassium channel regulatory factor
  misc_feature: Homolog of GI Number: 72008831 NR Desc:  similar to PRP18 pre
  misc_feature: Homolog of GI Number: 19924053 NR Desc: PRP18 pre
  misc_feature: Homolog of GI Number: 50731328 NR Desc:  similar to Pre
  misc_feature: Homolog of GI Number: 73949024 NR Desc:  similar to Pre
  misc_feature: Homolog of GI Number: 73949026 NR Desc:  similar to Pre
  misc_feature: Homolog of GI Number: 73949028 NR Desc:  similar to Pre
MDLLRKELEKKRKAATADFGGKNFVRRSELEDKQLQKRRQIPAKVPSVPTPNSSAASDPTNSNADPAQAGGGNPNPSSSAAAASVPPALAGKKATPEDTLHSEERRIDELVLPRNEVMRRLRVLREPVTLFGEDDADRLDRLKLVLKSGAIDDIDDLEMTEGQTNDFLRDMIELRMRQKAGRDAYGKGKGKRVGAGDGGEGGALGDDVDEGDGDARRSGDDADADKDSKRMKTKFEELCDEDKILVFFKRLLNEWNQELDDMTELEKRSAKGKSMFATFKQCARYLSPLFEFCRKKVLPDDIRKALLFIVDCCMKRDYLQAMDQYIKLAIGNAPWPIGVTMVGIHERSAREKIYTNSVAHIMNDETTRKYLQSIKRLMTLCQRRYPALPSKSVEFNSLANGSDLQALLSEEKNPTKGPSEDRLRLMPASKE

SEQ ID NO: 3985 - DNA, 1574 bp, Triticum aestivum
  misc_feature: Ceres CLONE ID no. 820525
  misc_feature: Ceres CDNA ID no. 36582637
  CDS (102)..(1235): REFERENCED BY SEQ ID NO: 3986
accgctcacccccgccccctcctccaccgtctctgcccccgtcgcgccaccggacctccaccgccgctgccccgccccccccccccccttcccggtagaaaatggctgacgccgaggacatccagcccctcgtctgcgacaatggtaccggtatggtcaaggctgggttcgctggagatgatgctcccagggccgtcttccccagtatcgtgggtcgcccacgccacaccggtgtcatggtcgggatggggcagaaggacgcctacgttggtgacgaggcgcagtccaagaggggtatcttgactctcaagtaccccatcgagcacggtatcgtcagcaactgggacgacatggagaagatctggcatcacaccttctacaacgagctccgtgtcgccccagaggagcaccccgtccttctcactgaggcgccgctcaaccccaaggccaatcgtgagaagatgacacagatcatgtttgagaccttcaacactcctgctatgtacgtcgccatccaggccgtcctctcgctgtacgccagtggtcgtaccacaggtatcgtgctggactctggagatggtgtcagccacactgtccccatctacgaaggatatgctctcccccatgctatccttcgtctcgacttggctgggcgtgatctcaccgattacctcatgaagatcctgactgagcgtggttactcattcaccaccactgctgagcgggaaattgtgagggacgtgaaggagaagctgtcctacattgccctggactacgaccaggaaatggagacttccaagaccagctcttctgtggagaagagctatgagctgcctgatgggcaggttatcaccattggttctgagcgtttccgttgccctgaggtcctcttccagccatccttcattgggatggaagctgcaggtatccatgagaccacctacaactccatcatgaagtgcgacgtggatattaggaaggatctgtacggcaacattgttctcagtggtggtaccactatgttcactggaatcgctgataggatgagcaaggagatcactgccttggctcctagcagcatgaagattaaagttgttgctcctcctgaaaggaagtacagtgtctggatcggaggatccatcttggcatctctcagcaccttccagcagatgtggattgcgaaggctgagtacgacgagtctggcccatccatcgtgcacaggaaatgcttctaattcttcggacccaagaaagaaagccaagaggagcctttatcgcgaccctcctgcttcgtctctctattttgttgctgtttcttcgttagcgtggacaaagttttcggctgccctaccggtcaccgtttcctcctattcaaagactgtaatatctattgctacttgtgcttctcacttgtgattttggacacatatgttcggtttattcaatcaaattcaatcagatgcctggtgaggctactagagaaatacgggcggtgttctgattttgtcatgtgtcacctctatcttgttaaatgaataatatgaagtgtcttgatccgaaaaaaaaaaaaaaaa

SEQ ID NO: 3986 - protein, 377 aa, Triticum aestivum
  misc_feature: Ceres CLONE ID no. 820525
  misc_feature: Ceres CDNA ID no. 36582637
  misc_feature: The plant flowers significantly late compared to wild-type.
  misc_feature: The plant is abnormally small.
  misc_feature: Useful for making plants with modulated biomass
  misc_feature: Useful for making plants with modulated flowering time
  misc_feature (8)..(377): Pfam Name: Actin PFAM Desc: Actin
  misc_feature: Homolog of GI Number: 62657474 NR Desc:  similar to Actin
  misc_feature: Homolog of GI Number: 61835460 NR Desc:  similar to alpha
  misc_feature: Homolog of GI Number: 62664168 NR Desc:  similar to myosin
  misc_feature: Homolog of GI Number: 7629995 NR Desc: actin
  misc_feature: Homolog of GI Number: 7211789 NR Desc: actin 1
  misc_feature: Homolog of GI Number: 3420239 NR Desc: actin
  misc_feature: Homolog of GI Number: 22609 NR Desc: actin
  misc_feature: Homolog of GI Number: 295885 NR Desc: actin
  misc_feature: Homolog of GI Number: 50918345 NR Desc: actin
  misc_feature: Homolog of GI Number: 21536 NR Desc: actin
MADAEDIQPLVCDNGTGMVKAGFAGDDAPRAVFPSIVGRPRHTGVMVGMGQKDAYVGDEAQSKRGILTLKYPIEHGIVSNWDDMEKIWHHTFYNELRVAPEEHPVLLTEAPLNPKANREKMTQIMFETFNTPAMYVAIQAVLSLYASGRTTGIVLDSGDGVSHTVPIYEGYALPHAILRLDLAGRDLTDYLMKILTERGYSFTTTAEREIVRDVKEKLSYIALDYDQEMETSKTSSSVEKSYELPDGQVITIGSERFRCPEVLFQPSFIGMEAAGIHETTYNSIMKCDVDIRKDLYGNIVLSGGTTMFTGIADRMSKEITALAPSSMKIKVVAPPERKYSVWIGGSILASLSTFQQMWIAKAEYDESGPSIVHRKCF

SEQ ID NO: 3987 - DNA, 1704 bp, Triticum aestivum
  misc_feature: Ceres CLONE ID no. 820632
  misc_feature: Ceres CDNA ID no. 36530655
  CDS (147)..(1394): REFERENCED BY SEQ ID NO: 3988
attactacgactgcctttcccttcttccaagcaaaccgctcttcgcgtctcaggttcctccgcacaccgctccgccacagtcgacggatcggaaccgcagacccgcccccgccaccaaaccctagcccgccgccccgccgcccgcgatgtcggccgcggccgtcgcgccgagccctgcggcgccgctcccgtcggcgcccccgccgtcctaccccgcggcgccccccgccccctccgccgaggacgacgacgacctctacggccgcctcaagtccctccagcgccacatggagttcgtcgagatccaggaggagtacgtcaaggacgagcagaagaacctgaagcgcgagctgctgcgcgcgcaggaggaggtcaagcggatccagtccgtgccgctcgtcatcggccagttcatggagatggtcgacggcaacaacggcatcgtcggctccaccaccggcagcaactactacgtgcgcatcctcagcaccatcaaccgcgagctgctcaagccctccgcctccgtcgccctgcaccgccactccaacgccctcgtcgacgtgctgccccccgaggccgactccagcatctcgctcctcgcctcgtcggagaagcccaacgtcctgtactcggacattggaggatgtgatatccaaaaacaagaaattcgggaggcagttgagctaccattgacacaccatgaattgtacaagcagattggtattgatccaccaagaggggtgctgctctatggtcctccaggcactggcaagaccatgcttgctaaagctgtggcgcatcacactactgctgcttttatcagagtggttggttcagagtttgtgcagaagtacttgggtgagggcccaaggatggttcgagatgtattccgcttagctaaagagaatgccccggctataatattcattgatgaggttgatgctatagccactgctcgattcgatgctcagaccggggctgaccgagaagttcagcgtattctgatggagctactgaatcagatggatggatttgatcaaacagtgaatgtgaaggttataatggcaaccaatcgggcagatactctagatcctgctctgttgcgtccaggaagactggacaggaaaatcgagttccccctgccggaccggaggcagaagaggcttgttttccaagtttgtactgctaagatgaacttgagtgacgaggttgatttggaagattatgtctccagacctgataaaatcagtgctgctgatatcactgctatttgccaggaagctggcatgcatgctgtccgcaaaaatcggtatgttatcctccccaaggacttcgagaagggttaccgaaccaacgtcaagaagcctgagtcagactttgacttctacaaataaggcagcaaacttttaaagaggatgctttatttcctacaggcgacatgattaacactctagatgaatttgtggatagtcgcctgatagtaatatcgttgtatccccgtgctcgtgtagtttgcacgttcagtctcaccagtgttgttaagctacttgtctgtacaattccttcctaaagtttcgcttgaccattttgcgcttttggaggctgtgatttgtcttccaaaggagaatcgagtacccccttttcgttcttaaagtttaaagtgcattaatctttttgattgaatttcgaaaaaaaaaaaaaaaa

SEQ ID NO: 3988 - protein, 368 aa, Triticum aestivum
  misc_feature: Ceres CLONE ID no. 820632
  misc_feature: Ceres CDNA ID no. 36530655
  misc_feature (150)..(171): Pfam Name: NACHT PFAM Desc: NACHT domain
  misc_feature: Homolog of GI Number: 1172638 NR Desc: 26S protease regulatory subunit 6B
  misc_feature: Homolog of GI Number: 23480119 NR Desc: 26S proteasome ATPase
  misc_feature: Homolog of GI Number: 42602319 NR Desc: 26S proteasome regulatory complex ATPase RPT3
  misc_feature: Homolog of GI Number: 17298145 NR Desc: 26S proteasome regulatory particle triple
  misc_feature: Homolog of GI Number: 45198912 NR Desc: AFR394Wp
  misc_feature: Homolog of GI Number: 56382019 NR Desc: At5g58290
  misc_feature: Homolog of GI Number: 55241740 NR Desc: ENSANGP00000017654
  misc_feature: Homolog of GI Number: 55241741 NR Desc: ENSANGP00000023984
  misc_feature: Homolog of GI Number: 54643817 NR Desc: GA14216
  misc_feature: Homolog of GI Number: 1155334 NR Desc: POTATP1
MEFVEIQEEYVKDEQKNLKRELLRAQEEVKRIQSVPLVIGQFMEMVDGNNGIVGSTTGSNYYVRILSTINRELLKPSASVALHRHSNALVDVLPPEADSSISLLASSEKPNVLYSDIGGCDIQKQEIREAVELPLTHHELYKQIGIDPPRGVLLYGPPGTGKTMLAKAVAHHTTAAFIRVVGSEFVQKYLGEGPRMVRDVFRLAKENAPAIIFIDEVDAIATARFDAQTGADREVQRILMELLNQMDGFDQTVNVKVIMATNRADTLDPALLRPGRLDRKIEFPLPDRRQKRLVFQVCTAKMNLSDEVDLEDYVSRPDKISAADITAICQEAGMHAVRKNRYVILPKDFEKGYRTNVKKPESDFDFYK

SEQ ID NO: 3989 - DNA, 1295 bp, Triticum aestivum
  misc_feature: Ceres CLONE ID no. 820885
  misc_feature: Ceres CDNA ID no. 40351405
  CDS (174)..(959): REFERENCED BY SEQ ID NO: 3990
accaatcatttcctcctcactctcgcttctccttttctgccttccaaccgaagccccatcccttgattccatccatcgttcgggatcctcctcctctcgcgcgcttctaggacccgtccgccctgggcaagttcgaggagatcgtggccgcgtccaaggggaagcagatcgtcatgttcctggactacgacggcacgctgtcccccatcgtcgatgaccccgacgccgccttcatgagcgagacgatgcggatggccgtgcgcagcgtggccaagcacttcccgacggcgatcgtcagcggtcggtgccgcgacaaggtgtttgatttcgtgaagctggcggagctctactacgccggcagccacggcatggacatcaagggcccggccaagtcctcaaagtccaaggccaaaggagttctcttccaaccagcaagcgagttcctgcccatgatagaagaggtgcatcagcggctgatagaggagacgaagcacgtagccggggccaaggtggagaacaacaagttctgcgtgtccgtccacttcagatgcgtcgacgaaaagagctggggcgcgctggcggagacggtgaagggcgtgatgcgggagtacccgaagctgcgcatgtcgcaggggcggatggtgttcgaggtgcggcccaccatcaagtgggacaagggcaaggccctcgagttcctgctcgagtcgctgggcttcgccgactgccccaacgtgctccccgtctacatcggcgacgaccgcaccgacgaggacgccttcaaggtgctgcgccggcggggccagggcgtcgggatcctcgtctccaagcaccccaaggacaccagcgcctccttctcgctgcaggagccggccgaggtcatggagttcctgctccgcctcgtcgagtggaagcagctctccaaggcgcgcctcaggctgcggcggcaggccgacgcctgatcggacgacgaggatcggccggccggcgggaatggccgaactaattatttcactgctacgtgtagcttagctagttaatgaaaatcccctgcttgctcatccgaacaaagccaaaggctacgtacgtggatgggaagaaggaacgtactacggcgaacctgcggagcattgttgcgccacatgttgtgttctaattaaccgtccttctttttctggggatgtataccgtacctaccgattatgcatgcatgtaaattacctttgtccacgtacaaggggaggaaccatggaataaacaaagagaaatctgagtaaataacaaaaaaaaaaaaaaaa

SEQ ID NO: 3990 - protein, 261 aa, Triticum aestivum
  misc_feature: Ceres CLONE ID no. 820885
  misc_feature: Ceres CDNA ID no. 40351405
  misc_feature (2)..(233): Pfam Name: Trehalose_PPase PFAM Desc: Trehalose
MFLDYDGTLSPIVDDPDAAFMSETMRMAVRSVAKHFPTAIVSGRCRDKVFDFVKLAELYYAGSHGMDIKGPAKSSKSKAKGVLFQPASEFLPMIEEVHQRLIEETKHVAGAKVENNKFCVSVHFRCVDEKSWGALAETVKGVMREYPKLRMSQGRMVFEVRPTIKWDKGKALEFLLESLGFADCPNVLPVYIGDDRTDEDAFKVLRRRGQGVGILVSKHPKDTSASFSLQEPAEVMEFLLRLVEWKQLSKARLRLRRQADA

SEQ ID NO: 3991 - DNA, 1878 bp, Triticum aestivum
  misc_feature: Ceres CLONE ID no. 821581
  misc_feature: Ceres CDNA ID no. 25447374
  CDS (189)..(1673): REFERENCED BY SEQ ID NO: 3992
accaccaccatctctgttctctcctctgtccctctcgcacaacagaagaaaaaccaactacctcctcctacgctccggtgagtcagctcggctctctgctccgtcagctgctctccggcggctcgcccggggagccgcgttctccttccggcagggggttaactaatttgggcttcctgacatcacagatggccgcagcggtggctgacgcggcggtgccggcggcggcgagggcgaacggcgccggggcggggtgctgcgcggcgaaggggcccggctacgccacgccgagggaggccatggagaagggcccgcgggaggggctcctctacgtcacctgcgtctacaatggtactggaatcgacaagccggattacctggccacggtggacgtcgaccccaattctgcgacctactcccaggtgatccacaggctcccggcgacgcacatcggcgacgagctgcatcactccggctggaacgcctgcagctcctgccacggcgatccgtccacgagccggcgcttcttgattcttccttccttgctgtctggtcgcgtgtatgtggtcgacactgcgaaggatccgagggcgcctgctctgcacacggttgtccaggctgaggacattgctgagaagaccgggcttgggttccctcacacatcccattgccttgcaactggtgatataatgatttcctgcctgggagacaaggagggaaatgctgctggcaatggctttctcctattggattcagagtttaacgtcaaaggacgttgggaaaagccaggccacagccccttgtttggctatgatttctggtaccagcctcgtcacaagacgatgattagttcttcatggggagccccggcagctttcaggacaggttttgatctccagcatgtccaggatggtctctatggaaggcacctgcatgtgtatgactggcctggtggtgagctcaagcagacgctggatctaggcagcacaggtcttcttccgctggaggtgaggtttttacacgacccatcaaaggacaccggctatgttggctgtgctttgacaagcaacatggtgagattcttcaaaactgcagatggatcatggagccatgaggtagctatatccatagaaccattgaaggtgcgcaactggatgctgccagaaatgccaggattgataactgactttgtcatctctctcgatgaccgctatctctacttggtcaactggcttcatggggatatcaggcagtacaacattgaggaccctgcaaagcctgtgttggctggacaagtgtttgtaggtgggcttcttcaaaagggcagtgatgttgtctatgtgaccgacgatgacaaagaagagcagtatgctgtgccccaagtcaaggggaatcggcttagaggtgggccgcagatgattcagctgagcttggacggcaagagggtgtatgtgaccaactctctcttcagccggtgggacgagcagttctacggccctgaccttctcaagaagggatctcacatgttgcagatcgacgtcgacactgaggaaggagggctggctgtcaaccccaacttctttgttgatttcgggaccgagcctgaaggtccctccttggcccatgagatgagatatcctggtggagactgcacctctgacatatggatctaggaggaagggtgtaggacacaggcagctggagatccatggtgttgagctcactgtaattaagatggtttcttcactgcctgcggtgttgtatgtgatgtggtatcaattggaataagttcctgatagaacctctgacattggcatcatgggagcttgtgccgtaataagagttgcctctgattctgaattaaaaaaaaaaaaaaaa

SEQ ID NO: 3992 - protein, 494 aa, Triticum aestivum
  misc_feature: Ceres CLONE ID no. 821581
  misc_feature: Ceres CDNA ID no. 25447374
  misc_feature (25)..(494): Pfam Name: SBP56 PFAM Desc: 56kDa selenium binding protein
  misc_feature: Homolog of GI Number: 22137196 NR Desc: AT4g14040/dl3061c
  misc_feature: Homolog of GI Number: 68385138 NR Desc:  similar to Selenium binding protein 1 isoform 1
  misc_feature: Homolog of GI Number: 68385141 NR Desc:  similar to Selenium binding protein 1 isoform 3
  misc_feature: Homolog of GI Number: 68385144 NR Desc:  similar to Selenium binding protein 1 isoform 4
  misc_feature: Homolog of GI Number: 57098813 NR Desc:  similar to selenium binding protein 1
  misc_feature: Homolog of GI Number: 73981582 NR Desc:  similar to selenium binding protein 1
  misc_feature: Homolog of GI Number: 72045768 NR Desc:  similar to selenium binding protein 1
  misc_feature: Homolog of GI Number: 61829782 NR Desc:  similar to selenium binding protein 1
  misc_feature: Homolog of GI Number: 7488184 NR Desc: probable selenium
MAAAVADAAVPAAARANGAGAGCCAAKGPGYATPREAMEKGPREGLLYVTCVYNGTGIDKPDYLATVDVDPNSATYSQVIHRLPATHIGDELHHSGWNACSSCHGDPSTSRRFLILPSLLSGRVYVVDTAKDPRAPALHTVVQAEDIAEKTGLGFPHTSHCLATGDIMISCLGDKEGNAAGNGFLLLDSEFNVKGRWEKPGHSPLFGYDFWYQPRHKTMISSSWGAPAAFRTGFDLQHVQDGLYGRHLHVYDWPGGELKQTLDLGSTGLLPLEVRFLHDPSKDTGYVGCALTSNMVRFFKTADGSWSHEVAISIEPLKVRNWMLPEMPGLITDFVISLDDRYLYLVNWLHGDIRQYNIEDPAKPVLAGQVFVGGLLQKGSDVVYVTDDDKEEQYAVPQVKGNRLRGGPQMIQLSLDGKRVYVTNSLFSRWDEQFYGPDLLKKGSHMLQIDVDTEEGGLAVNPNFFVDFGTEPEGPSLAHEMRYPGGDCTSDIWI

SEQ ID NO: 3993 - DNA, 1708 bp, Triticum aestivum
  misc_feature: Ceres CLONE ID no. 822001
  misc_feature: Ceres CDNA ID no. 25445667
  CDS (127)..(1584): REFERENCED BY SEQ ID NO: 3994
tagctagctagtgttatccgttagccgatgccgttggctggctttcgatcgatcacacgagacatgtggaaaccacgggcggccatgtattcagttcgtcgttagcgcgcgcgtagcagatagaagatggacgccttggcggggctctcggcccttgccgcggtggcgctgctgctgctgtacagcgtgcaccggtggaggagccctcggtgcaacggccggctcccgccggggtctatgggcctcccgctcgtcggcgagacgttccagttcttctccccggacgcctccttggacatccctcgcttcatccgacacaggctcacgaggtacggcccgatcttcaagacgagcgtggtggggcacccgatggtggtgtcggcggaccaggagctgaaccacatggtgttccagcaggagggggagctgttccagagctggtacccggactcgttcgtggagatcctcggccgcgataacgtcggggagcagaagggcaccatgttcaagtacctcaagaacatagttctcaggtacttcggcccggagagccttaaggagtccatccttggcgacgtcgagcgcgccgtctgcagctcgctctgcacctggtccaccctgccggccgtcgagctcaaagaagccgtctccaccatggtgtttgaactttccgcgagcaagctgctgggcctggagccgtcgaggtccaaggttctacggaagagcttcttcgacttcgtcagagggctcatctccttcccgctctacttgccaggaacagcctactacgcatgcatgcagggacggatgagtgtaatggaggtgctgcagcaggtgctggaggagaggacgagatcggctgaggcggccggaggacgggaagcacggtgccacggcgacttcctggactacgtcgtgcaggagatcaccaaggagaagcctgtcctgacggagggaatggcgctggacctcctgtttgtgctcctcttcgccagcttccacacgacgtcgctggccatcaccctggccgtcaagctcctcaccgagcaccctcgcgtcctggaggagctcacggtggagcatgaaacgattctgaacgagcgtgaggcaggcggcgagtctgatggcgacagagttacatggaaagagtacaaatccatgacattcacatcccaggtgataaacgagacggtccgactggccaacattgcgcctggcatcttcagaaagacactgaaagatgtacagttcagaggatacacaattccagctggatggggagtgatggtctgccctctcgcggtgcaccttaatccagatatttaccctgaccccctcaccttcaatccttcaaggttcaaggataaactagaggcaaaccgtgggttaagacacttcatggctttcggaggaggtctccggtcctgtgttggggcagacttcagcaagctacaaatggccattttccttcactttcttgtcaccaaatataggtggatacaactaggtggaggcaagatagtccggtgtccagggctggaatttcctgatggttacctcattcagatcagacagagagattaatcagcacctgctttcaagtcatgctagcagtaggaaaagcttatatctcacgtgtacaattgttctagcatgttgtttgatgaaataacacttgtgcagaagtattacaaaaaaaaaaaaaaaa

SEQ ID NO: 3994 - protein, 485 aa, Triticum aestivum
  misc_feature: Ceres CLONE ID no. 822001
  misc_feature: Ceres CDNA ID no. 25445667
  misc_feature (34)..(102): Pfam Name: p450 PFAM Desc: Cytochrome P450
  misc_feature: Homolog of GI Number: 50928055 NR Desc: OSJNBa0088I22.12
  misc_feature: Homolog of GI Number: 50928047 NR Desc: OSJNBa0088I22.16
  misc_feature: Homolog of GI Number: 9502380 NR Desc: T12C24.27
  misc_feature: Homolog of GI Number: 20520627 NR Desc: putative cytochrome P450
  misc_feature: Homolog of GI Number: 50253253 NR Desc: putative cytochrome P450
  misc_feature: Homolog of GI Number: 47155289 NR Desc: cytochrome P450
  misc_feature: Homolog of GI Number: 18483228 NR Desc: putative cytochrome P450
  misc_feature: Homolog of GI Number: 50928053 NR Desc: OSJNBa0088I22.13
  misc_feature: Homolog of GI Number: 50917409 NR Desc: putative hydroxylase
  misc_feature: Homolog of GI Number: 15222806 NR Desc: cytochrome P450
  misc_feature: Useful for making plants with altered leaf shape eg curled leaves
  misc_feature: Useful for making plants with increased biomass and foliage
  misc_feature: Useful for making shorter plants
  misc_feature: Useful for making smaller plants
  misc_feature: Useful for sterility
MDALAGLSALAAVALLLLYSVHRWRSPRCNGRLPPGSMGLPLVGETFQFFSPDASLDIPRFIRHRLTRYGPIFKTSVVGHPMVVSADQELNHMVFQQEGELFQSWYPDSFVEILGRDNVGEQKGTMFKYLKNIVLRYFGPESLKESILGDVERAVCSSLCTWSTLPAVELKEAVSTMVFELSASKLLGLEPSRSKVLRKSFFDFVRGLISFPLYLPGTAYYACMQGRMSVMEVLQQVLEERTRSAEAAGGREARCHGDFLDYVVQEITKEKPVLTEGMALDLLFVLLFASFHTTSLAITLAVKLLTEHPRVLEELTVEHETILNEREAGGESDGDRVTWKEYKSMTFTSQVINETVRLANIAPGIFRKTLKDVQFRGYTIPAGWGVMVCPLAVHLNPDIYPDPLTFNPSRFKDKLEANRGLRHFMAFGGGLRSCVGADFSKLQMAIFLHFLVTKYRWIQLGGGKIVRCPGLEFPDGYLIQIRQRD

SEQ ID NO: 3995 - DNA, 837 bp, Triticum aestivum
  misc_feature: Ceres CLONE ID no. 822286
  misc_feature: Ceres CDNA ID no. 25891259
  CDS (160)..(609): REFERENCED BY SEQ ID NO: 3996
ccaacatattacctcggcccatgcagctcttcactgactaaaccccaacgccccggacgtataaaatcgcccactcctcgcaatcacctgcctacgccgccgccgctcctccctgatcccgccgccgccgccgtgctctcgccaggcaccaccgcaaacatggctgctgtcctcacccgcccgacgccgggcacggtccagtgcttcgggcgcaagaagacggcggtggccgtcgcgtacaccaagccagggcgcggcctcatcaaggtgaacggcgctcccatcgagctgatccgcccggagatgctccgcctcaaggcgttcgagcccatcatgctcgccggccgctcccgcttcaaggacatcgacatgaggatccgctttcgcggcggcgggaagacctcccagatctacgccatccgtcaggccgtcgccaaggcgctcgtcgcctactaccagaagtatgtcgacgaggccgccaagaaggaggtcaaggacatcttcgcccgctacgaccgtaccctcctcgtcgccgacccccgtcgctgcgagcccaagaagttcggtggtcgcggcgcccgcgcgaggttccagaagtcttaccgttgattggcctgcaggatcgtcgactattgggtggttttctctgctttacctcccaagttttagactccgtatgattagttccgtaccttggcaagatattgtggtatgatttgctgtgagatgttttaagactactactgggtagttgctcgattgtgttatttacttgttatgttaaggaattttgatatggttgcgtacttgcactatattttaaaaaaaaaaaaaaaa

SEQ ID NO: 3996 - protein, 149 aa, Triticum aestivum
  misc_feature: Ceres CLONE ID no. 822286
  misc_feature: Ceres CDNA ID no. 25891259
  misc_feature (17)..(149): Pfam Name: Ribosomal_S9 PFAM Desc: Ribosomal protein S9/S16
  misc_feature: Homolog of GI Number: 77552917 NR Desc: ribosomal protein S9
  misc_feature: Homolog of GI Number: 7440266 NR Desc: probable ribosomal protein S16
  misc_feature: Homolog of GI Number: 2641209 NR Desc: ribosomal protein S16
  misc_feature: Homolog of GI Number: 6984222 NR Desc: 40S ribosomal protein S16
  misc_feature: Homolog of GI Number: 439654 NR Desc: RS16 protein
  misc_feature: Homolog of GI Number: 21555842 NR Desc: 40S ribosomal protein S16
  misc_feature: Homolog of GI Number: 16323500 NR Desc: putative 40S ribosomal protein S16
  misc_feature: Homolog of GI Number: 4574242 NR Desc: ribosomal protein S16
  misc_feature: Homolog of GI Number: 6721162 NR Desc: putative 40S ribosomal protein S16
  misc_feature: Homolog of GI Number: 62083431 NR Desc: ribosomal protein S16
MAAVLTRPTPGTVQCFGRKKTAVAVAYTKPGRGLIKVNGAPIELIRPEMLRLKAFEPIMLAGRSRFKDIDMRIRFRGGGKTSQIYAIRQAVAKALVAYYQKYVDEAAKKEVKDIFARYDRTLLVADPRRCEPKKFGGRGARARFQKSYR

SEQ ID NO: 3997 - DNA, 1521 bp, Triticum aestivum
  misc_feature: Ceres CLONE ID no. 822590
  misc_feature: Ceres CDNA ID no. 40041333
  CDS (332)..(1186): REFERENCED BY SEQ ID NO: 3998
acagcactgcgccactgctcgacctcgacgcccagccgcctcgccgtcgccgttcctcgcgacgcgacctcaccgcctgtagcctgctggagcccggatcccagcctcccggcgcccgcgcctctccttcccgcccggccggccggccctctggtccagccgcgcctccctgcccacgcccctccctgcgcgcggccgcgcccctgccgccggccggaagcctggcgcccctgccctcgccctgcaagtttggcggcagccactgccgctcagtcaccacaccagcctccggaattgaagccgggctcacggagaagggcgccacccccccatgatcgccgcatcagcgcggcgggtcgctgcagccgccgcttcctcttcccagtccggccgtgtctcccagctggcctcgacactgaatcaccagagatggattcacgaccgtaacaagaaggcaatggagttggtggccaagggttggagcgccctacaggaggtcgatcgcgtcatcgacttcgccgaccgcaacgacaagcggctaatcccacttctcaggggcgcgaaggagaactttgagctggctctagagatcgacaatatgaatactcacgcgagatgttggctggccaagatgcatttcaagtaccatgttcccggggcgtgcaaggcaattggtgctgctttgcttgttgaagctgcgaacatgggtgatccagaggcacagtatgaacttggatgtcggctaagagttgagaatgatcatgttcagtctgatcaacaggccttccattatatagagaaagctgttgaccagttgcatcctggtgctttgtatcttcttggtgctgtatatataactggggattgcgtcaagagggacatagcttcagctatgtggtgtttccatagagcttcagaaaagggacatgctggagctgcaattgcatatggttcccttcttctgaaaggtgctgaagtgcctgaagtcattaccaggttcaactcaggcaagagtccgtcaactgggaaggtgcgaaaaaggacaatacagcaggacccagtaaagctggcaaaggagcagttccagatagcagctgagtctggatctgacctcggtttacggtggttgaagaggcttggagattacgaaaaacagcccgaagagctaaagcaaatccagcaatgacctccagcgaaagaataccactgcattcggcaattagtggatgttgcaatgctcttgctgcacattagtagagagcttcatgtttcatctgccttcagaatgtagagataacctatctgcacattaaaaatcgctatttctgtaagcttttcttgctcctaggtgatcttttgaaaaattcgtactccagctattcctagcaaacaaccctagtatttttgacagcatagtaaacagccctagtaggcaaggaggcattacttttccctcaattcttcaaccgtactttaatatcattttgttttcaaaaaaaaaaaggaaaaaaaaaaaaaaaa

SEQ ID NO: 3998 - protein, 284 aa, Triticum aestivum
  misc_feature: Ceres CLONE ID no. 822590
  misc_feature: Ceres CDNA ID no. 40041333
MIAASARRVAAAAASSSQSGRVSQLASTLNHQRWIHDRNKKAMELVAKGWSALQEVDRVIDFADRNDKRLIPLLRGAKENFELALEIDNMNTHARCWLAKMHFKYHVPGACKAIGAALLVEAANMGDPEAQYELGCRLRVENDHVQSDQQAFHYIEKAVDQLHPGALYLLGAVYITGDCVKRDIASAMWCFHRASEKGHAGAAIAYGSLLLKGAEVPEVITRFNSGKSPSTGKVRKRTIQQDPVKLAKEQFQIAAESGSDLGLRWLKRLGDYEKQPEELKQIQQ

SEQ ID NO: 3999 - DNA, 481 bp, Glycine max
  misc_feature: Ceres CLONE ID no. 822761
  misc_feature: Ceres CDNA ID no. 36707420
  CDS (29)..(340): REFERENCED BY SEQ ID NO: 4000
agtattcagattattatacattgcaaaaatggcatcattcaccatgacagcttccatccttggctgcccagccgtcaccaaccggtcggcagcgacgcagaggagatcagtggtagtgaatgcagccagcaaatctgttgaaggggaaaaggtcagttatgacaacaatggtagcaatgcaaggaggaacttgatgttcgccacggcggcggctgctgtttgctcttttgctgcagggatggcattggcagatgagcctaaaccaggaaactcagaagccaagaaaaagtatgccccggtttgtgtcaccaatcctacagctaggatttgtcgcaattgaggaacttttttgtttcacttttggaatttggaaatgtacaatgaatttgttgtaaggctttgatgatttcatttcatcctcactgtactagatgttcataaaagtatcgactttgcttcgtcgcaaaaaaaaaaaaaaaaa

SEQ ID NO: 4000 - protein, 103 aa, Glycine max
  misc_feature: Ceres CLONE ID no. 822761
  misc_feature: Ceres CDNA ID no. 36707420
  misc_feature: Homolog of GI Number: 21537121 NR Desc: photosystem II
  misc_feature: Homolog of GI Number: 1465366 NR Desc: photosystem II
  misc_feature: Homolog of GI Number: 2129671 NR Desc: photosystem II protein psbT
MASFTMTASILGCPAVTNRSAATQRRSVVVNAASKSVEGEKVSYDNNGSNARRNLMFATAAAAVCSFAAGMALADEPKPGNSEAKKKYAPVCVTNPTARICRN

SEQ ID NO: 4001 - DNA, 563 bp, Glycine max
  misc_feature: Ceres CLONE ID no. 822820
  misc_feature: Ceres CDNA ID no. 36707110
  CDS (52)..(444): REFERENCED BY SEQ ID NO: 4002
ttcttctgcacccgcgccgtttctgtgcttttactctgctaccttgtgacaatggtgagggttagtgtgttgaatgatgctcttaagagcatgtacaatgctgagaaacgggggaagcgccaggtcatgattaggccatcctcaaaagtgattataaaattccttttggtgatgcaaaagcatgggtacattggagagtttaagtacgttgatgatcacagagctggaaaaattgttgttgaattgaatggtagactgaacaaatgtggggttattagtccgcgttttgatgttggtgtcaaagagattgaaggttggactgctaggctgctcccctcaagacagtttgggtatattgtgttgactacctcagctggcatcatggatcatgaagaagctaggagaaagaatgttggtgggaaagtgctgggtttcttttactagtttaattagtttcctttgaagattttgctctgatttcagttcttgaaactcaccggttataatgatcaatgtgttagacccgtagtttatcaagtatagcattagcaaaaaaaaaaaaa

SEQ ID NO: 4002 - protein, 130 aa, Glycine max
  misc_feature: Ceres CLONE ID no. 822820
  misc_feature: Ceres CDNA ID no. 36707110
  misc_feature (5)..(130): Pfam Name: Ribosomal_S8 PFAM Desc: Ribosomal protein S8
  misc_feature: Homolog of GI Number: 23397065 NR Desc: putative cytoplasmic ribosomal protein S15a
  misc_feature: Homolog of GI Number: 17863 NR Desc: r
  misc_feature: Homolog of GI Number: 6683481 NR Desc: wrp15a
  misc_feature: Homolog of GI Number: 20259193 NR Desc: putative cytoplasmic ribosomal protein S15a
  misc_feature: Homolog of GI Number: 13560779 NR Desc: cytoplasmic ribosomal protein S15a
  misc_feature: Homolog of GI Number: 50908303 NR Desc: putative ribosomal protein S15
  misc_feature: Homolog of GI Number: 50935123 NR Desc: ribosomal protein S15
  misc_feature: Homolog of GI Number: 2130985 NR Desc: r
  misc_feature: Homolog of GI Number: 3355488 NR Desc: 40S ribosomal protein S15A
MVRVSVLNDALKSMYNAEKRGKRQVMIRPSSKVIIKFLLVMQKHGYIGEFKYVDDHRAGKIVVELNGRLNKCGVISPRFDVGVKEIEGWTARLLPSRQFGYIVLTTSAGIMDHEEARRKNVGGKVLGFFY

SEQ ID NO: 4003 - DNA, 1664 bp, Triticum aestivum
  misc_feature: Ceres CLONE ID no. 824949
  misc_feature: Ceres CDNA ID no. 29191822
  CDS (119)..(1168): REFERENCED BY SEQ ID NO: 4004
attcgtctcgtctcgtctcgcctcgcctcgcctcccgcggcgcgctcgccaccgacgacgcgcgccaccccccaataataggcgccggatcgggcgagggccacggagcgagcgagccatgggcgtccacgcggcgcccttccccttcccccttccccgccgggacctggaggacgacgacgacgacatcctcctcggcggaggcggcgaccgctgggccgccgccgcgatggcgccagaggcggaggcggagcagtcccccacgccgccgcccatctcctcctgcggccgctacatcctgcaccgcgtctgccgcttcgacacgctcgccggcgtcgccatcaagtacggcgtcgaggtggctgacgtgaagcgggtgaacggcctcaccgccgacctgcagatgttcgcgcacaagacgctgcggatcccgctccccggccgccacccgcccgcccaacattcccctccctcctcctccccggccgccgccgccgccgccagggaatggactacgcgccggcctcccaaaaatgccgctgccttggacccgttccagaaaccgccgcgcagcacggtttcgccgtccatgagcctcttgcagggatactacggcctcgcgccgcctcccaagcgggacctgacagaccaaggctccgaaatggcgacggctgttagaggccagcataggaaggcgaggagcatatcgaccggcttccctggcgtgaacggggatgccggctgggagacggacgatgctgaaaagcagataaggcggcggcagaaggccgacctcgagctgacaccgatgagggaggacagtggcggtgccttgttgccgaggaccggggaaggcttggctttgaggccaaagtcgggaggtcggccagacatgaataacagccagcaggatctcgtcgcggcagggctggtgccttcgtatggcgatggcctgctcgccgtcaggaagtcgtccagcacccctgagttccaggactcagacaacaacaacatcgcttcggtgtggctgaggagcaagtggaacctgaaaccagacgccttcgccgtgcctctccaaatcctgctcctggacagccttccgaagccgctcttcgacagcctcccgaagcccattgctgcatggaggaacaaggcagcccgggattaacatccaaggctcacagctcatcgatacgacgccttttaatttatcgatcggtgtacaccggtgattgtagtccaggtgcaagaaggggtgaggagttcgcttacattgtcaggttcgcgagtacgtttacatggtccggtttggacggtggacattgtcgcgaccgagaggtgcgcttcttcttcttcttcttccatgagctacagagatgaatgcctaaaagacagagttggatacagtgatacaatagctctacatatacatagtgtactgaacctgctgcgccgcagcgatggcagcagcaggagcagtttgtttcctttttgtgagttgtttgagaggatatattctttgtcttttgtacgcgacgcagaactgcagatagacaacatacatataggaggatcaaagggaaaccagaggcagtatgttgtacctacactaatgaaggagaatggactttgttagtgcttgtgtgttaaaaaaaaaaaaaaaa

SEQ ID NO: 4004 - protein, 349 aa, Triticum aestivum
  misc_feature: Ceres CLONE ID no. 824949
  misc_feature: Ceres CDNA ID no. 29191822
  misc_feature (62)..(105): Pfam Name: LysM PFAM Desc: LysM domain
  misc_feature: Homolog of GI Number: 67987177 NR Desc: 4Fe
  misc_feature: Homolog of GI Number: 55239156 NR Desc: ENSANGP00000028192
  misc_feature: Homolog of GI Number: 58381251 NR Desc: ENSANGP00000017440
MGVHAAPFPFPLPRRDLEDDDDDILLGGGGDRWAAAAMAPEAEAEQSPTPPPISSCGRYILHRVCRFDTLAGVAIKYGVEVADVKRVNGLTADLQMFAHKTLRIPLPGRHPPAQHSPPSSSPAAAAAAREWTTRRPPKNAAALDPFQKPPRSTVSPSMSLLQGYYGLAPPPKRDLTDQGSEMATAVRGQHRKARSISTGFPGVNGDAGWETDDAEKQIRRRQKADLELTPMREDSGGALLPRTGEGLALRPKSGGRPDMNNSQQDLVAAGLVPSYGDGLLAVRKSSSTPEFQDSDNNNIASVWLRSKWNLKPDAFAVPLQILLLDSLPKPLFDSLPKPIAAWRNKAARD

SEQ ID NO: 4005 - DNA, 1072 bp, Triticum aestivum
  misc_feature: Ceres CLONE ID no. 825118
  misc_feature: Ceres CDNA ID no. 40351406
  CDS (86)..(799): REFERENCED BY SEQ ID NO: 4006
gactcacccagctcacaagcatctctctctcacctccggcgaataacacaccagagctcacctctcccctcgcttccccgcgaaaatgtcgactgacgtggctgccgctgacatcccggtgcctcaggtggaggtagccgccgacgctgccgttgacacaccggcggcgaagccggccaaggcgcccaaggcggccaaggccaagaagtccactggcccgaagaagccccgcgtcaccccggcccacccgtcctacgccgagatggtgtcggaggcgatcgccgccctgaaggagaggagcgggtcgagcaccatcgcgatcggcaagttcatcgaggacaagcacaaggcgcacctcccggccaacttccgcaagatcctgctgacccagatcaagaagctcgtcgccgccggcaagctgaccaaggtcaagggctcctacaagctcgccaaggcccccgccgccgtcaagcccaagacggcgaccaagaagaagcccgccgccaagcccaaggccaaggcgccagccaagaagaccgccgccaagtcgccggccaagaaggccgccgcgaagcccaaggccaaggccccagccaaggccaaggccgtcgcgaagcccaaggcggcggcgaagccgaaggcggccgccaagcccaaggccaaggccgccgccaagaaggcgccggccgccgcgaccccgaagaagcccgccgcccggaagccgcccaccaagcgggcgaccccggtgaagaaggccgcgccggccaagaagcccgcggccaagaaggccaagaagtagagccccgcatgacggacctagatgccctggcggtagtattgagtagcctaattctctgttcggtgttgtcagtcaagagcttcttgactgtgtcttgggcggcggtgggctgtaaatctgatctatctgtgccgggggtgtaccctttgtgtcgaggaagagtgatatccatgggaatcagttgtactagtagcagtaatctgtgtaatttagtcttttttattattgcagcaatgtccatgagctatttgtcagaaaaaaaaaaaaaaaaaa

SEQ ID NO: 4006 - protein, 237 aa, Triticum aestivum
  misc_feature: Ceres CLONE ID no. 825118
  misc_feature: Ceres CDNA ID no. 40351406
  misc_feature (53)..(123): Pfam Name: Linker_histone PFAM Desc: linker histone H1 and H5 family
MSTDVAAADIPVPQVEVAADAAVDTPAAKPAKAPKAAKAKKSTGPKKPRVTPAHPSYAEMVSEAIAALKERSGSSTIAIGKFIEDKHKAHLPANFRKILLTQIKKLVAAGKLTKVKGSYKLAKAPAAVKPKTATKKKPAAKPKAKAPAKKTAAKSPAKKAAAKPKAKAPAKAKAVAKPKAAAKPKAAAKPKAKAAAKKAPAAATPKKPAARKPPTKRATPVKKAAPAKKPAAKKAKK

SEQ ID NO: 4007 - DNA, 1118 bp, Triticum aestivum
  misc_feature: Ceres CLONE ID no. 825262
  misc_feature: Ceres CDNA ID no. 29191559
  CDS (385)..(927): REFERENCED BY SEQ ID NO: 4008
gccggaagatgttgtgctcgatccatcctactttgacgttaggcatcaccaaccaaccaacacgttggctgcaggttttcctcgatgctaaatcccatctacttcactacttcactataccaagatggctagcatggctcgtcgtctccttgctctccctctacctcctcaacctcctcacccacgcgcgctccggcctctcgccgggcccgcgcccgctgccgcttatcggcagcctccacctcctcggcgacaggcctcaccgctccctcgcacgcctggccaggacccacgccgccccgctcatgtccctccgcctcggcgcggtcaccacggtggtcgcctcctcccctcccccgccgccgctccccagatcccgccgccatgtcgacggagaagaagcagctgaaccccatgcgggacatcaaggtgcagaagctcgtcctcaacatctccgtcggcgagagcggagatcgcctcacccgcgcctccaaggtgctggagcagctgagcggacagtcaccggtgttctccaaggcgaggtacactgtcaggtcgttcggtatcaggcgtaatgagaagatcgcctgctatgtgactatcaggggtgagaaggcgatgcagctgctggagagtggcctgaaggtgaaggagtacgagctgctcaggaggaacttcagcgacaccggatgctttggcttcggtatccaggagcacatcgatctcggcatgaagtacgatccatctaccggcatctacggtatggacttctttgtggtgctcgagcgtgctgggtaccgcgtctcccgccgccgcaggtgcaaggcccgcgtcggtatccaccagagggtcaccaaggaggacgccatgaagtggttccaggtcaagtacgagggtgtcatcctcaacaagtcccatgcgagctaagaaggacgtagctctctttagaccttgagttaatgaagttcacctggttgctggatatgtatgttacctagaaaccgaaatgctttgtcagttttgcctgtactcaagctggatgatttctgtttgatctgcactttcgtctaagaggctcactactgttttatcctctttcaacaaaaaaaaaaaaaaaa

SEQ ID NO: 4008 - protein, 180 aa, Triticum aestivum
  misc_feature: Ceres CLONE ID no. 825262
  misc_feature: Ceres CDNA ID no. 29191559
  misc_feature (66)..(165): Pfam Name: Ribosomal_L5_C PFAM Desc: ribosomal L5P family C
  misc_feature (9)..(62): Pfam Name: Ribosomal_L5 PFAM Desc: Ribosomal protein L5
  misc_feature: Homolog of GI Number: 57471704 NR Desc: ribosomal protein L11
  misc_feature: Homolog of GI Number: 53749326 NR Desc: putative 60S ribosomal protein L11
  misc_feature: Homolog of GI Number: 21542441 NR Desc: 60S ribosomal protein L11
  misc_feature: Homolog of GI Number: 624938 NR Desc: ribosomal protein L16
  misc_feature: Homolog of GI Number: 463252 NR Desc: RL5 ribosomal protein
  misc_feature: Homolog of GI Number: 12642874 NR Desc: putative ribosomal protein L11
  misc_feature: Homolog of GI Number: 24817256 NR Desc: ribosomal protein RL5
  misc_feature: Homolog of GI Number: 78191444 NR Desc: ribosomal protein L11
  misc_feature: Homolog of GI Number: 550544 NR Desc: ribosomal protein L16
  misc_feature: Homolog of GI Number: 7268667 NR Desc: ribosomal protein L11
MSTEKKQLNPMRDIKVQKLVLNISVGESGDRLTRASKVLEQLSGQSPVFSKARYTVRSFGIRRNEKIACYVTIRGEKAMQLLESGLKVKEYELLRRNFSDTGCFGFGIQEHIDLGMKYDPSTGIYGMDFFVVLERAGYRVSRRRRCKARVGIHQRVTKEDAMKWFQVKYEGVILNKSHAS

SEQ ID NO: 4009 - DNA, 1692 bp, Triticum aestivum
  misc_feature: Ceres CLONE ID no. 825692
  misc_feature: Ceres CDNA ID no. 35383296
  CDS (66)..(1574): REFERENCED BY SEQ ID NO: 4010
taatcgaaaaataccattttcttcctaaaagaaaatcgaggcgaggaggagtccgcgtccgcgagatggcgatggcgagcttggcgaggaggcgcgcggcggaggctgtgctgctgcggcggccccacgcggcggcgtgggcgtccgcgtgccgggggtacgcggcgtcgggggaggagagcgacgtcgtcgtgatcggcggcgggcccggtgggtacgtggcggccatcaaggcggcgcagctcggtcttaagaccacctgcatcgagaagaggggcgcgctcggggggacctgcctcaacgtcggctgcatcccgtccaaggctcttctgcattcgtcgcatatgtaccatgaggcaaagtcttcttttgcacaccatggcgttaagttctccaatctggaggtagatctgcctgcaatgatggctcagaaagacaaggctgtttctgggcttacaaagggcatcgaaggcctgttcaagaagaacaaggttgagtatgttaaagggtttgggaagcttgtctctccgtcagaggtatctgtggatttagttgatggtggtagcactatcgtcaaagggaagaacataattgtcgccactggctcagatgtgaaatctctccctggagttacaattgatgagaagaagattgtgtcatctactggggctcttgcacttacagaaataccaaagaagttggtggtcattggagctggatacataggtctagagatgggttctgtctggaacaggctagggtctgaagtgactgtggttgaatttgcccctgatattgtcccatcaatggatggagagataaggaagcagtttcagcgtatgctggagaagcaaaagtttaagttcatgctcaagacaaaggtagtcggggtcgatacttctggaagtggtgtcaagttaactgtggagcctgcagctggtggagagcagactgtcattgaggctgatgttgtccttgtatctgctggcagagtcccatacactgctggtattgggctggacgccattggtgttgagacagacaagggcggaagggtccttgttgacaatcgctttatgacaaatgttaagggcgtatacgcgattggagatgcgatacctggaccgatgcttgcacacaaggctgaggaggatggtgttgcatgtgttgaatttatcgcggggaaggagggccatgttgactatgacactgtacctggcgtggtgtacacacacccagaggtggcctccgttggcaagacggaggaacaggtcaaggcatctggtgtagcctaccaggttgggaagttccccctgctggcaaacagtcgggcgaaggcaatcgatgatgccgaagggatggtgaaggtgatatctgagaaggaaactgatagaatcctcggcgtacacataatgtcccctggcgcgggcgagatcatccacgaggctgtgcttgcacttcagtatggagcatccagcgaggacattgcccgtacatgccacgcgcatccgacagtgagcgaggctctgaaggaggcgtgcatgaacacctacgacaaggcgatccacatgtgatttctgatacgagttcagctgccagctcgaaacaattggcaagtttttgaaataattttgaatcgatgcgttctagaaaaaaaaaaaaaaaaaaaaaaaaaaaaaaaaaaaaaaaaaa

SEQ ID NO: 4010 - protein, 500 aa, Triticum aestivum
  misc_feature: Ceres CLONE ID no. 825692
  misc_feature: Ceres CDNA ID no. 35383296
  misc_feature (37)..(358): Pfam Name: HI0933_like PFAM Desc: HI0933
  misc_feature: Homolog of GI Number: 13873336 NR Desc: dihydrolipoamide dehydrogenase precursor
  misc_feature: Homolog of GI Number: 23321340 NR Desc: dihydrolipoamide dehydrogenase precursor
  misc_feature: Homolog of GI Number: 10444388 NR Desc: dihydrolipoamide dehydrogenase precursor
  misc_feature: Homolog of GI Number: 5823556 NR Desc: ferric leghemoglobin reductase
  misc_feature: Homolog of GI Number: 3309269 NR Desc: ferric leghemoglobin reductase
  misc_feature: Homolog of GI Number: 44662784 NR Desc: lipoamide dehydrogenase
  misc_feature: Homolog of GI Number: 12704696 NR Desc: lipoamide dehydrogenase precursor
  misc_feature: Homolog of GI Number: 6984216 NR Desc: lipoamide dehydrogenase precursor
  misc_feature: Homolog of GI Number: 50932201 NR Desc: putative dihydrolipoamide dehydrogenase
  misc_feature: Homolog of GI Number: 34894800 NR Desc: putative dihydrolipoamide dehydrogenase precursor
MASLARRRAAEAVLLRRPHAAAWASACRGYAASGEESDVVVIGGGPGGYVAAIKAAQLGLKTTCIEKRGALGGTCLNVGCIPSKALLHSSHMYHEAKSSFAHHGVKFSNLEVDLPAMMAQKDKAVSGLTKGIEGLFKKNKVEYVKGFGKLVSPSEVSVDLVDGGSTIVKGKNIIVATGSDVKSLPGVTIDEKKIVSSTGALALTEIPKKLVVIGAGYIGLEMGSVWNRLGSEVTVVEFAPDIVPSMDGEIRKQFQRMLEKQKFKFMLKTKVVGVDTSGSGVKLTVEPAAGGEQTVIEADVVLVSAGRVPYTAGIGLDAIGVETDKGGRVLVDNRFMTNVKGVYAIGDAIPGPMLAHKAEEDGVACVEFIAGKEGHVDYDTVPGVVYTHPEVASVGKTEEQVKASGVAYQVGKFPLLANSRAKAIDDAEGMVKVISEKETDRILGVHIMSPGAGEIIHEAVLALQYGASSEDIARTCHAHPTVSEALKEACMNTYDKAIHM

SEQ ID NO: 4011 - DNA, 2056 bp, Triticum aestivum
  misc_feature: Ceres CLONE ID no. 826210
  misc_feature: Ceres CDNA ID no. 25891062
  CDS (296)..(1834): REFERENCED BY SEQ ID NO: 4012
attgattgcctatcgagactgttgatgtggggcgaaagaggtagtacttcctcgtattctcatcatccagaaacgccagaggtgttccttgtttgtccgaggcgtaagtggcgccgtagattacgatcgattcaagatgttccttttcgcttgatcgattcaagatgttcctcttagttcgatcggttctggagcaacagcgatagagcagttcctggggatctgtttctgttcgtcagttcccaagcttttacactagaccgtgtgtaaaaaaattcaacaggggaaagttaacatgtctgatcttttattttgtttttcttctttccctctcaccgcacaggctgagagcatagtgaaacatgtagccagcggtggaagctggcatgggttgcatagtttttcagaggcatcagccaggggtttcagctctgaaccgtctcttcaggcccactcgacggaagaaatcgggttcaaggggcatggcatgctggctccattcacagctggctggcagagcaccgatgtgcatcccctggttattgatagatctgagggtgcatatgtctatgatatcaatgggaaaaagtatatagatgctcttgcaggactctggtgtacagctctaggtggtagcgaacctcgactagtcaaagctgcaacagaacaattaaacaaattacccttctatcattccttctggaaccgtactaccaaaccctcattggatcttgcaaatgacgttctcagcatgtttactgcaagggaaatgggaaaggtattcttcgcaaatagtggttcagaagcaaatgactcacaggtgaaactagtgtggtattataacaatgcaatggggagaccagacaagaagaaatttattgcacgctcaaaatcatatcatggttcaacattaatatcagctagtttatccggtcttcctgctcttcatcaaaagtttgatctaccggcaccttttgttctgcacacggactgtccacactactggcgcttccaccttcctgatgaaacagaagaagaattttctactagacttgcaaacaacttggagaatcttatcctaaaagaaggaccagaaacaattgctgctttcattgctgaacctgtgatgggtgccggtggtgtcatccttcctccaaagacttattttgagaagattcaagcagtactcaagaagtacgacgtcttgttaatagcagatgaggtcattactgcatttgggagattgggaaccatgtttggatgtgatatgtataatattcaaccagatctcgtctccatagcaaaggctctttcttcggcctacatgccaattgcagctattcttgttagcccagaaatagcagatgtagttcattcgcagagcagtaaacttggttcttttgctcatggctttacatactccgggcatccagttgcctgtgctgttgccatagaagctctgaagatctacaaggaaaggaatattaccgaacatgtcaacacaattgccacaaggttccaagaaggaatcaaggccttctcaggcagtccgatcatcggagagatacgtggcctgggattgatacttggaactgaatttgccgacaacaagtcgccaaatgatccattccctgcagaatggggggttggttcaatatttggtgccgagtgtgagaagcgtgggatgcttatcagggtcgctggggataacatcatgctatcacctccactaataatgactcccgatgaagttgaagaaattgtgagcaaatatggcggcgccctaaaggccacagaggaaagaattgaggagcttaaatcagccaagaggtgaacaattccaatttgctgaaagcctctagcaatgattggtgatgatggtgacgacaatgtacagttacttgaacaattaggtgccaataatagcacattgaaagcctgaaaattgatcttgatgtggaaatgtcagttcttatttaccatctccagtcacagaataggcacgtttgtgaccggagggaagggctgcagtgtttttccaaaaaaaaaaaaaaaa

SEQ ID NO: 4012 - protein, 512 aa, Triticum aestivum
  misc_feature: Ceres CLONE ID no. 826210
  misc_feature: Ceres CDNA ID no. 25891062
  misc_feature (82)..(437): Pfam Name: Aminotran_3 PFAM Desc: Aminotransferase class
  misc_feature: Homolog of GI Number: 50928703 NR Desc: OSJNBa0008M17.3
  misc_feature: Homolog of GI Number: 11994739 NR Desc: aminotransferase
  misc_feature: Homolog of GI Number: 12963338 NR Desc: aminotransferase
  misc_feature: Homolog of GI Number: 14030435 NR Desc: gamma
  misc_feature: Homolog of GI Number: 29837282 NR Desc: gamma
  misc_feature: Homolog of GI Number: 29837286 NR Desc: gamma
  misc_feature: Homolog of GI Number: 50904709 NR Desc: putative 4
  misc_feature: Homolog of GI Number: 23296654 NR Desc: putative aminotransferase
  misc_feature: Homolog of GI Number: 33340007 NR Desc: putative aminotransferase
  misc_feature: Homolog of GI Number: 50942161 NR Desc: putative gamma
MSDLLFCFSSFPLTAQAESIVKHVASGGSWHGLHSFSEASARGFSSEPSLQAHSTEEIGFKGHGMLAPFTAGWQSTDVHPLVIDRSEGAYVYDINGKKYIDALAGLWCTALGGSEPRLVKAATEQLNKLPFYHSFWNRTTKPSLDLANDVLSMFTAREMGKVFFANSGSEANDSQVKLVWYYNNAMGRPDKKKFIARSKSYHGSTLISASLSGLPALHQKFDLPAPFVLHTDCPHYWRFHLPDETEEEFSTRLANNLENLILKEGPETIAAFIAEPVMGAGGVILPPKTYFEKIQAVLKKYDVLLIADEVITAFGRLGTMFGCDMYNIQPDLVSIAKALSSAYMPIAAILVSPEIADVVHSQSSKLGSFAHGFTYSGHPVACAVAIEALKIYKERNITEHVNTIATRFQEGIKAFSGSPIIGEIRGLGLILGTEFADNKSPNDPFPAEWGVGSIFGAECEKRGMLIRVAGDNIMLSPPLIMTPDEVEEIVSKYGGALKATEERIEELKSAKR

SEQ ID NO: 4013 - DNA, 2497 bp, Triticum aestivum
  misc_feature: Ceres CLONE ID no. 826386
  misc_feature: Ceres CDNA ID no. 40041334
  CDS (338)..(1837): REFERENCED BY SEQ ID NO: 4014
ctcttccacttcccctaatctccaacagtttccaatttctcatctcccaagcccaaaccccaaccccaaccagagaccgaaaagagtcgcacgcgacttcgcgagagaggggagaagcagcagacgaaagcgagagacctcctccttccccaaccccagccccgctccaaaccctaacccttcctcagatctcgcgcccgtctgccctcccgccccgccccgccccgcctcgatgtgacccggcccctagggtttgtgccggtgcggtgtggtggtgggtcccggttcgtgggcggatttcggacccgaggagttggagctggcggcgcgcgcgcacatgaaggacccggcgcaccgcacgaaggtggtgctcaggcggctgccgccggcgattgcgcagcaggccgtcgtggaccaggttgacgcgcgcttcgctggtcggtatgactgggcctgcttccgccccggtaatgccagccaaaagaatcatagatattcgcgtctctaccttaacttcaagagcccagaagatgttgttgagtttgccgagttcttcaatgggcatgtatttgtgaatgaaaagggtgctcaatttaaagctcttgtggaatatgcaccatcacaacaggttccgaagtcaaatatcaagaaagatgctcgtcaaggaactataacaaaagatccagaatacttggagtttcttgagcttatatcaaagcctactgagcatttgccaagtgctgaaattcagcttgaaaggaaagaagccgaaagagcagctgctggaaaggtgccccctgttgtgacacctcttatggtttatgttcgtcagcaaagggcggctaagagtatggctcagaggtctgtaagtagtagactaagcagaaaagttgcaggcgtggtaactagtagttctagtccatctaaaaggtcttctgaaaggcgcagggcctccacttcaacgcagtatgttgtgcgagataatgctaaggagaagccgacttacatcttagcaccaaagagagatgatcatacacacagagagaaaatcattgctggaacttcagatgctacaagcggtgggccatctggatctgctcaggttatcgacggtaaaaaggacaaaattgtccttctgaaaggaagagcgagggttgattccaatcagtctctgccgcctccgagaaatacacccccatcaacttctagacaagaccagcgaaatgaggccagtgtcagaattatcaagactatactttcaaacaaggaaggacgccatgcaatagcatcatctcaacatgagcaagaaggtcacataattagtgccgagaaggataagaggccaccacgggctccgaactcgcgttccactgtaaaagatcagactgttgaaaatgctgagaaaaaccactatgatgacaagcatctgcatggttctggacccattggtgagaagattgaaagacatgccagaaatagagataggcctgaccgaggtgtttgggcccctcgtcgctatgacaagtctgcatcaggaggcagtacgcaagcatcatcgtctgagttcccgctaatgcagtcgcactctatggataatttctctcagcaagtagatggccatggagagagaaaaatagacacaaggagtcctggtggccgtggtggccttgtggagaatggaaacaggcatgccaaccgccgtggtccgccacgtgggtcgaaggagatggaaatccctcttattacatctgatggaaagccttcaaagaggggccctgctagctatgtggctcatgagagacaagtatgggttcaaaagtcaagttcaggatcgtgagtttgtccaccaatgatacttccatcaaaacagatgttgcaagctgtggagaagtctctggattttgcggctcattctgaagtttgtgaatgaaatgactgttggtgagatggttctatgaagtgcgatcctagatttgtcaacgaaagtctcagctatagctgaaaaggcagctctttgatttgattcacagaatcacagcaatagtgaagtaacataacccaccagtaggtagctctccatcactttgggtgagacttgattttggacccaagggtgctatatctggagcgacggatggaaattaggctggcatcaatacctcgagacagctgtcgcatatttccaagacccctggaggctatacacagtgatggatgtacatatctctagagaaagaagaggtctggctctgtttgctgtttacaggttagaggtgccatgtatctacaaagagataagagttatgagactacccagtttgctaaataaaggcgaatttttagttagttgattatgagaacccctgtatcccggcggctgcagttgcagtcagtatgaccgaagttaatgtggagtgcaaagtgacatagcactatcatgttttatgctccagggtgaatggaatgtgaggctattttggcaaaaaaaaaaaaaaaa

SEQ ID NO: 4014 - protein, 499 aa, Triticum aestivum
  misc_feature: Ceres CLONE ID no. 826386
  misc_feature: Ceres CDNA ID no. 40041334
  misc_feature (1)..(170): Pfam Name: Smg4_UPF3 PFAM Desc: Smg
  misc_feature: Homolog of GI Number: 50924502 NR Desc: OJ000114_01.14
  misc_feature: Homolog of GI Number: 33416419 NR Desc: Similar to UPF3 regulator of nonsense transcripts homolog B
  misc_feature: Homolog of GI Number: 55239404 NR Desc: ENSANGP00000011347
  misc_feature: Homolog of GI Number: 24762426 NR Desc: CG11184
  misc_feature: Homolog of GI Number: 40882583 NR Desc: AT18503p
  misc_feature: Homolog of GI Number: 24762428 NR Desc: CG11184
  misc_feature: Homolog of GI Number: 17863070 NR Desc: SD10857p
  misc_feature: Homolog of GI Number: 54635400 NR Desc: GA10824
MKDPAHRTKVVLRRLPPAIAQQAVVDQVDARFAGRYDWACFRPGNASQKNHRYSRLYLNFKSPEDVVEFAEFFNGHVFVNEKGAQFKALVEYAPSQQVPKSNIKKDARQGTITKDPEYLEFLELISKPTEHLPSAEIQLERKEAERAAAGKVPPVVTPLMVYVRQQRAAKSMAQRSVSSRLSRKVAGVVTSSSSPSKRSSERRRASTSTQYVVRDNAKEKPTYILAPKRDDHTHREKIIAGTSDATSGGPSGSAQVIDGKKDKIVLLKGRARVDSNQSLPPPRNTPPSTSRQDQRNEASVRIIKTILSNKEGRHAIASSQHEQEGHIISAEKDKRPPRAPNSRSTVKDQTVENAEKNHYDDKHLHGSGPIGEKIERHARNRDRPDRGVWAPRRYDKSASGGSTQASSSEFPLMQSHSMDNFSQQVDGHGERKIDTRSPGGRGGLVENGNRHANRRGPPRGSKEMEIPLITSDGKPSKRGPASYVAHERQVWVQKSSSGS

SEQ ID NO: 4015 - DNA, 1701 bp, Triticum aestivum
  misc_feature: Ceres CLONE ID no. 826681
  misc_feature: Ceres CDNA ID no. 25446859
  CDS (88)..(1512): REFERENCED BY SEQ ID NO: 4016
aagtccaaccaagccaagccaaaggaagacaagagatcagatctcatctcagtctccccttcctctgctctcctcacgtcgccggcgatggcgccgtccgtccgcgccaccgtcctgctcctcctcctcctcgccgcctcctcctcttctcaggcggcacaagcggcggaggacggcatccgggtcctctccgccgagaaaaggatcgacctcaccggccccatcgtcaaggtcttcctcaccctcaaggtccagaacaccgccaccggcgccgacgcctcacacgtcctcatcgccttcacgcctgccgaggccgaccacctcgccatcgtcaaggcaacaagggccgagggcaagcgcaagaagaagacctacatcccgctcccagtatcacctgccgaccccgccactgccgctcccaacggcgcccgcctctactccatctcccttcccaccccactgaaacccaccgacacaaccaccgtggaggtcttctacgtgctcacgcactccctcgagcccttccctgccgagatcacccagtccgagtcccagctcgtctactaccgcgacagcgccgtcctcctctcgccgtaccatgtccaggagcagggcacctatgtcaagacgcccagcagcagggtcgagtccttcaccagggtcgaccccaccagccgctcgggccctgatgtcaaatacggcgcgtacagcaaccagctcccctacgcctactcgcccatcattctgcattatgagaacaaccatgcgtttgctgtcgtcgaggagctcgtgcgcaaggtggagatctctcactgggggaacgtccaggtcaccgagcactacaagttgaagcatggcggtgccaagcacaaaggagtcttttcaaggctcgagtatcaggctaggcaatctatcagtggagcgtcatcatttaagaaccttcttgcaaggttgcctccacgagttcattcagtctactatcgtgatgagattggtaacatctcctcatcccatctgcgcagtgattcatacaagtcagaactagaaattgaaccaagatatccactgtttggtgggtggcactgcactttcaccatcggctatggcatgccactgcaagatttcctgtttgaatcggctgatggtcgacgcttcgccaaccttacatttggatgccctctactgaatactgtggttgataatcttaccatcaaggttgtgcttcctgagggctcgaaaagcccgcaagctgttgttccttttgagacggagcaacatctcgagactagctattcatacctggatgttgtggggaggacgacagtggtgataaagaagaaaaacgtagtaggagagcacaatgttccattccaggtgtactatgagttcagccccatcttcatgttggcggagccgctgatgctggtaaccgcagtgctgctcttcttcgccgcttgcattgtctatcttcacacggatctttccatcgcgaaatcacaggcctcctcctgaaggagtaactgcaaactagccattgtgatgaaggaattgatggttgtggtgaaacattagctttggggagttttgtagaagaagcaagcatgatgatgattgattgattgctgtaggaactttggggacaagagaagagcatgttataaaaaaaaatactggattagtagtataaaaaaaaaaaaaaaa

SEQ ID NO: 4016 - protein, 474 aa, Triticum aestivum
  misc_feature: Ceres CLONE ID no. 826681
  misc_feature: Ceres CDNA ID no. 25446859
  misc_feature (30)..(462): Pfam Name: Ribophorin_I PFAM Desc: Ribophorin I
  misc_feature: Homolog of GI Number: 4220476 NR Desc: putative ribophorin I
  misc_feature: Homolog of GI Number: 2894378 NR Desc: putative ribophorin I homologue
  misc_feature: Homolog of GI Number: 22655006 NR Desc: At1g76400/F15M4_10
  misc_feature: Homolog of GI Number: 50754383 NR Desc:  similar to Dolichyl
  misc_feature: Homolog of GI Number: 28277278 NR Desc: MGC52808 protein
  misc_feature: Homolog of GI Number: 73984484 NR Desc:  similar to Dolichyl
  misc_feature: Homolog of GI Number: 47523726 NR Desc: ribophorin I
  misc_feature: Homolog of GI Number: 28175644 NR Desc: MGC52894 protein
  misc_feature: Homolog of GI Number: 55715894 NR Desc: Rpn1 protein
  misc_feature: Homolog of GI Number: 38512106 NR Desc: Ribophorin I
MAPSVRATVLLLLLLAASSSSQAAQAAEDGIRVLSAEKRIDLTGPIVKVFLTLKVQNTATGADASHVLIAFTPAEADHLAIVKATRAEGKRKKKTYIPLPVSPADPATAAPNGARLYSISLPTPLKPTDTTTVEVFYVLTHSLEPFPAEITQSESQLVYYRDSAVLLSPYHVQEQGTYVKTPSSRVESFTRVDPTSRSGPDVKYGAYSNQLPYAYSPIILHYENNHAFAVVEELVRKVEISHWGNVQVTEHYKLKHGGAKHKGVFSRLEYQARQSISGASSFKNLLARLPPRVHSVYYRDEIGNISSSHLRSDSYKSELEIEPRYPLFGGWHCTFTIGYGMPLQDFLFESADGRRFANLTFGCPLLNTVVDNLTIKVVLPEGSKSPQAVVPFETEQHLETSYSYLDVVGRTTVVIKKKNVVGEHNVPFQVYYEFSPIFMLAEPLMLVTAVLLFFAACIVYLHTDLSIAKSQASS

SEQ ID NO: 4017 - DNA, 1105 bp, Triticum aestivum
  misc_feature: Ceres CLONE ID no. 826792
  misc_feature: Ceres CDNA ID no. 40351407
  CDS (69)..(719): REFERENCED BY SEQ ID NO: 4018
atggcattgtgtgaggaataaaccaacgaaaattgtcccaactctcctagtgtcatccacaactatcaatgctcaggttcaaaggtctaacaaactttgatcatgtttgtaggtatggtgagagcgaaggttatccttctcagagtggcatcacaaaagatgcacaggccgcacttgatcatctacttcagaggaaggacattgacacatccaggatagttatcttcgggagatctttaggaggtgctgttggagcagttcttgcaaaaaacaatcctgacaaggtgtctgctctaatattggaaaatacttttacatctatattggatatggctggtatcatgctgcccttcttaagatggttcataggcggtagttctgccaaaggcccaaaacttcttaactgcgttgttcgctctccatggagtacacttgatgttgttgcagaggtcaaacagcccattctctttctttctggattgcaagatgaactggttcccccttcacacatgaggatgctgtatgacaaagctgttgaacataacaggaattgtaggtttgttgattttctcaatggtatgcatatggatacctggatttctggaggggaccgctactggaggacaatcgaattgtttctggaccaatattccccagaagtacagagttctgatgccagctgcacaagtgaaattgctgatgatgataaagctgcataataattggaacatctagagcagcctgctgttttccaccagtttttctgatgttgatgcaattccggtctttgatggattgaagatcatttcaaacaattaattcaggtggttgttctgctccattccacctgaagaagccaaagctgtgaatatattttgaggttgttctccatcctgtgatgctgctgcatatgtgtatggaatgacacatatatatttctgagcctggctcggccttcaactcccgagtttctgtacaatgttgaattggcttcattcaagtatttgcaatttattggaactagtaccgaatgttagaaaatctggccttggtgtatgacggttcagtatagggtaatcttgttggctcaaaaaaaaaaaaaaaa

SEQ ID NO: 4018 - protein, 216 aa, Triticum aestivum
  misc_feature: Ceres CLONE ID no. 826792
  misc_feature: Ceres CDNA ID no. 40351407
  misc_feature (8)..(201): Pfam Name: Peptidase_S9 PFAM Desc: Prolyl oligopeptidase family
MLRFKGLTNFDHVCRYGESEGYPSQSGITKDAQAALDHLLQRKDIDTSRIVIFGRSLGGAVGAVLAKNNPDKVSALILENTFTSILDMAGIMLPFLRWFIGGSSAKGPKLLNCVVRSPWSTLDVVAEVKQPILFLSGLQDELVPPSHMRMLYDKAVEHNRNCRFVDFLNGMHMDTWISGGDRYWRTIELFLDQYSPEVQSSDASCTSEIADDDKAA

SEQ ID NO: 4019 - DNA, 1509 bp, Triticum aestivum
  misc_feature: Ceres CLONE ID no. 827337
  misc_feature: Ceres CDNA ID no. 24766525
  CDS (367)..(1113): REFERENCED BY SEQ ID NO: 4020
tcccctccgccctcccccgtccctttcctcttcatccccgatcccttccttccgcacgccgctctcgagctcctgccctacccgacctccaatcccacccaatgcggctctaaaaatatctcactcgctccgccaccgccgagccccagacctaccgccgcgccgcagctcaccgtcgccgactcctcctctcgcgctccccgccgccgcggccgccgtcgccgtccccgtcctaccccgtcgcgtccctgctgactacaccccgtccgcggcctcggccagtggttctcgaggaaagaaggcgggggcgcatggggaggtaggcgtcgtcgtcggtcgctgctggagtgattttggctgccggaaatggtgctggtggtgaagcagcaccgctgcacgcactcggcgtcctgctcctgcaccaagggccacctcagcgaggacgcgctgttcctcgtcttccgccacatgaactggaaccccaggctgatcgccaacctctcctgcgtctgcaagtggttcgacgaggtcgccaagcaggtgctgtggaaggagttctgccatgccagggcgcccaagatgatgctggatctgcattccgacggcagccacattgtcgacggcaactggaaggcgctcgggaagctgctgatctactgcaacggctgcacaaaggggggcttgttcggaaacatccatgtccccggacactttgtgttccggacgcgcttctcaaggaccgcaggcaagagcttcctgcctctgcagtgtaggatggatgtcttgtatgtgtccgatccatgcgaacatctcgatcagggggaagaaggcgacctgggttttttccgtggcatcttcaagtcgtttgccacttcaagggtcaagaagatcctgattgagaagcaggctaggttccatccaacggaggtttgcccctattgcaaggctaagctatggaacatgctgcacgctgatatgatgccggcgagtgcttccgccaggctgggtgcttacgatgattccgtggagtactttgtatgcctgaatggacatgttattggattgggtaccctgttacctctctcggattctgaggaggcaccggaggagtaatcatcaggaacattgatcaggtttgcaagatggagtcctggggcttgtggcatattgcttctgaatcctggttgtgtctaacagcgagaaggcatgggcgcggcaaaactgcaaggcgacaagatcgtgcagctagctttgcatctaaccgcagtgttgtccgtactggtgcatcagatgaaaatgctgtttctctgtggtctcttctctgcttgttgatcgattctctgttgttctcgtcattgtaatgaccatgccgacctttcgccttgtcctacatgtgcagagcatatgtagcaaggtgtgatgagaccgagttgtaaaattggtgcccatattggacctcatatattcatgtgctgttcctaactgtaaaaaacaaaaaaaaaaaaaaaa

SEQ ID NO: 4020 - protein, 248 aa, Triticum aestivum
  misc_feature: Ceres CLONE ID no. 827337
  misc_feature: Ceres CDNA ID no. 24766525
  misc_feature: Homolog of GI Number: 14210079 NR Desc: circadian clock coupling factor ZGT
  misc_feature: Homolog of GI Number: 34908976 NR Desc: putative circadian clock coupling factor ZGT
  misc_feature: Homolog of GI Number: 52353476 NR Desc: putative circadian clock coupling factor ZGT
  misc_feature: Useful for sterility
MVLVVKQHRCTHSASCSCTKGHLSEDALFLVFRHMNWNPRLIANLSCVCKWFDEVAKQVLWKEFCHARAPKMMLDLHSDGSHIVDGNWKALGKLLIYCNGCTKGGLFGNIHVPGHFVFRTRFSRTAGKSFLPLQCRMDVLYVSDPCEHLDQGEEGDLGFFRGIFKSFATSRVKKILIEKQARFHPTEVCPYCKAKLWNMLHADMMPASASARLGAYDDSVEYFVCLNGHVIGLGTLLPLSDSEEAPEE

SEQ ID NO: 4021 - DNA, 1919 bp, Triticum aestivum
  misc_feature: Ceres CLONE ID no. 827948
  misc_feature: Ceres CDNA ID no. 40041335
  CDS (341)..(1627): REFERENCED BY SEQ ID NO: 4022
agagcacgcgcatcttcttctcgcctcctccctccccgcccgcctccccgcccgcccgccattaatgcgcccctctcctactggggcaagtggtcaaccagcttagcacgggcaccagcgaggccggcctcccctccctacccttccttcccgtgatcgatcgaggtcgacggagacagataggaaagtcaggggaggagtagtatatataactaggcctgctcgccggccggggtgaagagagacagactctgccgttcgtcctcgcctctggtcgagctccgtctcccctgcctgagaatccatccatcgatcggtctgcgtttgctcgccggcggccatggggaactgcttcgggagcaggatcggctccgacagcccctacaagagcggcggcggctccggctccccttcttcctcctcagggtggacgtggaggaggaaggggaaagggggcgcgagcgtgtcgagcagccgggtgtcgtcctcgccgtcgaccacggtgccgccgacgccgcggagcgagggcgagatcctgcagtccgccaacgtcaagagcttcgccttcaacgagctcaagacggccacccggaacttccggcccgacagcgtgctcggcgagggcggcttcggctccgtcttcaagggctgggtcgacgagaccaccttcgcgcccgcccgccccggcaccggcatggtcatcgccgtcaagaagctcaaccaggagggcttccagggccaccgcgagtggctggctgaagtgaactacctcgggcagttgtcgcaccccaatcttgtgaggctcgtcggttactgcctcgaggacgagcagcgcctccttgtctacgagttcatgccgcgagggagcctcgagaaccatcttttcagaaggggctcgcatttccagccactgtcatggaacctgaggatgaaggtggccctcggggcggccagggggctcgccttcctccacagcgacatggccaaggtcatctaccgcgacttcaagacgtccaacgttctccttgactcgagctacaatgctaagttgtccgatttcgggctggcgaaggacgggccgaccggagacaagagccatgtctccacaagggtcatgggcactcatggctacgccgcccccgagtatcttgcaacagggcatctgacggcgaagagcgacgtgtacagcttcggggtggtgctgctggagatgctgtcggggcggcgggcgctggacaagaaccggccgtcgggggagcacaacctggtggagtgggcgcggccgtacctcaccagcaagcgccgggtgttccacatcctggacgcgcggctgggcggccagtactcgctgtccggcgcgcagaagacggcggcgctggccatgcggtgcctctccggcgacgcccgggcccgccccggcatggcggaggtggtgaccgcgctcgagcagctgcaggacgccaaggagacggccgccgcgggggccgggcaggggaaggcgtccggggggttcgtcaggatgcgcggcggcggcgggagcggcgcggggcggcagcagcagcggcgcccggagcccatggccgtgcggcggctgccggcggcgccgctgcggtcgcaccccgagtgatgggttgtaaagatcgaaaatggtgtagtttctgaatgttgttaatgtagctggcttcttcgctctcgcgaatccggcgtccgccatttcttttgcttggttagttaggcggcaggatgattggcgacgatggtcggcggagctttttgttttgacgaggcgactccgccgccgtcgccgtcgccgactccacccgatggagatgcgccgggaaataacgtgcaaaaattagcggttttgcttggatggattgatatggataaacggatggatgccaaaaaaaaaaaaaaaa

SEQ ID NO: 4022 - protein, 428 aa, Triticum aestivum
  misc_feature: Ceres CLONE ID no. 827948
  misc_feature: Ceres CDNA ID no. 40041335
  misc_feature (86)..(368): Pfam Name: Pkinase_Tyr PFAM Desc: Protein tyrosine kinase
  misc_feature: Homolog of GI Number: 79323399 NR Desc: APK1B
  misc_feature: Homolog of GI Number: 8778537 NR Desc: F22G5.5
  misc_feature: Homolog of GI Number: 42569425 NR Desc: protein kinase
  misc_feature: Homolog of GI Number: 34906046 NR Desc: putative serine/threonine
  misc_feature: Homolog of GI Number: 21555255 NR Desc: serine/threonine
  misc_feature: Homolog of GI Number: 28804505 NR Desc: serine/threonine protein kinase
  misc_feature: Homolog of GI Number: 50927967 NR Desc: OSJNBa0017B10.2
  misc_feature: Homolog of GI Number: 27311943 NR Desc: serine/threonine specific protein kinase
  misc_feature: Homolog of GI Number: 53689728 NR Desc: serine/threonine protein kinase
  misc_feature: Homolog of GI Number: 9294282 NR Desc: protein kinase
  misc_feature: Useful for decreasing plant size
  misc_feature: Utility: PEG Useful for making plants with increased tolerance to drought
MGNCFGSRIGSDSPYKSGGGSGSPSSSSGWTWRRKGKGGASVSSSRVSSSPSTTVPPTPRSEGEILQSANVKSFAFNELKTATRNFRPDSVLGEGGFGSVFKGWVDETTFAPARPGTGMVIAVKKLNQEGFQGHREWLAEVNYLGQLSHPNLVRLVGYCLEDEQRLLVYEFMPRGSLENHLFRRGSHFQPLSWNLRMKVALGAARGLAFLHSDMAKVIYRDFKTSNVLLDSSYNAKLSDFGLAKDGPTGDKSHVSTRVMGTHGYAAPEYLATGHLTAKSDVYSFGVVLLEMLSGRRALDKNRPSGEHNLVEWARPYLTSKRRVFHILDARLGGQYSLSGAQKTAALAMRCLSGDARARPGMAEVVTALEQLQDAKETAAAGAGQGKASGGFVRMRGGGGSGAGRQQQRRPEPMAVRRLPAAPLRSHPE

SEQ ID NO: 4023 - DNA, 1872 bp, Triticum aestivum
  misc_feature: Ceres CLONE ID no. 829171
  misc_feature: Ceres CDNA ID no. 40351408
  CDS (100)..(1656): REFERENCED BY SEQ ID NO: 4024
ggttgggcatgactgtgcagcgaggaccgagcaggacagcagggctgcattcgtgttcttctctctcgcccacattgagagcggaggctgcagccccggatgtcgtcggccgggagggcgagggccgcgagcctggcggcggtggcggtgcggatggtggtgggggcggcggcgcggcccgcgccgagcgcggcgctgctgatggcggcggtgcgtggggaggacacggagttcgggacggcgttgtggtgggcgtacgccgccttctccgccctcctggtgctgctggccgggatcatgtcggggctcaccctgggcctcatgtcgctcggccccgtggatctggagatcctcatgcgcagcggcaccgacgccgagaaggctcaggccgctgctatccttccggttgtaaaaaagcagcaccagcttcttgtcactctgctgctctgtaatgcttgtgccatggaggctctccctatattccttgacaggattttcaatcctgttcttgcaattatattgtcagtgacatttgttcttgcctttggggaggttatacctcaagcaatatgtaccaggtatgggctggcagtgggtgctagctttgtctggctcgtacgcatcgtcatgttcattgcctatcctattgcttacccgattgggaagctcctagactttgctcttgggcatgaatctgcgcttttcaggcgagctcagttgaaagctcttgtttctatccatagcaaagcggctggcaagggtggagagcttacccatgatgagactacaatcataagtggagcgttggacttaactgaaaagaccgccgaagaagctatgacgcctattgaatcaactttctctttagatgtggactccaagttggattgggaaacaattggtacaattcttgcccggggccacagccgtgtacctgtgtattcaggaagccctagaaatgttataggtctcctattggtcaaaagtcttctgacagttcgtgctgaaatagagacgccagttagtgctgtttccattaggaggattccaagggttccttcagacatgcctttgtatgatatactgaacgagtttcagaaaggaggtagtcatatggctgctgttgtgaaggcaaagcctaagaatgcaccacctcatgataaaactgaacctggtatggagtcggctggggcaacacaactgactgcacccttgctagccagtactgatgaaagggtggatactattattgttgatactgaaagacagcagaacatgcaggttaatagaaataaagcccactcgatgcagccgaatgatacaccgtcaaatgcattggctcagttatcagaggatatggataatggtagtgtcattggtatcatcacactggaagacgtatttgaagaactcttgcaggaggagatagttgatgagacggacgaatatgttgatgtccatcaaaggatccgagtggctgctgcagtcgctgcatcagcagttgcaagggttccatcttatcgaaaattattgagtcaaaagggttcacagggacagggtcagccagggcaacagcctaccggaattctgaagaaacctagtggtgattcaaacaagtcaaaaaataaagtgagccttgttgagcctcttctataaaacgggaggtaattttagatatatcacatcaatgtaaagatggaagaacacaggggtattgggaaacttttttccgttcatgcaatcttcggcaagcaataaatacaagcgaacttgctctgtaaatttcaagtacagcaacatttggtgaccacttttgaaaccactgatcactgaaccataaacataaaactgtttgcaaaaaaaaaaaaaaaa

SEQ ID NO: 4024 - protein, 518 aa, Triticum aestivum
  misc_feature: Ceres CLONE ID no. 829171
  misc_feature: Ceres CDNA ID no. 40351408
  misc_feature (421)..(439): Pfam Name: CBS PFAM Desc: CBS domain pair
MSSAGRARAASLAAVAVRMVVGAAARPAPSAALLMAAVRGEDTEFGTALWWAYAAFSALLVLLAGIMSGLTLGLMSLGPVDLEILMRSGTDAEKAQAAAILPVVKKQHQLLVTLLLCNACAMEALPIFLDRIFNPVLAIILSVTFVLAFGEVIPQAICTRYGLAVGASFVWLVRIVMFIAYPIAYPIGKLLDFALGHESALFRRAQLKALVSIHSKAAGKGGELTHDETTIISGALDLTEKTAEEAMTPIESTFSLDVDSKLDWETIGTILARGHSRVPVYSGSPRNVIGLLLVKSLLTVRAEIETPVSAVSIRRIPRVPSDMPLYDILNEFQKGGSHMAAVVKAKPKNAPPHDKTEPGMESAGATQLTAPLLASTDERVDTIIVDTERQQNMQVNRNKAHSMQPNDTPSNALAQLSEDMDNGSVIGIITLEDVFEELLQEEIVDETDEYVDVHQRIRVAAAVAASAVARVPSYRKLLSQKGSQGQGQPGQQPTGILKKPSGDSNKSKNKVSLVEPLL

SEQ ID NO: 4025 - DNA, 2355 bp, Triticum aestivum
  misc_feature: Ceres CLONE ID no. 831149
  misc_feature: Ceres CDNA ID no. 40041336
  CDS (124)..(2073): REFERENCED BY SEQ ID NO: 4026
cttcctcttctccccctcttccgtgctgcaaccccacgtactcccaagaaatggcagggctgtttgttgtagtctagcgcgagccattccgaggggcagatacgagttctttctcccgtcgcaatggcggccgtgcgggcggcggcggtggcggtgctgctggcggccgtggccgtggcggcggccgcgctgaacacggacggcctggcgcttctcgcgctcaagttcgcggtgaccgatgaccctggcagcggtctcgacacctggagggacgccgaccccgacccctgcggctgggccggcgtcacctgcgtcgacggcggcgggggccgggtcgccggcgtcgagctcgccaacctctcgctcgcgggctacctgccctccgagctctccctgctctccgagctcgagacgctggcgctgccgtccaaccgcctctccggccagatcccggtcgccatctccgcgctgcagaagctcaccaccctagacctggcgcacaacttcctgtccggccagattcccgccgggattgggaggctcgcctccttgtcccgcctcgatttgtcctccaaccagctcaacgggacgctcccgccgtccatcgcggggcttccgcgtctctccggcgtgctcaacctcagctacaaccatttcgtcggcgggatcccgccggagttcggcggcattcccgtcgctgtcagccttgacctccgggggaacgacctcgccggcgagatcccgcaggtgggctcgctcgtcaaccagggccccaccgccttcgacgacaacccgaggctctgcgggttcccgctcaagatcgagtgcgccggggagagggatgagccaagaatcccgcagtcgaaccctggcatgaaccctggtgcggcggcgcaggttgggaggccgccgaagcgtcggtcgtcgcccacggtgccgattcttgccgtcattgtggtggcggccatcgtcgcagggctagtgctgcagtggcagtgccggaggcggtgcgctgcgacgaccagggacgaggagaaggagtcgtcgaccaaggagaagagcgcggcggtgacgctcgccggcactgaagagcggcgcggcggcggggaggagggggagctgttcgtggccgtggacgacggtttcgggatggagctggaggagctgctccgggcgtccgcctacgtcgtggggaagagccgcggcggcatcgtgtacagggtcgtccccggccgcggcaccgccgtggccgtccgccgtctcagcgagcccgacgacggcgatggcactgagtccgggtggcgccggcgccgtgccttcgaggccgaggctgccgccatcggccgcgcgcgccatcccaacgtcgcccgcctccgcgcatactactacgccccagacgagaagctgctcatctacgactacctcggcaatggctccctccactccgccctccacggtggcccgacggcttcgccaacgccattgccgtggtcggtgaggctgtccatcgtgcagggcgcggcgagggggctggcatacctgcacgagtgcagccctcgccggtacgtgcacggctgcatcaagtcgtccaagatcctgctcgacgacgagctccgtccgcacgtctccggcttcggcctcgctcgcctcgtcgccggcgcgcacaagacggcgcagtcgaggaagctcggcagcgcggcgtgcgcgctccgcagcggcgccctgtcggcgctgtcgtacgtggcgccggagctgcgcgcgccggggggcacggccgcggcggcgacgcagaaaggggacgtgttcgcgttcggggtgctgctgctggaggcggtgaccgggcggcagccgacggagggggagggcgggctggagctggaggcgtgggtgcggcgagccttcaaggaggagcggccgctgtcggaggtggtggacccgacgctgctcggcgaggtgcacgccaagaagcaggtcctcgccgtgttccacgtggcgctcggctgcaccgagcccgacccggagctgcgcccccgcatgcgcgccgtcgccgagagcctcgaccgggtgaactagtccggcgatccatcatcaatcattccggggaacggaagccatgacccgtcattctcgtcgaccatcagcagcagtagttcctgaaatccttagctccgcagattagcatcatttgccaacgttattaggtttagagagacggtgaagaaaccagccaagaatcgttcgctgatgtgcgtttggtactcctttttttgtagctgcaatcttcgcggccgtgtatgtatgtaaccgatgatcatgatctggacaatttgcatcctcctaaaaaaaaaaaaaaaa

SEQ ID NO: 4026 - protein, 649 aa, Triticum aestivum
  misc_feature: Ceres CLONE ID no. 831149
  misc_feature: Ceres CDNA ID no. 40041336
  misc_feature (142)..(165): Pfam Name: LRR_1 PFAM Desc: Leucine Rich Repeat
  misc_feature (371)..(477): Pfam Name: Pkinase PFAM Desc: Protein kinase domain
  misc_feature (555)..(576): Pfam Name: Pkinase_Tyr PFAM Desc: Protein tyrosine kinase
  misc_feature: Homolog of GI Number: 38564248 NR Desc: At3g57830
  misc_feature: Homolog of GI Number: 50947445 NR Desc: putative leucine
  misc_feature: Homolog of GI Number: 4567301 NR Desc: putative receptor
  misc_feature: Homolog of GI Number: 6729526 NR Desc: receptor
  misc_feature: Homolog of GI Number: 12324677 NR Desc: putative receptor protein kinase
  misc_feature: Homolog of GI Number: 34914668 NR Desc: putative receptor
  misc_feature: Homolog of GI Number: 12597769 NR Desc: receptor protein kinase
  misc_feature: Homolog of GI Number: 4262228 NR Desc: putative receptor
  misc_feature: Homolog of GI Number: 55770095 NR Desc: putative atypical receptor
  misc_feature: Homolog of GI Number: 19032343 NR Desc: inflorescence and root apices receptor
MAAVRAAAVAVLLAAVAVAAAALNTDGLALLALKFAVTDDPGSGLDTWRDADPDPCGWAGVTCVDGGGGRVAGVELANLSLAGYLPSELSLLSELETLALPSNRLSGQIPVAISALQKLTTLDLAHNFLSGQIPAGIGRLASLSRLDLSSNQLNGTLPPSIAGLPRLSGVLNLSYNHFVGGIPPEFGGIPVAVSLDLRGNDLAGEIPQVGSLVNQGPTAFDDNPRLCGFPLKIECAGERDEPRIPQSNPGMNPGAAAQVGRPPKRRSSPTVPILAVIVVAAIVAGLVLQWQCRRRCAATTRDEEKESSTKEKSAAVTLAGTEERRGGGEEGELFVAVDDGFGMELEELLRASAYVVGKSRGGIVYRVVPGRGTAVAVRRLSEPDDGDGTESGWRRRRAFEAEAAAIGRARHPNVARLRAYYYAPDEKLLIYDYLGNGSLHSALHGGPTASPTPLPWSVRLSIVQGAARGLAYLHECSPRRYVHGCIKSSKILLDDELRPHVSGFGLARLVAGAHKTAQSRKLGSAACALRSGALSALSYVAPELRAPGGTAAAATQKGDVFAFGVLLLEAVTGRQPTEGEGGLELEAWVRRAFKEERPLSEVVDPTLLGEVHAKKQVLAVFHVALGCTEPDPELRPRMRAVAESLDRVN

SEQ ID NO: 4027 - DNA, 855 bp, Triticum aestivum
  misc_feature: Ceres CLONE ID no. 831848
  misc_feature: Ceres CDNA ID no. 40351409
  CDS (119)..(616): REFERENCED BY SEQ ID NO: 4028
cagatcagatcgtggaagcccaggccaaatccaaagcgacaacagaaaagctcgagctcttgcttgggtggtcgagcgagcagaccccgatcccagcagtagcaccaggaggaggaagatgtcgtcggtgttcagcggcgatgagaccgcccccttcttcggctttctcggcgccgccgcggctctcgtcttctcatgtatgggggcggcctacgggacggccaagagcggcgtcggcgtggcgtccatgggagtcatgcgcccggagctcgtcatgaagtccatcgtgcccgttgtcatggctggagtgctcggtatctacgggcttattatcgctgtcatcatcagtaccgggatcaaccccaaggccaagccctactacctcttcgacggctacgcccacctctcgtccgggctcgcctgtggccttgccggacttgctgctggcatggccatcggcattgttggtgatgctggagtcagggcaaatgctcagcagcccaagctgtttgtcggcatgatcctcatcctcatcttcgcagaggcgctcgctctctacggtctcattgtcggcatcatcctgtcatcccgagctggccagtctcgtgccgattagccaattaggcatgttccacacacgcggccctgtgtgccctcttgttttatattattcagacagcaaactgagctctagaggttatcatgtctagttttcattcttctgtttggtggagaaaaaaacatctgtagccaagggagttttgcccttgatgtaccattcttttcccgtcaagatgctgggagggggttggtgcttatgtatgcacagttatttacctaaaaaaaaaaaaaaaa

SEQ ID NO: 4028 - protein, 165 aa, Triticum aestivum; identical to SEQ ID NO: 170
  misc_feature: Ceres CLONE ID no. 831848
  misc_feature: Ceres CDNA ID no. 40351409
  misc_feature (14)..(79): Pfam Name: ATP PFAM Desc: ATP synthase subunit C

SEQ ID NO: 4029 - DNA, 1734 bp, Triticum aestivum
  misc_feature: Ceres CLONE ID no. 833048
  misc_feature: Ceres CDNA ID no. 40351410
  CDS (113)..(1456): REFERENCED BY SEQ ID NO: 4030
cggattccccaggggtccatccgcgaaaagaccccacagccgggagggaggagcccatcccgtcccgaaccaatcacacccctcggcggcggcgcggaccgccgcgccggccatggcggacgccgtcaagcagccgctcctccaccaccagccctacccctacgcgtacccgtcttacgccgcgtcggcctcgtcccccgcgctcccctccgtgccccactccgggaccgccacccccacccccgggggcgggggcgggggcgcggcctcctccttcgccgggggccgccgcttcccgggcggcctcgacgtgcccaacctcaagaagcgcggcggcggcacgcgcagctggatccgcgtcgaggccgccacggcctccgtgcagacgctcgaggtcgacaaggccaccatgatgcgccgctgcgagctccccgcccgcgacctccgcctcctcgacccgctcttcgtctacccctccaccgtcctcggccgggagcgcgccatcgtcgtcaacctcgagcagatccgctgcgtcatcaccgccgacgaggtgctcctccttaactccctcgacagctacgtcttccagtacgccgccgagctgcagcgccgcctcctccagcgcgccgagggcgacgagctccccttcgagttccgcgccctcgagctcgccctcgaggccgcctgctccttcctcgacgcccaggcagcagaattggaaattgaagcatatcccttactggatgagctaacatcaaaaattagtactctaaatctggaacgtgttcggcggctaaaaagtagactagttgctctgaccagaagagtccagaaggtcagggatgaaatagaacaactgatggatgatgatggagatatggctgagatgtatctcaccgagaaaaagatgaggatggaatcatcatctgtgtttggtgatcagtcgttggcgaccttcaacgcagcagctgctgggacttcagtttcagctcccgtgtctccagtctcgtcaccaacagaatcacggaaattggagaaaacctacagcttgtgtagaagtagacatgatagtgtaaagagctcagataacacagtgactgaacatattgaggagcttgaaatgttactagaagcatattttgtagtcatcgacagcactcttaacaagctgacctcgctgaaggagtatattgatgacaccgaagattttatcaacattcagctggacaacgtgcggaatcagctgatccagttcgagcttttgctaacaaccgccacatttgtcgtcgccattttcggagtggtcgcgggtgttttcgggatgaacttcgagaccgacgttttcaacatccagaacgcgttccagtgggtgctgatcattactggagtggttggcgctttcgtcttctgcttcttcgtctggttcttcaagtacaagagactgatgcccctgtagatataagctcccgtcattatgcggactcaaccttctattctctgttaaggtacttgaccaaaaagacctgaatccatgtaaatcaacattttttcaggggcttgccgtgtacctactacaaaatcaaatgaaaacatataatttttccttactcttctgtaaatgggttattatagaaatagttctcaagtcttaaccatccatccttccaaatattttgcctattaataaaaacaggtatttgttggggtggttatagatgaaaaaaaaaaaaaaaa

SEQ ID NO: 4030 - protein, 447 aa, Triticum aestivum
  misc_feature: Ceres CLONE ID no. 833048
  misc_feature: Ceres CDNA ID no. 40351410
MADAVKQPLLHHQPYPYAYPSYAASASSPALPSVPHSGTATPTPGGGGGGAASSFAGGRRFPGGLDVPNLKKRGGGTRSWIRVEAATASVQTLEVDKATMMRRCELPARDLRLLDPLFVYPSTVLGRERAIVVNLEQIRCVITADEVLLLNSLDSYVFQYAAELQRRLLQRAEGDELPFEFRALELALEAACSFLDAQAAELEIEAYPLLDELTSKISTLNLERVRRLKSRLVALTRRVQKVRDEIEQLMDDDGDMAEMYLTEKKMRMESSSVFGDQSLATFNAAAAGTSVSAPVSPVSSPTESRKLEKTYSLCRSRHDSVKSSDNTVTEHIEELEMLLEAYFVVIDSTLNKLTSLKEYIDDTEDFINIQLDNVRNQLIQFELLLTTATFVVAIFGVVAGVFGMNFETDVFNIQNAFQWVLIITGVVGAFVFCFFVWFFKYKRLMPL

SEQ ID NO: 4031 - DNA, 1845 bp, Triticum aestivum
  misc_feature: Ceres CLONE ID no. 833492
  misc_feature: Ceres CDNA ID no. 35383297
  CDS (348)..(1448): REFERENCED BY SEQ ID NO: 4032
atttttccccaaaatctcaaacccgttccctcacctcgacggctcgacctaaccgtcgtcagcccgccacgctccgacacgcgcccagccgccacgccacgccctgccctctctgctcctcgacgcagccgccacactcccctgcgctctcgtctgtccctcgggaatctgtggccggcacgagcgggcaagcggcgcaccaccgcggcggcggtagcacgctagtggggaagcgggggcggcggatccgggaagagcagcggcggcagatcgggaagagaagcatcagccatcagcaagaccccctcccttcaagaacgaaggctaaggctgcaattgccggcgtgatgaacaagcgaccccgcgaggacgagccttcctcctcccaaaagcgccagtttggtgcaggtggcggctatggggagcaagaagggtactcggaggagcggatcagtgcgcagcgggtggcggaccactacagtgcccggtcgaatcagacgctcgaggagcgtgagaacagccccatcatccacctcaagaagctcaacaactggataaagagcgtcctggttcagctgtatgcacgtccaggagactgcgttctagatcttgcttgtggcaagggaggtgatttgataaagtgggataaggccaaggttggctattatgtaggggttgatattgcagaaggctcgataaaagattgcatgacccgttataacggcgactcggatcaacaacgaaggaagaagttcagttttcctgcacggcttatttgtgctgactgttatgagactcggctggatgagtatctacgtgaggatgctccatttgacatatgcagctgccagtttgcaatgcactactcatggtcaactgaagcacgtgcaagacaagccctcgcaaatatatctgcattgcttcgtcctggaggcacgttcattggaacgatgcctgatgctaatgtcattattaaaagactaagagaatctgaagggatggagtttgggaacagtgtttactgtattacctttggtgaagagtacacagaaaagaaattcccggcatccaggccttttggtatcaagtacaagtttcatttagaggacgcagttgattgcccggagtgggttgttccattccatctcttcaaactactggcagaggagtatgatttagagctggttctaatgaagaacttccatgaatttgtacacgactatgtgcaaaggccagagtttgctgatctcatgcgaaggctggggcctctgggtgatggacgatcgggccaaagcacgctgtcacaagatgagtgggaggcatcctatctttaccttgcatttgttttgcggaagcgaggccctccaccgtcccagcggagagccaacaatcctaacagagggaagacgttcctcgccgaggaggacatcgagtttcttagcatatgaagcaggctttgccgtcctggagcttactaacaacttaccgattatatgcttcacattgtggtgatgaaagttgtatctttagtggctcacctgtgatctccccaaggcgtacccgatatatataacttcactaagtttaatgttcgcacgaactagttactcatgtaattttgcagagatgaacacatatttaggtgtcatacatagttgatgcgatagctctcaagttctacgcggaacatcagaatatttgttcaggcatttttcttgtaaagtagtacttgcactaggcacacccccaattcctgagaaggttgggcttgaatctctcttattccaccgcctctctcttcaattgaacatcaaacactttgacgcttcaaaaaaaaaaaaaaaa

SEQ ID NO: 4032 - protein, 366 aa, Triticum aestivum
  misc_feature: Ceres CLONE ID no. 833492
  misc_feature: Ceres CDNA ID no. 35383297
  misc_feature (28)..(62): Pfam Name: Pox_MCEL PFAM Desc: mRNA capping enzyme
  misc_feature: Homolog of GI Number: 42572501 NR Desc: mRNA capping enzyme family protein
  misc_feature: Homolog of GI Number: 50941687 NR Desc: putative mRNA cap methyltransferase
  misc_feature: Homolog of GI Number: 19075210 NR Desc: mRNA cap methyltransferase
  misc_feature: Homolog of GI Number: 57225706 NR Desc: mRNA
  misc_feature: Homolog of GI Number: 72012887 NR Desc:  similar to RNA
  misc_feature: Homolog of GI Number: 68392632 NR Desc:  similar to RNA
  misc_feature: Homolog of GI Number: 48095789 NR Desc: mRNA 5' cap
  misc_feature: Homolog of GI Number: 37359924 NR Desc: mKIAA0398 protein
  misc_feature: Homolog of GI Number: 50736564 NR Desc:  similar to RNA
  misc_feature: Homolog of GI Number: 5478275 NR Desc: RNA
MNKRPREDEPSSSQKRQFGAGGGYGEQEGYSEERISAQRVADHYSARSNQTLEERENSPIIHLKKLNNWIKSVLVQLYARPGDCVLDLACGKGGDLIKWDKAKVGYYVGVDIAEGSIKDCMTRYNGDSDQQRRKKFSFPARLICADCYETRLDEYLREDAPFDICSCQFAMHYSWSTEARARQALANISALLRPGGTFIGTMPDANVIIKRLRESEGMEFGNSVYCITFGEEYTEKKFPASRPFGIKYKFHLEDAVDCPEWVVPFHLFKLLAEEYDLELVLMKNFHEFVHDYVQRPEFADLMRRLGPLGDGRSGQSTLSQDEWEASYLYLAFVLRKRGPPPSQRRANNPNRGKTFLAEEDIEFLSI

SEQ ID NO: 4033 - DNA, 1236 bp, Triticum aestivum
  misc_feature: Ceres CLONE ID no. 833586
  misc_feature: Ceres CDNA ID no. 40351411
  CDS (62)..(748): REFERENCED BY SEQ ID NO: 4034
aaaaatcaccttatccgcaacccgcaaaaacctcacttcccccacacgcacgctcgcttcaatggctgccctgccgaccgccgccgccgccgggcgcgtagcggccagcgccttcacgttccctgccaagccctccttatcctccttctcagccgcgtctctcccccgcgccgcagccgcggcggcggccttttcagcgatcgccctcgcaccggcggggagcctccagcgtcggcggaggccgacggcggccggcgcagcgcccgggagcgagcagagggagacgatactgctccccgggtgtgactacaaccactggctgatcgtcatggagttccccaaggaccccgcgcccacacgcgagcagatgatcgacacctacctcaacaccctcgccaccgtcctcggcagcatggaggaagccaagaagaacatgtatgccttcagcacaaccacttacactgggttccagtgcactgtcgatgaagaaacatcagagaagttcaagggtttgcctggtgtcctgtgggtgctccctgattcctacatcgatgtgaaaaacaaagactatggaggtgataaatacataaatggtgagatcattccatgcacatacccaacctatcaaccaaaggagcggaggacctcaaagtacgaaagcagacggtatgagaggcgaagagatggccctcctgccagcaggaaaccgaaacaacaggccactcagcctgagtcggcgtcttcatgagttttgcaggcgattactcgcatactgaaacaacagagagtgctcaattctatcatctgactccgccaccatgtattgggagagcttctaggcacacaatttcatccaaagcccaaaatatgatgtagcacttgagcgagcgacctgcgcagctggatttggggttttggaccacaaggatatcttgagtggactaaatctaagtgtaacaaaagactgaaatcctggtccatcaaaaatgttattcctcaagtatcttgtgatattttctgtaatgtttagtggtatccctgatcgtgagagttcattcacattgagcttgattgaactgaagttagcttttagtcgtgataaggatagtcagattgtgcttggaatttaggatgttgagtggagtgtgattgaaagtccttgttatgtggaatgcggtgaatgtgtgcacttgtcattgtagcttgttattgttccaagcaaaaaaaaaaaaaaaa

SEQ ID NO: 4034 - protein, 228 aa, Triticum aestivum
  misc_feature: Ceres CLONE ID no. 833586
  misc_feature: Ceres CDNA ID no. 40351411
MAALPTAAAAGRVAASAFTFPAKPSLSSFSAASLPRAAAAAAAFSAIALAPAGSLQRRRRPTAAGAAPGSEQRETILLPGCDYNHWLIVMEFPKDPAPTREQMIDTYLNTLATVLGSMEEAKKNMYAFSTTTYTGFQCTVDEETSEKFKGLPGVLWVLPDSYIDVKNKDYGGDKYINGEIIPCTYPTYQPKERRTSKYESRRYERRRDGPPASRKPKQQATQPESASS

SEQ ID NO: 4035 - DNA, 1421 bp, Triticum aestivum
  misc_feature: Ceres CLONE ID no. 833597
  misc_feature: Ceres CDNA ID no. 35383298
  CDS (276)..(1181): REFERENCED BY SEQ ID NO: 4036
aagttaccgtataaagcgaaggaaagcggttttccccaaagggcgtcctcccttcccctccccatctgcacactgccgccacgccactacactgccgccgggacagcttgcttccccgctgcctcgcgccgccgggatccgcctagggctcgccttccccgctcgccaggaaccccacctcccgccggccgccgcaccgttctccgccgtcagaggaaagcaagcggaacagcgcgggtcgaggaaggggtaggtgaggaggagagaggtgggagatggccggcgctgggaggaaagtggccgtcgccgccgtgcagttcgcctgcaccgacacggtggccgacaacgtcgccgccgccgagaggttgattagagaagctcataagaaaggtgcgaacatcatcctcattcaggagctatttgaggggcactatttctgtcaagctcaaaggatggatttctttgggcgtgccaagccttataaagagaacccgactataatgagaatgcaaaaacttgcaaaggagttggatgttgtaatacctgtaagtttctttgaagaagcgggcaatgctcattataattccgtggccattattgatgctgatggcaccgatcttggtctataccgcaaatcacacattccagatggaccaggttatcaagagaaattttatttcaacccgggtgacactggattcaaggctttcaaaaccaagtatgcaacaattggtgttggaatttgctgggatcagtggttcccagagaccgcaagggctatggtgctacagggggcagaaatattgttctatcccactgctattggttctgaaccccaggatatgaacctggactcccgcgaacactggaagcgtgtcatgcaaggccacgccggcgctaacttggttcctcttgttgcttctaaccggatagggaaggaaacggttgagactgagcatgggaacagcaccataaagttctacgggaattcgttcatcgcagggccaactggagaaatcgtgaagctcgcaaacgacaaagatgaggaggtgctggtcgcggagtttgacttggacgagatcaaatctacgaggcacggctggggtatattcagggacaggcgtcctgatctatacaaagtgctactgacgttggatggcaagacatcatcatcatcctaggttccacttttttgaagaggacacgaggtccgcaataccgggagaacaccaaacggtagatcgatcttcttgtctagcttcgccctgcataaatagtgatcggcctctgcgtttccagcttggtgattttcgaccgatacataacatgaataaaaataccgtcatgtgatgatgatgtgaccggaaccagaatatttgaaatgaaagcaatatgaaaatgatgcaaaaaaaaaaaaaaaa

SEQ ID NO: 4036 - protein, 301 aa, Triticum aestivum
  misc_feature: Ceres CLONE ID no. 833597
  misc_feature: Ceres CDNA ID no. 35383298
  misc_feature (9)..(182): Pfam Name: CN_hydrolase PFAM Desc: Carbon
  misc_feature: Homolog of GI Number: 76160960 NR Desc: beta
  misc_feature: Homolog of GI Number: 50253039 NR Desc: putative beta
  misc_feature: Homolog of GI Number: 5262946 NR Desc: beta
  misc_feature: Homolog of GI Number: 21554187 NR Desc: putative nitrilase
  misc_feature: Homolog of GI Number: 21689871 NR Desc: putative nitrilase
  misc_feature: Homolog of GI Number: 25407897 NR Desc: probable nitrilase
  misc_feature: Homolog of GI Number: 71736941 NR Desc: carbon
  misc_feature: Homolog of GI Number: 28855757 NR Desc: carbon
  misc_feature: Homolog of GI Number: 63258864 NR Desc: Nitrilase/cyanide hydratase and apolipoprotein N
  misc_feature: Homolog of GI Number: 15595490 NR Desc: probable hydratase
MAGAGRKVAVAAVQFACTDTVADNVAAAERLIREAHKKGANIILIQELFEGHYFCQAQRMDFFGRAKPYKENPTIMRMQKLAKELDVVIPVSFFEEAGNAHYNSVAIIDADGTDLGLYRKSHIPDGPGYQEKFYFNPGDTGFKAFKTKYATIGVGICWDQWFPETARAMVLQGAEILFYPTAIGSEPQDMNLDSREHWKRVMQGHAGANLVPLVASNRIGKETVETEHGNSTIKFYGNSFIAGPTGEIVKLANDKDEEVLVAEFDLDEIKSTRHGWGIFRDRRPDLYKVLLTLDGKTSSSS

SEQ ID NO: 4037 - DNA, 1567 bp, Triticum aestivum
  misc_feature: Ceres CLONE ID no. 833625
  misc_feature: Ceres CDNA ID no. 29191560
  CDS (61)..(1305): REFERENCED BY SEQ ID NO: 4038
atatacgacctcgatccccctcctcccccaacaagtcgaatccgcccgcgttgaggaaggatgtgctcccaagcccccaaatccctagacctagacctcgacctcgacccctccccagtccccagatccctagacctcgaccccgaatcccaaccctgccccggcgtgacgacgacggccgagctccccgacgaagcggagaacccctgcttgtcgcggtttcgccaccggcgactcctcgccttcctctcgcgccagcgctacgatgtcgccttcaacgggctgatgctacaggcgagtgagcccttctgcttggagcgtctgcaggggctcgtgaggaagggcctgtgggaggatgccatcgactaccttgatggcttcctgcctgccggccccaggagcctccacgcccacgccttccgcaacttcctcttgatgcaccactacttggccagcatcgccgccggggatgagtccgccatggacaagctccgggcccaccattggatgcaacacgtcgttgatgcctggaaaacgaaagcgaaccacacatttcctcgtgtcatggcccaagccctgctctcgtcggagcagctccgggcgtccatggactgggatggattgaggagggaggctgcgtacatcctctccaggttagcttcgaggaccccagagctcaacaggccgctcacattgccgacttgctacaccaagccgcaccaagtgcttcccattgacgttgcctctggattgtgcaggcggcggcgcgtgaaggaacagcgtccccatctacaaccagctgctgttgccagggccatccttttcagggggagtcagcgttacacaagatctctagccaactcaagtttcgaattcattgagaatgcaaaggaatggtttgcgactatcatggatgaaagcttacgagctggttcaggtaaagcgacttccctgctccaacaaattatgaaggaaggtgctcctgttgctccagtttcactgataagtcctgctaaaagttctggtacctcgtcattgacaaatgcaggtgctcctgtttcttcagtgtgccagactctgaacatgacaagagacgctgaaaactatggtatctcatcagtgacaagtccaggcccagaaaagagtcaagaaggtgcctgcggtggtttcaatcccagaaagaatccacgggcagaattggcaactattgatgaatatttggattcaaaaaggcaacgtactactgggacttttggggaagcaagtatggtgccggtgaatgaagtttgggctgaagctcactagctggctggtgaagtcaaccacctagattcataaccgagatatggtgacaatggtggtggtggtggtgtacctgctaactcgcacttcatttatgctttgaacttggatgttaattatacaactttgtttccaagtgcctactatgagctagtacttcataagtaattctgctagtgttggttaatcaggctgcttactgccagcattttctatcactgaaatgaaaattaatcagattattggatcaaaaaaaaaaaaaaaa

SEQ ID NO: 4038 - protein, 414 aa, Triticum aestivum
  misc_feature: Ceres CLONE ID no. 833625
  misc_feature: Ceres CDNA ID no. 29191560
  misc_feature: Homolog of GI Number: 50928743 NR Desc: OSJNBa0093O08.7
  misc_feature: Homolog of GI Number: 50928699 NR Desc: OSJNBa0008M17.1
MCSQAPKSLDLDLDLDPSPVPRSLDLDPESQPCPGVTTTAELPDEAENPCLSRFRHRRLLAFLSRQRYDVAFNGLMLQASEPFCLERLQGLVRKGLWEDAIDYLDGFLPAGPRSLHAHAFRNFLLMHHYLASIAAGDESAMDKLRAHHWMQHVVDAWKTKANHTFPRVMAQALLSSEQLRASMDWDGLRREAAYILSRLASRTPELNRPLTLPTCYTKPHQVLPIDVASGLCRRRRVKEQRPHLQPAAVARAILFRGSQRYTRSLANSSFEFIENAKEWFATIMDESLRAGSGKATSLLQQIMKEGAPVAPVSLISPAKSSGTSSLTNAGAPVSSVCQTLNMTRDAENYGISSVTSPGPEKSQEGACGGFNPRKNPRAELATIDEYLDSKRQRTTGTFGEASMVPVNEVWAEAH

SEQ ID NO: 4039 - DNA, 617 bp, Triticum aestivum
  misc_feature: Ceres CLONE ID no. 834257
  misc_feature: Ceres CDNA ID no. 40351412
  CDS (81)..(413): REFERENCED BY SEQ ID NO: 4040
tagaagccccctgcctcctgcgcctccacttccatcgcctccccaagatcgcagatccgctccggtgagaatccgtcgccatgtcttccagcgaggtcgcctgcacccttgccgccctcatcctccacgatgacgggatccccatcacttctgagaagatcgcgacggtggtgaaggctgccggaatcaaggttgaggcctactggcccgcgctcttcgccaagctcctggagaagaggagcgtcgatgacctcatcctttccgtcggatctggtggaggtggtgctccagctgctgctgctgctgccccggctgctggtggtgctgctgccgctgaagagaagaaagaagagaaaaaggaggaggccaaggaagagagcgatgatgacatgggcttcagcttgtttgactaagcagttcaattccagctctcctgtggaatctgctatgctaaagattacctatcttatgtgcttttaggttgaattttgcggatttgatatgtaattctgttgagacctaagtatctgtgcaatgagtactgcaaaccaccttgggatggtctttttagaatgaaaatggttctacattatgtgccttcaaaaaaaaaaaaaaaa

SEQ ID NO: 4040 - protein, 110 aa, Triticum aestivum
  misc_feature: Ceres CLONE ID no. 834257
  misc_feature: Ceres CDNA ID no. 40351412
  misc_feature (21)..(109): Pfam Name: Ribosomal_60s PFAM Desc: 60s Acidic ribosomal protein
MSSSEVACTLAALILHDDGIPITSEKIATVVKAAGIKVEAYWPALFAKLLEKRSVDDLILSVGSGGGGAPAAAAAAPAAGGAAAAEEKKEEKKEEAKEESDDDMGFSLFD

SEQ ID NO: 4041 - DNA, 2547 bp, Triticum aestivum
  misc_feature: Ceres CLONE ID no. 835061
  misc_feature: Ceres CDNA ID no. 29191823
  CDS (366)..(2210): REFERENCED BY SEQ ID NO: 4042
agaaatccaacggcgaaaaacatactccctcggttctccccgacccgtcggtggaggtggagcagaactgtcaagctcggggttgggcgaatcccaccgccctcggaaaatcgggggaaacccagctctaaaaccccgagattttgaccccgggttctctcccagccgttacagcagcgccgcggaagctgccgttcgcctaggagctggcggtaacccgggatccggccggcgaaccattctcccccgcgagcagctgcccgcgcctcaagccctctacggcggcttcctcagctccgagctccgtccttcctcccgtcgccacatcgcagtctttcgacattgggttgtgaggataaaccataatggccgtcaaggggggtcctgcggacaacaggactagaagcactgtgtctatatgcatagtgattggcttgtgctgcttcttctacatcctcggggcgtggcagaagagtggcttcggaaagggggacagcattgccctggagatcacgaagcggaccgattgcaccatcttaccgaacctcagcttcgacacacaccattctaaacaaggcagctccggcgatctggtttcgccggtgaagaagtttaagccatgcccggaccgcttcacagactatacaccttgccaagatcaaaacagagctatgaaatttcctcgggagaacatgaattacagagagcggcattgcccaccgcagaaagaaaagttgcactgcctggtaccaccgcctaagggatatgttgctccattcccatggcccaaaagtcgggactatgttcctttcgcgaattgtccctataagagcttgactgtcgagaaagccatacagaactgggtgcagtatgagggcaacgtcttcagattccctggtggagggactcagttccctcaaggtgctgataagtacattgatcaattggcatcagttataccgattgccaacggaaccgtcaggactgcattggacactggttgcggggtggctagttggggagcttacttgttaaagaggaatgttttagccatgtcgtttgcacccagagattcacacgaagcccaagtacagtttgctctggagagaggtgtcccagctgttattggtgttcttggcacaattaaactcccttatccatcaagagcctttgatatggctcattgttctaggtgcttgattccatggggaatgaatgatggactctatatgatggaagttgatagggttctaagacctggtggatactgggtgctgtcaggtcctccaattaactggaaggcgaactacaagggttggcaacgtacaaaggaggatcttgaggcagagcagaacaagatagaggaaatggctaagcttctatgttgggagaaagtctcggagaagggtgagacggcaatatggaggaaaagagtaaatactgagtcctgtccttctaggctagaagaatcaactgtgcagatgtgtgaatcaacaaatgcagatgatgtctggtacaagaagatgaaggcatgtgttacacctcttcctgatgtagaaaatccaagtgaagttgccggaggagcaatcgagcccttcccaagcaggctcaacgcaattcctccaagaatttctaatgggttaattccaggggtttcatctcaggcatatcagaaagacaacaaaatgtggaagaagcatgtgaaggcttatagcaatgtgaacaagtatctacttactggtaggtacagaaacatcatggacatgaatgcaggttttgggggttttgctgcggcgattgagtccccaaaatcttgggtgatgaatgtggtgccaaccattgcaaagattgcaaccctgggggctgtttatgagcgaggattgattggcatttaccatgactggtgtgaagctttctctacttatccaagaacctatgatcttatccacgctagtggccttttcaccttgtatagcaataagtgcagcatggaagacatcctccttgagatggaccgcatcttgaggcctgaaggtgctgttataatgcgtgacgatgtcgatgtcttgacaaaggtgaacaaactcgctcggggcatgagatggaacacgaagctagttgaccacgaggacggccctctagtgcgcgagaagatcttgtatgctgtgaagcagtattgggttggcggaaaccagacggccgcatcgtgaagaacatattctaacacggggaattctgggatccacctttgaagctggcgtccaggaattgagatatggagtcatcaggtgcaaacaaaaatggcctactcttctccggggtagcaatgaagcaaccaaggttcatcggtagcagtatattgttgtaacagttttgttatttaatttgattcgtcactcggcatgaagttactctggttaattgaaggatgtattgtcaagaaatattattgctttagtttctgtaattttgctcatgctgcaacttctgaatgtttgctttattaccagtaatcccattgcttcgtttttaaaaaaaaaaaaaaaa

SEQ ID NO: 4042 - protein, 614 aa, Triticum aestivum
  misc_feature: Ceres CLONE ID no. 835061
  misc_feature: Ceres CDNA ID no. 29191823
  misc_feature (92)..(602): Pfam Name: DUF248 PFAM Desc: Putative methyltransferase
  misc_feature: Homolog of GI Number: 51469000 NR Desc: Ankyrin protein kinase
  misc_feature: Homolog of GI Number: 23308473 NR Desc: At1g26850/T2P11_4
  misc_feature: Homolog of GI Number: 50928057 NR Desc: OSJNBa0088I22.11
  misc_feature: Homolog of GI Number: 50253255 NR Desc: dehydration
  misc_feature: Homolog of GI Number: 50253003 NR Desc: dehydration
  misc_feature: Homolog of GI Number: 77551793 NR Desc: methyltransferase
  misc_feature: Homolog of GI Number: 47824983 NR Desc: putative methyltransferase
  misc_feature: Homolog of GI Number: 48057593 NR Desc: putative methyltransferase
  misc_feature: Homolog of GI Number: 53749450 NR Desc: putative methyltransferase
  misc_feature: Homolog of GI Number: 47825032 NR Desc: putative methyltransferase family protein
MAVKGGPADNRTRSTVSICIVIGLCCFFYILGAWQKSGFGKGDSIALEITKRTDCTILPNLSFDTHHSKQGSSGDLVSPVKKFKPCPDRFTDYTPCQDQNRAMKFPRENMNYRERHCPPQKEKLHCLVPPPKGYVAPFPWPKSRDYVPFANCPYKSLTVEKAIQNWVQYEGNVFRFPGGGTQFPQGADKYIDQLASVIPIANGTVRTALDTGCGVASWGAYLLKRNVLAMSFAPRDSHEAQVQFALERGVPAVIGVLGTIKLPYPSRAFDMAHCSRCLIPWGMNDGLYMMEVDRVLRPGGYWVLSGPPINWKANYKGWQRTKEDLEAEQNKIEEMAKLLCWEKVSEKGETAIWRKRVNTESCPSRLEESTVQMCESTNADDVWYKKMKACVTPLPDVENPSEVAGGAIEPFPSRLNAIPPRISNGLIPGVSSQAYQKDNKMWKKHVKAYSNVNKYLLTGRYRNIMDMNAGFGGFAAAIESPKSWVMNVVPTIAKIATLGAVYERGLIGIYHDWCEAFSTYPRTYDLIHASGLFTLYSNKCSMEDILLEMDRILRPEGAVIMRDDVDVLTKVNKLARGMRWNTKLVDHEDGPLVREKILYAVKQYWVGGNQTAAS

SEQ ID NO: 4043 - DNA, 905 bp, Triticum aestivum
  misc_feature: Ceres CLONE ID no. 835240
  misc_feature: Ceres CDNA ID no. 24727186
  CDS (189)..(563): REFERENCED BY SEQ ID NO: 4044
atcagtctatggacttgtgattggatccaggtagccggctttgccctttccgcctctataaatgccgccccacgctctcgtccacagcaaaacccaacggagctacgtataactagtcactctgctctctcactccaccgcacacactcacagagggacgcagagaagcaccaggggagtccggagtgatggcaatggctcagggaagaggcagtgcggcgcagggcttcgccctcggcttcctcgtgctgtgcctcctcctcggcgccgccaccgccggcgccgccacctacaacgtcgactggtcgttcgccgccggcagctggcccagccgcaagaccttccgcgcaggggacgtcctcgtgttcagctacaacccggtcgtgcacaacgtggtggcggtggacgccggcggctacaacagctgccgcggctccggcgcgacgcacacctacacctcggggagcgaccgcgtgaccctcgtccccgggacgaactacttcatctgcagcctcagcggccactgcgggctcgggatgaagatggccgtcactgcaaactgaagcgagtctagctgcagcttccggtttcagaaaagctagctgcggctgcgatgccatccgtgcgcatgtgaaaacatcaataaagtgttgtggaactcagtgactccccgcgtgttgtatcctgagttgttaacatgatacagaagccagcagtgtgcatcaattgatgcagagacggaggtggtatccttcttttcggaaggaaagaaaaatacagcagccagtaggcatgcgttatgtgtggatatggagggtggtaggtaacgcatgatgtttgtatgaacgatcgccggcatggcagtaaagaacctcggactggtttgttcaaaaaaaaaaaaaaaa

SEQ ID NO: 4044 - protein, 122 aa, Triticum aestivum
  misc_feature: Ceres CLONE ID no. 835240
  misc_feature: Ceres CDNA ID no. 24727186
  misc_feature (37)..(115): Pfam Name: Cu_bind_like PFAM Desc: Plastocyanin
  misc_feature: Homolog of GI Number: 44887717 NR Desc: Chemocyanin precursor
  misc_feature: Homolog of GI Number: 50918197 NR Desc: putative basic protein
  misc_feature: Homolog of GI Number: 50918193 NR Desc: putative disease resistance protein
  misc_feature: Homolog of GI Number: 3395754 NR Desc: plantacyanin
  misc_feature: Homolog of GI Number: 21536649 NR Desc: putative basic blue protein plantacyanin
  misc_feature: Homolog of GI Number: 20453369 NR Desc: At2g02850/T17M13.2
  misc_feature: Homolog of GI Number: 50920109 NR Desc: putative basic blue copper protein
  misc_feature: Homolog of GI Number: 3860333 NR Desc: basic blue copper protein
  misc_feature: Homolog of GI Number: 14164559 NR Desc: putative S
  misc_feature: Homolog of GI Number: 6688810 NR Desc: basic blue protein
MAQGRGSAAQGFALGFLVLCLLLGAATAGAATYNVDWSFAAGSWPSRKTFRAGDVLVFSYNPVVHNVVAVDAGGYNSCRGSGATHTYTSGSDRVTLVPGTNYFICSLSGHCGLGMKMAVTAN

SEQ ID NO: 4045 - DNA, 1866 bp, Triticum aestivum
  misc_feature: Ceres CLONE ID no. 836129
  misc_feature: Ceres CDNA ID no. 40041337
  CDS (166)..(1608): REFERENCED BY SEQ ID NO: 4046
gactgtatatgctctataacagcgtgtctttattcctccgaacacacgacccccaagccagcaccgccgccctaccctaatcggcgccgccgccgtcgcgcgctgagctgcaaatcctcctctctattcgacgtttcctcttacgccgccacccccctgcctccaatgcaccgcctctcatcttcttcgcgacttcccatctctttcatggcatctgccccgcctcgctggtggccattagcgcttgcgcgacaaattatcccactcttggcggctccaaatccaccggcccgtcgtctttccagatttcctcatggatctcagaacctggccaccgtcagtcgagtacaaggcgatgaatctggtaaaccatataaacgactgcccatctcgatcgctcaaatgatgaaaaacatgaagactgacaatttaaaaaaattgaaaaatattgggacgaggggcactgtctcggaggttatagatgaagatgagaggaaaagtgataaagatgcttttaggacaacatcagaggttatggatgacaaaagtgatacatggggccaaaatgtgaacttacctggttttgaggaagaccaaagtagcgcagccaagaatcacattactgaaatcgctgtcagtgaggatgaaggactcagtgatgatgaaggatatagtgtgaacggtatacttgcaaaaagcagacaccgtgatggttctatatacagggatatggatttatatgattggaaaaaacattatcgcattgcagaccgtattgagactcggttggaggcaatgacattatcagatcctgctgcaaattgcaacgttcacgatggaatttgtactagacattttgctcgtagcatgctgcaaatttactcactagagttggctaaaattcctgtggatggcttagtagagttgtatggatatgtagcagtgcgggatgatctggatccattgcttaattatgttgtcaatattagcagagatgatcccgtcatcgtggagcagggttctctcatcaacatgattggccccaagcgagggatagatatggcagatcatgctctacttgaatatgacatgaagatcaagtcaggtgaacaagaaaaaaatgacctacagctgattgatggtgcatcattcataggccccttaggctcatgggatcaaccatgcacatttcacattgctggtgattgtggctcagttgacataactttgtcacgccttttaaaagcagttgaggcgaccgtagaggttctcatattggaagtgaaaagcagtttcagtttgtccgtcggatgtttagccagtgggtttaatgaagaaatccagctctttgatggcaccatcgctgattcacaaggcctaaagaggtccgtggttgctgtaatgaaaaactcttcgatagatttgaagttcaaggtaggcgcactgtcatccagttccgaccaacattgctgttctttcaaggcgaaaatgcacgggcatgatattgaagaaataaagactgattttgcattaatcttagtgaaggtgatttggtcgaccttgcctaggggcttttccgccatgtgtgatgggctggctcgtgattaacttggagtgtaataatcaaaactatcctagcaattctttgctaagtgtaataatcaaaacgacaagtctttgcatactcagtcgatgctccgagtcgttaagtgtaccagtggctgggttaagtgtactagtggatggggtgcgcctcgtgaggtgtaagtgtgcggtacttgtcatgctgttaaacttgttaatgtgtttgtacagcccatgggcgcgagttgcatcaaaacaacatactcaaaaaaaaaaaaaaaa

SEQ ID NO: 4046 - protein, 466 aa, Triticum aestivum
  misc_feature: Ceres CLONE ID no. 836129
  misc_feature: Ceres CDNA ID no. 40041337
  misc_feature: Homolog of GI Number: 50924728 NR Desc: OSJNBa0006M15.13
  misc_feature: Homolog of GI Number: 77548308 NR Desc: RNA polymerase II largest subunit
  misc_feature: Homolog of GI Number: 50924656 NR Desc: OSJNBa0086B14.25
MASAPPRWWPLALARQIIPLLAAPNPPARRLSRFPHGSQNLATVSRVQGDESGKPYKRLPISIAQMMKNMKTDNLKKLKNIGTRGTVSEVIDEDERKSDKDAFRTTSEVMDDKSDTWGQNVNLPGFEEDQSSAAKNHITEIAVSEDEGLSDDEGYSVNGILAKSRHRDGSIYRDMDLYDWKKHYRIADRIETRLEAMTLSDPAANCNVHDGICTRHFARSMLQIYSLELAKIPVDGLVELYGYVAVRDDLDPLLNYVVNISRDDPVIVEQGSLINMIGPKRGIDMADHALLEYDMKIKSGEQEKNDLQLIDGASFIGPLGSWDQPCTFHIAGDCGSVDITLSRLLKAVEATVEVLILEVKSSFSLSVGCLASGFNEEIQLFDGTIADSQGLKRSVVAVMKNSSIDLKFKVGALSSSSDQHCCSFKAKMHGHDIEEIKTDFALILVKVIWSTLPRGFSAMCDGLARD

SEQ ID NO: 4047 - DNA, 2393 bp, Triticum aestivum
  misc_feature: Ceres CLONE ID no. 837682
  misc_feature: Ceres CDNA ID no. 40351413
  CDS (214)..(1974): REFERENCED BY SEQ ID NO: 4048
cccctcattggctcccccgcctgcctccccccgatcgccacactccccgaccccgccgcgcggccaccgcgcccgcgccataaatcaagctagccagcgctgcttcacttgaacaacgcggcacctcacctcaccgccaccgcacacctcccctgccgcgccgccgtgacagagtaggaaggaaggcgcagcggcggcggccggcacggcaagatgatcacgggcacggacttctaccacgtcatgacggcgatggtgccgctgtacgtggcgatgatgctcgcgtacggctccgtcaagtggtggcggatcttcacgccggaccagtgctccgggatcaaccgcttcgtggcgctcttcgccgtgccgctgctctccttccacttcatctccaccaacaacccctacaccatgaacctccgcttcatcgccgccgacacgctgcagaagctcatcgtgctcgcgctcctcaccctctggagccacctctcccgcaacggctccctcgagtggaccatcacgctcttctccctctccacgctgcccaacaccctcgtcatgggcatcccgctcctcaagggcatgtacggcgacgagtccggcagcctcatggtgcagatcgtggtgctgcagtgcatcatctggtacacgctcatgctcttcatgttcgagtaccgcggcgccaggatcctcatcaccgagcagttccccgacaccgccggcgccatcgcctccatcgccgtcgacccggacgtcatgtcgctcgacggcaggagggacatgatcgagacggaggcggaggtgaaggaggacggcaagattcacgtcaccgtgcgccgctccaacgcctcccgctccgacatctactcgcgccgctccatggggttctccagcaccacgccgcgccccagcaacctcaccaacgccgagatctactcgctgcagtcgtcgcggaaccccacgccccggggctccagcttcaaccacaccgacttctactccatggtgggccgcagctccaacttcgccgccggggacgcgttcggcccggtggtgcgcaccggggccacgccgcgcccgtccaactacgaggaggacaaggccggcggcaacaacaacagcaagtacgggcagtacccggcgcccaaccccgcgatggcagcgccgcagaagccgtccaagaaggcggccaacgggcaggccaagggcgaggacggcaaggacctgcacatgttcgtgtggagctccagcgcgtcgcccgtgtccgacgtgttcggcaacggcaccgaggcgtacaacgacgccgccgccaaggacgtccgggtggccgccgcctcgccgcgcaaagcggacggcgtggagcgtgacgagttcagcttcgggaacaaggagagggacgcggaggccggcgacgagaaggccgcggcggagcagggcaccgcgggcctggtggcggcgcccacggtgatgccgccgaccagcgtgatgacccgcctcatcctcatcatggtgtggcgcaagctcatccgcaaccccaacacctactccagcctcatcggcctcatctggtccctcgtctgcttccggtggaacttcgttatgccggcgatcatcatgaagtccatcgccatcctgtccgacgccggcctcggcatggccatgttcagcctcgggctgttcatggcgctgcagccgcggatcatcgcgtgcgggaacaagcgggcgacgttcgccatggccgtgcggttcctgacgggcccggccgtcatggccgccgcctccatcgccgtcggcctccgcggcaccctcctccacatcgccatcgtgcaggcagcgctgccccagggcattgtccccttcgtcttcgccaaggagtacagcgtgcaccccgacatcctcagcacggctgtcatcttcggcatgctcatcgcgctgcccatcacgctggtctactacatcctgctggggctgtgagctaacggagacacggccgggctgcgtgcagccatgccggcgtggcgtaggagacagacggacagaggaggggacaagggagctgcagcggctccatgcgcctgccggggacatgatgcgtgctcctgcatgcgggaggctaattactactaggattcttaattaggtgtagggatcagatggggtgaggggaggaatgtttagggcaagagtttcagttgttggtaaattataaaggactgccaagatcaagggttggggaggcaaaggatcaatccggtttggggttttagaagatgtatgtactccatgggtgtgttggcagaggtttctttccctggagggaggatggctgggctgggttggccttgtaaaatggatgtcaatttgatgaaattaatgcaaaaaaaaaaaaaaaa

SEQ ID NO: 4048 - protein, 586 aa, Triticum aestivum
  misc_feature: Ceres CLONE ID no. 837682
  misc_feature: Ceres CDNA ID no. 40351413
  misc_feature (9)..(581): Pfam Name: Auxin_eff PFAM Desc: Auxin Efflux Carrier
MITGTDFYHVMTAMVPLYVAMMLAYGSVKWWRIFTPDQCSGINRFVALFAVPLLSFHFISTNNPYTMNLRFIAADTLQKLIVLALLTLWSHLSRNGSLEWTITLFSLSTLPNTLVMGIPLLKGMYGDESGSLMVQIVVLQCIIWYTLMLFMFEYRGARILITEQFPDTAGAIASIAVDPDVMSLDGRRDMIETEAEVKEDGKIHVTVRRSNASRSDIYSRRSMGFSSTTPRPSNLTNAEIYSLQSSRNPTPRGSSFNHTDFYSMVGRSSNFAAGDAFGPVVRTGATPRPSNYEEDKAGGNNNSKYGQYPAPNPAMAAPQKPSKKAANGQAKGEDGKDLHMFVWSSSASPVSDVFGNGTEAYNDAAAKDVRVAAASPRKADGVERDEFSFGNKERDAEAGDEKAAAEQGTAGLVAAPTVMPPTSVMTRLILIMVWRKLIRNPNTYSSLIGLIWSLVCFRWNFVMPAIIMKSIAILSDAGLGMAMFSLGLFMALQPRIIACGNKRATFAMAVRFLTGPAVMAAASIAVGLRGTLLHIAIVQAALPQGIVPFVFAKEYSVHPDILSTAVIFGMLIALPITLVYYILLGL

SEQ ID NO: 4049 - DNA, 1785 bp, Triticum aestivum
  misc_feature: Ceres CLONE ID no. 837840
  misc_feature: Ceres CDNA ID no. 25446646
  CDS (157)..(1536): REFERENCED BY SEQ ID NO: 4050
ctaaaaaaaaaggaggcggcggcggcgcgcgtgaagcagcgccaaggacacaatcaggaacggcaagccggcgaccaggacggacatcagctccctctttggtgactttctcctcagctggctgcagggtcacccactagaacggagcctgggaaaatgatggccacccttctcccaaccttatcatcgccggtttcatgggccactgcattcctcctcagaaccccactaaaatcctcccgctctcaccatcctcttctccgcagcctccttgcttctgcttctcccctatcatcccctcgtactccccgctccctcatcaccatggcctccgcagctatccctgcccgccgggacctcctcatgctcggcatcgagaccagttgcgacgacactgccgccgccgtggtcagaggcgatggggagatccttagccaagtgattgcttcccaatcagatttgcttgtaaaatggggcggtgttgctcctaagatggccgaagaagctcatgctcttgcaattgatcaggttgttcagaaagcacttgatgaggcaaatgtttcagagagtgatctttctgctgtggccgtgaccattggaccaggacttagtctatgccttagagttggtgttcacaaagctcggaaaatagcaaaagtatttcacttgcctattgttggagttcaccatatggaggcacatgcattagtttccaggctagtgaacaaggacgttgattacccgtttttggctcttctaatttcaggcggacacaatcttcttgttcttgctcagaaccttggtgagtatgttcaactggggactacaatagatgatgcaattggcgaggcatatgacaagtcagcaagatggctgggtcttgatatacggaaaggtggtggtcctgctcttgaagagcttgccctagaaggtgatccaaattctattaatttcagagttccgatgcgacaacacaaagattgcaatttctcttatgctggtctcaagactcaagttcgattggccattgaatccagaaatctgtgcacagatgatatccccatttcatctgcaacagaagaagacagacaactaagggcaaacattgctgcctctttccagcggatagctgttctacatttggaggatagatgccagcgagcagttgaatgggcattgaagatggagccttctattaaacactttgttgtttcaggtggtgttgcatcgaaccaatatgttagggcacgcttgaatcatattgctgagaagaatggcctacagcttgtatcccctcccccaagtctttgtactgacaatggtgtcatgattgcttggactggaatcgagcactttgttgccggtagatttgaagatccacctccagctgatgagcctgacgatatgcagtatgagttgcgtccaagatggcctcttggcgaagaatactcagaaggaagaagtgtttcacgatcattgagaacagctaggatccatccatcacttacatccatgatgaagagctctcgcagctagttcggtcggaccatcgatcttggctgcgtgctgccattgagttccacataatccagttttgggaccattacctgggtaaccctgctcacctttatttgtcattgcagtaattatttgcaaaggcctgagctgattttctgttcattgtacacctgagaagcaaacaagatgtttgctgctccatggcttgatatttgaatctatattatgtttatacatatgagatatagtccaaaaaaaaaaaaaaaa

SEQ ID NO: 4050 - protein, 390 aa, Triticum aestivum
  misc_feature: Ceres CLONE ID no. 837840
  misc_feature: Ceres CDNA ID no. 25446646
  misc_feature (38)..(127): Pfam Name: Peptidase_M22 PFAM Desc: Glycoprotease family
  misc_feature: Homolog of GI Number: 77555725 NR Desc: O
  misc_feature: Homolog of GI Number: 77555726 NR Desc: O
  misc_feature: Homolog of GI Number: 25408940 NR Desc: probable O
  misc_feature: Homolog of GI Number: 21436377 NR Desc: putative O
  misc_feature: Homolog of GI Number: 47026853 NR Desc: O
  misc_feature: Homolog of GI Number: 50750033 NR Desc:  similar to O
  misc_feature: Homolog of GI Number: 61100491 NR Desc: metal
  misc_feature: Homolog of GI Number: 52627174 NR Desc: O
  misc_feature: Homolog of GI Number: 22204219 NR Desc: novel glycoprotease
  misc_feature: Homolog of GI Number: 34875824 NR Desc: similar to putative sialoglycoprotease type 2
MLGIETSCDDTAAAVVRGDGEILSQVIASQSDLLVKWGGVAPKMAEEAHALAIDQVVQKALDEANVSESDLSAVAVTIGPGLSLCLRVGVHKARKIAKVFHLPIVGVHHMEAHALVSRLVNKDVDYPFLALLISGGHNLLVLAQNLGEYVQLGTTIDDAIGEAYDKSARWLGLDIRKGGGPALEELALEGDPNSINFRVPMRQHKDCNFSYAGLKTQVRLAIESRNLCTDDIPISSATEEDRQLRANIAASFQRIAVLHLEDRCQRAVEWALKMEPSIKHFVVSGGVASNQYVRARLNHIAEKNGLQLVSPPPSLCTDNGVMIAWTGIEHFVAGRFEDPPPADEPDDMQYELRPRWPLGEEYSEGRSVSRSLRTARIHPSLTSMMKSSRS

SEQ ID NO: 4051 - DNA, 2188 bp, Triticum aestivum
  misc_feature: Ceres CLONE ID no. 838298
  misc_feature: Ceres CDNA ID no. 29191824
  CDS (447)..(2021): REFERENCED BY SEQ ID NO: 4052
aaaaggaaaaggttagggggaaggaaaagagaggcaccaccacggcacggcacgagaaaggctggcgacttcagtggtgtagtggtacgctagcagccagccgcagtatctctagcatcgtagtgccgcggattgctcttgccgttcgcacttcaccaccatcacaatccccgcagcctttttcctcaacagatttcgtccgggctcctgcaaaggggcgctgaggctcttgagtgctgtgcgcggcggaagcaagcccccgtccggttgtcttcttcccccgccagaggacaaggagcggtcacaagggatcaccgccagggccgccgtgcgctgccttcataagcgagggagggaggcaatcctgtggagtgcggtacagagcagcggcgtttcttctttctttcttcttcctctcgtcgacggtgcgaggccagcaaggggagatgtcggaggtgaagccggaggagatcagccactcggccatggagcagctccaggggttcgagtactgcatcgactccaaccctccatggggggaggccatcatactgggctttcagcactacatcctggcgctgggcacggccgtcatgatcccggcggtgctggtacccatgatgggcgggagcgacggagacagggtgagggtggtgcagacgctgctcttcgtcaccggcatcaacacgctgctgcagtcgctcttcgggacgcggctgcccacggtcataggcggctcctacgccttcgtcatcccggtgatggccatcgtgcaggactcgtcgctcgcggccatacccgacgaccacgagaggttcctccagagcatgagggccatacagggggcactcatagtgtcctccagcattcagatcatccttggttacagccagctctggggtattttctccagattcttcagtccactgggaatggcgccggtggttgcgcttctcggttttggtctcttcgaaagaggattccctgtggttgggagatgcgttgaggttggcctgccaatgttaatcctctttgttgtgctttcccagtatctgaagaatgtacagataagagagatccccatactggaacgattctccctgttcatttgtatcgcattggtctgggcttatgctcaaatcctcacttctggtggcgcgtataatcatagcaccgaggttactcagatcaactgccgcactgaccgtgccaatctgatctcttctgccccatggattaagatcccatatcccctgcagtggggggcaccaaccttcagtgccggccaatcgttcggtatggtgtctgcggttttggtctcgctaatagagtccacagcttcttacagcgctgcagctcggcttgcaagtgcaactccacctccagcccacatcctgagcagaggcatcgggtggcagggaattggcatcctcctttgtggcctctttggaacagggaccggctccactgtctcagtggagaacgtggggttgctaggatcaaccaggatcgggagccgacgcgttatacaaatctgtgctggcttcatgatcttcttctccatgctggggaaatttggagcgctgttcgcctccatcccgttcaccatctttgccgcggtgtactgcgtcctgttcggactagttgccgcggtggggctctccttcttgcagttcaccaacatgaactccatgcgcaacctgttcatcgtcggcgtgtccatcttccttggcttgtccgtgccggagtacttcttccgctacagcatggctgcccagcgtggtcctgcgcacactaaagctggatggttcaacgactacatcaacaccatcttctcgtcgccgccgacggtggggctgatggtggccgtgttcctggacaacacgctggaggtgaaggacgccggcagggaccgcgggatgccgtggtgggtgcccttccgctccttcaagggggacagccggaacgaggagttctacagcctgcccttcaacctcaaccgcttcttccctccctcgtaaacgctcgagggatcataaaaggacgcaaggaagagagcacatggttggtttcttggctgatgcgatcgtgtgtgcctgttcgaagtgttgttgagcagtggaaatagtagatgtgtattacctctaaaaaaaaaaaaaaaaaaaaaaaaataaaaaaaaaaaaaaaa

SEQ ID NO: 4052 - protein, 524 aa, Triticum aestivum
  misc_feature: Ceres CLONE ID no. 838298
  misc_feature: Ceres CDNA ID no. 29191824
  misc_feature (31)..(174): Pfam Name: Xan_ur_permease PFAM Desc: Permease family
  misc_feature: Homolog of GI Number: 66792650 NR Desc: At2g05760
  misc_feature: Homolog of GI Number: 23297127 NR Desc: putative membrane transporter
  misc_feature: Homolog of GI Number: 14334908 NR Desc: putative membrane transporter protein
  misc_feature: Homolog of GI Number: 50901994 NR Desc: putative permease 1
  misc_feature: Homolog of GI Number: 50944971 NR Desc: putative permease 1
  misc_feature: Homolog of GI Number: 50912631 NR Desc: putative permease 1
  misc_feature: Homolog of GI Number: 49333379 NR Desc: putative permease
  misc_feature: Homolog of GI Number: 49333395 NR Desc: putative permease
  misc_feature: Homolog of GI Number: 34897392 NR Desc: putative permease
  misc_feature: Homolog of GI Number: 50945833 NR Desc: putative permease
MSEVKPEEISHSAMEQLQGFEYCIDSNPPWGEAIILGFQHYILALGTAVMIPAVLVPMMGGSDGDRVRVVQTLLFVTGINTLLQSLFGTRLPTVIGGSYAFVIPVMAIVQDSSLAAIPDDHERFLQSMRAIQGALIVSSSIQIILGYSQLWGIFSRFFSPLGMAPVVALLGFGLFERGFPVVGRCVEVGLPMLILFVVLSQYLKNVQIREIPILERFSLFICIALVWAYAQILTSGGAYNHSTEVTQINCRTDRANLISSAPWIKIPYPLQWGAPTFSAGQSFGMVSAVLVSLIESTASYSAAARLASATPPPAHILSRGIGWQGIGILLCGLFGTGTGSTVSVENVGLLGSTRIGSRRVIQICAGFMIFFSMLGKFGALFASIPFTIFAAVYCVLFGLVAAVGLSFLQFTNMNSMRNLFIVGVSIFLGLSVPEYFFRYSMAAQRGPAHTKAGWFNDYINTIFSSPPTVGLMVAVFLDNTLEVKDAGRDRGMPWWVPFRSFKGDSRNEEFYSLPFNLNRFFPPS

SEQ ID NO: 4053 - DNA, 1333 bp, Triticum aestivum
  misc_feature: Ceres CLONE ID no. 838887
  misc_feature: Ceres CDNA ID no. 40041338
  CDS (68)..(1093): REFERENCED BY SEQ ID NO: 4054
aagccacacgcctagccttagctagctagcttactccacagtccacacccaccgcaccgcaccaactatggcgatggcgagcagcagcggcggcgcaggcgcactggttctggccttccttaccgtcgccgttctgctctccccggcgcagtccgcccctctggacggcgccggcttccactcggcgacgtgcccgcagctggagagcatcgtgctgtcctccgtgcaggcggcgctccagcgcgaggtggcgctcgccgccggcctgctccgcatcttcttccacgactgcttcccgcagggctgcgacgcgtccgtgtacctcaagggcagcggtacggagcaggcaatgggtcccaacacgacgctgcagccgcgggcgctgcagctggtcgaggacatccgcgccaaggtgcacgcggcctgcggcgccactgtgtcgtgcgccgatatctcggcgctggccacccgcgacgccgtcgtgctctccggcgggcccaactacaccgtgccgcagggccagttcgacagcctcgccccggcctcacagaacgccgtcaacgccctcccgtcgccggccaccaccagcgtctccgccctcgcgcgcgccttcagcgccaagggcctccgcgaccttgccgacctggtggcgctctccggcgcccacacagtcgggaggacgggctgccccttcttccgcgaccgggctcagcgcatggacgacaccttctcccggaggctggcggcgaactgcagcgcggccccgacccggctgcagaacctggacgtggtgacccccgacctgttcgacaacggctactacagggcgctggtgaacagccagggcgtgttcacctccgacatggcgctcatcaaggacagcaccacggcgcccatcgtgaggcagttcgcgcagagcaaggacgccttcttcgcgcagttcgccaagtccatggccaagctcgccaccgcgccgaggcccggcgggaacgtgggcgagatccgccgcagctgcttcagccccaacgcccggcgcgccatcgacaccgtcgtcgacgccggcgaggaggagggattcgcggcttctgcctgatgtggatcaacggattagcgtgtgtacgcttgctgctagtcgtgcgctagatagcatgcacgtgcatggcttcgtgtatgtcagctgttaatttctgctcccgtgtgtgtgtgcctgctttggctcgatagtctgtagtgtaataagagacttcatcagggagtcactgagtgcttgcttgctcaaggttcaacatttcaatgaaatttcacccggcgggtaccaaaaaaaaaaaaaaaa

SEQ ID NO: 4054 - protein, 339 aa, Triticum aestivum
  misc_feature: Ceres CLONE ID no. 838887
  misc_feature: Ceres CDNA ID no. 40041338
  misc_feature (47)..(282): Pfam Name: peroxidase PFAM Desc: Peroxidase
  misc_feature: Homolog of GI Number: 50929853 NR Desc: OSJNBa0039K24.14
  misc_feature: Homolog of GI Number: 50929843 NR Desc: OSJNBa0039K24.9
  misc_feature: Homolog of GI Number: 50929845 NR Desc: OSJNBa0039K24.10
  misc_feature: Homolog of GI Number: 55700991 NR Desc: TPA: class III peroxidase 62 precursor
  misc_feature: Homolog of GI Number: 5777624 NR Desc: CAA303712.1 protein
  misc_feature: Homolog of GI Number: 55700993 NR Desc: TPA: class III peroxidase 63 precursor
  misc_feature: Homolog of GI Number: 5777625 NR Desc: CAA303713.1 protein
  misc_feature: Homolog of GI Number: 5777627 NR Desc: CAA303715.1 protein
  misc_feature: Homolog of GI Number: 50929841 NR Desc: OSJNBa0039K24.8
  misc_feature: Homolog of GI Number: 55700989 NR Desc: TPA: class III peroxidase 61
MASSSGGAGALVLAFLTVAVLLSPAQSAPLDGAGFHSATCPQLESIVLSSVQAALQREVALAAGLLRIFFHDCFPQGCDASVYLKGSGTEQAMGPNTTLQPRALQLVEDIRAKVHAACGATVSCADISALATRDAVVLSGGPNYTVPQGQFDSLAPASQNAVNALPSPATTSVSALARAFSAKGLRDLADLVALSGAHTVGRTGCPFFRDRAQRMDDTFSRRLAANCSAAPTRLQNLDVVTPDLFDNGYYRALVNSQGVFTSDMALIKDSTTAPIVRQFAQSKDAFFAQFAKSMAKLATAPRPGGNVGEIRRSCFSPNARRAIDTVVDAGEEEGFAASA

SEQ ID NO: 4055 - DNA, 872 bp, Triticum aestivum
  misc_feature: Ceres CLONE ID no. 838999
  misc_feature: Ceres CDNA ID no. 25891760
  CDS (84)..(686): REFERENCED BY SEQ ID NO: 4056
ccccgcgcgccgattccactaggttttccagctctcccgcacccgccgccgccacctccccactccccaccaccccctcagccatggcggtcgtcgagccggtgcccgggggcgacgtgaagctattcaaccgctggaccttcgaggatgttcaggtgagcgacatctcgctgaacgactacctcgcggtgacgtcgatgaagcactacaccttcctgccgcactcggccggccgctactcggccaagcgcttccgcaaggcgcagtgccccatcatcgagcgcctcaccaactccctcatgatgcacgggcgcaacaacggtaagaagatcatggccgtccgcatcatcaagcacaccatggagatcatccacctcctcaccgacgccaaccccatccagatcatcgttgacgccatcatcaacagtggtccacgtgaggatgctacccgtattgggtctgctggtgttgtgaggaggcaggctgtggatatctcccccctgaggagggtgaaccaggccatctaccttctgaccactggtgccagggagagcgccttcaggaatgtcaagaccattgctgagtgcctcgctgatgagctgatcaatgctgccaagggctcatccaacagctatgccatcaagaagaaggacgagattgagcgtgttgccaaggctaaccgttaagatggatgtgcatctgagggtctcatgcttttggctggagattttggactgaatgtgttttacaagatatctagaactgttttagctatgctttaagtttgtgatgaaagaacatttcgatgtagcggcaaggacttgcctgtctttatgaaaccaattcctgttcaggcaaaaaaaaaaaaaaaa

SEQ ID NO: 4056 - protein, 200 aa, Triticum aestivum
  misc_feature: Ceres CLONE ID no. 838999
  misc_feature: Ceres CDNA ID no. 25891760
  misc_feature: The plant flowers significantly late compared to wild-type.
  misc_feature: The plant is abnormally small.
  misc_feature: Useful for making plants with modulated biomass
  misc_feature: Useful for making plants with modulated flowering time
  misc_feature (47)..(200): Pfam Name: Ribosomal_S7 PFAM Desc: Ribosomal protein S7p/S5e
  misc_feature: Homolog of GI Number: 77550926 NR Desc: ribosomal protein S7
  misc_feature: Homolog of GI Number: 34893994 NR Desc: putative 40S ribosomal protein S5
  misc_feature: Homolog of GI Number: 3043428 NR Desc: 40S ribosomal protein S5
  misc_feature: Homolog of GI Number: 6671950 NR Desc: putative 40S ribosomal protein S5
  misc_feature: Homolog of GI Number: 4056502 NR Desc: 40S ribosomal protein S5
  misc_feature: Homolog of GI Number: 21617886 NR Desc: 40S ribosomal protein S5
  misc_feature: Homolog of GI Number: 40748265 NR Desc: 40S ribosomal protein S5
  misc_feature: Homolog of GI Number: 62083399 NR Desc: ribosomal protein S5 isoform A
  misc_feature: Homolog of GI Number: 62083485 NR Desc: ribosomal protein S5 isoform A
  misc_feature: Homolog of GI Number: 29825585 NR Desc: 40S ribosomal protein S5
  misc_feature: Useful for delaying flowering time
  misc_feature: Useful for increasing chlorophyll and photosynthetic capacity
  misc_feature: Useful for increasing increasing anthocyanin content
  misc_feature: Useful for making lethal plants for genetic confinement systems
  misc_feature: Useful for making ornamental plants with modified leaves
  misc_feature: Useful for making plants with altered leaf shape eg curled leaves
  misc_feature: Useful for making plants with increased biomass and foliage
  misc_feature: Useful for making plants with increased biomass and foliage
  misc_feature: Useful for making plants with increased biomass and foliage
  misc_feature: Useful for making shorter plants
MAVVEPVPGGDVKLFNRWTFEDVQVSDISLNDYLAVTSMKHYTFLPHSAGRYSAKRFRKAQCPIIERLTNSLMMHGRNNGKKIMAVRIIKHTMEIIHLLTDANPIQIIVDAIINSGPREDATRIGSAGVVRRQAVDISPLRRVNQAIYLLTTGARESAFRNVKTIAECLADELINAAKGSSNSYAIKKKDEIERVAKANR

SEQ ID NO: 4057 - DNA, 786 bp, Triticum aestivum
  misc_feature: Ceres CLONE ID no. 839353
  misc_feature: Ceres CDNA ID no. 35383299
  CDS (207)..(599): REFERENCED BY SEQ ID NO: 4058
ctctctcgagtcttgtccaggccgcgccgccacagccacgccgcctagtgctatagttcttccctcccctcccctccctccatcccaccggccgcctgcgtccaatccgtcctgttgattccgaattttcaatcaatctttctaacaacagctagcttcttctccccctttgtgcacgcggttccttgatccgcttggttccgcagatggagatgccgacgggttcttcgcaggcaggtggccgcttccctgtgccgcacaagtccctctccttggatatcaagggcaacaagactgacattgttatcagcaaatacgaagataactttctggtcattgtgacacagattggatgcatgggaaccatattagctgctaagaaagatgaaagtgttttctctgatccaacctacaatgtatctgttctttttgggaagagggatgagccactcctgctagcttgtgcacgccaacttatcgagcatataagtggtagtggctcagctcggccgttggtgatctctcttggtttgaaggatcattcccagggaacattgaaagatgtagtttctgccattgttgacaaccgcctatggtgataactttgcaaaggttgggatgggcatttacagtttcggttcatctacagagatattgacatacacaagctgtcagagcaaaaccagcccttccttaccatgcatgaatctctagaaactatgtaattggaatttattccagattcagttatcatgaggtgatttcccaacaaaaaaaaaaaaaaaa

SEQ ID NO: 4058 - protein, 128 aa, Triticum aestivum
  misc_feature: Ceres CLONE ID no. 839353
  misc_feature: Ceres CDNA ID no. 35383299
  misc_feature: Homolog of GI Number: 55741043 NR Desc: putative integral membrane protein
  misc_feature: Homolog of GI Number: 34894978 NR Desc: B1088D01.11
  misc_feature: Homolog of GI Number: 50540128 NR Desc: zgc:92917
MPTGSSQAGGRFPVPHKSLSLDIKGNKTDIVISKYEDNFLVIVTQIGCMGTILAAKKDESVFSDPTYNVSVLFGKRDEPLLLACARQLIEHISGSGSARPLVISLGLKDHSQGTLKDVVSAIVDNRLW

SEQ ID NO: 4059 - DNA, 1146 bp, Triticum aestivum
  misc_feature: Ceres CLONE ID no. 839394
  misc_feature: Ceres CDNA ID no. 35383300
  CDS (149)..(850): REFERENCED BY SEQ ID NO: 4060
cctgtactagtactcctctgtcccaatcgccgtgatccagctagccagcttacacacacaagggcgattcgaccgaggccgccgccccgccgccgccgccgccgccgccggagactatcccctgcagtcagttagttaagatacaaaaatggcctcactggacaccgttagaggggatcttggcctggttgttttgtacctaagcaaggctgaggcaagagataagatctgtagggctatacaatatggatccaagttcttgagcaacggacagccaggacctgcacagaatgtcgacaaatcaactagtctagctcggaaagttttccgcctgtttaagtttgttaatgatctccaagctctgattagtccccctgccaaaggaactccacttccactgatcttacttggaaagtcgaagaacgcgatgctgtcaactttcctctttctggaccaaattgtttgggctgggagaacaggagtatacaagaacaaggagcgagcagagttccttggcaggatagcattttattgctttctcggatctaatacctgtactaccatcatcgagctagcggagcttcagcggctttccaaatcgatgaagaagttagagaaggacctcaagcaccaagagctgcacaagaacgagcagtatcggatgaagctgcagaagtccaacgagaggctgctcgccctcatcaaatcgagcctcgacatagttgttgcggtggggctcctgcaacttgccccgaaaaaggtcactcctcgcgtcacaggggcctttgggttcgctagctcgctcatcgcctgttaccagttgcttccagccccagccaaatccaagtgatctgcctgcccacctcgggccaggcagctggtgcatcgattggtgaaacggcggtcgctgttgctgatacttgataagaaataaatctggaccaaattgtccgtcctgtaggatataaccgaggattactgttgtgcatgctggcattgcccagggccatctcatagcctggttgatctgccttgccttagacttgatcatgtagcacgcttgtatttggatggtccggtgtgccactatcatactacaactgttgcaaaataattagaaatttcataccaaaaaaaaaaaaaaaa

SEQ ID NO: 4060 - protein, 233 aa, Triticum aestivum
  misc_feature: Ceres CLONE ID no. 839394
  misc_feature: Ceres CDNA ID no. 35383300
  misc_feature (11)..(226): Pfam Name: PEX11 PFAM Desc: Peroxisomal biogenesis factor 11
  misc_feature: Homolog of GI Number: 55775296 NR Desc: peroxisomal biogenesis factor 11 protein
  misc_feature: Homolog of GI Number: 56368447 NR Desc: putative peroxisomal membrane protein PEX11
  misc_feature: Homolog of GI Number: 56368449 NR Desc: peroxisomal membrane protein PEX11
  misc_feature: Useful for increasing chlorophyll and photosynthetic capacity
  misc_feature: Useful for making ornamental plants with modified leaves
  misc_feature: Useful for sterility
MASLDTVRGDLGLVVLYLSKAEARDKICRAIQYGSKFLSNGQPGPAQNVDKSTSLARKVFRLFKFVNDLQALISPPAKGTPLPLILLGKSKNAMLSTFLFLDQIVWAGRTGVYKNKERAEFLGRIAFYCFLGSNTCTTIIELAELQRLSKSMKKLEKDLKHQELHKNEQYRMKLQKSNERLLALIKSSLDIVVAVGLLQLAPKKVTPRVTGAFGFASSLIACYQLLPAPAKSK

SEQ ID NO: 4061 - DNA, 923 bp, Triticum aestivum
  misc_feature: Ceres CLONE ID no. 839550
  misc_feature: Ceres CDNA ID no. 40351414
  CDS (71)..(781): REFERENCED BY SEQ ID NO: 4062
aaacagatgcagaacacagtacaactaaacagattccaacacaactacagtagtaccgtgctagtagaaaatggccggaggaggcgatgagctgaagctactcggcacgttcgcgagcccgttcgtcatgcgagcgaagctggcgctcagcttcaagggcctgagcttcgaggacgtcgaggaagacctggccaacaagagccagctcctcctcgagtccaacccggcggagaagaaggtgcccgtgctcatccacaacggcaagcccgtctgcgactcgcgtgtcatcgtgcagtacatcgacgaggccttcagcggcaacggcgcgcctctcctccccgccgacccctacgagcgcgccgtcgctcgcttttgggccgcctacgtcgacgacaagctcttggcgtcttggctgcaggccgcgaggggcaagacggaggaggagaaggcggaggggctgaagcagacgctcgtggcggtggagaccatggaggcggccttcaagacgtgctccaaggggaagcctttcttcggcggcgacagggttgggtacctggacgtgacgctcggcggtctggtcgtctgggtgcacgccggcgcggcgctgtatggcatgcggcttttcgacgacgccaagagccctttcctggcggcctgggtggagcgcttcggcgcgctggacgccgccaaggctgtcctgccggccgtcgaaagagtggtcgagttcgccaagatgagacaggcgcaggctgcggcaccggccacggcaggaggcaactaagctgcccataaccacgtgtttagacatcatcagctcggagtctgcaatgctacgttgccaacaccagagtgtgttactgattgttgtactggttccgttgctcttgcgaataaaaaatttctcaacaaaaaaaaaaaaaaaa

SEQ ID NO: 4062 - protein, 236 aa, Triticum aestivum
  misc_feature: Ceres CLONE ID no. 839550
  misc_feature: Ceres CDNA ID no. 40351414
  misc_feature (8)..(79): Pfam Name: GST_N PFAM Desc: Glutathione S
  misc_feature (89)..(204): Pfam Name: GST_C PFAM Desc: Glutathione S
MAGGGDELKLLGTFASPFVMRAKLALSFKGLSFEDVEEDLANKSQLLLESNPAEKKVPVLIHNGKPVCDSRVIVQYIDEAFSGNGAPLLPADPYERAVARFWAAYVDDKLLASWLQAARGKTEEEKAEGLKQTLVAVETMEAAFKTCSKGKPFFGGDRVGYLDVTLGGLVVWVHAGAALYGMRLFDDAKSPFLAAWVERFGALDAAKAVLPAVERVVEFAKMRQAQAAAPATAGGN

SEQ ID NO: 4063 - DNA, 861 bp, Triticum aestivum
  misc_feature: Ceres CLONE ID no. 839727
  misc_feature: Ceres CDNA ID no. 40351415
  CDS (192)..(680): REFERENCED BY SEQ ID NO: 4064
acgccgtccgtttctggctcatcaggaggtccaaaggccgcgcaagtcgacctatataagcgcctccgctccagcttgggatcaaatcacgaccaacacgtaccggatcttgaccgaccgaaccattcagtgctcgcgctcactcacgcatcatagccaagttaagcgggaaggaaggaaggaaggaagccatgtctgccgcggagggagccgtcgtgttcagcgaggagaaggaggcgctggtgctcaagtcatgggccatcatgaagaaggattccgccaaccttgggctccgcttcttcctcaagatcttcgagatcgcgccgtcggcgaggcagatgttcccgttcctgcgcgactccgacgtgccgctggagaccaaccccaagctcaagacccacgccgtgtccgtcttcgtcatgacgtgcgaggctgctgcgcagctgcggaaagccgggaagatcaccgtcagggagaccaccctgaagaggctgggcggcacgcacttgaaatacggcgtggcagatggccactttgaggtgacgcggttcgctctgctcgagacgatcaaggaggcgcttccggcggacatgtgggggccggagatgaggaacgcgtggggcgaggcctacgaccaactggtcgcggccatcaagcaagagatgaagccctctgagtagctcatccattgtactcatatcatatgccacgcaacttccgtccatatccgtccaactttcgttgcttgaccggttcactcatgtcaccatattgtgtttgtattgtgtgtttacgtgtactaacgcatattgtaaaatgggcattcaataaaggaacaaattgtgcaaaaaaaaaaaaaaa

SEQ ID NO: 4064 - protein, 162 aa, Triticum aestivum
  misc_feature: Ceres CLONE ID no. 839727
  misc_feature: Ceres CDNA ID no. 40351415
  misc_feature (14)..(154): Pfam Name: Globin PFAM Desc: Globin
MSAAEGAVVFSEEKEALVLKSWAIMKKDSANLGLRFFLKIFEIAPSARQMFPFLRDSDVPLETNPKLKTHAVSVFVMTCEAAAQLRKAGKITVRETTLKRLGGTHLKYGVADGHFEVTRFALLETIKEALPADMWGPEMRNAWGEAYDQLVAAIKQEMKPSE

SEQ ID NO: 4065 - DNA, 1308 bp, Triticum aestivum
  misc_feature: Ceres CLONE ID no. 839828
  misc_feature: Ceres CDNA ID no. 40041339
  CDS (34)..(1020): REFERENCED BY SEQ ID NO: 4066
attctcctccctcccacccacggcgccgcagaaatggcctcgcgcggaggagccgtcggcgaggcggcgggggcggaggcggcgaggaggggcgtaggcgtcggcgttgggggagggagagggatgcggctgttctcgccggagtactacgccctgtgcttcggcggcgggatgctggcggccggcgccacccacctcgccatcaccccgctcgacgtcctcaaggtcaacatgcaggtgaatccagttaagtataacactatatgttcaggactgagttctcttgtaagagaagagggcgcttcgtcgctttggagaggctggggagggaagctattcggctacggtgcgcagggcggctgcaagtttggcctctacgagtttttcaagaagcagtattctgatgcgctggtggacagcaacaggagcacagtttactttcttagcagcgcctctgctcagatcatagctgatgttgccctctgcccctttgaatcggtgaaagtccgtgtgcagacacagcccatgtttgcaaaaggtttggtcgatggctttccaagggtgtatgccgctgaaggcttgtctggattttacagggggcttttaccgctgtggggacgaaatcttccattttctatgataatgttttcgtcatttgagcataccgtgggcttcctatacgagaaggtaattcaaaagaagaaacaggattgttcaacagcacagcagcttggcgctacatgcctggctggatatatttctggtgctgttggtactgttgtttcaaatcctgcagataacatcgtttcttctctgtacaacaaaaaggctaaaaacgttatacatgctataaaaagcattggattgcgtgggctgttcacaagaagcctgcccattcgaattacccttgtagggcctgtcgtgaccatgcaatggttcttctacgataccattaagatatttactggattgccacccagtggagggcttcctcgtgatctggaaaaagttgacacataatatgacctgttctacaaaagtttatcgatacattttttggtttctcagaggcactgagaagtattttacccacagttctgagttcttgctgattatgtcgagtgtgagtgatttgtagttgtagggaacagtagctaactgaaccatatgaaggatttgtatgttctagatgcaccttagacaaccataagtccatgaacttcagcacctgttacagcctggtgtgttttcaggatgctttgtagtatctccatttcgaagtttgttgtgtgaaaaaaaaaaaaaaaa

SEQ ID NO: 4066 - protein, 298 aa, Triticum aestivum
  misc_feature: Ceres CLONE ID no. 839828
  misc_feature: Ceres CDNA ID no. 40041339
  misc_feature (202)..(284): Pfam Name: Mito_carr PFAM Desc: Mitochondrial carrier protein
  misc_feature: Homolog of GI Number: 33589804 NR Desc: At2g17270
  misc_feature: Homolog of GI Number: 3318611 NR Desc: mitochondrial phosphate transporter
  misc_feature: Homolog of GI Number: 23505897 NR Desc: At5g14040/MUA22_4
  misc_feature: Homolog of GI Number: 51090502 NR Desc: putative mitochondrial phosphate transporter
  misc_feature: Homolog of GI Number: 3318613 NR Desc: mitochondrial phosphate transporter
  misc_feature: Homolog of GI Number: 18252510 NR Desc: phosphate transporter
  misc_feature: Homolog of GI Number: 50913125 NR Desc: mitochondrial phosphate transporter
  misc_feature: Homolog of GI Number: 18150857 NR Desc: mitochondrial phosphate transporter
  misc_feature: Homolog of GI Number: 50900458 NR Desc: OSJNBa0064H22.14
  misc_feature: Homolog of GI Number: 53828196 NR Desc: mitochondrial phosphate translocator
MRLFSPEYYALCFGGGMLAAGATHLAITPLDVLKVNMQVNPVKYNTICSGLSSLVREEGASSLWRGWGGKLFGYGAQGGCKFGLYEFFKKQYSDALVDSNRSTVYFLSSASAQIIADVALCPFESVKVRVQTQPMFAKGLVDGFPRVYAAEGLSGFYRGLLPLWGRNLPFSMIMFSSFEHTVGFLYEKVIQKKKQDCSTAQQLGATCLAGYISGAVGTVVSNPADNIVSSLYNKKAKNVIHAIKSIGLRGLFTRSLPIRITLVGPVVTMQWFFYDTIKIFTGLPPSGGLPRDLEKVDT

SEQ ID NO: 4067 - DNA, 803 bp, Triticum aestivum
  misc_feature: Ceres CLONE ID no. 839982
  misc_feature: Ceres CDNA ID no. 35383301
  CDS (103)..(447): REFERENCED BY SEQ ID NO: 4068
atgttctgatcggcttcgccacccacgtcgcgccgcgcgccgccgccgccgccctgcgctgtccgctgcatccccggctcgccgcgcgagaaaccagtaacaatggtcgtccctccaccagacagggccgctaggatcgtcggttttctcaagccctaccttttgaggatgcatttctcgaacaagtatgtaactgcccaggtcatccataccccaacagcaaccgtcgcgtgttctgcaagctcgcaggagaagctgctgagaccgaacttggagtcgacccgcgacgtatctgccgccgcaaagattgggaagttgctgggggagcgcctgctgctcaaggggatacctgccgtgtccatccacatgaagagagagcagaagtaccacgggaaagtcaaggctgttatagattctgtcagagaatctggtgtcaagctgttgtgatggtgaaaacatagagctcggcttagcatttgcgcagtcttgagctgcatttctgatttttggactgattgcaacttttgtgttcatgaatttggcaatgaacgaacgtttgtccgggactccaggtcaataaaaggactctgttgtaggagctcgacctgataatctgcagtagcactttttatttgaaacaaatctgctgtagcacttgatgacttgaggatcaacagcctgttatgtttctcctctccgaaatgcaacggagattattgggctggagatattctggacttgcttgcctgtgatgctaaatttgctattcaagactgtttgatggagcaaaaaaaaaaaaaaaa

SEQ ID NO: 4068 - protein, 114 aa, Triticum aestivum; identical to SEQ ID NO: 2310
  misc_feature: Ceres CLONE ID no. 839982
  misc_feature: Ceres CDNA ID no. 35383301
  misc_feature (24)..(113): Pfam Name: Ribosomal_L18p PFAM Desc: Ribosomal L18p/L5e family
  misc_feature: Homolog of GI Number: 50917923 NR Desc: putative ribosomal protein L18
  misc_feature: Homolog of GI Number: 27904926 NR Desc: 50S ribosomal protein L18
  misc_feature: Homolog of GI Number: 68548618 NR Desc: Ribosomal protein L18
  misc_feature: Homolog of GI Number: 1044980 NR Desc: ribosomal protein L18
  misc_feature: Homolog of GI Number: 1208546 NR Desc: ribosomal protein L18
  misc_feature: Homolog of GI Number: 32475074 NR Desc: 50S ribosomal protein L18

SEQ ID NO: 4069 - DNA, 1461 bp, Triticum aestivum
  misc_feature: Ceres CLONE ID no. 840255
  misc_feature: Ceres CDNA ID no. 40041340
  CDS (278)..(1378): REFERENCED BY SEQ ID NO: 4070
ctgaatcctcaagatatagctaggagctgcgctccctctcgctctcttgctcacacacacctctcgctgtctcctcggcttgcctcactaatcactgcacctccaccaccataccaccactactagtacctcccccatatgcttgcttccctctcgatccctctcctcctccctcccgtttcataagcccacagccagccacagcgccaagaacaatcgagctactacaccatcgatctatctcccacaggcagcaaggcagtacagcgtagcgcctatgtcgggcgagttccagttccacgacgagctcgcgtcgctcttcacgcagcggccggggccggggatgcagcagcaggagcagcaggcctcctggctcgccgactacctgcagacgcccatggactacgatctgctgtgcagggcgctggagctgccggccgcggaggacgtcgtcaagagggagctggtggtggacaccacgccaagcggcggcggcgccctcactcccagcgccggcggggggacgcccaacgccacgtcgtccatgtcgtcctcgtcgagcgaggccggcggaggcctctgcgccggagagggggactcggcggggaggtgcaagaaggaggacggcgacggggaggacggcaaggggggagacgagggtgacaagagcaagaaagggtctgcggctaagggcggcaaggcgggcaagggcgagaagcgtccgcggcagccgcggttcgccttcatgaccaagagcgaggtcgaccacctcgaggacggctaccgctggcgcaagtacggccagaaggccgtcaagaacagcccatatcccaggagctactaccgatgcacgacgcagaagtgtgtggtgaagaagagagtggagcggtcgttccaggacccggcggtggtgatcaccacgtacgagggcaagcacacgcaccccatcccctccgctctccgtggcagcacgcacctcctcgccgcccaggcggcgcacctgcatcaccagcaccacggccacctcggcatgctgccgcagatgggcatgggcggccgcgccggatcgccgttcggccggagcagcggcggcggcatcgacgtgctgggcggcctcctgcagccgcgcgcccaccacggcatgacgccgccgatgatcggcgctggcgcgggccaccaggcgtcgacccagggtctgcccggctcaatcagcagcgtggcgagcgccaccgcctcgtctcctccgtcgctccagatgcagcacttcatggcgccggacttcgggctcctgcaggacatgctgccgtccttcatccacggcgccggcggcaacaacaacaacaaccagccctcatcaccgtatgggaagcttcattagttagctagctatagctagagataattatgagatttggttggttcttgctgccttattaacatcccccaaaaaaaaaaaaaaaa

SEQ ID NO: 4070 - protein, 366 aa, Triticum aestivum
  misc_feature: Ceres CLONE ID no. 840255
  misc_feature: Ceres CDNA ID no. 40041340
  misc_feature (165)..(224): Pfam Name: WRKY PFAM Desc: WRKY DNA
  misc_feature: Homolog of GI Number: 33519198 NR Desc: WRKY14
  misc_feature: Homolog of GI Number: 51854273 NR Desc: WRKY transcription factor
  misc_feature: Homolog of GI Number: 46394352 NR Desc: TPA: WRKY transcription factor 49
  misc_feature: Homolog of GI Number: 33519200 NR Desc: WRKY16
  misc_feature: Homolog of GI Number: 15991740 NR Desc: WRKY transcription factor 71
  misc_feature: Homolog of GI Number: 21435999 NR Desc: AT4g18170/T9A21_10
  misc_feature: Homolog of GI Number: 58042731 NR Desc: WRKY8
  misc_feature: Homolog of GI Number: 33519202 NR Desc: WRKY17
  misc_feature: Homolog of GI Number: 7268610 NR Desc: DNA binding
  misc_feature: Homolog of GI Number: 46394312 NR Desc: TPA: WRKY transcription factor 29
MSGEFQFHDELASLFTQRPGPGMQQQEQQASWLADYLQTPMDYDLLCRALELPAAEDVVKRELVVDTTPSGGGALTPSAGGGTPNATSSMSSSSSEAGGGLCAGEGDSAGRCKKEDGDGEDGKGGDEGDKSKKGSAAKGGKAGKGEKRPRQPRFAFMTKSEVDHLEDGYRWRKYGQKAVKNSPYPRSYYRCTTQKCVVKKRVERSFQDPAVVITTYEGKHTHPIPSALRGSTHLLAAQAAHLHHQHHGHLGMLPQMGMGGRAGSPFGRSSGGGIDVLGGLLQPRAHHGMTPPMIGAGAGHQASTQGLPGSISSVASATASSPPSLQMQHFMAPDFGLLQDMLPSFIHGAGGNNNNNQPSSPYGKLH

SEQ ID NO: 4071 - DNA, 567 bp, Triticum aestivum
  misc_feature: Ceres CLONE ID no. 840347
  misc_feature: Ceres CDNA ID no. 36701375
  CDS (80)..(391): REFERENCED BY SEQ ID NO: 4072
atcgcaagcatcagactccctccaaagcaggcagcagctcctcttcttcctaatcacactatctcggagaggagcggccatgtctgggcgcgacaagggcggcaaggggctgggcaagggcggcgccaagcggcaccggaaggtcctccgcgacaacatccagggcatcaccaagccggcgatccggaggctggccaggaggggcggcgtgaagcgcatctccggcctcatctacgaggagacccgcggcgtcctcaagatcttcctcgagaacgtcatccgcgacgccgtcacctacaccgagcacgcccgccgcaaaaccgtcaccgccatggacgtcgtctacgcgctcaagcgccagggccgcaccctctacggcttcggaggctagatttgtgtggtgaagcaacttcctcgtttgctctgtgatctgtgctgtcgtagatgagatttactgatttggcgtgcgccggttgtattctgtcatggggttcagtaggctgtgtaataccttgctctgtacttctgttcaatgcaatcacttctattctaaaaaaaaaaaaaaaa

SEQ ID NO: 4072 - protein, 103 aa, Triticum aestivum
  misc_feature: Ceres CLONE ID no. 840347
  misc_feature: Ceres CDNA ID no. 36701375
  misc_feature (66)..(92): Pfam Name: TAF PFAM Desc: TATA box binding protein associated factor
  misc_feature: Homolog of GI Number: 70774 NR Desc: histone H4
  misc_feature: Homolog of GI Number: 50729214 NR Desc:  similar to germinal histone H4 gene
  misc_feature: Homolog of GI Number: 55667113 NR Desc:  similar to germinal histone H4 gene
  misc_feature: Homolog of GI Number: 57106967 NR Desc:  similar to germinal histone H4 gene
  misc_feature: Homolog of GI Number: 74004256 NR Desc:  similar to germinal histone H4 gene
  misc_feature: Homolog of GI Number: 62663604 NR Desc:  similar to Histone H2B 291B
  misc_feature: Homolog of GI Number: 74004178 NR Desc:  similar to germinal histone H4 gene
  misc_feature: Homolog of GI Number: 61834317 NR Desc:  similar to germinal histone H4 gene
  misc_feature: Homolog of GI Number: 224293 NR Desc: histone H4
  misc_feature: Homolog of GI Number: 74004215 NR Desc:  similar to germinal histone H4 gene
MSGRDKGGKGLGKGGAKRHRKVLRDNIQGITKPAIRRLARRGGVKRISGLIYEETRGVLKIFLENVIRDAVTYTEHARRKTVTAMDVVYALKRQGRTLYGFGG

SEQ ID NO: 4073 - DNA, 897 bp, Triticum aestivum
  misc_feature: Ceres CLONE ID no. 840866
  misc_feature: Ceres CDNA ID no. 35383302
  CDS (150)..(662): REFERENCED BY SEQ ID NO: 4074
cgcccgactccgccgagctcatttccctcaccctctctctgcgtcgccgtcgccggcgccgccgcgacgctgtactccggctccctggacccgatagttcctcgaccctagttcgttcgacgagggaattcttcgggtggctgcaggagatggcggcgttcctgaggtcaaagtgctcctcagttgggcgtacgttgatgggaagcgttggaaacaatctgaatgggggtatcaattcctctgctgaaactgtgacaagaccatctcactgtgatgctatcagccagcaaatcaggacattcatccagatgagaaccaacctcaaggtggtagacaactctggagccaaacgggtcatgtgcatacagtccttgagggggaagaaaggagcaaggctaggggacatgataattggttctgtgaaggaagcgcaacctcgcggcaaggtcaagaaaggtgatgtggtctatggtgtggttgtccgtgccgctatgaagaaaggacgtagtgacggcagcgaggtccagttcgatgacaacgctatcgtcatcgtgaacaacaaaggcgagctgattggcactcgcgtcttcggtcctgttccccatgagctcaggaagaagaagcatctcaagatcttggcattggctgaacacatagtttgagaccttaccctgcttagtcatatctctcttttatttcaatggaatggaattaacattgctccagtaatgttttgcttgtccctgcagtcattccacctttcctttggtaatttgtgtttggaagaatgtaccctaaaaggagaatgtgtaccaatcaaactatagggagccctcggcagatcaagttttatagcacatttaatctgaatgtttcgctgcaaaaaaaaaaaaaaaa

SEQ ID NO: 4074 - protein, 170 aa, Triticum aestivum
  misc_feature: Ceres CLONE ID no. 840866
  misc_feature: Ceres CDNA ID no. 35383302
  misc_feature (52)..(170): Pfam Name: Ribosomal_L14 PFAM Desc: Ribosomal protein L14p/L23e
  misc_feature: Homolog of GI Number: 18140856 NR Desc: HUELLENLOS
  misc_feature: Homolog of GI Number: 56403953 NR Desc: ribosomal L14 protein
  misc_feature: Homolog of GI Number: 47027061 NR Desc: HUELLENLOS
  misc_feature: Homolog of GI Number: 18140860 NR Desc: HUELLENLOS PARALOG
  misc_feature: Homolog of GI Number: 30694900 NR Desc: ribosomal protein L14 family protein / huellenlos paralog
  misc_feature: Homolog of GI Number: 9757736 NR Desc: 50S ribosomal protein L14
  misc_feature: Homolog of GI Number: 8778471 NR Desc: F1L3.27
  misc_feature: Homolog of GI Number: 18140858 NR Desc: HUELLENLOS
  misc_feature: Homolog of GI Number: 28973235 NR Desc: putative ribosomal protein
  misc_feature: Homolog of GI Number: 75675566 NR Desc: Ribosomal protein L14
MAAFLRSKCSSVGRTLMGSVGNNLNGGINSSAETVTRPSHCDAISQQIRTFIQMRTNLKVVDNSGAKRVMCIQSLRGKKGARLGDMIIGSVKEAQPRGKVKKGDVVYGVVVRAAMKKGRSDGSEVQFDDNAIVIVNNKGELIGTRVFGPVPHELRKKKHLKILALAEHIV

SEQ ID NO: 4075 - DNA, 690 bp, Triticum aestivum
  misc_feature: Ceres CLONE ID no. 841071
  misc_feature: Ceres CDNA ID no. 40041341
  CDS (115)..(477): REFERENCED BY SEQ ID NO: 4076
accaaagctcccagcttttcccccttcctccgccgccgccgacgccgacgcttcctagggtttcgtcccccgatccggatccggcggcggcagcagcagcagcagcagcgagcgatggcggccgcgggagacgccggcgagaagaagatgatcacgctcaagagctcggacggcgaggagttcgaggtggaggaggcggtggccatggagtcgcagacgatccgccacatgatcgaggacctcaagaactgggacgccgagttcgtcaaggtcgaccaggccaccctcttcgacctcatcctggctgccaactacctcaacatcaaggggctgctggacctgacctgccagactgttgccgacatgatcaagggcaagaccccagaggagatccgcaagaccttcaacatcaagaatgactttacccccgaggaggaggaggagatccgcagggagaaccagtgggcctttgagtaggggagcatctaggcgatgccgccgccgccgccgcgttgaatgaacgaacaatgcttagtattggtcatgtctgcatttcagcgctcttctttatgtctgtcctaatggcttgtaattatcctggagtctatgagtgaacatgttcggtcagtggttatgtttgcgacaacaagaaaaacctatcgtggtcagtggtcaaaaaaaaaaaaaaaa

SEQ ID NO: 4076 - protein, 120 aa, Triticum aestivum
  misc_feature: Ceres CLONE ID no. 841071
  misc_feature: Ceres CDNA ID no. 40041341
  misc_feature (11)..(43): Pfam Name: Skp1_POZ PFAM Desc: Skp1 family
  misc_feature: Homolog of GI Number: 7378764 NR Desc: putative kinetochore protein
  misc_feature: Homolog of GI Number: 32330695 NR Desc: SKP1/ASK1
  misc_feature: Homolog of GI Number: 47054182 NR Desc: skp1 protein
  misc_feature: Homolog of GI Number: 77550711 NR Desc: Skp1 family
  misc_feature: Homolog of GI Number: 47176688 NR Desc: Skp1/Ask1
  misc_feature: Homolog of GI Number: 52076056 NR Desc: putative UIP2
  misc_feature: Homolog of GI Number: 4959710 NR Desc: Skp1
  misc_feature: Homolog of GI Number: 51292007 NR Desc: SKP1
  misc_feature: Homolog of GI Number: 18958257 NR Desc: kinetochore protein
  misc_feature: Homolog of GI Number: 2673870 NR Desc: fimbriata
MAAAGDAGEKKMITLKSSDGEEFEVEEAVAMESQTIRHMIEDLKNWDAEFVKVDQATLFDLILAANYLNIKGLLDLTCQTVADMIKGKTPEEIRKTFNIKNDFTPEEEEEIRRENQWAFE

SEQ ID NO: 4077 - DNA, 1128 bp, Triticum aestivum
  misc_feature: Ceres CLONE ID no. 841073
  misc_feature: Ceres CDNA ID no. 29191705
  CDS (118)..(807): REFERENCED BY SEQ ID NO: 4078
cacacacacacacacacacacacacacactgacacacacacacgcacacgctacagagcagagtcttgctccttctcctgcctgtagagcatccatcacgtacgttcacggacaaacatgtctccggtgaaggtgttcgggcatccgatgttgacaaacgtcgcacgggtgatgctcttcctggaggaggtcggcgccgagtacgagctcgtgcccatcgacttcgtcgccggcgagcacaagaggtcccaacacgtccagctaaacccgttcgcgaagatgcctgggttccaagatggcgatctcgtcctgttcgagtcgcgcgccatcgccaagtacatcctccgcaagtacggggggacagccggcctggacctcctcggagaaaacagcggaatcgaagaattagcagtggtggacatgtggacggaggtggaggcccagcagtactacccggccatctcgccggtggtgttcgagtgcatcatcattcccttcatcatccctggcggtggcgcgacgccgaaccggagcgtcgtggacgagagcctggagcggctgaggggtgtgctggggatctacgaggcccggctggagaagagcagctacttggccggggactccatcagcttcgccgatctgaaccacatcccattcaccttctacttcatgaccaccccgtacgccaaggtgtttgatgagtaccccaaggtgaaggcctggtgggagatgctcatggccaggccggcggtgcagagggtctgcaagcatatgcctaccgagtttaagctaggtgcgcagtactagatgtctatgcactccgcgcgggtgtgtgccgtgccggtgccggttcaagagaagagacctcccgtggctgtgggtgatcatctgcccgtctagttcgagtatatgctttcagtttcagcagcgcaaggaatccgcttgcgcttctgttcgtgcgctggattccgctttaatttgtgcactagtagtaaataaacaacggactggtcaatgctgctaatccgtatgtcctatatagtactgtacaccactagagatcagaatggatccaaagcaaataccaagaatactaggcccgtaagggttccaaaaaaaaaaaaaaaa

SEQ ID NO: 4078 - protein, 229 aa, Triticum aestivum
  misc_feature: Ceres CLONE ID no. 841073
  misc_feature: Ceres CDNA ID no. 29191705
  misc_feature (4)..(77): Pfam Name: GST_N PFAM Desc: Glutathione S
  misc_feature (95)..(210): Pfam Name: GST_C PFAM Desc: Glutathione S
  misc_feature: Homolog of GI Number: 21790 NR Desc: glutathione transferase
  misc_feature: Homolog of GI Number: 21788 NR Desc: glutathione transferase
  misc_feature: Homolog of GI Number: 34914744 NR Desc: putative glutathione transferase
  misc_feature: Homolog of GI Number: 22022400 NR Desc: glutathione
  misc_feature: Homolog of GI Number: 18479038 NR Desc: glutathione transferase
  misc_feature: Homolog of GI Number: 4127372 NR Desc: glutathione transferase
  misc_feature: Homolog of GI Number: 57012737 NR Desc: Probable glutathione S
  misc_feature: Homolog of GI Number: 4127370 NR Desc: glutathione transferase
  misc_feature: Homolog of GI Number: 4127352 NR Desc: glutathione transferase
  misc_feature: Homolog of GI Number: 23572872 NR Desc: glutathione transferase
MSPVKVFGHPMLTNVARVMLFLEEVGAEYELVPIDFVAGEHKRSQHVQLNPFAKMPGFQDGDLVLFESRAIAKYILRKYGGTAGLDLLGENSGIEELAVVDMWTEVEAQQYYPAISPVVFECIIIPFIIPGGGATPNRSVVDESLERLRGVLGIYEARLEKSSYLAGDSISFADLNHIPFTFYFMTTPYAKVFDEYPKVKAWWEMLMARPAVQRVCKHMPTEFKLGAQY

SEQ ID NO: 4079 - DNA, 857 bp, Triticum aestivum
  misc_feature: Ceres CLONE ID no. 841216
  misc_feature: Ceres CDNA ID no. 40351416
  CDS (189)..(674): REFERENCED BY SEQ ID NO: 4080
accgcccagcccagcccagacgccgaccgacgccgctcgcgctcccgtctctcggcgatcctacctcctccgacgaccggctgcaaccccggccgccctcgccgccagatccgcgcggccacgcccacccgcctcgctcctcctctcgggcctcggcagatctacgcgggccgcgaccgtccctagccatgattaatttcgtgctcctaatcagccgccagggcaaggtgaggctcaccaagtggtactcgccttacacccagaaggagaggactaaggtcatccgtgagcttagtgggctcattcttactcgagggccaaaactctgcaactttgtcgagtggagaggttacaaggttgtgtacagaaggtatgccagcctctatttctgcatgtgtatcgatgctgatgataatgagctcgaagtccttgaaattatccatcattttgttgagatactggaccgttatttcggcagtgtatgcgagctggatttgatattcaatttccacaaggcgtactacgtactggatgagattctcatttctggtgagcttcaggaatctagcaagaagaatgttgcaagacttattgctgcacaggattcgttggtagaggctgctaaagaggaagctggctccatcagtaacatcattgcccaggctacgaagtaaaagtccgcgtctgatgatgccccgctgctctttggtttatgcatatgttggtaaatttgatgtaatagctcctttgctgtatccattttcccaaagaaatacgacttcccggattcaggcctgttcagaatgagtgatatgtaactacaatgcatgtgttcctttgcaaaaaaaaaaaaaaaa

SEQ ID NO: 4080 - protein, 161 aa, Triticum aestivum
  misc_feature: Ceres CLONE ID no. 841216
  misc_feature: Ceres CDNA ID no. 40351416
  misc_feature (1)..(142): Pfam Name: Clat_adaptor_s PFAM Desc: Clathrin adaptor complex small chain
MINFVLLISRQGKVRLTKWYSPYTQKERTKVIRELSGLILTRGPKLCNFVEWRGYKVVYRRYASLYFCMCIDADDNELEVLEIIHHFVEILDRYFGSVCELDLIFNFHKAYYVLDEILISGELQESSKKNVARLIAAQDSLVEAAKEEAGSISNIIAQATK

SEQ ID NO: 4081 - DNA, 984 bp, Triticum aestivum
  misc_feature: Ceres CLONE ID no. 841369
  misc_feature: Ceres CDNA ID no. 25892658
  CDS (178)..(651): REFERENCED BY SEQ ID NO: 4082
ccctttgttcctccctcttttgcatctctcgccggggcagggcacggagggtggaagaaacagggcggcagccgggctgggaaggaggaggaaggaagcaaccccacccaccacccgctccttcttcctcccccctcctcacccccctccacgcctcccagggcccgagctgctgccatggcggatagcaacccggacagcatcaagagatacacgcctcccgtgcacaggaatcgtgcaaacaatcgccgcaaggctggagatagggctgagaaagccaactattcatacaacaatgatggagagaagagccatgttccttcactaaagaaccttcctccaattatccatcatgatgcttttgtcagcaatgctcaaaatgattacagtcatgcaagattagtaccattggaaggatgttctgctagtgaggcttcacagcttctcagtgaacgttgggctgctgcaatgaacatgtataatgacccaaatgattcccctgataaaccggtgatgtacgctggatctggcggatcgtcatggggtcaaggtcacatgaaacttcctcatcagatgaacttcctcgaagatctgcgtcgtgcggtagatgctcaaacgggcctggcagcggcgctcagcacctggaactaattaaagtcaagctgcatcggtggagtgtcacagatttatcagaagcaagctattttgccagctcaatgtgtgttcagtttcgtttgaaaactatatgtatgatgataagtccaaattttagtctaacctgcggctgcttggtttctctaaaatgggagcagcagtcaatctcttgtagccttacagatggaagggcattgctgtgtcgtgaacctgagtcaccgggtaggtactcgattactctgccttaacaatgccctggtaaaagttgtattcggttgaaagaaaaagattgtttggatatactctgtcatggcaaaaaaaaaaaaaaaa

SEQ ID NO: 4082 - protein, 157 aa, Triticum aestivum
  misc_feature: Ceres CLONE ID no. 841369
  misc_feature: Ceres CDNA ID no. 25892658
  misc_feature: Homolog of GI Number: 51964154 NR Desc: PREDICTED OSJNBa0030C08.45 gene product
  misc_feature: Homolog of GI Number: 21360368 NR Desc: iron
MADSNPDSIKRYTPPVHRNRANNRRKAGDRAEKANYSYNNDGEKSHVPSLKNLPPIIHHDAFVSNAQNDYSHARLVPLEGCSASEASQLLSERWAAAMNMYNDPNDSPDKPVMYAGSGGSSWGQGHMKLPHQMNFLEDLRRAVDAQTGLAAALSTWN

SEQ ID NO: 4083 - DNA, 1133 bp, Triticum aestivum
  misc_feature: Ceres CLONE ID no. 841942
  misc_feature: Ceres CDNA ID no. 40041343
  CDS (88)..(915): REFERENCED BY SEQ ID NO: 4084
cttagccgccgccacagcctccagctccaaaccctcatcccccccatcggagctcccctgcccccaaccccccacccccacccagccatggcggaccgcggcggcgagcgtggtgtcggcgagcgcggcggcttcgggcgcggcttcggtcgcggcgggcgcggggaccgtggcgggcgccgcggcggccgccgtggccctcgccaggaggaggagaagtgggtgcccgtcaccaagctcggccgcctcgtcaaggagggccgcttcaccaagatggaggagatctacctacactcgctccccgtcaaggagcaccagatcgtggagacgctctgcccggggctcaaggacgaggtgatgaagatcaccccggtgcagaagcagacccgcgccgggcagcgcacccgcttcaaggccttcgtcgtcgtcggcgacagcaacggccacgtcggcctcggcgtcaagtgcgccaaggaggtggccacggccatccgcggcgccatcatcctcgccaagctctcgatcgtgcccgtcaggaggggctactgggggaacaagatcggcctgccccacaccgtgccctgcaaggtcaccggcaagtgcggctccgtcaccgtgcgcatggtgcccgcccccaggggttccggaatcgtcgccgcccgcgtccccaagaaggtgctgcagttcgccgggatcgatgatgtcttcacttcctcgcgtggatccaccaagacccttggcaacttcgtcaaggctacctttgactgcctgatgaagacctatggattcctcactcctgacttctggagggagacaaccttcaccaaggcgccgtaccaggagttcaccgacatcttggcgaagccgaccaaggccctgatgcttgatgcaccagctgagaagatagaagcttaggatgaagggtttttactagctgggagctgtctgttgcactttgctttattatagtcgagaaccaggtgtctttgaattgtgctacttgtggaagtctctgtttgctgtcaaagttttggattatggtgcaatgctactctgttattggcaatggatgctacataattatgccaattgcagtgttatttgtctagatgtttggaaaaaaaaaaaaaaaa

SEQ ID NO: 4084 - protein, 275 aa, Triticum aestivum
  misc_feature: Ceres CLONE ID no. 841942
  misc_feature: Ceres CDNA ID no. 40041343
  misc_feature (168)..(241): Pfam Name: Ribosomal_S5_C PFAM Desc: Ribosomal protein S5
  misc_feature (85)..(151): Pfam Name: Ribosomal_S5 PFAM Desc: Ribosomal protein S5
  misc_feature: Homolog of GI Number: 50919281 NR Desc: putative 40S ribosomal protein S2
  misc_feature: Homolog of GI Number: 50935111 NR Desc: putative 40S ribosomal protein S2
  misc_feature: Homolog of GI Number: 22137092 NR Desc: At2g41840/T11A7.6
  misc_feature: Homolog of GI Number: 21553851 NR Desc: 40S ribosomal protein S2
  misc_feature: Homolog of GI Number: 30017231 NR Desc: At3g57490
  misc_feature: Homolog of GI Number: 22137288 NR Desc: At1g59359/T4M14_3
  misc_feature: Homolog of GI Number: 18181932 NR Desc: ribosomal protein S2
  misc_feature: Homolog of GI Number: 21618011 NR Desc: ribosomal protein S2
  misc_feature: Homolog of GI Number: 21539457 NR Desc: ribosomal protein S2
  misc_feature: Homolog of GI Number: 6566279 NR Desc: RF12
  misc_feature: Useful for increasing chlorophyll and photosynthetic capacity
  misc_feature: Useful for sterility
MADRGGERGVGERGGFGRGFGRGGRGDRGGRRGGRRGPRQEEEKWVPVTKLGRLVKEGRFTKMEEIYLHSLPVKEHQIVETLCPGLKDEVMKITPVQKQTRAGQRTRFKAFVVVGDSNGHVGLGVKCAKEVATAIRGAIILAKLSIVPVRRGYWGNKIGLPHTVPCKVTGKCGSVTVRMVPAPRGSGIVAARVPKKVLQFAGIDDVFTSSRGSTKTLGNFVKATFDCLMKTYGFLTPDFWRETTFTKAPYQEFTDILAKPTKALMLDAPAEKIEA

SEQ ID NO: 4085 - DNA, 776 bp, Triticum aestivum
  misc_feature: Ceres CLONE ID no. 842034
  misc_feature: Ceres CDNA ID no. 24727433
  CDS (99)..(518): REFERENCED BY SEQ ID NO: 4086
aagtgagggaaccctaggtccctcgattcctctattcgattcgaccgccgccgccgccgccgcccaagcccgaggaggagaggagaggagaggagaggatggcgtccgtggggccgacgctcgagtccctcgtcgaccgtgagcctcccttccccttccttccttcctccctccctaaacctagcagcttgtttcagtttcaatctcaccgtctttctttcttgttttctgtatgtatgtatgtatgtatgtatgtagaagtgatctccgtcatcaccaacgacggccgcaacatcgtggggactctgcgggggttcgaccaggccaccaacatcatcctcgacgagtcccacgagagggtctactccactaaggagggagtacagcagcttgtcctcggactgtacatcatcaggggcgacaacataggcgtggtgggtgaggtggacgaggagctggacgcggcgctggacatgtccaagctgagagcgcagcccctcaagccggtcatccactgaagatgatgaaatgttctatcgatctgatcctgatcgcacaagccgaagctgatgttgttcagtcaatctgtaccgtaggttaatcgattgatcgctcactcatatctcatatctcatatcatggacccttgtatgatgaaaaaaaacgcggtttgctgcgtcgatggaccggtcatgttcttgtatgagagagagagatacatgcatctctgtgcgcgtaagtaatgaatgaatgaagtaggaaaaaaaaaaaaaaaa

SEQ ID NO: 4086 - protein, 93 aa, Triticum aestivum
  misc_feature: Ceres CLONE ID no. 842034
  misc_feature: Ceres CDNA ID no. 24727433
  misc_feature (10)..(69): Pfam Name: LSM PFAM Desc: LSM domain
  misc_feature: Homolog of GI Number: 25404943 NR Desc: protein F1E22.8
  misc_feature: Homolog of GI Number: 21592627 NR Desc: small nuclear ribonucleoprotein
  misc_feature: Homolog of GI Number: 66533783 NR Desc:  similar to CG2021
  misc_feature: Homolog of GI Number: 68358714 NR Desc:  similar to U6 snRNA
  misc_feature: Homolog of GI Number: 50728156 NR Desc:  similar to U6 snRNA
  misc_feature: Homolog of GI Number: 31240533 NR Desc: ENSANGP00000020162
  misc_feature: Homolog of GI Number: 46329906 NR Desc: MGC82379 protein
  misc_feature: Homolog of GI Number: 54641159 NR Desc: GA15189
  misc_feature: Homolog of GI Number: 73976399 NR Desc:  similar to U6 snRNA
  misc_feature: Homolog of GI Number: 71027589 NR Desc: U6 snRNA
MYVCMYVEVISVITNDGRNIVGTLRGFDQATNIILDESHERVYSTKEGVQQLVLGLYIIRGDNIGVVGEVDEELDAALDMSKLRAQPLKPVIH

SEQ ID NO: 4087 - DNA, 589 bp, Triticum aestivum
  misc_feature: Ceres CLONE ID no. 842113
  misc_feature: Ceres CDNA ID no. 24727104
  CDS (92)..(391): REFERENCED BY SEQ ID NO: 4088
ctagctcgctcgcctccggccgccctcgattcctctattcgattcgaccagcgccgccgccgaagcccgaggaggagaggaggaaagggggatggcgtccgtggggccgacgctcgagtccctcgtcgaccaggtgatctccgtcatcaccaacgacggccgcaacatcgtggggactcttcgggggttcgaccaggccaccaacatcatcctcgacgagtcccacgagagggtctactccactaaggagggagtacagcagcttgtcctcggactgtacatcatcaggggcgacaacataggcgtggtgggtgaggtggacgaggagctggacgcggcgctggacatgtccaagctgagagcgcagcccctcaagccggtcatccactgaagatgatgaaatgttctatcgatctgatcctgatcgcgcaagccgaagctgatgttgttcagtcaatctgtaccgtaggttaatcgattgatcgctcactcatctcatatctcatatcatggacccttgtatgatgaaaaaaaacagggtttgctgcgtcgatggaccggtcatgttcttgtaaaaaaaaaaaaaaaa

SEQ ID NO: 4088 - protein, 99 aa, Triticum aestivum; identical to SEQ ID NO: 3846
  misc_feature: Ceres CLONE ID no. 842113
  misc_feature: Ceres CDNA ID no. 24727104
  misc_feature (6)..(75): Pfam Name: LSM PFAM Desc: LSM domain
  misc_feature: Homolog of GI Number: 21592627 NR Desc: small nuclear ribonucleoprotein
  misc_feature: Homolog of GI Number: 25404943 NR Desc: protein F1E22.8
  misc_feature: Homolog of GI Number: 50728156 NR Desc:  similar to U6 snRNA
  misc_feature: Homolog of GI Number: 66533783 NR Desc:  similar to CG2021
  misc_feature: Homolog of GI Number: 68358714 NR Desc:  similar to U6 snRNA
  misc_feature: Homolog of GI Number: 31240533 NR Desc: ENSANGP00000020162
  misc_feature: Homolog of GI Number: 46329906 NR Desc: MGC82379 protein
  misc_feature: Homolog of GI Number: 54641159 NR Desc: GA15189
  misc_feature: Homolog of GI Number: 73976399 NR Desc:  similar to U6 snRNA

SEQ ID NO: 4089 - DNA, 960 bp, Triticum aestivum
  misc_feature: Ceres CLONE ID no. 843128
  misc_feature: Ceres CDNA ID no. 24766526
  CDS (135)..(809): REFERENCED BY SEQ ID NO: 4090
ccactcacgctgccgcggcggccacccccgcccgccgctgcgctcgcattcgcgtctccaccggtccttcccgcgccacggccgcgcacccgacctgatcccccgcgccgctcgcgagccgccatccagcagagatgccggccctgaggccgccgccgccgcgcctcatgctcaacgccgtctcctgcatgcggaacgcgcagacggttctccgggacatcaacgtcagcgtccacgacggcacggcgctcgtcctcacgggcgccaacggctccggcaagaccaccttcctgcggatgctggccggcttctcgcgcccctcggccggggagatcctctggaacggccacgacgtcacctccccgggggtcttccagcagtacaagctgcagctcaactggatgtcgctcaaggacgccgtcaaggagaagctcaccgtgctggagaacgtccagtggttcgagctcctcgagggcaagcacggcaggtccgcccccgccatcgagctcatgggcctcggccggctcatgaacgacaaggccaggatgctctccatggggcagaggaagcgcctgcagctcgccaggctgctcgccatcgaccgcccgatctggctcctggacgagccctccgtcgcgctcgactccgagggtgtcaagctgctcgagtacatcatagcggagcaccgcaagaagggtgggatcgtcatcgtcgccacgcatttgcccattgagatcgaggattccatgaacctccggcttccgcagcggttccccaggaggaaaactctggttgatcttgtgcgttgattgattggagctcaaaatatgtagctgtatctttctaattcttctccagccatacaagttttgcgttggagcaacttctgatggtgcaattttgtgacactttcttctggaaaataagaacatatttgccatgccaaaaaaaaaaaaaaaa

SEQ ID NO: 4090 - protein, 224 aa, Triticum aestivum
  misc_feature: Ceres CLONE ID no. 843128
  misc_feature: Ceres CDNA ID no. 24766526
  misc_feature (37)..(57): Pfam Name: NACHT PFAM Desc: NACHT domain
  misc_feature: Homolog of GI Number: 57834086 NR Desc: OSJNBb0060E08.18
  misc_feature: Homolog of GI Number: 46200868 NR Desc: COG4133: ABC
  misc_feature: Homolog of GI Number: 82948120 NR Desc: ABC
  misc_feature: Homolog of GI Number: 77739690 NR Desc: Heme exporter protein CcmA
  misc_feature: Homolog of GI Number: 39933280 NR Desc: heme exporter protein A
  misc_feature: Homolog of GI Number: 16130138 NR Desc: ATP binding protein of heme exporter A
  misc_feature: Homolog of GI Number: 9911057 NR Desc: Cytochrome c biogenesis ATP
  misc_feature: Homolog of GI Number: 49333383 NR Desc: putative ABC transporter
  misc_feature: Homolog of GI Number: 75211617 NR Desc: COG4133: ABC
  misc_feature: Homolog of GI Number: 75186997 NR Desc: COG4133: ABC
MPALRPPPPRLMLNAVSCMRNAQTVLRDINVSVHDGTALVLTGANGSGKTTFLRMLAGFSRPSAGEILWNGHDVTSPGVFQQYKLQLNWMSLKDAVKEKLTVLENVQWFELLEGKHGRSAPAIELMGLGRLMNDKARMLSMGQRKRLQLARLLAIDRPIWLLDEPSVALDSEGVKLLEYIIAEHRKKGGIVIVATHLPIEIEDSMNLRLPQRFPRRKTLVDLVR

SEQ ID NO: 4091 - DNA, 1173 bp, Triticum aestivum
  misc_feature: Ceres CLONE ID no. 843690
  misc_feature: Ceres CDNA ID no. 35383303
  CDS (144)..(935): REFERENCED BY SEQ ID NO: 4092
acaactcacacactacttctacttgtattaacgccagtgcggccacacttggtcacatcctcgtatcgtcggcaagaaagaagagttgagttgaaaagagaagagcggcttgcttgctttggtacgtacgtgcgtcggtcaggatgagcacggcggcgcggacgacggggcggcgggggtttaccatggggcgcagcgaggacgcgacgcacccggacaccatccgcgccgccatctccgagttcctcgccacggccatcttcgtcttcgccgccgagggctccatcctctccctcgggaagctctaccatgacatgagcacggcgggcgggctggtggccgtggcgctggcacacgcgctggcgctggccgtggcggtgtccgtggccgtgaacatctccgggggccacgtcaacccggccatcaccttcggcgcgctgctcggcggccgcatcaccctcgtgcgcgccctcttctactggatcgcgcagctcctcggcgccatcgtcgcctccctcctcctccgcctcaccaccggaggcatgcggccgcccggtttctccctggcgtcgggggtgggggactggcacgcggtgctgctggaggcggtgatgacgttcggcctcatgtacgcctactacgcgacgctgatcgaccccaagaggggccacgtgggcaccatcgggccgctcgccgtggggttcctgctcggggctaacatactcgccggcgggccgttcgatggcgccgcgatgaacccggcgcgggtcttcgggccggcgctcgtcgggtggcggtggaggcaccactgggtctactggctcgggcccttcctcggctccggcctcgctgggctcctctacgagtacgtcgtcatgccgtctaccgagaccgccgcccacgcccaccagccgctcgcgccggaggactactagccgccaccgccgcagctgctgcttcaaatccttgaaatccaacacttgcagctatgctttatcgctatatatgtatgtatggctttttgtttctatatttagtgtgttggttaataatggagggtggccttgctgtgcatggttgcccctatagtatctccgaggtgatgtttgctccgttttgtgtaataagtttccagtgcaatatagtatcttcatctgaaaaaaaaaaaaaaaa

SEQ ID NO: 4092 - protein, 263 aa, Triticum aestivum
  misc_feature: Ceres CLONE ID no. 843690
  misc_feature: Ceres CDNA ID no. 35383303
  misc_feature (20)..(240): Pfam Name: MIP PFAM Desc: Major intrinsic protein
  misc_feature: Homolog of GI Number: 10140710 NR Desc: putative beta
  misc_feature: Homolog of GI Number: 13447827 NR Desc: tonoplast membrane integral protein ZmTIP3
  misc_feature: Homolog of GI Number: 13448043 NR Desc: tonoplast membrane integral protein ZmTIP3
  misc_feature: Homolog of GI Number: 21436427 NR Desc: putative tonoplast intrinsic protein alpha
  misc_feature: Homolog of GI Number: 7441287 NR Desc: membrane protein MP23 precursor
  misc_feature: Homolog of GI Number: 4539145 NR Desc: major intrinsic protein
  misc_feature: Homolog of GI Number: 7441288 NR Desc: membrane protein MP28
  misc_feature: Homolog of GI Number: 81886 NR Desc: tonoplast intrinsic protein alpha
  misc_feature: Homolog of GI Number: 135859 NR Desc: Probable aquaporin TIP
  misc_feature: Homolog of GI Number: 50927737 NR Desc: OSJNBb0034G17.15
MSTAARTTGRRGFTMGRSEDATHPDTIRAAISEFLATAIFVFAAEGSILSLGKLYHDMSTAGGLVAVALAHALALAVAVSVAVNISGGHVNPAITFGALLGGRITLVRALFYWIAQLLGAIVASLLLRLTTGGMRPPGFSLASGVGDWHAVLLEAVMTFGLMYAYYATLIDPKRGHVGTIGPLAVGFLLGANILAGGPFDGAAMNPARVFGPALVGWRWRHHWVYWLGPFLGSGLAGLLYEYVVMPSTETAAHAHQPLAPEDY

SEQ ID NO: 4093 - DNA, 715 bp, Triticum aestivum
  misc_feature: Ceres CLONE ID no. 843770
  misc_feature: Ceres CDNA ID no. 40041344
  CDS (88)..(477): REFERENCED BY SEQ ID NO: 4094
caaaaatcgatttggaccagacaccaccgagcccccaaccagacccagaccaaaccctaggcggcggcggcggcggcggcggaagcgatggcggcggcgagcctgaggaaggggaacgcgaggctgccgccggaggtgaacagggcgctgttcgtgcggaacctgccgttcaacatctcgagcgaggagatgtacgacatcttcggcaagtacggggcgatccggcagatccgactgggcaacgccaaggacacgcgggggacggcgtacgtggtgtacgaggacatctacgacgccaagaacgccgtcgaccacctctcgggcttcaacgtcgccaaccgctacctcatcgtgctctactcgcagctcaacaggatgtccaagaagacggacatcaagaagaaggaggacgagatcaccaggctccaggagaagtacggcgtcggatccaagaccccctccgccaacgacgcctgatccttggtgccccgtgtttttttttagttagaaatcgtcgagagaaactgttgaatcggagatcggtcctgtaatctgtgcttgccgcggtatgtttgtgtttgcggtggttccatattgatgatgaacatagctcggatggaacttgaatttgatactttaattagtaggtatatctgtgctgtgggtgtcaatggtctgataaacaggggcgttcgcttgaaaaaaaaaaaaaaaa

SEQ ID NO: 4094 - protein, 129 aa, Triticum aestivum
  misc_feature: Ceres CLONE ID no. 843770
  misc_feature: Ceres CDNA ID no. 40041344
  misc_feature (21)..(89): Pfam Name: RRM_1 PFAM Desc: RNA recognition motif.
  misc_feature: Homolog of GI Number: 32129324 NR Desc: putative RNA binding protein
  misc_feature: Homolog of GI Number: 62857825 NR Desc: LOC550003
  misc_feature: Homolog of GI Number: 76698314 NR Desc:  similar to splicing factor 3B
  misc_feature: Homolog of GI Number: 34785490 NR Desc: MGC68842 protein
  misc_feature: Homolog of GI Number: 66515801 NR Desc:  similar to CG13298
  misc_feature: Homolog of GI Number: 54642523 NR Desc: GA12181
  misc_feature: Homolog of GI Number: 68395294 NR Desc:  similar to tudor domain containing 6
  misc_feature: Homolog of GI Number: 85255 NR Desc: salivary glue protein sgs
MAAASLRKGNARLPPEVNRALFVRNLPFNISSEEMYDIFGKYGAIRQIRLGNAKDTRGTAYVVYEDIYDAKNAVDHLSGFNVANRYLIVLYSQLNRMSKKTDIKKKEDEITRLQEKYGVGSKTPSANDA

SEQ ID NO: 4095 - DNA, 1457 bp, Triticum aestivum
  misc_feature: Ceres CLONE ID no. 845691
  misc_feature: Ceres CDNA ID no. 25445923
  CDS (238)..(1233): REFERENCED BY SEQ ID NO: 4096
ctgtttaggggtcatggagttggtgatttgggccaccgccaccgcgaaacatttcccgcgatctcgggcgccttcccgcgagcgcgaaacctcccaatccgttccgttccccacctcagccgcgtaatcccacccattctgcgtgtcaagctagggtttctcctcgccccgccggcccgcccccatagatccccacaccaaggcacgcgctagagcctagaggagctgcacgatccgatggcgccgctctcatggcggcaccatacgctgctgcaggcgctgctctcccgtggaccgctctcggagcgagacttccacgccctcttcaccgccatctccggcggcaagaaccccgccactcaccagcaactattcactgatacacttatgaagatcaacaatgagctagggtatctacaatttgatctgcgagcatgtataaaccagtatgatggaacagtttattatggagtggtcaacaacatttctgatgaagaatcgaagcttggctccaagtattctgtaccacagattgcattctacaagggactgttagaagcaatagttcatgaagctggaaatgatgggagcataactagtattgaagctctcaacgtccggattgacaaccaggtcgtgattgcggatggtacacaagacactcaatctcgtcttccttcttctatcacaaacttcttgttctctcaaaaggaaaagactcttattgaactgatacaagatcgttggctggcgtacacctcagagggcaagattggtcttggtatcagatcatttcttgatctccggagctggtttcgcagcaatgatatcccatcatgcgaggtttgcaatgaagctggtataaaggcatcaacttgttccaaggaaggatgcaatgtgagaatccatatctactgtctgaagaagaaatttccacagcggaaggcctcgagagcttgtccccagtgtgccactgaatggccccagcaggaaggcgaggacgagggtgacgaggaagcgaacgagcccggcggggaaggtcaggagggcccatcggctgaccctccttcgaggaggaaacgcagagtcaaggctgaactggcggaggaagctgaagaagcaggcccgtcgaccgcggtgcccaggagaagttcgaggatggccaaagccgaggaggcagcgtctgcagatgcttcacagccggccaggtcctcaaagagaaggaagaaatgatggctctttctagtaagattggcaatgcaatgctgcttttgtcgtgtacatagcgtagctggtatcactatgctggtggtttctgccttcctggagttacttgcttgacctgctctgcttgcccgtttgccgcctggctttagccagctgggaagacaaggacaaggacggcccctgttagtttaagtactataattaattattatacaaaaaaaaaaaaaaaa

SEQ ID NO: 4096 - protein, 331 aa, Triticum aestivum
  misc_feature: Ceres CLONE ID no. 845691
  misc_feature: Ceres CDNA ID no. 25445923
  misc_feature (200)..(228): Pfam Name: C1_2 PFAM Desc: C1 domain
  misc_feature (6)..(189): Pfam Name: SMC_Nse1 PFAM Desc: Nse1 non
  misc_feature: Homolog of GI Number: 77548515 NR Desc: Nse1 non
MAPLSWRHHTLLQALLSRGPLSERDFHALFTAISGGKNPATHQQLFTDTLMKINNELGYLQFDLRACINQYDGTVYYGVVNNISDEESKLGSKYSVPQIAFYKGLLEAIVHEAGNDGSITSIEALNVRIDNQVVIADGTQDTQSRLPSSITNFLFSQKEKTLIELIQDRWLAYTSEGKIGLGIRSFLDLRSWFRSNDIPSCEVCNEAGIKASTCSKEGCNVRIHIYCLKKKFPQRKASRACPQCATEWPQQEGEDEGDEEANEPGGEGQEGPSADPPSRRKRRVKAELAEEAEEAGPSTAVPRRSSRMAKAEEAASADASQPARSSKRRKK

SEQ ID NO: 4097 - DNA, 1710 bp, Triticum aestivum
  misc_feature: Ceres CLONE ID no. 846655
  misc_feature: Ceres CDNA ID no. 29191561
  CDS (261)..(1373): REFERENCED BY SEQ ID NO: 4098
tcgccccccactccccctccccgcaggaatcctcccacttttctgttccgtcgcctggacagatctctcgaggcgcatccgtcgcccctctccgcaatccgaagcggcgacgagctcgcgccggcggagatccgccgcctgaactgggttttcatagtctcgacaattctaccggaatgatgttttagcatgattatagaagtgaagccttgtaaatgtagattctgaagctctgtcattgctacacatacacctggatcatggcaccacgcaacagaacttcatctagaaggcctctctgggtcatcgtcttgattgcttttgtctgtgcgatagtcactggtgcctatctttataaaccccaacattacacgggttgctacttgtctaattcctgtggttctcagcctcctctagaacctgtgagagtatacactgatgatgagatagctgctcgtgctgtaatgagagaccttgttctgtcacagcctgttcagtcaaagaatccgaagatcgctttcatgttcttgacacccagttcattgccttttgagaagctttgggaaaagttcttcatgggacatgaagaccgatacacaatatacgtacatgcttcaagagaaaagacagttcatgcaagtccaatattcgctggcagggatattcggagtgaaaaggtggtctggggtacagttactatgattgatgcagagaggaggctcttggcaaatgcactgcaagatgcagataaccagcattttgtcttgctctctgagagttgtgtaccactgcataacttcgattatgtatatagttatctcatggaaacaaacatcagctttgttgactctttcgatgatcctggtccacatggagcaggtagatactctgagcatatgttacctgaaatcgtcaagagggattggagaaagggtgcacagtggttcacggtgaaacggcagcatgcagttcttatacttgttgacactctttactatggaaagttcaaacgttactgtaagcctggaaatgaatatcataactgctattctgatgagcactatctgccaaccttatttaatatggttgatccaaccggaatcgcgaattggtcagtgacacgtgttgattggtctgaaggaaaatggcatcctaaagtttatagggctgttgacacaagctttgaactgcttaaaagtatagcgtctatcgacgagagcgttcacgtgacgagcaacgcgaagcacgaaatgcagcgaagaccgtgcatgtggaacggcatgaagaggccttgctacctattcgcacggaaattttatcccgaggcgctcgacactctgatgaacattttctcgaatttcaccgtcatatgagtatggcggatgcctcgaggattcttttttcataccgattgttgcccgccgtggcgctgcagtccaggcgctgttgtgttgtagctggtgtcagaatacactgcttgttcagcagaggtttgcacgttttcagatggcacctgacctggcctgctggtctctgaagcaaaatctctcaatggttaggctattttagtagcagctcttttaatggcgatttttgctggtgtagaacagtggcaactgcaaaacgaaatgaaccagttcgtctgaccgagaagtgctctgttcttttatgaaattgatgcctgatcccttaacaaaaaaaaaaaaaaaa

SEQ ID NO: 4098 - protein, 370 aa, Triticum aestivum
  misc_feature: Ceres CLONE ID no. 846655
  misc_feature: Ceres CDNA ID no. 29191561
  misc_feature: Homolog of GI Number: 50928577 NR Desc: OSJNBa0035M09.18
  misc_feature: Homolog of GI Number: 50922289 NR Desc: OSJNBb0056F09.13
  misc_feature: Homolog of GI Number: 34911442 NR Desc: P0431H09.21
MAPRNRTSSRRPLWVIVLIAFVCAIVTGAYLYKPQHYTGCYLSNSCGSQPPLEPVRVYTDDEIAARAVMRDLVLSQPVQSKNPKIAFMFLTPSSLPFEKLWEKFFMGHEDRYTIYVHASREKTVHASPIFAGRDIRSEKVVWGTVTMIDAERRLLANALQDADNQHFVLLSESCVPLHNFDYVYSYLMETNISFVDSFDDPGPHGAGRYSEHMLPEIVKRDWRKGAQWFTVKRQHAVLILVDTLYYGKFKRYCKPGNEYHNCYSDEHYLPTLFNMVDPTGIANWSVTRVDWSEGKWHPKVYRAVDTSFELLKSIASIDESVHVTSNAKHEMQRRPCMWNGMKRPCYLFARKFYPEALDTLMNIFSNFTVI

SEQ ID NO: 4099 - DNA, 1659 bp, Triticum aestivum
  misc_feature: Ceres CLONE ID no. 846809
  misc_feature: Ceres CDNA ID no. 25892853
  CDS (310)..(1344): REFERENCED BY SEQ ID NO: 4100
atcattgcagctcgtagcactccacccttggtctcgagtctagtcctagccagctccttcgccggcggggcgaggcgaggcgagcgacgcccagctcatcttccccatctatataagcgcgcgcgcgcccgcctctctcctcacttaaggcacgccgagtgttagctacagagagagagagagagggagagtgagggcagcggcaagtgcaagcatcaattaaggtcaggcagggcagagagaggaataagcaagaagagctagctagttaagagtccaagggagggagacaggcagctcctatagtagatggcaatgaggtcgagggggctgcagctgcggtcgcggcggcagcacagcgtgctcgtcgccgcggccgtcgtcgtcggcgtgctgctgctggcgacggcggcgccgcgcgtcgcggcggcggggctgagccggaactactacgccaagacgtgccccaacgtggaggcgctggtccgcggcgccgtgacccagaagctccaggagaccttcaacgccgcgcccggcaccctccgcctcttcttccacgactgcttcgtcagggggtgcgacgcttcggtgctcatctccgggccgggcgacgaacacagcgcgggcgcggacacgacgctgtcgccggacgcgctggacctcatcacccgcgccaaggccgccgtggacgccgacgccagctgctccaacaaggtctcctgcgccgacatcctcgccctcgccacccgcgacgtcgtccagcaggcgggagggccgtcgtacccggtggagctggggcggctggacggcaaggtggggacgcgcgccgtggtgaagcacagcctccccggcgccggcttctccctggaccagctcaacaagctcttcgccgtcaacggcctcacccagaccgacatgatcgccctctcaggggggcacacgatcggggtgacgcactgcgacaagttcgtgcggcggctgtacacgttcaagggggcgcggccgcagtacagcccgccgatgaacctggcgttcctgcggcagatgcgcgggacgtgcccgctcaactacaaccccaccacggtggccatgctggacgccgtcacgcccaacaagttcgacaacggatactaccagacgctgcagcagcagaagggcctgctgtcgtccgaccaggtgctcttcgccgaccgccgctcccgggccaccgtcaactacttcgccgccaaccagaccgccttcttcgacgccttcgtcgccgccatggccaagctcggccgcatcggggtcaagaccgccggctccgacggcgagatccgacgggtgtgcaccaaggtcaactaatgttgcttgcctagctggaggagtagctgccatggtagcatcacacgtacattcagtagagagggtaaatggatggatgggccaatcagttgtcatgtgtctctcctcttctccctgcccatgcacgccccatatgctcacacaagccatattgtcataaccgatttgttccagcccaattcttttcttcatcatgtaataaagcatataatcatataaatgccgtgggataggaggcacagttacatgcatgtaaatgttacagtgggtccagttaatcaacaagtatatcccatatcaaaaaaaaaaaaaaaa

SEQ ID NO: 4100 - protein, 342 aa, Triticum aestivum
  misc_feature: Ceres CLONE ID no. 846809
  misc_feature: Ceres CDNA ID no. 25892853
  misc_feature (57)..(305): Pfam Name: peroxidase PFAM Desc: Peroxidase
  misc_feature: Homolog of GI Number: 55701047 NR Desc: TPA: class III peroxidase 90 precursor
  misc_feature: Homolog of GI Number: 50929299 NR Desc: OSJNBa0071I13.13
  misc_feature: Homolog of GI Number: 3004558 NR Desc: peroxidase
  misc_feature: Homolog of GI Number: 1620369 NR Desc: peroxidase ATP22a
  misc_feature: Homolog of GI Number: 62526567 NR Desc: secretory peroxidase PX3
  misc_feature: Homolog of GI Number: 4138647 NR Desc: peroxidase
  misc_feature: Homolog of GI Number: 6522917 NR Desc: peroxidase ATP21a
  misc_feature: Homolog of GI Number: 28629828 NR Desc: peroxidase 1
  misc_feature: Homolog of GI Number: 17104673 NR Desc: putative peroxidase ATP8a
  misc_feature: Homolog of GI Number: 971564 NR Desc: peroxidase2
  misc_feature: Useful for making ornamental plants with modified flowers
MRSRGLQLRSRRQHSVLVAAAVVVGVLLLATAAPRVAAAGLSRNYYAKTCPNVEALVRGAVTQKLQETFNAAPGTLRLFFHDCFVRGCDASVLISGPGDEHSAGADTTLSPDALDLITRAKAAVDADASCSNKVSCADILALATRDVVQQAGGPSYPVELGRLDGKVGTRAVVKHSLPGAGFSLDQLNKLFAVNGLTQTDMIALSGGHTIGVTHCDKFVRRLYTFKGARPQYSPPMNLAFLRQMRGTCPLNYNPTTVAMLDAVTPNKFDNGYYQTLQQQKGLLSSDQVLFADRRSRATVNYFAANQTAFFDAFVAAMAKLGRIGVKTAGSDGEIRRVCTKVN

SEQ ID NO: 4101 - DNA, 1043 bp, Triticum aestivum
  misc_feature: Ceres CLONE ID no. 846933
  misc_feature: Ceres CDNA ID no. 25087759
  CDS (121)..(828): REFERENCED BY SEQ ID NO: 4102
aatatacacggagaagagatcgtcatcatccgccaaaccagatcggctcggctgcttcctcttcttcaacttcgcagaatcgctggtcttctcgtcctctagttaagtccctcgacagcaatgggaggaggcaacgacggtcatgggtacccacccggtggccaggggggataccctccgcaagggtacccgccgcagcagggaggttaccctccacagcaaggatacccgcctgcacctggagcttacccacctgcacctggggcataccctcctgcacctggggcataccctcctgcgcccggagcgggtggcagtgacggggagaaggggctcctctccaacatcatgcacggtgttgccggtgctcatggtggtggccatggctacccatctggtggccacgggtaccccccgcagcagcatggataccctcagcaaggctaccctcctcagcatggctacccaccgcaacagcatggctaccctccacagcagcatggctatccccctgctggctaccctggctcatctggtcacagtggtagccatggaggaggaggcatgggcatgggcggcatgctagctggaggcgcagcagctgctgccgccgcttacggagcacacaagatttctcacggcggccacggtggaggtggacacatgatgggaggcatgatgggcggccatggaggctatggcggcgggtacggccaccacggcggcaagttcaagcacgggaagcacggccacggcaagttcaagcacggcaagcatgggaagcacggcatgttcggcggcggcggaaagttcaagaagtggaagtaatgcgctagctagtagcttcaccatggctgatgaatcaaaaaaatacctaaactcttcgtgtaggcttccagaacttggtttggtcagggaaagcctttgagatgtatctaagcagggtgtggtgtggttgctgcccggatctcgtggagcttccatcctttcctctatatgatttggcactctagtctgcgtctgtgacaaaaaaaaaaaaaaaa

SEQ ID NO: 4102 - protein, 235 aa, Triticum aestivum; identical to SEQ ID NO: 2048
  misc_feature: Ceres CLONE ID no. 846933
  misc_feature: Ceres CDNA ID no. 25087759
  misc_feature (9)..(13): Pfam Name: XYPPX PFAM Desc: XYPPX repeat
  misc_feature: Homolog of GI Number: 33668156 NR Desc: GPRP
  misc_feature: Homolog of GI Number: 6478148 NR Desc: putative glycine and proline
  misc_feature: Homolog of GI Number: 9755790 NR Desc: glycine/proline
  misc_feature: Homolog of GI Number: 21553447 NR Desc: putative glycine and proline
  misc_feature: Homolog of GI Number: 113965 NR Desc: Annexin A7
  misc_feature: Homolog of GI Number: 671859 NR Desc: annexin VII
  misc_feature: Homolog of GI Number: 3288572 NR Desc: annexin max4
  misc_feature: Homolog of GI Number: 37778577 NR Desc: prion

SEQ ID NO: 4103 - DNA, 1124 bp, Triticum aestivum
  misc_feature: Ceres CLONE ID no. 847109
  misc_feature: Ceres CDNA ID no. 40041345
  CDS (216)..(860): REFERENCED BY SEQ ID NO: 4104
agcctcccttccctcagttccccaatccctgcgctacgtaccctagccgccagcagtcgcgcgctcccagcgctccctgctccccgtcctcccgctcgaatcgtcgccgtccgtcgtccacggccagagcaagcggccttgattccgtcccccacctccacccatccacgccacagccaggcctcgtctagaacctacgtcgaggcttgagcgagatggggttgagggacaagaagaggaaccagaggcgggtgctctcgcggcgctcggccggcccccggaccggcgagggcaaggatttcctgccgctggaggggaaagagcagaggatccgggagaagaagcaggccgaggagccggagaacacggccaccgtcctctacatcggccacatcccccacggcttctacgaggaccagatgcaaggtttctttcagcagttcggggctgttaagggggtcaggattgcccggaatcgcaagacaggaaagtccaagcattatggattcattgagtttgagaaccctgaggtggccaagattgtagctgatgagatgaataactacctcttgtttgagcacactctgcaaattgcgcctgtcccactggagaaagttcatgccaaattatggaaaggtgtgcggaagggatttgttccagttgaccaggtagcaattgaacagaagaggcttagtaaggatagaacagtagaagagcaccagaggatgcttgaaggaattgtaaagcgggatgagaagtgtcgcaaaagaatcaaggctgctggtatcgattacgagtgtccagcccttatcgggagcgttcagccttcagctaagaagatcaagtttgatgaggattagctatacagaaagcagatggatctttatccagtgggagtgatggaactgctgagttaacatggctggtctattttagtgaagatgagattgcgattttgcacttctttttcgcatcctgtctttagtggatgttgtattagttaaatgactggtgtatgttgatgaagaagcatgaagctgtgatggaaaatgaatgaatttcttatttctttagtaccaacctcaagatagatatttacacccttcagaaaaaaaaaaaaaaaa

SEQ ID NO: 4104 - protein, 214 aa, Triticum aestivum
  misc_feature: Ceres CLONE ID no. 847109
  misc_feature: Ceres CDNA ID no. 40041345
  misc_feature (55)..(126): Pfam Name: RRM_1 PFAM Desc: RNA recognition motif.
  misc_feature: Homolog of GI Number: 50945703 NR Desc: putative RNA binding protein
  misc_feature: Homolog of GI Number: 46367676 NR Desc: TA8 protein
  misc_feature: Homolog of GI Number: 18652180 NR Desc: RNA binding protein
  misc_feature: Homolog of GI Number: 82623439 NR Desc: RNA binding protein
  misc_feature: Homolog of GI Number: 21689805 NR Desc: putative RNA binding protein
  misc_feature: Homolog of GI Number: 47940061 NR Desc: Mki67
  misc_feature: Homolog of GI Number: 27545352 NR Desc: mki67
  misc_feature: Homolog of GI Number: 49257917 NR Desc: MKI67
  misc_feature: Homolog of GI Number: 73984027 NR Desc:  similar to MKI67 FHA domain interacting nucleolar phosphoprotein
  misc_feature: Homolog of GI Number: 73984025 NR Desc:  similar to MKI67 FHA domain interacting nucleolar phosphoprotein
MGLRDKKRNQRRVLSRRSAGPRTGEGKDFLPLEGKEQRIREKKQAEEPENTATVLYIGHIPHGFYEDQMQGFFQQFGAVKGVRIARNRKTGKSKHYGFIEFENPEVAKIVADEMNNYLLFEHTLQIAPVPLEKVHAKLWKGVRKGFVPVDQVAIEQKRLSKDRTVEEHQRMLEGIVKRDEKCRKRIKAAGIDYECPALIGSVQPSAKKIKFDED

SEQ ID NO: 4105 - DNA, 1257 bp, Triticum aestivum
  misc_feature: Ceres CLONE ID no. 847260
  misc_feature: Ceres CDNA ID no. 29191825
  CDS (114)..(944): REFERENCED BY SEQ ID NO: 4106
cacacaccaaaaagaatctcactccactccactccactgcaagcaacaatacaaacaccactcgagcatcctaagatcgaccagagtccttccttcctttcacgtagccggccatggagaaggcggcggagaacgttgacgccggtgcggcggcgcagctgcagctgcagctgaagctgttcgggtcgtgggcgagctcgtacacgcaccgcgtgcagctggccatgcggctcaaggggctcgccttcgagtacgcggaggaggacctcggtaacaagagcgacgcgctgctgcgccacaaccccgtctataagaaggtccccgtgctcgtccacgacggccgctccctcgccgagtccgtcatcatcctccagtacctcgacgacgccttcccggcctcccgccagctcctccccgctgacgccttcgaccgcgccgtcgctcgcttctggtgccacttcggcgacgacaagcttggacccgcggtgggggcggtgttcgcgtccacgggggaggagcaggaggctgcggtgcggcaggtgcacgagaacctggcgctgatcgaggcggagctgcgggagggggcgttcaagggccggcgtttcttcggcggcgacgaggtcggcttcctcgacgtcgtcctgggctgcggctcctactggctggccgtcttcgaggaggtcaccggcgtgcagctggtggacgcccaggcgttcccgctcttccacgcctggctgcgcgacttcgaggcgcaggacgaggtgagggagaccatcccctccatcgaccgcctcctcgagtacgcgcgcggcctccgccagatgctggtcgccatggccgccggcgccggcgctggcgcagcctcggccgatgcccccaccgccgctccgcccgccgcggcgcccccggccgccaccacggccgacatcgccgttgacatatgaccataggctgtgcacgcgttgaactgtggtttgtgtcggtcggacgtcgtcgtagctactagctagtatagtttcccgtgttgtgcggtgccgagcatgtggcgagccgccatgaattgcgctgctaccactatagttagtggcgcagtctggctaggtgtcgtttatttctttctcttctctttctctcattgttatgcgttgtgtgtttgtaactgggaatcttatgtgtttgcttcctagctttcttgtttagacataatgcacgtgtgtgagactggcattttcgttggatccaaaaaaaaaaaaaaaa

SEQ ID NO: 4106 - protein, 276 aa, Triticum aestivum
  misc_feature: Ceres CLONE ID no. 847260
  misc_feature: Ceres CDNA ID no. 29191825
  misc_feature (100)..(215): Pfam Name: GST_C PFAM Desc: Glutathione S
  misc_feature (20)..(91): Pfam Name: GST_N PFAM Desc: Glutathione S
  misc_feature: Homolog of GI Number: 11385533 NR Desc: glutathione S
  misc_feature: Homolog of GI Number: 51038226 NR Desc: putative glutathione s
  misc_feature: Homolog of GI Number: 20143553 NR Desc: putative glutathione S
  misc_feature: Homolog of GI Number: 50900304 NR Desc: putative glutathione S
  misc_feature: Homolog of GI Number: 11385523 NR Desc: glutathione S
  misc_feature: Homolog of GI Number: 11177837 NR Desc: putative glutathione S
  misc_feature: Homolog of GI Number: 20143577 NR Desc: putative glutathione S
  misc_feature: Homolog of GI Number: 11385497 NR Desc: glutathione S
  misc_feature: Homolog of GI Number: 20143551 NR Desc: putative glutathione S
  misc_feature: Homolog of GI Number: 4468798 NR Desc: GST7 protein
  misc_feature: Useful for sterility
MEKAAENVDAGAAAQLQLQLKLFGSWASSYTHRVQLAMRLKGLAFEYAEEDLGNKSDALLRHNPVYKKVPVLVHDGRSLAESVIILQYLDDAFPASRQLLPADAFDRAVARFWCHFGDDKLGPAVGAVFASTGEEQEAAVRQVHENLALIEAELREGAFKGRRFFGGDEVGFLDVVLGCGSYWLAVFEEVTGVQLVDAQAFPLFHAWLRDFEAQDEVRETIPSIDRLLEYARGLRQMLVAMAAGAGAGAASADAPTAAPPAAAPPAATTADIAVDI

SEQ ID NO: 4107 - DNA, 1605 bp, Triticum aestivum
  misc_feature: Ceres CLONE ID no. 847823
  misc_feature: Ceres CDNA ID no. 36520455
  CDS (138)..(1271): REFERENCED BY SEQ ID NO: 4108
gttttaaccgcacgctgctcaatccaatccaatcagtcccttgcttggatccatccatcccctccccaccaaataccgtcgatctctattcacctctcccaaagtcttcgtctggtcttctccacctcgacgcagacatggccgccgccgccgcgtcggatctggagagcaaggccaaggaggccttcgtcgacgacgacttcgagctggccgccgagctctacacccaggccattgaggcggggccggccaccgcggaactctacgccgaccgagcccaggcgcacatcaagctgggcagttacactgaggctgtagctgatgccaacaaagcaattgaacttgatccttcgatgcataaagcataccttcggaagggctctgcttgcatcaagctggaggaataccaaactgcaaaggctgctcttgaagtgggttcttcatatgcatctggtgactcgaggtttactcgtctgatgaaggagtgtgatgatcgtattgctgaggaggctagccaggtgccagtaaagaatgccgctgcagctgttgctccagctacatcttcgggggcatcttccggggctacaactgtggctactgaagttgaggaccaggatggtgcaaatatggagaatgcacagccaacggtagaagtgccaagcaagcccaaatacaggcatgactactacaatactcctacagaagtggtactgactatatttgctaagggtgttccagctgacagcgtggttgttgactttggtgaacagatgctgagtgtctcaattgaacttcccggtgaggaaccataccattttcagcctcgtctgttttcaaagatcgtcccagataagtgcaagtatactgtgttgtctacaaaggttgaaatgcgccttgcaaaagctgagccagtaacttggacatcattggattatactggtaaaccaaaggctcctcagaagataaatgtaccagctgaatcagcccagaggccatcttatccatcatcaaaatccaaaaaggactgggataagcttgaagctgaagtgaaaaaacaggagaaggatgaaaaacttgatggcgatgctgcattgaacaaatttttccgtgaaatttacagtgatgctgatgaagatatgcgtagagcaatgatgaagtcttttgtggagtctaatggaaccgttctctcaaccaactggaaggatgtcgggaaaaagacggttgaaggaagccctcctgatggaatggagctcaagaagtgggagtattaatgaatccagatcatccatgttgtaaatcctggtcgggtcgtgagtgttaacttggctgcagacttgcaaatcagtgtcggtcggattattgtgtgttgctcttgattctgtttccgtatttgtaagctgtttgcgtggcaggttagcttttaagtacttatcctagttttgcgagctacagttggtaatagagtaagccatacctgtgcatctgtggtatggaagtgcaaaacgtcgttgtaactggtgccaaaactatcatctgtgaaacggtgctattttttgtctgaaatctgcgcatcacactttatttttaagaaaaaaaaaaaaaaaa

SEQ ID NO: 4108 - protein, 377 aa, Triticum aestivum
  misc_feature: Ceres CLONE ID no. 847823
  misc_feature: Ceres CDNA ID no. 36520455
  misc_feature (177)..(264): Pfam Name: CS PFAM Desc: CS domain
  misc_feature (294)..(375): Pfam Name: SGS PFAM Desc: SGS domain
  misc_feature (74)..(98): Pfam Name: TPR_1 PFAM Desc: Tetratricopeptide repeat
  misc_feature: Homolog of GI Number: 17017306 NR Desc: SGT1
  misc_feature: Homolog of GI Number: 34912836 NR Desc: Sgt1
  misc_feature: Homolog of GI Number: 6581058 NR Desc: Sgt1
  misc_feature: Homolog of GI Number: 62467587 NR Desc: Sgt1b
  misc_feature: Homolog of GI Number: 29468339 NR Desc: SGT1
  misc_feature: Homolog of GI Number: 58760268 NR Desc: SGT1
  misc_feature: Homolog of GI Number: 38156582 NR Desc: pollen
  misc_feature: Homolog of GI Number: 30524966 NR Desc: SGT1
  misc_feature: Homolog of GI Number: 79325237 NR Desc: SGT1A
  misc_feature: Homolog of GI Number: 57103142 NR Desc:  similar to Suppressor of G2 allele of SKP1 homolog
MAAAAASDLESKAKEAFVDDDFELAAELYTQAIEAGPATAELYADRAQAHIKLGSYTEAVADANKAIELDPSMHKAYLRKGSACIKLEEYQTAKAALEVGSSYASGDSRFTRLMKECDDRIAEEASQVPVKNAAAAVAPATSSGASSGATTVATEVEDQDGANMENAQPTVEVPSKPKYRHDYYNTPTEVVLTIFAKGVPADSVVVDFGEQMLSVSIELPGEEPYHFQPRLFSKIVPDKCKYTVLSTKVEMRLAKAEPVTWTSLDYTGKPKAPQKINVPAESAQRPSYPSSKSKKDWDKLEAEVKKQEKDEKLDGDAALNKFFREIYSDADEDMRRAMMKSFVESNGTVLSTNWKDVGKKTVEGSPPDGMELKKWEY

SEQ ID NO: 4109 - DNA, 1787 bp, Triticum aestivum
  misc_feature: Ceres CLONE ID no. 847913
  misc_feature: Ceres CDNA ID no. 35387060
  CDS (89)..(1513): REFERENCED BY SEQ ID NO: 4110
acctcgccttcgtccccgccgatttgtctccacccatcagctgccgtcctcactcctctccgccggccgacccattcggagcgacgaaatggccgtgtcgacggagctgccggaggccgggtccccgcaggagcaggggacggaggcgacggcgccgcctccccccggcctgcggtacaactcgccgctggtccaggtgtcgctgatcgggctggtgtgcttctgctgcccgggcatgttcaacgcgctgtccgggctgggcgggggcgggcagttggaccacaccacggccgacaacgccaacacggcgctctacgcctgcttcgccatcttcggcgtcctcggcggcgccgcccacaacctgctcggcccgcgcctcacgctgctcctggggtccctcacctacccgctctacgccgcctccttcctctactacaaccaccgcaagtcccagacgttccccatcatcgccggcgcgctgctcggcgccggcgcgggcctgctctgggcggcgcagggcgccatcatgacctcctacccgccgcccaaccgccggggcagctacatctcgctcttctggtgcctcttcaacctgggcggcgtcctggggggcctcctccccttctccttcaactacgcccgcaccgacgccggcagcgtgaacgacgccacctacggggccttcatcggcttcatgctcctcggcgccgcgctcaccttcctcgtcctcccccccgccaggatcgtccgggacgacggcacccgcgccaccagggtcacctactcctcggtgtccaccgaggggtgggagatcctcaagctcttcaccaactggaggatgctgctcatcctgcccgccgcatgggccagcaacttcttctacacctaccagttcaacaacgtcaatggcctcctcttcaccctgaggaccaagggcctcaacaatgttttctattggggcgcgcagatgatcggctccgccggcatcggatacttcctcgacttcggcttcgccagccgccggaagaggggcctcatgggcgtcgccgccgtcgccctcctcggcaccgccatctgggccggcggcctcgccaaccagctgaggtatctcgacggcgaattccccgacaagatcgacttcaaggagggccgccgctacgccgggccattcctgctctacttcagctacggcctcatggacgccatcttccagagcctcatctactggatcatcggcgccctcgcaaacgactcacagatcctaagcagatacgttgggttctacaagggtgtgcagagtgcaggagcggccgtggcatggcaggtggacacccacaagacgtccctgctgtcgcagctgatcgtgaactgggggctgtgcaccgtcagctacccgctgctggcggtcctggtgctcctggccgtcaaggacgaggactactcggtgtcaaacgttgacgacggcggcaaggagaaagacgccaagatggccgcgccgtcaagcttccactgaggagagaaaatgtttcagtcattcggcgtggtcgcctgctgcgacatctcatgagtacaatggtttaggccatggtgtaggcgtgagtgctcgctgctcggtcatcatgcgatcttcgtgttgtgtccaactgttactccagtgtgtgtgtagttcatgttggtggtggtggtggtgttcattggtaacatcatgtgataattttttctctgtttgcattgtcttcggttcactttatgcagtaaatggtaactatacaaaaaaaaaaaaaaaa

SEQ ID NO: 4110 - protein, 474 aa, Triticum aestivum
  misc_feature: Ceres CLONE ID no. 847913
  misc_feature: Ceres CDNA ID no. 35387060
  misc_feature (40)..(410): Pfam Name: MFS_1 PFAM Desc: Major Facilitator Superfamily
  misc_feature: Homolog of GI Number: 50921229 NR Desc: OSJNBb0004G23.4
  misc_feature: Homolog of GI Number: 72547023 NR Desc: proteophosphoglycan ppg4
  misc_feature: Homolog of GI Number: 72547041 NR Desc: proteophosphoglycan ppg1
  misc_feature: Homolog of GI Number: 72547036 NR Desc: proteophosphoglycan 5
  misc_feature: Homolog of GI Number: 72547018 NR Desc: proteophosphoglycan ppg3
  misc_feature: Homolog of GI Number: 56283929 NR Desc: CG3047
  misc_feature: Homolog of GI Number: 5420387 NR Desc: proteophosphoglycan
  misc_feature: Homolog of GI Number: 188864 NR Desc: mucin
  misc_feature: Homolog of GI Number: 11359723 NR Desc: proteophosphoglycan
MAVSTELPEAGSPQEQGTEATAPPPPGLRYNSPLVQVSLIGLVCFCCPGMFNALSGLGGGGQLDHTTADNANTALYACFAIFGVLGGAAHNLLGPRLTLLLGSLTYPLYAASFLYYNHRKSQTFPIIAGALLGAGAGLLWAAQGAIMTSYPPPNRRGSYISLFWCLFNLGGVLGGLLPFSFNYARTDAGSVNDATYGAFIGFMLLGAALTFLVLPPARIVRDDGTRATRVTYSSVSTEGWEILKLFTNWRMLLILPAAWASNFFYTYQFNNVNGLLFTLRTKGLNNVFYWGAQMIGSAGIGYFLDFGFASRRKRGLMGVAAVALLGTAIWAGGLANQLRYLDGEFPDKIDFKEGRRYAGPFLLYFSYGLMDAIFQSLIYWIIGALANDSQILSRYVGFYKGVQSAGAAVAWQVDTHKTSLLSQLIVNWGLCTVSYPLLAVLVLLAVKDEDYSVSNVDDGGKEKDAKMAAPSSFH

SEQ ID NO: 4111 - DNA, 845 bp, Triticum aestivum
  misc_feature: Ceres CLONE ID no. 848601
  misc_feature: Ceres CDNA ID no. 40041346
  CDS (105)..(545): REFERENCED BY SEQ ID NO: 4112
gaccagaaaaccctagcccgtcgcgccgccgccgccgccaccgcaaaatcttaaacccgcacgcacctccccctgccccgacctcgccgtcggcgtcctcagccatggcgttcaccgcccgcatgaaggacctcatgaggaagtacggcaaggtggccctcggtgtccacgtctccgtctccgtcgcctccgtctccggcctctacgtcgccatcaacaacaacgtcgacgtcgacgccatcttccgcaagatcggcatcagcgcccccggcaccgccgcaggcgacgcggccctgcccgccccctctcccggcgccggcgacggggccctccccctccccgcccccgccgtcgtcgtcggccaggaggcgccgcggaaccggaccggggagctcgcggcgtccagcggcggcgcgctcgcgctcgccatcctctgcaacaaggccctcttccccgtcagggtccccatcaccatcgcgctcacgccgcccatcgccaggctcctcgcccgctggaagctcgtcaagagcctcaagcagacctgagctgtgagcccaatgaccccccctctacgacttcagcatcgcctagttggaatcaaaattagatgcaaattttgctacactgtaccattggtttagctgtgagaggatttgtgaattatgcccgtcttctatcctaactattgggattggtaactttgcaatgtaattggtagcttcttttcttttctgaatggagtactgttcttcatttgtactgctccgtacctagttgtcaagtacggctttgaacaagttacaatattaatacactgtttcgaatatctaaaaaaaaaaaaaaaa

SEQ ID NO: 4112 - protein, 146 aa, Triticum aestivum
  misc_feature: Ceres CLONE ID no. 848601
  misc_feature: Ceres CDNA ID no. 40041346
  misc_feature: Homolog of GI Number: 55740439 NR Desc: hydroxyproline
  misc_feature: Homolog of GI Number: 530876 NR Desc: amino acid feature: Rod protein domain
  misc_feature: Homolog of GI Number: 2429362 NR Desc: proline rich protein
  misc_feature: Homolog of GI Number: 21992 NR Desc: extensin
  misc_feature: Homolog of GI Number: 12018147 NR Desc: vegetative cell wall protein gp1
  misc_feature: Homolog of GI Number: 67987177 NR Desc: 4Fe
  misc_feature: Homolog of GI Number: 50926032 NR Desc: OSJNBa0067K08.24
  misc_feature: Homolog of GI Number: 530878 NR Desc: amino acid feature: N
MAFTARMKDLMRKYGKVALGVHVSVSVASVSGLYVAINNNVDVDAIFRKIGISAPGTAAGDAALPAPSPGAGDGALPLPAPAVVVGQEAPRNRTGELAASSGGALALAILCNKALFPVRVPITIALTPPIARLLARWKLVKSLKQT

SEQ ID NO: 4113 - DNA, 1388 bp, Triticum aestivum
  misc_feature: Ceres CLONE ID no. 848766
  misc_feature: Ceres CDNA ID no. 25446239
  CDS (168)..(1061): REFERENCED BY SEQ ID NO: 4114
acgggcgttcactggtatctccatgtcgtccagtggtacttgtcattgctgattacggagggagtagttgactacctccccacgattatcagcagctcccacaaatttgcagcagccgccgccgccgttgctgttatcctgccgccgccgccgccttgttcggagaaatgggcaaaaaagccatccgatacgccgtggtggatgccttcgcggctgagccgttcaagggcaaccccgccgcagtatgcctcctcgaagaggagggcgcctccgcgaccgtggacgaccggtggatgcagtccgtcgccgccgagttcaacctctcggagaccgccttcctcgcccgtgactcctccggggcagccggcgcagccccgcggttccacctccgatggttcactcccgtcaccgaggttgacctctgcggccacgcgacgttggcctctgcgcacttcctcttcacgaccgttcttccggagcatggcaagctggagttcatgaccaggtccgggatcctaactgccaagaaagtccctgcaccagggagcactggcgtcccaggtgaggagcaggggaagctgtttattgagctggatttccccatgattggttttctggaatgcaacgaaatgctgtcgattccggagaccctaaatggtgctcccattgtcagcgttcacaaatcggctaccgacggtgacctcattgtgggactttcttcaggaaaagaagttgtggatatccttcctagcatcgatgaaattaaaaacttggcctgcaggggtcttattgttacaggaccggcacctgctggatctggttatgacttctttacacgtttcttctgcccaaaatttgggatagatgaggaccccgttactggcagtatacattgtgttttggcaccctattggggcagaaagctggggaagcaaaaattgacggcatttcaagcatctccaagaggtggaacactatacctgcaactggatgacgcaaatcagagagtgcaaatccagggagaagctcttactgtgatggatggaacgctcctagcctagccagcatgcctttggcaatttggcatccatctactcgtatatgctttgaaggacaaccattcatccatctactcgtatattcatggagttataatatgagtttggatggtggtgattctgttcgttgttatatgcttgtcgaacagttaactgcttatgggtacaaaaaataaaaaacatcctgagctcttttagagacctgaacaatgcccggcaattgcggataccgatgggggcttgtctaggggaagtgatttcattgtatttccgtgccacaaatgccatgtattgggcttgacgagttgacatccaaaaaaaaaaaaaaaa

SEQ ID NO: 4114 - protein, 297 aa, Triticum aestivum
  misc_feature: Ceres CLONE ID no. 848766
  misc_feature: Ceres CDNA ID no. 25446239
  misc_feature (5)..(293): Pfam Name: PhzC PFAM Desc: Phenazine biosynthesis
  misc_feature: Homolog of GI Number: 53370728 NR Desc: phenazine biosynthesis family protein
  misc_feature: Homolog of GI Number: 79461947 NR Desc: catalytic
  misc_feature: Homolog of GI Number: 51972140 NR Desc: At4g02850
  misc_feature: Homolog of GI Number: 48835186 NR Desc: COG0384: Predicted epimerase
  misc_feature: Homolog of GI Number: 72160500 NR Desc: Phenazine biosynthesis PhzC/PhzF protein
  misc_feature: Homolog of GI Number: 48730303 NR Desc: COG0384: Predicted epimerase
  misc_feature: Homolog of GI Number: 48765088 NR Desc: COG0384: Predicted epimerase
  misc_feature: Homolog of GI Number: 25354024 NR Desc: protein R02D1.1
  misc_feature: Homolog of GI Number: 48825816 NR Desc: COG0384: Predicted epimerase
  misc_feature: Homolog of GI Number: 15806348 NR Desc: antibiotic biosynthesis protein
MGKKAIRYAVVDAFAAEPFKGNPAAVCLLEEEGASATVDDRWMQSVAAEFNLSETAFLARDSSGAAGAAPRFHLRWFTPVTEVDLCGHATLASAHFLFTTVLPEHGKLEFMTRSGILTAKKVPAPGSTGVPGEEQGKLFIELDFPMIGFLECNEMLSIPETLNGAPIVSVHKSATDGDLIVGLSSGKEVVDILPSIDEIKNLACRGLIVTGPAPAGSGYDFFTRFFCPKFGIDEDPVTGSIHCVLAPYWGRKLGKQKLTAFQASPRGGTLYLQLDDANQRVQIQGEALTVMDGTLLA

SEQ ID NO: 4115 - DNA, 1084 bp, Triticum aestivum
  misc_feature: Ceres CLONE ID no. 848942
  misc_feature: Ceres CDNA ID no. 25087646
  CDS (121)..(771): REFERENCED BY SEQ ID NO: 4116
acaaagaaaaattagaatagaaaaaaacctttttcggggaatctcggctcccccagcggcaggcagtgcccgcctcccctccgagcgtccggcgccgacctcctggacctctcctccgccatgatggacctggatccccgcctctacgaggacgcctctgtcagcgataacgatgttcgcaacatagtgctatcttatcttatgcacaattgttttaaggagaccgcagagaccttcctatccagcactgggttaaagttacctgttgattatactgtagatgtggataagcgtaaagcaatcttaaattttgtggtggaaggggatgccgtgaaggccatagaactgacagaagagttggcacccaacttgctagagaatgacatggatttacattttgatcttataagtcttcacttcattgagctaattcgttccagaaaatgcacagaagcactcgagtttggccagaaaaagttgacaccctttggtaaagtttccaagtatgttgagaaattagaggactttatggccctcctagcttatgaagagcctgagaagtcacctatgtttcatctactagccccagagtataggcagaatgttgcagatagtttgaatcgggctattctcgcacatgctaatctaccagcatattcatcattggagagagttatacagcagtcgaccgtggtgagacaatatctacagcaggaagttgacaaggattcttacccaccgttttgtttgaaggcctttctggacaagtaaggcgcaaccatgatcagaaaggaaagggctatcatcacccctagattcgtgtgcccttgagagtgcggaaacaacaccgagagtttttcccattttccgttaaaagaacagcgagatgcacatatctgcagcgacctgacactgttgacagtgttgtactttgatagagtggtgttgtatgtgttttttttttttcgtcgggtcgtcagtattctgctcccctttagtcgtcgttaaacatgtacatatggaagcgccgggtcattctgtattattcgttcaaaaaaaaaaaaaaataaaaaaaaaaaaaaaa

SEQ ID NO: 4116 - protein, 216 aa, Triticum aestivum
  misc_feature: Ceres CLONE ID no. 848942
  misc_feature: Ceres CDNA ID no. 25087646
  misc_feature: Homolog of GI Number: 34910006 NR Desc: P0413G02.3
  misc_feature: Homolog of GI Number: 48104709 NR Desc: similar to ENSANGP00000018568
  misc_feature: Homolog of GI Number: 66514070 NR Desc:  similar to ENSANGP00000018568
  misc_feature: Homolog of GI Number: 55245016 NR Desc: ENSANGP00000018568
  misc_feature: Homolog of GI Number: 31200387 NR Desc: ENSANGP00000018568
  misc_feature: Homolog of GI Number: 37748147 NR Desc: 2310003C23Rik protein
  misc_feature: Homolog of GI Number: 54635739 NR Desc: GA14944
  misc_feature: Homolog of GI Number: 17944430 NR Desc: RH01588p
  misc_feature: Homolog of GI Number: 42571745 NR Desc: SPla/RYanodine receptor
  misc_feature: Homolog of GI Number: 24652442 NR Desc: CG11763
MMDLDPRLYEDASVSDNDVRNIVLSYLMHNCFKETAETFLSSTGLKLPVDYTVDVDKRKAILNFVVEGDAVKAIELTEELAPNLLENDMDLHFDLISLHFIELIRSRKCTEALEFGQKKLTPFGKVSKYVEKLEDFMALLAYEEPEKSPMFHLLAPEYRQNVADSLNRAILAHANLPAYSSLERVIQQSTVVRQYLQQEVDKDSYPPFCLKAFLDK

SEQ ID NO: 4117 - DNA, 717 bp, Glycine max
  misc_feature: Ceres CLONE ID no. 849745
  misc_feature: Ceres CDNA ID no. 40351417
  CDS (111)..(473): REFERENCED BY SEQ ID NO: 4118
cctagcaattcggcgcaatcgtcttctgcttcaaggaaggagagcttgttattctctatcaacaaggaaaatgtcaggctgagccagctgctgccatcccaggcgagcctatggatatcatgactgccttgcaacttgtgctcagaaaatctctggcttatggtggtcttgcacgaggccttcacgaaggggcaaaagtgattgagaagcatgctgcacaactctgtgttctagcagaagactgtgaccagcctgactatgttaaactggttaaggccctttgtgcagagcacaatgttagcctgctgacagttccgagtgcaaagacccttggagaatgggctggtttgtgcaagattgattccgaaggaaaagctaggaaggttactggttgctcctgtgtggttgtgaaggattttggtgaggagcatgaagcctataacgtcgttctgcagcatgtgaaatctcaatgagttgcaagattcatagattttatgcatttcattttgggttattccatgagaatgaattttgccttgtagctggattatatctaccttgggttttgattgtttaatatgactgccacattctaaatgttgttccttttttctttctttctttgatgcattgctgttactctaattaggaactcttgtttcacatttaatcattaaagaagggaaagttacatgacagaaaaaaaaaaaaaaaaaa

SEQ ID NO: 4118 - protein, 120 aa, Glycine max
  misc_feature: Ceres CLONE ID no. 849745
  misc_feature: Ceres CDNA ID no. 40351417
  misc_feature (5)..(100): Pfam Name: Ribosomal_L7Ae PFAM Desc: Ribosomal protein L7Ae/L30e/S12e/Gadd45 family
MDIMTALQLVLRKSLAYGGLARGLHEGAKVIEKHAAQLCVLAEDCDQPDYVKLVKALCAEHNVSLLTVPSAKTLGEWAGLCKIDSEGKARKVTGCSCVVVKDFGEEHEAYNVVLQHVKSQ

SEQ ID NO: 4119 - DNA, 746 bp, Glycine max
  misc_feature: Ceres CLONE ID no. 849918
  misc_feature: Ceres CDNA ID no. 40041347
  CDS (117)..(521): REFERENCED BY SEQ ID NO: 4120
atgtagtagtatttatcaggcaagtgggggttggtttgtgtttttttgttatatttgtatgttgttctgtgctgggtccttaatttgtggctgagaattaattattattatcaattatgggtctctcaaatttcccaagtgcatctgaaggggtgctacctgtgcttgtgataaacacggttctctcagtggcagtgttgaagaacatgtttagatccatgctccaagtagtacttggtggcagtgctgctgctaatggttcaaacattgaacatgatgaaagttcatcatcatcatgggaaaggagggtgtcaataactcagtacaagtcattgtgccacagccacgacataggaagaacaagtatggctatggtggagtgctgcgtttgtttgtgtcgttttgaagccaatcaagaggtcagtgagttgccttgcaagcattacttccacagaggttgcttggacaaatggtttgataacaaacacaccacttgtcccttgtgccgttccatcgactagacatgcagacatatacatacaaaggttgattaattaccattagagatatagctagctagttaattagttgttgctatatactgttaactggttatagtgaaaagaatcaatgcctcttttcatttctttactttagatttgtaaaactccttcaaccaactcagtttctctttgttttagtttttatggaacgtaatgagagatgacgttgcccaaaaaaaaaaa

SEQ ID NO: 4120 - protein, 134 aa, Glycine max
  misc_feature: Ceres CLONE ID no. 849918
  misc_feature: Ceres CDNA ID no. 40041347
  misc_feature (89)..(130): Pfam Name: zf PFAM Desc: Zinc finger
  misc_feature: Homolog of GI Number: 9743343 NR Desc: F21J9.24
  misc_feature: Homolog of GI Number: 48958501 NR Desc: At1g24580
  misc_feature: Homolog of GI Number: 20340241 NR Desc: putative RING zinc finger protein
  misc_feature: Homolog of GI Number: 12642858 NR Desc: putative RING zinc finger protein
  misc_feature: Homolog of GI Number: 37901055 NR Desc: putative C3HC4
  misc_feature: Homolog of GI Number: 76446335 NR Desc: RING
  misc_feature: Homolog of GI Number: 50947165 NR Desc: zinc finger protein family
  misc_feature: Homolog of GI Number: 4689366 NR Desc: BRH1 RING finger protein
  misc_feature: Homolog of GI Number: 50928223 NR Desc: OSJNBa0064M23.12
  misc_feature: Homolog of GI Number: 72536735 NR Desc: At1g63840
MGLSNFPSASEGVLPVLVINTVLSVAVLKNMFRSMLQVVLGGSAAANGSNIEHDESSSSSWERRVSITQYKSLCHSHDIGRTSMAMVECCVCLCRFEANQEVSELPCKHYFHRGCLDKWFDNKHTTCPLCRSID

SEQ ID NO: 4121 - DNA, 536 bp, Glycine max
  misc_feature: Ceres CLONE ID no. 850223
  misc_feature: Ceres CDNA ID no. 11021202
  CDS (45)..(300): REFERENCED BY SEQ ID NO: 4122
actttgagttcgaactaaacaattcaattcaatctgcctcgatcatggagaggaaaacatttgggtttttgttcttgctcctccttgtcttagcttctgatgtgacggtgaagagagcagaggcgaaagattgcttgacaaggaggcacgggttccagggtagatgcttattcgacaggcaatgtgcacatgtgtgcaggagcgatggtttcatcggtggtcagtgccgaggcccccttcgcaaatgcttttgcagcaggccatgttggtcgaaattactactgccaaagaggccatgaaataaacaaacaaacaaataaataaatagctctaaccgacacatatgtacgtagtgtcggggttctagctagctaggtaggtacgtgtgtcttttgttatcgatcctagtttggtggagcaagtgtggcatcatgatctagttatatatatatgtcgtgatcatcttgctctgttcagcaataaattataatggaaattaataaattagttatgccttttcaaaaaaaaaaaaaaaa

SEQ ID NO: 4122 - protein, 84 aa, Glycine max
  misc_feature: Ceres CLONE ID no. 850223
  misc_feature: Ceres CDNA ID no. 11021202
  misc_feature (28)..(74): Pfam Name: Gamma PFAM Desc: Gamma
MERKTFGFLFLLLLVLASDVTVKRAEAKDCLTRRHGFQGRCLFDRQCAHVCRSDGFIGGQCRGPLRKCFCSRPCWSKLLLPKRP

SEQ ID NO: 4123 - DNA, 532 bp, Glycine max
  misc_feature: Ceres CLONE ID no. 853050
  misc_feature: Ceres CDNA ID no. 25446240
  CDS (145)..(360): REFERENCED BY SEQ ID NO: 4124
atttttccgatcttagtttgcgttgcgttggcgtaggttgaagaagaagaagagagagagagagagagagagagagagagagagagagagagagagagagagaagagtaaggtaaccctagagtggtgaatcgaattcgaaacgatggaaagtgtttctcgaagaagaggtggaggcattttcgaaagcctctacaaggtcgttatgcgtcgcaactctgtctatgttacctttgtcatcgctggcgccttccttggagaacgggctgttgattatggagtccacaagctctgggaggcaaataatgttgggaaacgatatgaagacattcctgtgctagggcaaaggccgtcagaatagtgaccagcttgttagccattttgaagttttattattttcataaagatttgaagtgattaagagctggaagcagtttccatttttacaataaataccatatgcttgtgcgtggtctcattgactggccattggaaatattaaacattgaaccattgcgaaaaaaaaaaaaaaa

SEQ ID NO: 4124 - protein, 71 aa, Glycine max
  misc_feature: Ceres CLONE ID no. 853050
  misc_feature: Ceres CDNA ID no. 25446240
  misc_feature (13)..(69): Pfam Name: UCR_UQCRX_QCR9 PFAM Desc: Ubiquinol
  misc_feature: Homolog of GI Number: 633685 NR Desc: ubiquinol
  misc_feature: Homolog of GI Number: 4775284 NR Desc: putative ubiquinone
MESVSRRRGGGIFESLYKVVMRRNSVYVTFVIAGAFLGERAVDYGVHKLWEANNVGKRYEDIPVLGQRPSE

SEQ ID NO: 4125 - DNA, 1326 bp, Glycine max
  misc_feature: Ceres CLONE ID no. 853161
  misc_feature: Ceres CDNA ID no. 29191888
  CDS (34)..(1110): REFERENCED BY SEQ ID NO: 4126
aacatttgttctctccgcgttcgatgctatctaatggcttcttcttcactcttggtgtcactgcaagtagcgcttgtggttttcacttgcatattccatgcagcaacagtgacatgtgaccgtagcttcaaaatattctcttctatgaataactcctccaagagtagccaccattggattggacccatcggccaccgcaaaatcaccgttgatgttaacggtggcgggcactaccggtccgtccaagacgccgtcaatgccgtccccgacaacaacagaaagaatgtccttgttcaaatcaacgccgggtgctacaaagaaaaggtagtggtgcccgtgacgaagccgtacataacatttcagggcgcgggtaaggaagtgacggtgatagaatggcatgatcgagccagtgaccccggtcccagcggacagcaattgcgtacttacagaaccgcttctgttacagtttttgccacctatttttctgccagaaacatcagcttcaagaacacagcacctgcaccaatgccggggatgcagggaaggcaagcggtggcgtttcgaatatccggcgacaaagcatacttctccggctgcggtttctacggtgcacaagacaccctgtgcgacgatgcaggcagacattacttcaaggaatgctacattgagggatcaatcgactttatttttgggaatggcaggtcaatgtacaaggattgcgagctgcactcaatagcgacgaggtttggttccatagcggcccacgataggaaggaggcagaggagaagacagggttcgcattcgtaggatgcaaggtgacaggaacgggtccgttatatgtggggcgagcaatgggacagtattccagaattgtttactcttacacatatttcgatgatatcgttgcacatggcggttgggatgattgggaccatgcagacaataagaacaagactgtgttcttcggagtgtacaagtgctggggaccaggagcagaggctgtacgtggagtctcatgggcccgagacttaaatttcgaatctgctcatccatttatcaggaagagtttcgtcaatgggagacactggatcgcgccatctgatgcttaattagtcataacgtttttgttaactcactcaccctttatacaagtggacaaaacaatttacattcaaattccataaccattgttgcatccttcattcatttgattttgtcaatataggaattcatttttccctctttgtaaaatggccgaaacaccttctttccatgatttttttgttgaatattcatttatcacctacaaaaaaaaaaaaaaaaaa

SEQ ID NO: 4126 - protein, 358 aa, Glycine max
  misc_feature: Ceres CLONE ID no. 853161
  misc_feature: Ceres CDNA ID no. 29191888
  misc_feature: null
  misc_feature: Useful for making plants with altered cell wall content and/or composition
  misc_feature (56)..(350): Pfam Name: Pectinesterase PFAM Desc: Pectinesterase
  misc_feature: Homolog of GI Number: 23308329 NR Desc: At5g47500/MNJ7_9
  misc_feature: Homolog of GI Number: 50927829 NR Desc: OSJNBa0010H02.16
  misc_feature: Homolog of GI Number: 9758778 NR Desc: pectin methylesterase
  misc_feature: Homolog of GI Number: 34909402 NR Desc: putative pectin methylesterase
  misc_feature: Homolog of GI Number: 55733810 NR Desc: putative pectin methylesterase
  misc_feature: Homolog of GI Number: 20465499 NR Desc: putative pectin methylesterase
  misc_feature: Homolog of GI Number: 4415916 NR Desc: putative pectinesterase
  misc_feature: Homolog of GI Number: 27754550 NR Desc: putative pectinesterase family protein
  misc_feature: Homolog of GI Number: 15220471 NR Desc: pectinesterase family protein
  misc_feature: Homolog of GI Number: 57899969 NR Desc: pectinesterase
MASSSLLVSLQVALVVFTCIFHAATVTCDRSFKIFSSMNNSSKSSHHWIGPIGHRKITVDVNGGGHYRSVQDAVNAVPDNNRKNVLVQINAGCYKEKVVVPVTKPYITFQGAGKEVTVIEWHDRASDPGPSGQQLRTYRTASVTVFATYFSARNISFKNTAPAPMPGMQGRQAVAFRISGDKAYFSGCGFYGAQDTLCDDAGRHYFKECYIEGSIDFIFGNGRSMYKDCELHSIATRFGSIAAHDRKEAEEKTGFAFVGCKVTGTGPLYVGRAMGQYSRIVYSYTYFDDIVAHGGWDDWDHADNKNKTVFFGVYKCWGPGAEAVRGVSWARDLNFESAHPFIRKSFVNGRHWIAPSDA

SEQ ID NO: 4127 - DNA, 583 bp, Glycine max
  misc_feature: Ceres CLONE ID no. 853231
  misc_feature: Ceres CDNA ID no. 40351419
  CDS (61)..(333): REFERENCED BY SEQ ID NO: 4128
acaacatcatcatcaacaacaagcagatcaatctctctctctctctcaaccataatagtcatgggtttgaaggaggattttgagcagtatgctgagaaagcaaaaactttgccaccgactcaatcaaacgaagacttgcttatcctttatggattgtacaaacaggccaccgttggacctgtcaacaccagccgtcctggaatgttcaacatgagggacagagctaaatgggatgcatggaaggctgttgaagggaaatccaaggacgaagcaatgggtgattacatcattaaggtgaaacagctgctggaagcagctggcttgcctgcttgataacattgtcatgccttgctttctgattctgtgctagaagttcacaacagtttggaaataaacaattgcagtgtttgaagcttttattatcataatcatatttatttctaatgatttagacatgttgcttttgagtttagttatctgtatcactgttattggaaatgcctgtagacagatgctgaggacctgaaaatttctgtctagtataattaaaactacttcgacttttgacaaaaaaaaaaaaaaa

SEQ ID NO: 4128 - protein, 90 aa, Glycine max
  misc_feature: Ceres CLONE ID no. 853231
  misc_feature: Ceres CDNA ID no. 40351419
  misc_feature (3)..(87): Pfam Name: ACBP PFAM Desc: Acyl CoA binding protein
MGLKEDFEQYAEKAKTLPPTQSNEDLLILYGLYKQATVGPVNTSRPGMFNMRDRAKWDAWKAVEGKSKDEAMGDYIIKVKQLLEAAGLPA

SEQ ID NO: 4129 - DNA, 578 bp, Glycine max
  misc_feature: Ceres CLONE ID no. 854078
  misc_feature: Ceres CDNA ID no. 40041348
  CDS (69)..(401): REFERENCED BY SEQ ID NO: 4130
agtttctgttctccctctttcaccgcagtgttagggtttctgaagcctccaaccagaaagagagggaaatggctcccaaaccgcctagtacgggtctgtttgttggactgaacaagggacatgtcgtcaccaagaaggaattgcccccacgcccctcggatcgtaaggggaaaacaagcaagagggtgcactttgtgaggaacctcataagagaggttgctggttttgcaccctatgaaaagcgtataactgagttgctgaaggttgggaaggataagagggcacttaaggttgcaaagagaaagcttggaacccacaaacgtgcaaagaagaagcgtgaggaaatgtccaatgttcttaggaagatgagggctggtggggctggagacaagaagaaataagtcttatttactcttttctagtttcactagatggacctgtgtattgatggacgaactttcatatttttgctttggatcaattagtttacttcaacattttgtttgagaaatgtgttttgcttaactgagacatgatttatggaagaagctagattggacaaaaaaaaaaaaaaaaaa

SEQ ID NO: 4130 - protein, 110 aa, Glycine max; identical to SEQ ID NO: 3848
  misc_feature: Ceres CLONE ID no. 854078
  misc_feature: Ceres CDNA ID no. 40041348
  misc_feature (5)..(103): Pfam Name: Ribosomal_L36e PFAM Desc: Ribosomal protein L36e
  misc_feature: Homolog of GI Number: 57471698 NR Desc: ribosomal protein L36
  misc_feature: Homolog of GI Number: 34908154 NR Desc: putative 60S RIBOSOMAL PROTEIN L36
  misc_feature: Homolog of GI Number: 50931673 NR Desc: putative 60S ribosomal protein L36
  misc_feature: Homolog of GI Number: 56182368 NR Desc: putative 60S ribosomal protein L36
  misc_feature: Homolog of GI Number: 12642884 NR Desc: putative 60S ribosomal protein
  misc_feature: Homolog of GI Number: 79314916 NR Desc: structural constituent of ribosome
  misc_feature: Homolog of GI Number: 21592383 NR Desc: 60S ribosomal protein L36
  misc_feature: Homolog of GI Number: 1276967 NR Desc: putative ribosomal protein
  misc_feature: Homolog of GI Number: 17865758 NR Desc: 60S ribosomal protein L36
  misc_feature: Homolog of GI Number: 21554932 NR Desc: 60S RIBOSOMAL PROTEIN L36 homolog

SEQ ID NO: 4131 - DNA, 431 bp, Glycine max
  misc_feature: Ceres CLONE ID no. 854084
  misc_feature: Ceres CDNA ID no. 35383304
  CDS (77)..(229): REFERENCED BY SEQ ID NO: 4132
aacaacaacctaggtcacaaccgaggcagtcttttattttatagtataattcattctgtcatatatctgtgtagcaatggtggtctttctttgcaaggaagaatatggtgtgctcttgggcaatgactgggctgcaactcatgaatttggccacaacttttgtatctcaaatgaaggtgacgatgacgatgatgataatggcgtcattgatgtggccccagcggcatagaagaatttcgcaaaacatgcataaatgaggaggatgaggagggatatagtagtagtcagtgtaagcttcattctgtggtcttgcttagtaattacattacatttgtgtttactcttggaataggttctagtgttatgcttaattacggtcactataaatttgagacataatacatgttttattagcaaaaaaaaaaaaaaaa

SEQ ID NO: 4132 - protein, 50 aa, Glycine max; identical to SEQ ID NO: 3926
  misc_feature: Ceres CLONE ID no. 854084
  misc_feature: Ceres CDNA ID no. 35383304

SEQ ID NO: 4133 - DNA, 593 bp, Glycine max
  misc_feature: Ceres CLONE ID no. 854354
  misc_feature: Ceres CDNA ID no. 40351420
  CDS (144)..(350): REFERENCED BY SEQ ID NO: 4134
aaaaacgtgcgtttcacaaagtctaagcttattttcgtagccctatctgatctccctctctctcaatctcacaactctcgtcgtcgccgcactgcaccgcaccgcaccgcacgtaagcacccacggttgcaaattggcaggagatgaagaagggagtccatccacagaagcaatggatatcctacgttacacaaacgggtaggttgatgcatgtgatgatgacaaagatacaccctgttgggaaggtttatcacttccgggctaagcgtcaaatggccgagagtttaggacagattgctaagttcagacgccgctttgggctagaaaatccagagggcaatgaaaaatgacagcatagggaactttggttttttattttgtgcaaattggtggaaaataactgagaaattggtgatactctcaagcagggttttttttttgtagcatttaatatctgtagtttaactgcagaaatctttccttctttagttcatattaagtgatgtcttaagttagcagttgatatttgctggtgggtttattcaatgcaagttcaagctgaggttctttgttgcaaaaaaaaaaaaaaaaaa

SEQ ID NO: 4134 - protein, 68 aa, Glycine max
  misc_feature: Ceres CLONE ID no. 854354
  misc_feature: Ceres CDNA ID no. 40351420
MKKGVHPQKQWISYVTQTGRLMHVMMTKIHPVGKVYHFRAKRQMAESLGQIAKFRRRFGLENPEGNEK

SEQ ID NO: 4135 - DNA, 511 bp, Glycine max
  misc_feature: Ceres CLONE ID no. 854745
  misc_feature: Ceres CDNA ID no. 40351421
  CDS (27)..(278): REFERENCED BY SEQ ID NO: 4136
attatctatcttatatctaaactagtatgttgttggattttggagatgagctgacgttagatagtttctggattccatggctcatatggattcaactgttattgttccttcttctccttaccattctcttttgtcactccatcattactttagatccctctcaccacacaacttctccttctgcctctgccactgattctgatcttcacactcaacaaccctccaaccacggttccactgctgtgaccaaccgtcttcagagcacccgggtacagtagacattaaccaaaaaaacgagagtgaactttcaacaatctcccctggtccccttattttgttatgaatttaatgtatgccgcatttgattgtcttcccttttcattttcaccttcaaaatttcgagacatgcgtaatgatttaagacaaaatttagatgtgactttgtaagtatttttgatattgttctctaatcagaattggatcttagcgcaaaaaaaaaaaaaaaaaaaaa

SEQ ID NO: 4136 - protein, 83 aa, Glycine max
  misc_feature: Ceres CLONE ID no. 854745
  misc_feature: Ceres CDNA ID no. 40351421
MLLDFGDELTLDSFWIPWLIWIQLLLFLLLLTILFCHSIITLDPSHHTTSPSASATDSDLHTQQPSNHGSTAVTNRLQSTRVQ

SEQ ID NO: 4137 - DNA, 734 bp, Glycine max
  misc_feature: Ceres CLONE ID no. 855902
  misc_feature: Ceres CDNA ID no. 40041349
  CDS (79)..(393): REFERENCED BY SEQ ID NO: 4138
gcgtgactctcgcgggtggacaacgaaatttctcagccaaagaacaaggatcagaatcgtttaatcaagttgaggaagatggcactagtctccggaggaagatcaacactgaaccctaacgcccctctttacattcccgccgcgttccgccaagtggaggatttttctccagaatggtggcagctggtgacgacactgacatggtaccataactactggctaagccagcagcacgatgatggagccttctatggcgaggatgggtttgatggcaatgatgtggttgatttgcttcctgattcgtttgattttgatgctggtgaagatctttttgaagagtttattcgatcttctgaatcccaagaagaaactggacccaaaggaactgcatgagcttttagagatgaacccttttaaaagaagctaccaacctaagagactggacccaaggccttagctttaggtcatttagctgatatgtttgtatcatgttgttatccgtagcttcaacttcctgtaacttcttgtataggcaaggtttcaaacttccaatctatccttctctgccttttgccaaaatgtatggtaaatagggaaaggaaaaagatggagaaaaaaatgtgactgttttatgtactgatgttgtaaaagctgctacaacctacaattattcaaattacaaaatgagaaaaaaaaggaaaaaagacttctctgtttgcaaaaaaaaaaaaaaa

SEQ ID NO: 4138 - protein, 104 aa, Glycine max
  misc_feature: Ceres CLONE ID no. 855902
  misc_feature: Ceres CDNA ID no. 40041349
  misc_feature: Homolog of GI Number: 8489786 NR Desc: dehydration
  misc_feature: Homolog of GI Number: 20197424 NR Desc: ERD15 protein
  misc_feature: Homolog of GI Number: 42571167 NR Desc: dehydration
  misc_feature: Homolog of GI Number: 21592689 NR Desc: ERD15 protein
  misc_feature: Homolog of GI Number: 33415268 NR Desc: poly
  misc_feature: Homolog of GI Number: 75755868 NR Desc: TO44
  misc_feature: Homolog of GI Number: 56481295 NR Desc: early response to dehydration 15
  misc_feature: Homolog of GI Number: 56481323 NR Desc: early response to dehydration 15
MALVSGGRSTLNPNAPLYIPAAFRQVEDFSPEWWQLVTTLTWYHNYWLSQQHDDGAFYGEDGFDGNDVVDLLPDSFDFDAGEDLFEEFIRSSESQEETGPKGTA

SEQ ID NO: 4139 - DNA, 594 bp, Glycine max
  misc_feature: Ceres CLONE ID no. 857599
  misc_feature: Ceres CDNA ID no. 40351422
  CDS (193)..(342): REFERENCED BY SEQ ID NO: 4140
atcttgggatgcgtgttctttttttggttttgcttgcatgctaaatgagtggttggtcaccatgttgaaattagtgctcagaaccacaactatgctgttgaccctgccacactgccggaaggagtggaggttactcatatcaatctaaatgatggaagttgtgctggtcttgctttccctgctcaacagcttatgtctcttcaataccatcctgaagcatcccctggacctcatgattctgactacatttttagggagtttatagagctaatgaagcaagggaaaaacagaacaaagggaaggctacaccaactatcaacagcacatgctttggatgcataagtagttgaaggaagctgctcgcgttcggggcaaaaagaataatgcatctgctgaaaaattacgaagttatgagtccattactatgattttgtagatgagtttattaaggtttcctagggatccataaagattatgattttctcatgctcgcgttcgggccatgattgtcataaacctcaatgaggtttaatgtacttattacttatcgctatcaacactaaattttggttgctggcaaaaaaaaaaaaaaaa

SEQ ID NO: 4140 - protein, 49 aa, Glycine max
  misc_feature: Ceres CLONE ID no. 857599
  misc_feature: Ceres CDNA ID no. 40351422
  misc_feature (1)..(26): Pfam Name: GATase PFAM Desc: Glutamine amidotransferase class
MSLQYHPEASPGPHDSDYIFREFIELMKQGKNRTKGRLHQLSTAHALDA

SEQ ID NO: 4141 - DNA, 585 bp, Glycine max
  misc_feature: Ceres CLONE ID no. 858600
  misc_feature: Ceres CDNA ID no. 25891761
  CDS (78)..(491): REFERENCED BY SEQ ID NO: 4142
atcgctcatctccgttactcagcatcacctccttttacactctcgaattcgcattctcttcactcattttccaatccatggccaagggagagaaaaaacctgcagagaagaagcccgcggcggagaaggctccggcggagaaaacaaaagccgagaagaagatcccgaaggacgcagcctccggcgagaagaagaagaagaggacgaagaagagcgtggagacgtacaagatctacatcttcaaggtgctgaagcaggttcaccctgacatcgggatctccagcaaggccatggggatcatgaacagcttcatcaacgacatcttcgagaagctcgctcaagaatcttccagactcgcgcgctacaacaagaagcctaccatcacctctcgcgaaatccagactgcggttcgtcttgtgctccctggtgagctcgccaagcacgctgtctccgaaggcaccaaggctgtaaccaagttcactagctcttgaacgcgtttctgagaattttagggtttacgagatgtatattttgggagaattttaattttatatttatcctcttttattaaaaaaaaaaaaaaaa

SEQ ID NO: 4142 - protein, 137 aa, Glycine max
  misc_feature: Ceres CLONE ID no. 858600
  misc_feature: Ceres CDNA ID no. 25891761
  misc_feature: No seed is being produced by the plant
  misc_feature: The plant flowers significantly late compared to wild-type.
  misc_feature: Useful for biocontainment applications
  misc_feature: Useful for making plants with modulated flowering time
  misc_feature (44)..(116): Pfam Name: Histone PFAM Desc: Core histone H2A/H2B/H3/H4
  misc_feature: Homolog of GI Number: 82400146 NR Desc: histone H2B
  misc_feature: Homolog of GI Number: 3021485 NR Desc: histone H2B
  misc_feature: Homolog of GI Number: 7635498 NR Desc: histone H2B
  misc_feature: Homolog of GI Number: 2558962 NR Desc: histone H2B1
  misc_feature: Homolog of GI Number: 21592734 NR Desc: putative histone H2B
  misc_feature: Homolog of GI Number: 21536602 NR Desc: histone H2B
  misc_feature: Homolog of GI Number: 2746719 NR Desc: histone H2B
  misc_feature: Homolog of GI Number: 21553526 NR Desc: putative histone H2B
  misc_feature: Homolog of GI Number: 10177235 NR Desc: histone H2B like protein
  misc_feature: Homolog of GI Number: 6729516 NR Desc: histone H2B
  misc_feature: Useful for delaying flowering time
  misc_feature: Useful for increasing chlorophyll and photosynthetic capacity
  misc_feature: Useful for making plants with altered leaf shape eg curled leaves
  misc_feature: Useful for making plants with altered leaf shape eg curled leaves
  misc_feature: Useful for making plants with increased biomass and foliage
  misc_feature: Useful for making plants with increased biomass and foliage
  misc_feature: Useful for sterility
  misc_feature: Useful for sterility
MAKGEKKPAEKKPAAEKAPAEKTKAEKKIPKDAASGEKKKKRTKKSVETYKIYIFKVLKQVHPDIGISSKAMGIMNSFINDIFEKLAQESSRLARYNKKPTITSREIQTAVRLVLPGELAKHAVSEGTKAVTKFTSS

SEQ ID NO: 4143 - DNA, 1709 bp, Triticum aestivum
  misc_feature: Ceres CLONE ID no. 859397
  misc_feature: Ceres CDNA ID no. 35383305
  CDS (79)..(1551): REFERENCED BY SEQ ID NO: 4144
agatctacatcctccctccaccccgtctcgccggccgcccggccgccccccaatcgtgcgtcggacgaggccacggcgatggatctcctctcggacgcccagccccagtggctcctcgccggcgccgcgctgctgctcgccaccgtcgccttcctcagggtcctcctcggctccggcggccgcggcaagcgggcgccgccgacgatcccgggggcgcccgtcgtgggcgggctcctgcgcttcctgcggggccccatcccgctcatccgggccgagtacgcccgcctcggccccgtcttcaccgtccccatcctcacccgccggatcaccttcctcatcggccccgacgtctcggcgcacttcttcaagagcaacgagtccgacatgagccagcaggaggtctaccgcttcaacgtccccaccttcggccccggggtcgtcttcgacgtcgactaccaggtcaggcaggagcagttcaggttcttcaccgaggcgctcagggccaacaagctccgcagctacgtcgaccagatggttgccgaggccgaggagtacttctcaaagtggggagaaagcggcactgtggatctgaagtatgaactggagcacctcatcatactgactgctagccgatgcttgttgggaagggaagtgcgagaaaaattgtttgatgatgtttctgctctcttccatgatcttgacaatgggatgcagccaatcagtgtcatctttccctacctcccaatccctgcacaccgtcgccgtgaccaggcacggacacgtttggcggagatctttgccacgatcatcaagtcccgcaaggcctctggacagtccgaggaagacatgctgcagtgcttcattgattccaagtacaagaatggccgccagaccacagaaagtgaggtgactgggctacttattgcagccctgtttgctggacagcacactagctcgatcacctcaacctggactggggcctacctgcttaagttccagcagtactttgcagaggctgttgaggagcagaaggaggtcatgaagaggcatggtgacaagatcgatcacgacatattggcagagatggatgtcctctaccggtgcatcaaggaggcgctccggctccacccgccgctgatcatgctgcttcgccaatcacactctgacttcagcgtgaccacgagggaaggcaaagagtttgatatccccaagggccacatcgtcgcaacatctcctgctttcgctaacaggctcccccatatcttcaagaacccggactcgtatgaccctgaccggtttgcagctgggagggaggaggacaaggttgcgggtgccttctcgtacatctcctttgggggtggcaggcacgggtgcctgggtgagcccttcgcgtacctgcagatcaaggcgatatggacacacctcctgaggaactttgagtttgagctggtctcaccgttcccagagaacgactggaatgcgatggtcgtcggcatcaagggcgaggtgatggtcagctacaagcggcggaagcttgtcgtcgacaactagagagcgggtggtcccatagggggtgtttgcttctgtatttgttccatttaagttttttctattcgcacgccaacctgtagggtatctatcttgccattgttttagggtactttgatttgcttccagtgattatttagacgtgaaaaaaaaaaaaaaaa

SEQ ID NO: 4144 - protein, 490 aa, Triticum aestivum
  misc_feature: Ceres CLONE ID no. 859397
  misc_feature: Ceres CDNA ID no. 35383305
  misc_feature (40)..(158): Pfam Name: p450 PFAM Desc: Cytochrome P450
  misc_feature: Homolog of GI Number: 5921924 NR Desc: Cytochrome P450 51
  misc_feature: Homolog of GI Number: 27542762 NR Desc: cytochrome P450
  misc_feature: Homolog of GI Number: 1707857 NR Desc: obtusifoliol 14
  misc_feature: Homolog of GI Number: 1707855 NR Desc: obtusifoliol 14
  misc_feature: Homolog of GI Number: 47156870 NR Desc: obtusifoliol 14alpha
  misc_feature: Homolog of GI Number: 18000074 NR Desc: obtusifoliol
  misc_feature: Homolog of GI Number: 27461067 NR Desc: obtusifoliol
  misc_feature: Homolog of GI Number: 20258897 NR Desc: putative obtusifoliol 14
  misc_feature: Homolog of GI Number: 2262164 NR Desc: putative obtusifoliol 14
  misc_feature: Homolog of GI Number: 4586676 NR Desc: sterol 14
MDLLSDAQPQWLLAGAALLLATVAFLRVLLGSGGRGKRAPPTIPGAPVVGGLLRFLRGPIPLIRAEYARLGPVFTVPILTRRITFLIGPDVSAHFFKSNESDMSQQEVYRFNVPTFGPGVVFDVDYQVRQEQFRFFTEALRANKLRSYVDQMVAEAEEYFSKWGESGTVDLKYELEHLIILTASRCLLGREVREKLFDDVSALFHDLDNGMQPISVIFPYLPIPAHRRRDQARTRLAEIFATIIKSRKASGQSEEDMLQCFIDSKYKNGRQTTESEVTGLLIAALFAGQHTSSITSTWTGAYLLKFQQYFAEAVEEQKEVMKRHGDKIDHDILAEMDVLYRCIKEALRLHPPLIMLLRQSHSDFSVTTREGKEFDIPKGHIVATSPAFANRLPHIFKNPDSYDPDRFAAGREEDKVAGAFSYISFGGGRHGCLGEPFAYLQIKAIWTHLLRNFEFELVSPFPENDWNAMVVGIKGEVMVSYKRRKLVVDN

SEQ ID NO: 4145 - DNA, 1056 bp, Triticum aestivum
  misc_feature: Ceres CLONE ID no. 859827
  misc_feature: Ceres CDNA ID no. 25446585
  CDS (350)..(874): REFERENCED BY SEQ ID NO: 4146
aaaagaaaacgcctgcgtctccatccacggatccccctcccacccccacccccgcgcgccgccgctcgccggagcccgcctcgcccccctgtcaagcccgcccccaatcgtcaactgcgagcctgaattgctgccggccgacagggggcattagccagcttctgaggaactattcagagccagtcagtcttcttttgttccattgctgtactagggcgaacttccttcctcggcaaccggcctcaatcccatccttcctcgtttccagatagacgtcactcaggagatctacgcaggcggtgatccttgtttgtcagcggtgcaccgtacctggcgctcgttcatagacatggtttatcactctagtttcattgacgatgatgagatcacaaaagcctgtgggtgtcctttgcttccactaaaaactcatataaagggcccagccccagccgcggattcagataaggcggatatagttgatgaagcgataactttcttccgagcaaatgttttcttcaaaaacttccatgtcaaaagcccagcagacaaattgctcatctatctgacatcttacatcaatattgccttgaaaagactagaaacctgccggacgctggctgtcggaactaaggcaatcattaacctggggttggaaaaagttcctgtgcctggggaaccagggtttccttttcctggacttttcactctcccccaatctggggaggaagcagaactgctgaggaactatctgaagcagataagggaggaaacgagcgggaggctgctcaactgcgcatacagagctaatggcactccaaacaaatggtggctggcttttgcaaagaggaagttcatgaacgttgtcatcctttagagcgtaagcatatcatcagtgacagcttaagaggcgtttgtgtaaatcctgattgcgcttgcacatttattcctacgatgatgtaaagcacagtttcttgcaatgcacctgctgaacacagtttcttgcaatgcaccttcactgaatgaaactctcattgatatttaaaaaaaaaaaaaaaa

SEQ ID NO: 4146 - protein, 174 aa, Triticum aestivum
  misc_feature: Ceres CLONE ID no. 859827
  misc_feature: Ceres CDNA ID no. 25446585
  misc_feature (1)..(173): Pfam Name: P21 PFAM Desc: P21
  misc_feature: Homolog of GI Number: 50251225 NR Desc: putative actin related protein 2/3 complex
  misc_feature: Homolog of GI Number: 18406746 NR Desc: ARP2/3 complex 21 kDa subunit family
  misc_feature: Homolog of GI Number: 21536845 NR Desc: Contains similarity to 21 KD subunit of the Arp2/3 protein complex
  misc_feature: Homolog of GI Number: 48126067 NR Desc: similar to ENSANGP00000008511
  misc_feature: Homolog of GI Number: 40642998 NR Desc: actin related protein 2/3 complex
  misc_feature: Homolog of GI Number: 9790141 NR Desc: actin related protein 2/3 complex
  misc_feature: Homolog of GI Number: 57105594 NR Desc:  similar to ARP2/3 complex 21 kDa subunit
  misc_feature: Homolog of GI Number: 5031597 NR Desc: actin related protein 2/3 complex subunit 3
  misc_feature: Homolog of GI Number: 62901838 NR Desc: p21
  misc_feature: Homolog of GI Number: 2209347 NR Desc: p21
MVYHSSFIDDDEITKACGCPLLPLKTHIKGPAPAADSDKADIVDEAITFFRANVFFKNFHVKSPADKLLIYLTSYINIALKRLETCRTLAVGTKAIINLGLEKVPVPGEPGFPFPGLFTLPQSGEEAELLRNYLKQIREETSGRLLNCAYRANGTPNKWWLAFAKRKFMNVVIL

SEQ ID NO: 4147 - DNA, 1778 bp, Triticum aestivum
  misc_feature: Ceres CLONE ID no. 860254
  misc_feature: Ceres CDNA ID no. 25446860
  CDS (130)..(1638): REFERENCED BY SEQ ID NO: 4148
gcccaggatcacgtcacgtgcagtctttgctggttaggttgtctcgcgttgagggctttggcgagccgcgccgacgccgccgccgcaacacgcacccaaaaatcctaatcctcctcgccgccggcgaccatggtgtcgcagcacggcatcctcctcgccgcgggcctcatatccgaccacttcggccccctcgtagcgaaggtgtgcgactgcctcctccgccacggggcgctgcagctgacggagattgtgcgccgtctcaagctcccgcaggggcaagtgaagaactctctcctcgtcctcatccagcacaactgcgttcaggccttctcatcgcccagaggcgacaggaccatcacgctctacttggccatcttcgacaatgtcctgcatcggctgcgcttctcaaagttcatctctgttatccgcgcggacattccagagtcagaaactcttattgagggattgcttcagaatggtaggctaacatttgaccaacttgtgggacgcacaatctctaaagtgccagaaggcaccatccgaccagcaagggaagaaatacgaatgaacttcaacaaacttgtgtatgcacgttatgtggaacgttgcccaaaagctgaaccctatttcaatccacaggaagatgaacaatctacagctgcaaggagaagagttccaaaaactgccgaggaggttctttcacttgagcagaaagttgtcaatactgcaaccctttctgacccggaaaggttttctgagatcccatacggcatggaggatgcatcaaagacaaatgattgtcctcataacgctgttgcaggtgctaagcggaaacacggagcctttgagatagatgaagagctcaactcaacaattgcagagaatgaagtactttggcgggtaaattttgagaaatttatattctgtctaaagaagaagttttgtgcagaccgaaagaagccaaagctgaaggttggcacacatcctatctgggagtcatttttcgaagctaacttaactgacaaagatacaaactctgtgacatcatcaacaaatggtattttggagaaactaggacaaaaggaaggaactgcagcaatgacaattggtgacataaaaccagtcctgctggatttacagtgtactacttccgatggggaagaatttacttttgatttacgcaaaatggttgaagcatgtagaaatgaggagatagagtcgcttgtgaaaaagaaatacgggcaagaagcttttacaatctttaggctattggtcacacaaggttgtgcagttgagacagatcaaattattgacacaacaattcttgacaagcagattgttcattcaactttgtacaaactatggaacgatggctacatagatacagagaaaatcgcttccgcagcaggaacaggatacgcacagttttttgtatggagagccaaaaatacatttcgtgagcagttcatcgataatctctaccatgctgctttgaacttgcgccagatggtgaattacattgctgaacttctgctcgagggttcgaaggacgaaacaaagctgcggaacagaaagaacattttgatcctggccctcactagacatgatgactctctcatgctgttccatgatttttgaaaacaccggagccggtcttagtctaccataaatgtagaatgtaaaccagactgaagttggacaaccgaattaatttatctttggctcttagctgatttcacctatgggaaattcatttacgctgaaaaaaaaaaaaaaaa

SEQ ID NO: 4148 - protein, 502 aa, Triticum aestivum
  misc_feature: Ceres CLONE ID no. 860254
  misc_feature: Ceres CDNA ID no. 25446860
  misc_feature (477)..(502): Pfam Name: RNA_pol_Rpc82 PFAM Desc: RNA polymerase III subunit RPC82
  misc_feature: Homolog of GI Number: 56202140 NR Desc: RNA polymerase III subunit
  misc_feature: Homolog of GI Number: 56202141 NR Desc: RNA polymerase III subunit
  misc_feature: Homolog of GI Number: 34911154 NR Desc: putative RNA polymerase III subunit
  misc_feature: Homolog of GI Number: 34098883 NR Desc: At3g49000
  misc_feature: Homolog of GI Number: 21553700 NR Desc: RNA polymerase III subunit
  misc_feature: Homolog of GI Number: 6522566 NR Desc: RNA polymerase III subunit
  misc_feature: Homolog of GI Number: 49670421 NR Desc: Polr3c
  misc_feature: Homolog of GI Number: 20070909 NR Desc: Polr3c protein
  misc_feature: Homolog of GI Number: 55588026 NR Desc:  similar to polymerase
  misc_feature: Homolog of GI Number: 13325210 NR Desc: POLR3C protein
MVSQHGILLAAGLISDHFGPLVAKVCDCLLRHGALQLTEIVRRLKLPQGQVKNSLLVLIQHNCVQAFSSPRGDRTITLYLAIFDNVLHRLRFSKFISVIRADIPESETLIEGLLQNGRLTFDQLVGRTISKVPEGTIRPAREEIRMNFNKLVYARYVERCPKAEPYFNPQEDEQSTAARRRVPKTAEEVLSLEQKVVNTATLSDPERFSEIPYGMEDASKTNDCPHNAVAGAKRKHGAFEIDEELNSTIAENEVLWRVNFEKFIFCLKKKFCADRKKPKLKVGTHPIWESFFEANLTDKDTNSVTSSTNGILEKLGQKEGTAAMTIGDIKPVLLDLQCTTSDGEEFTFDLRKMVEACRNEEIESLVKKKYGQEAFTIFRLLVTQGCAVETDQIIDTTILDKQIVHSTLYKLWNDGYIDTEKIASAAGTGYAQFFVWRAKNTFREQFIDNLYHAALNLRQMVNYIAELLLEGSKDETKLRNRKNILILALTRHDDSLMLFHDF

SEQ ID NO: 4149 - DNA, 2256 bp, Triticum aestivum
  misc_feature: Ceres CLONE ID no. 860308
  misc_feature: Ceres CDNA ID no. 40041350
  CDS (261)..(2111): REFERENCED BY SEQ ID NO: 4150
accacccgacgaccggggcggccgcctctgaccagactctgatgtcgccacccccaacccccggtgtgaatcctcctctagcattggacttaccttccctccctcaaaccttcctaccagttcttcttcttcttcttcgccttcttcagtagaatcatcatcaccacaagggtaggaggctccgtcgcggccggggtctgctgctgcggcgagggaccatcgtgcacgtgcgtcggagtggaaggaaaggggaggagaggatggaattgggggaggaggtggcgcgcgcactgggcgcgggcttcgacctcacgtccgacttccgcctgcgcttcgcgaagctccggcggcggctcgtggacctcaacgaggccggggcgagggacgtccccgtcccgggcgggggcggcgcggtgctgcgcgggataccgcgcgacgtcggcatcgacaagggcgaccgcatccgcttccgttccgacgttctcgagttcaaccagatgtcggaattacttaatcagaaatcctcagtccaagggaaagttccttcaggctatttcaatgcactttttgatttaatgggagcttggttgacagatgccaaagagattaagtatcttgcttttgacggctatttcatttcgttgttcaacttgaacctaaaagcttctccgttggttctttgcgatgaggtcaaaaaggctgttccatccaagtgggatcctgtagcattatcttggtttatcagaacttatgggacacacataattgttgaaatggcagttggaggtcaggatgtcatatgtgttaaacaaagtcattcttcaactatttcatctgctgaactaaagttacatctggaagatcttggcgattttctattctccgatgggaaaaatctctcccccatacatcgtaagaccaaggatggcaagagcaaggtgcctgatgtttttgtcaggatagtgcagcagcctaataacctacatctttccagttactcagaatcatcaaccaaagatggcctgacaattacatgttcgaaaaggggtggagatgtacgtatacccagtcactccaagtggttaccaacagttccgaagaatcctgacgctataatgttcaaatttgttcccattacctctcttcttactggcattcctggtagtggttacctcagccatgccatcaatttatatcttcgctataaacccgatcttgacgacttacaacatttcttggagtttcaagtgcctctgcaatgggcacctgtgttcaatgtgcttgtccttgggccccagaagagaaaaggctcttacccttccttgcagttcagattccttggccccaaacttcgagttaacacttctcaggtatctagcgcccagaaacctgtagtcggtcttcggttatatcttgagggtaggaagtgcaatcagttggccatccatgtccagcacctctctagtgtcccaagcatgcttggagactcgatggcatcttcgatgtctgagtggcgtgagtcggaagatacagacccagggtacattgaggctatccaatggaatagttactcatgcatttctacatctgttgtgaagtacaaccccgagtggagtaagagagtttctggtggagttttcatcgtcactggtgcccagctcttcacaaagggaacctgggcaaggaaggtgctccatctgaggctcctctacacacatatcccaaagtgcaccatacataaatctgagtggacccgagcaccagcagcatctcaaaagggaagcttttttacaacaataagcacaactctaagctctcctttcatgcatcgcaacgcacagcctgcccagaagcatgagccggcgcagctgaactcaggtgtttaccctgatggtccacctgttccgcttcagtcgaggaagctcctgaagtttgttgacatgtcggaggtggtgaagggggcgcatgatgtacctgggcattggctggtgacagctgcgaagcttgtgaaggaagctggcaaaattggattgcatgtgaagtttgccctgctcaactatgatgatacagaacaaccgcatggaagtatcatgagctaccactgtaaataggacaggtgattgttgatctttgtactccatgcagtatcatgagcctatcatggaatcgatggcaggattttggagcaaaaaaaaaaaaaaaaaaaaaaaaaaaaaaaaaaaaaaaaaaaaaaaaaaaagaaaacaaaaaaaaaaa

SEQ ID NO: 4150 - protein, 616 aa, Triticum aestivum
  misc_feature: Ceres CLONE ID no. 860308
  misc_feature: Ceres CDNA ID no. 40041350
  misc_feature (116)..(188): Pfam Name: MACPF PFAM Desc: MAC/Perforin domain
  misc_feature: Homolog of GI Number: 8778214 NR Desc: F10B6.18
  misc_feature: Homolog of GI Number: 15809820 NR Desc: At1g29690/F15D2_24
MELGEEVARALGAGFDLTSDFRLRFAKLRRRLVDLNEAGARDVPVPGGGGAVLRGIPRDVGIDKGDRIRFRSDVLEFNQMSELLNQKSSVQGKVPSGYFNALFDLMGAWLTDAKEIKYLAFDGYFISLFNLNLKASPLVLCDEVKKAVPSKWDPVALSWFIRTYGTHIIVEMAVGGQDVICVKQSHSSTISSAELKLHLEDLGDFLFSDGKNLSPIHRKTKDGKSKVPDVFVRIVQQPNNLHLSSYSESSTKDGLTITCSKRGGDVRIPSHSKWLPTVPKNPDAIMFKFVPITSLLTGIPGSGYLSHAINLYLRYKPDLDDLQHFLEFQVPLQWAPVFNVLVLGPQKRKGSYPSLQFRFLGPKLRVNTSQVSSAQKPVVGLRLYLEGRKCNQLAIHVQHLSSVPSMLGDSMASSMSEWRESEDTDPGYIEAIQWNSYSCISTSVVKYNPEWSKRVSGGVFIVTGAQLFTKGTWARKVLHLRLLYTHIPKCTIHKSEWTRAPAASQKGSFFTTISTTLSSPFMHRNAQPAQKHEPAQLNSGVYPDGPPVPLQSRKLLKFVDMSEVVKGAHDVPGHWLVTAAKLVKEAGKIGLHVKFALLNYDDTEQPHGSIMSYHCK

SEQ ID NO: 4151 - DNA, 1334 bp, Triticum aestivum
  misc_feature: Ceres CLONE ID no. 860447
  misc_feature: Ceres CDNA ID no. 25446716
  CDS (235)..(1044): REFERENCED BY SEQ ID NO: 4152
gcacatcccgtggaggactacaggagcgagacggcccgccgccggtggaatcgaacgcggcggcgcccacccccaaccccccgagccagccggcgcgtgctcctccgagctccgccactccgcaccgcgaggccgacctgaatcactgatgacctgatcagagcagatcaggggggaaagataaagttttaggggccctagatactcctgactgcaaataggtgcctagcctcgatggcgatgcctggatcctgcccctcgacggtggccccgtcagccggccatcctcccatcgccgatgcttcagggcgagcgggatcccaagacatgctgcggccgcgtctggtgctcttcggcgactccatcaccgagcagtccttccgccctggcggttggggagcggcccttgccgatacctactcccgcaaggccgatattgttgtcagaggctatggtgggtacaactcaagatgggctctgttcctgatccagcgcatctttcccctggttggcttgccacccgttgcgacgactatattctttggcgctaatgatgcagcgcttctaggacgaacaagccagcggcaacatgttccggttcaggagtataaacagaatctcaaaacaattgttaatcacctgaaggattgttccaagtccatggtaattttgcttatcactccacctcctatcgatgaagatggaagagaaagatatgcacgatcacagtatggagaagatgcgaggaggctccctgaaagaacaaatgaaatggctggcgtctatgcaggtcaatgcatagaacttgccaaagaaatggatgtacagtgtgttgatctttggtcaaagatgcaagccactgaaggttggcagaaactttacttaagtgatggactgcatctgacgccggaaggaaacgctctggtccacaaggaggtcgtccagaccttgagaggcgctggtctgaaagctgaagatatgccacatgacttcccccatcattccaaaatcgatggggtttacccggaaagggccttccagtgaagtggtttcaggcagtgtgatgttcaagttctgaaccgcttgcttcctcgttctttgtcttttccttgtgttttaatttttttttcttttggtgtgaaacttctgaactgtgaaatttcacgtccatttttcagcccattgaaatagttgggtgtgccatagaaaaattacaagtagatgacatgatttttcggtggattgctgctcagattgtctctactacaatttacaatacaaggaacacagtggctaatgttttgatagtgccgcgacgaaaaaaaaaaaaaaaa

SEQ ID NO: 4152 - protein, 238 aa, Triticum aestivum
  misc_feature: Ceres CLONE ID no. 860447
  misc_feature: Ceres CDNA ID no. 25446716
  misc_feature (6)..(204): Pfam Name: Lipase_GDSL PFAM Desc: GDSL
  misc_feature: Homolog of GI Number: 78708813 NR Desc: esterase
  misc_feature: Homolog of GI Number: 31432667 NR Desc: putative esterase
  misc_feature: Homolog of GI Number: 38454102 NR Desc: At5g45920
  misc_feature: Homolog of GI Number: 55297455 NR Desc: putative CPRD49
  misc_feature: Homolog of GI Number: 42568344 NR Desc: GDSL
  misc_feature: Homolog of GI Number: 13161403 NR Desc: CPRD49
  misc_feature: Homolog of GI Number: 16974631 NR Desc: At2g38180/F16M14.11
  misc_feature: Homolog of GI Number: 66852864 NR Desc: GDSL Lipase/Acylhydrolase family protein
  misc_feature: Homolog of GI Number: 55594601 NR Desc:  cleavage and polyadenylation specific factor 3
  misc_feature: Homolog of GI Number: 46441242 NR Desc: potential Lipase/Acylhydrolase
MLRPRLVLFGDSITEQSFRPGGWGAALADTYSRKADIVVRGYGGYNSRWALFLIQRIFPLVGLPPVATTIFFGANDAALLGRTSQRQHVPVQEYKQNLKTIVNHLKDCSKSMVILLITPPPIDEDGRERYARSQYGEDARRLPERTNEMAGVYAGQCIELAKEMDVQCVDLWSKMQATEGWQKLYLSDGLHLTPEGNALVHKEVVQTLRGAGLKAEDMPHDFPHHSKIDGVYPERAFQ

SEQ ID NO: 4153 - DNA, 2176 bp, Triticum aestivum
  misc_feature: Ceres CLONE ID no. 860492
  misc_feature: Ceres CDNA ID no. 25447382
  CDS (374)..(1933): REFERENCED BY SEQ ID NO: 4154
aattccccccatcctccacacaccacccgtctcgtcctagctccctactcctcccgctcgccactcctccgccccagctctgctcgccctcgaccgcggctcgccaggaaggtgaagtccaagaaggttagctcttgcggaaacactggtcatagccgctgcggcgaagttcataaacccgtcctgccgtgtcgcatgcgggatcgctgcttaaatagaaataatcccttctcacttcaggtctggtttgcatttcctttcaagtataaaagcaactatattcagcatggcatttgagtaagcatcagaacctcaaaagccaagtttgtcagcaatattatacctttattggtgcaacacttccgtagagaagatggtggatgacctgttttatgagggcaacactgatcacagcatcagctctgaggacgaagacacacttgtcaggagttgtagtaatctcagcgtaagctttggatatcattgcaattcttatcagagtttccctcttgaaaatgatgagcatgacacctctccccagatgaggtttgaaactaatgccatgacgaagtcacgaaatggctcatttacttgtttatctggtgccgcaattagtgcaaatttcacattggccaatacaaatatatgcaagggtcttattggggaagagattttgccagaactagattctccaaattctttcagaaaaatcgtctcttctccatctatgtcaaggttagacttgctatccacctcacaaggcagccctgcatcaactgagagctccatatttgaaatcagtaaaaatctttggaggtccagcgctccaacaactgtatcatccaattttctgactggtaccgaggtaaagatggctggtggagctgctggagaggatagagtccaagctgtgtgctctgagaaaaatggatggttgatttgtggaatttatgatggatttaatggacgagatgcagctgattttctggcagtaactctatatgataacatagtatattacctatacttgttagagtgccgtatcaagcaacaagatggcctatgtagctcatcaggggactcccctaatggtgttaaaagtgagttaacattagccatggaaattgcagagaatgaagatgtaaaactttctgaaagttttcgagctggtgtgctgaattgcctcacttctgctgttgagcaagctgagaatgatttcttatgcatggttgaacaggatatggatgatagaccagatttagtttcagttggatcttgtgtcctggttgtgcttcttcagggaacagatttgtgcattctaaatcttggggatagtagagctgtgcttgcttccatgccatattcagaaatggatacagtgaaagctactcaattgacagagatccactcacttgaaaatccattggaataccaaaaactattagctgaccatcctaatgactctaaagttgtgatgggtaacaaagtaaaagggaagctgaaggttactcgtgcttttggagttggctaccttaaacagaaaaagttcaatgatgcactcatgggaattctccgagttcgtaatttgtgcagcccgccttacgtatatacaaatccacacacactgagtcacaaggttatggaagacgatctgtttgttgtgcttggcagtgatggcttatttgatttcttcagtaacgatgaagttgttcagttggtttatcaatttatgcatgataatccaactggcgatcctgcaaaatatctcatcgagcaagttgtacataaagctgccaaagaagcagctttaacagctgaacagcttatgaggatacctgttgggagcaggagaaagtaccatgacgacgtgactgtcattgttatcatccttgggaacgcacgaaggacggtgagcgcatcaacttcgatatgaaagactgccgatctcaagaagaggctgtgagccgcataaaattttgtgggtgttaggacatgaatctttttcagggttctggtgtgatagtcaataataagcataataatgtgtgtatatcctttggaaattttgggtgcgaacagatatcttttgttaaatcaaaaggtgcaccgagacttgctccgcttaattctgcacgcggtaacgaaaattttcaccgctctaaaaaaaaaaaaaaaa

SEQ ID NO: 4154 - protein, 519 aa, Triticum aestivum
  misc_feature: Ceres CLONE ID no. 860492
  misc_feature: Ceres CDNA ID no. 25447382
  misc_feature (257)..(478): Pfam Name: PP2C PFAM Desc: Protein phosphatase 2C
  misc_feature: Homolog of GI Number: 50924039 NR Desc: OSJNBb0118P14.8
  misc_feature: Homolog of GI Number: 30690552 NR Desc: protein phosphatase 2C family protein / PP2C family protein
  misc_feature: Homolog of GI Number: 42569633 NR Desc: protein phosphatase 2C family protein / PP2C family protein
  misc_feature: Homolog of GI Number: 28466963 NR Desc: At3g12620
  misc_feature: Homolog of GI Number: 12321955 NR Desc: protein phosphatase 2C
  misc_feature: Homolog of GI Number: 15020818 NR Desc: Ser/Thr protein phosphatase 2C
  misc_feature: Homolog of GI Number: 7329635 NR Desc: protein phosphatase 2C
  misc_feature: Homolog of GI Number: 6572058 NR Desc: protein phosphatase 2C
MVDDLFYEGNTDHSISSEDEDTLVRSCSNLSVSFGYHCNSYQSFPLENDEHDTSPQMRFETNAMTKSRNGSFTCLSGAAISANFTLANTNICKGLIGEEILPELDSPNSFRKIVSSPSMSRLDLLSTSQGSPASTESSIFEISKNLWRSSAPTTVSSNFLTGTEVKMAGGAAGEDRVQAVCSEKNGWLICGIYDGFNGRDAADFLAVTLYDNIVYYLYLLECRIKQQDGLCSSSGDSPNGVKSELTLAMEIAENEDVKLSESFRAGVLNCLTSAVEQAENDFLCMVEQDMDDRPDLVSVGSCVLVVLLQGTDLCILNLGDSRAVLASMPYSEMDTVKATQLTEIHSLENPLEYQKLLADHPNDSKVVMGNKVKGKLKVTRAFGVGYLKQKKFNDALMGILRVRNLCSPPYVYTNPHTLSHKVMEDDLFVVLGSDGLFDFFSNDEVVQLVYQFMHDNPTGDPAKYLIEQVVHKAAKEAALTAEQLMRIPVGSRRKYHDDVTVIVIILGNARRTVSASTSI

SEQ ID NO: 4155 - DNA, 1106 bp, Triticum aestivum
  misc_feature: Ceres CLONE ID no. 860880
  misc_feature: Ceres CDNA ID no. 24766512
  CDS (213)..(950): REFERENCED BY SEQ ID NO: 4156
gtgctgccggacctccactctcccgtccggcgcccgcggatcgtcctccgccttcccccctgcacgtcctccaccgcgcgatcccgacccgccttctccgcgccgcaccgccgtccgctccacccaagctctcccctgtctgcgaaggcgacaaccagcagccgcggcccgaatcctgggtgggaaggagatctgccgcgctactctgctcgatggagactggagcggaggcgggcggcggtaggccggagtacagcatcatcgttcccacctacaacgagcgcctgaacgtcgccctcatcgtctacctcatcttcaagcacctgcctgattccaagttcgaaatcattattgtggatgatggaagccctgatggcactcaagacgttgtaaagcagttgcagcaattatatggcgaagatcgtgttctactgcgagctagaccaaggaagctaggacttggtactgcatatatgcatggattaaagcatgcctcaggggagttcgttgttataatggatgcagatctatctcatcatccaaaatatttgccaagcttcatcaggaagcaaaaggaaaccggtgctgacattgtaaccggcacccgttatgttagcaacggtggtgtccatggttggaatcttatgcgtaagttgactagcaggggagcgaatgttctagcacagacgttgctacagcccggagcttctgatctgactggatcgtttaggctatataagcgaagtgctttggaggatgtcatctcctgctgcgtcagcaagggctatgtattccaaatggagatgattgtcagggctactaggaaaggttatcacatcgaagaggtcccaataactttcgtcgacagggtcttcggaatctcaaagctcggtggatctgaaattgttggatatttgaaaggccttgtgtatctgttgctcacaacataggggagacgcacggtagatgcttgttagtgtgtgtgtttttccttatgttaccacagcttgagttacatgaatttactaacattctcagacttagttgaattatatgcacaagtttttgtctatgagtatccttatgaagcaaaaaaaaaaaaaaaa

SEQ ID NO: 4156 - protein, 245 aa, Triticum aestivum
  misc_feature: Ceres CLONE ID no. 860880
  misc_feature: Ceres CDNA ID no. 24766512
  misc_feature (15)..(184): Pfam Name: Glycos_transf_2 PFAM Desc: Glycosyl transferase
  misc_feature: Homolog of GI Number: 8778597 NR Desc: F5M15.10
  misc_feature: Homolog of GI Number: 50759086 NR Desc:  similar to Dolichol
  misc_feature: Homolog of GI Number: 14250108 NR Desc: Dolichyl
  misc_feature: Homolog of GI Number: 4503363 NR Desc: dolichyl
  misc_feature: Homolog of GI Number: 50418523 NR Desc: Zgc:101018 protein
  misc_feature: Homolog of GI Number: 72076181 NR Desc:  similar to dolichyl
  misc_feature: Homolog of GI Number: 4838365 NR Desc: dolichol
  misc_feature: Homolog of GI Number: 57104284 NR Desc:  similar to Dolichol
  misc_feature: Homolog of GI Number: 34860748 NR Desc: similar to dolichol
METGAEAGGGRPEYSIIVPTYNERLNVALIVYLIFKHLPDSKFEIIIVDDGSPDGTQDVVKQLQQLYGEDRVLLRARPRKLGLGTAYMHGLKHASGEFVVIMDADLSHHPKYLPSFIRKQKETGADIVTGTRYVSNGGVHGWNLMRKLTSRGANVLAQTLLQPGASDLTGSFRLYKRSALEDVISCCVSKGYVFQMEMIVRATRKGYHIEEVPITFVDRVFGISKLGGSEIVGYLKGLVYLLLTT

SEQ ID NO: 4157 - DNA, 733 bp, Triticum aestivum
  misc_feature: Ceres CLONE ID no. 861070
  misc_feature: Ceres CDNA ID no. 24766527
  CDS (139)..(486): REFERENCED BY SEQ ID NO: 4158
aaacgagtggtcagggttttgtccttcctcgccaaggtcgagtgaggtctccaactctccattacatacttccccacccatccaccaaaggcgcagagaggggagaagaagaagaagaagaagcggagggggaggaagatgccttgcctgaacgtgtcgacgaacgtgaacctggagggggtggacacctccgccgtcctcgccgacgcctccagcaccgtcgcaaccatcatcggcaagccggaggcctatgtgatggttgttctcaagggttcagtgcccatggcatttggaggtacccaggagcctgcagcctacggcgagctggtttccatcggagggctgaacgctgatgtgaacaagaagctgagcgccggcattgcttccatcctggagtcaaagctgtccatccccaagtcccgcttctacctcaagttccacgattcaaagcgctcagactttggatggaatggatccaccttttagacgcatcatatggcatggagccttgcatgaactccagagttcctaatattctgtccattgcctatttaaggagaaactgctgcagtaagacatcgtgtcagtttaatggccagtgtttatgagtgccggagtacttgtgtgatctagttggtttggtttcggacttgccatggcaagggaatgttgcaactgcttggttcgattcgtaatcatgaaccctttgtggtgtagaaaaaaaaaaaaaaaa

SEQ ID NO: 4158 - protein, 115 aa, Triticum aestivum
  misc_feature: Ceres CLONE ID no. 861070
  misc_feature: Ceres CDNA ID no. 24766527
  misc_feature (2)..(115): Pfam Name: MIF PFAM Desc: Macrophage migration inhibitory factor
  misc_feature: Homolog of GI Number: 77548302 NR Desc: MATE efflux family protein
  misc_feature: Homolog of GI Number: 77552836 NR Desc: light
  misc_feature: Homolog of GI Number: 5869758 NR Desc: AT
  misc_feature: Homolog of GI Number: 53791876 NR Desc: putative light
  misc_feature: Homolog of GI Number: 6580148 NR Desc: LS1
  misc_feature: Homolog of GI Number: 33864912 NR Desc: possible ATLS1
  misc_feature: Homolog of GI Number: 5327286 NR Desc: macrophage migration inhibitory factor
  misc_feature: Homolog of GI Number: 16118445 NR Desc: macrophage migration inhibitory factor
  misc_feature: Homolog of GI Number: 53803041 NR Desc: phenylpyruvate tautomerase
  misc_feature: Homolog of GI Number: 61871218 NR Desc:  similar to p12a isoform=macrophage migration
MPCLNVSTNVNLEGVDTSAVLADASSTVATIIGKPEAYVMVVLKGSVPMAFGGTQEPAAYGELVSIGGLNADVNKKLSAGIASILESKLSIPKSRFYLKFHDSKRSDFGWNGSTF

SEQ ID NO: 4159 - DNA, 1915 bp, Triticum aestivum
  misc_feature: Ceres CLONE ID no. 861563
  misc_feature: Ceres CDNA ID no. 25446082
  CDS (50)..(1627): REFERENCED BY SEQ ID NO: 4160
atcccacccactgctcccaatccccgccgctgccgccgccagctccaccatggcggccaccacccacgccccctccccgtcgccatccctctccttcctcctctcccgcccccgctctgccgcgccgcagctccgcctccgccccgccgcccaccgccgcgtccgctgcgccaccgacgccgccgcccccgccgccaccaacaagccccggcgcgcggcggacgaggacatccgcgaggaggcggcgcggcaccgcgccccggccaacggcttctccgcctggtacgaaccctttcccccaggccccggcggggccggcacggacgagcgctactccctggacgagatcgtgtaccgctccagctccggcggcctgctcgacgtgcgccacgacatggacgccctcgcgcgccaagcggggtcctactggcgggacctcttcgactcccgcgtcggccgcaccgtctggccctacggctccggcgtctggtccaagaaggagttcgtgctccccgggatcgacccggaccacatcgtctccctcttcgagggcaactccaacctcttctgggccgagcgcctcggccgcgaccacctcgccgggatgaaggacctctgggtcaagcactgcggcatctcccacaccggctccttcaaggacctcggcatgaccgtgctcgtcagccaggtcaaccgcctccgccgcgccccgctctcccgccccatcgccggcgtcggctgcgcctccacgggggacacctccgccgcgctctccgcatactgcgcggccgccgggatccccgccatcgtcttcctcccggccaaccgcatctcgctcgagcagctcatccagcccatcgccaacggcgccaccgtgctctccctcgacaccgacttcgacggctgtatgaggctcatcagggaggtgaccgccgaactgcccatttaccttgccaattcgctcaactccctccggctcgaggggcagaagacggcagccattgagatactgcagcagttcgattgggaggtgcccgattgggtcatcgttccaggaggcaaccttggaaacatatatgcattctacaagggattcgagatgtgccgcgttcttggccttgttgatcggctgccacggcttgtctgtgcacaggccgccaatgccaacccgctgtaccgctactacaaatccgggtggacgcagttccagccacaagtggccgagcctacatttgcgtcggcgattcagatcggtgaccctgtatcggtcgaccgtgcggtggtcgcactcaaggcaacaaatggcatcgtcgcagaggccacggaggaggagctcatgaacgcaatgtccctcgccgaccgcaccggcatgtttgcctgcccgcacactggggtcgctctcgcagcgctcttcaagctccgggaagagggcaccatcggggcaaacgaccgcacggtggtcgtcagcacggcgcacggcctcaagttctcccagtccaagatagactaccatgatcagaagatcgaggacatggcctgcaagtacgccaacccgccggtcagcgtgaaggctgacttcggcgctgtcatggacgtcctcaagaagaggctcaagggtaagctttgagtatgatgccctcctgctactgctgctgacccctccgattggctactgcgattcgattgtcttgtgcatctgattcaaatgtgtggagcattcgaacccttgatttgatatcttgtaggtgagtgagactcttgtaggcgtgtccgcggggaatggttagggggtgtggttgattatctcttgtaccgtgttgtgttctatggataataaacgattgtgttgtgttgctgttcattgaataatcaatcattcagtctgtttaaaaaaaaaacaaaaaaaaaaaaaaaa

SEQ ID NO: 4160 - protein, 525 aa, Triticum aestivum
  misc_feature: Ceres CLONE ID no. 861563
  misc_feature: Ceres CDNA ID no. 25446082
  misc_feature (163)..(476): Pfam Name: PALP PFAM Desc: Pyridoxal
  misc_feature: Homolog of GI Number: 53794949 NR Desc: COG0498: Threonine synthase
  misc_feature: Homolog of GI Number: 15825883 NR Desc: Chain B
  misc_feature: Homolog of GI Number: 45550058 NR Desc: chloroplast threonine synthase
  misc_feature: Homolog of GI Number: 34911416 NR Desc: putative threonine synthase
  misc_feature: Homolog of GI Number: 50932643 NR Desc: putative threonine synthase
  misc_feature: Homolog of GI Number: 1448917 NR Desc: threonine synthase
  misc_feature: Homolog of GI Number: 4914408 NR Desc: threonine synthase
  misc_feature: Homolog of GI Number: 8439547 NR Desc: threonine synthase
  misc_feature: Homolog of GI Number: 42573081 NR Desc: threonine synthase
  misc_feature: Homolog of GI Number: 20466326 NR Desc: threonine synthase
MAATTHAPSPSPSLSFLLSRPRSAAPQLRLRPAAHRRVRCATDAAAPAATNKPRRAADEDIREEAARHRAPANGFSAWYEPFPPGPGGAGTDERYSLDEIVYRSSSGGLLDVRHDMDALARQAGSYWRDLFDSRVGRTVWPYGSGVWSKKEFVLPGIDPDHIVSLFEGNSNLFWAERLGRDHLAGMKDLWVKHCGISHTGSFKDLGMTVLVSQVNRLRRAPLSRPIAGVGCASTGDTSAALSAYCAAAGIPAIVFLPANRISLEQLIQPIANGATVLSLDTDFDGCMRLIREVTAELPIYLANSLNSLRLEGQKTAAIEILQQFDWEVPDWVIVPGGNLGNIYAFYKGFEMCRVLGLVDRLPRLVCAQAANANPLYRYYKSGWTQFQPQVAEPTFASAIQIGDPVSVDRAVVALKATNGIVAEATEEELMNAMSLADRTGMFACPHTGVALAALFKLREEGTIGANDRTVVVSTAHGLKFSQSKIDYHDQKIEDMACKYANPPVSVKADFGAVMDVLKKRLKGKL

SEQ ID NO: 4161 - DNA, 1546 bp, Triticum aestivum
  misc_feature: Ceres CLONE ID no. 861649
  misc_feature: Ceres CDNA ID no. 25892858
  CDS (175)..(1140): REFERENCED BY SEQ ID NO: 4162
agcccagccgcagtcggcacccagcagacagactacccgcgccgcgccgcgccgcgccgccggtcgctcctccttccccgccgtcatctccaatcggacctccgcgcacaccaccgtcggcctccgccgcaccgcgccgctcctttcctgcgccgcgctgggctcctcgtcgccatgggcaaggcctccaaagacaagcgggacatctactaccggaaggccaaggagcagggatggagggctcgcagcgccttcaagctcatgcagatcgaccaggagttcaacatcttccacggagtgaagcgtgccgttgacctgtgcgctgctcctgggagctggagccaggttttgagccgcaatttgtatctaccggcaaagctatcgtctgacggcaaagatggtggccttcctctcatcgtcgcaatcgatctgcaaccgatggctccgatagaaggtgtcatacaagtgcagggcgacatcaccaatgctcgaacagcggaagtggttatcaggcattttgatggatgcaaagcggacttggttgtctgtgatggtgcccctgatgttactggacttcatgatatggacgagtttgttcagtcccagcttatattggcggcactgacaattgtgactcatgtactcaaagttggtggaaaatttgttgcgaagattttccggggtaaagatacaagtctcctgtattgccagttaaagctgttcttctcacaagttacatttgcaaagccaaaaagcagccgcaactcaagtatcgaggcatttgcagtttgcgagaactactcacctccagagggcttcaaagagaaagatttatatcacctgctggagaaagtgggaactccttctggggctgatgatctagattgcagaagcggatggttggagggaccaaacaaggtctacatcccgtttctggcttgcggtgacctcagcggttacgattcagaccgctcatacccccttccaagcacagaaggcggcacctaccagagcctagatccagtccagcctcccatcgccccgccatacaaaactgcattggagatgaagaaggcgtctagccacggcgctggcacagataccagcaaattatctcttgacccccaaacaacattatagcttcagcttatgctcatctacccaatcgccacatggaaacatatgaatcgtcctgcagtgacgttcagcacatgttgcagagtatatgctgaagttgaagctgaattttggttattcatccaatcttgaaggcaatagcatgtggaagagatggtataaaccgaggggtatgcatgccatgggctaagcaaactctgtaatgaactataagcctggatcaccattgtagtactttgccttgtggtcatttctggtattttccatattgtactgcgtgtaagcgcaaagaatcgtggcaaacggtgctttatgagaaattcaaaaatgaagtcttgaatcatacacagttgattattaagcaatgtgaaggagagtggtaatttggtgctcaaaaaaaaaaaaaaaa

SEQ ID NO: 4162 - protein, 321 aa, Triticum aestivum
  misc_feature: Ceres CLONE ID no. 861649
  misc_feature: Ceres CDNA ID no. 25892858
  misc_feature (21)..(211): Pfam Name: FtsJ PFAM Desc: FtsJ
  misc_feature: Homolog of GI Number: 21593533 NR Desc: cell division
  misc_feature: Homolog of GI Number: 6759446 NR Desc: cell division
  misc_feature: Homolog of GI Number: 53792764 NR Desc: putative FtsJ homolog 1 isoform b
  misc_feature: Homolog of GI Number: 26983822 NR Desc: putative cell division protein
  misc_feature: Homolog of GI Number: 55250314 NR Desc: Zgc:101831
  misc_feature: Homolog of GI Number: 68397044 NR Desc:  similar to Ftsj homolog isoform 2
  misc_feature: Homolog of GI Number: 68397049 NR Desc:  similar to Ftsj homolog isoform 4
  misc_feature: Homolog of GI Number: 68440761 NR Desc:  similar to Ftsj homolog isoform 2
  misc_feature: Homolog of GI Number: 68440767 NR Desc:  similar to Ftsj homolog isoform 4
  misc_feature: Homolog of GI Number: 62857467 NR Desc: Ftsj1
MGKASKDKRDIYYRKAKEQGWRARSAFKLMQIDQEFNIFHGVKRAVDLCAAPGSWSQVLSRNLYLPAKLSSDGKDGGLPLIVAIDLQPMAPIEGVIQVQGDITNARTAEVVIRHFDGCKADLVVCDGAPDVTGLHDMDEFVQSQLILAALTIVTHVLKVGGKFVAKIFRGKDTSLLYCQLKLFFSQVTFAKPKSSRNSSIEAFAVCENYSPPEGFKEKDLYHLLEKVGTPSGADDLDCRSGWLEGPNKVYIPFLACGDLSGYDSDRSYPLPSTEGGTYQSLDPVQPPIAPPYKTALEMKKASSHGAGTDTSKLSLDPQTTL

SEQ ID NO: 4163 - DNA, 627 bp, Triticum aestivum
  misc_feature: Ceres CLONE ID no. 861927
  misc_feature: Ceres CDNA ID no. 25891762
  CDS (72)..(443): REFERENCED BY SEQ ID NO: 4164
gtacgccaaagccctctcttatttccagacgcggcggcttcttcttccgtttttgtctatcggcgtgaacaatggcgacttacgctgcgatgaagcccacaaagcccggcttggaggagccccaggagcagatccacaagataaggatcaccctttcctccaagcacgtcaaaaacctcgagaaggtttgtgcggacttggttcgcggtgcaaaggacaagcgcctcagggttaagggacctgtcaggatgcccactaaggttcttctcatcactaccaggaagtccccttgtggtgaaggtaccaacacatgggacagatttgaacttcgtgtgcacaagagagtgattgacctctacagttccccagatgtagttaagcagattacctctatcacgattgaacctggtgtggaggttgaggttaccattgcagatgcttgatctggattcaaattttaactgttatgcttcccagttttttccctctctttttttgtattttgtaagttttgattgtgggactgagttggattgttttctctagttttacggttgtagacattgatgaatacccgagaaatgccatcttgatatattctagaatcttacaaaaaaaaaaaaaaaa

SEQ ID NO: 4164 - protein, 123 aa, Triticum aestivum
  misc_feature: Ceres CLONE ID no. 861927
  misc_feature: Ceres CDNA ID no. 25891762
  misc_feature: The plant flowers significantly late compared to wild-type.
  misc_feature: The plant is abnormally large.
  misc_feature: null
  misc_feature: Useful for making plants with modulated biomass
  misc_feature: Useful for making plants with modulated flowering time
  misc_feature: Useful for making plants with modulated phosphate use efficiency
  misc_feature (23)..(118): Pfam Name: Ribosomal_S10 PFAM Desc: Ribosomal protein S10p/S20e
  misc_feature: Homolog of GI Number: 21281054 NR Desc: putative 40S ribsomomal protein
  misc_feature: Homolog of GI Number: 21617905 NR Desc: 40S ribosomal protein S20
  misc_feature: Homolog of GI Number: 23198348 NR Desc: 40S ribosomal protein S20
  misc_feature: Homolog of GI Number: 31430421 NR Desc: putative ribosomal protein S10p/S20e
  misc_feature: Homolog of GI Number: 54208698 NR Desc: ribosomal protein S10p/S20e
  misc_feature: Homolog of GI Number: 55775376 NR Desc: 40S subunit ribosomal protein
  misc_feature: Homolog of GI Number: 50933555 NR Desc: 40S ribosomal protein S20
  misc_feature: Homolog of GI Number: 15294053 NR Desc: 40S ribosomal protein S20
  misc_feature: Homolog of GI Number: 55630698 NR Desc:  similar to 40S ribosomal protein S20
  misc_feature: Homolog of GI Number: 56789370 NR Desc: Ribosomal protein S20
  misc_feature: Useful for making shorter plants
  misc_feature: Useful for sterility
  misc_feature: Useful for sterility
MATYAAMKPTKPGLEEPQEQIHKIRITLSSKHVKNLEKVCADLVRGAKDKRLRVKGPVRMPTKVLLITTRKSPCGEGTNTWDRFELRVHKRVIDLYSSPDVVKQITSITIEPGVEVEVTIADA

SEQ ID NO: 4165 - DNA, 531 bp, Triticum aestivum
  misc_feature: Ceres CLONE ID no. 861990
  misc_feature: Ceres CDNA ID no. 40351423
  CDS (73)..(321): REFERENCED BY SEQ ID NO: 4166
tacggcactcgttttcgttctcgttctggtttatagatctttgcgaaggaggtttacagcgctcaaccaaagatgcagaacgaggaaggacagatcactgagctttacattcctaggaagtgctccgccacaaacagattgattaccgctaaggaccatgcttcggttcagatcaacattgggcatgtggatgagaatggcgtctacaatggccatttctccacttttgccctctgcggattcatccgtgctcagggtgatgctgacagtgctctagaccgcttgtggcagaagaagaaagttgaagttaagcaacagtagacacccatgatagtttgttacttcgttatgtattaatttctactcttgctagagatatttgagtactatgattgtcgttttgagcacaaatactcattctgaattttcgtcggcatttggtgcctccagctaaggtggttacttttttgacagtttgccagtgcgttgataaatattctgtcatatttcaatcgaaaaaaaaaaaaaaaa

SEQ ID NO: 4166 - protein, 82 aa, Triticum aestivum; identical to SEQ ID NO: 3832
  misc_feature: Ceres CLONE ID no. 861990
  misc_feature: Ceres CDNA ID no. 40351423
  misc_feature (1)..(81): Pfam Name: Ribosomal_S21e PFAM Desc: Ribosomal protein S21e

SEQ ID NO: 4167 - DNA, 1843 bp, Triticum aestivum
  misc_feature: Ceres CLONE ID no. 862004
  misc_feature: Ceres CDNA ID no. 40041351
  CDS (128)..(1486): REFERENCED BY SEQ ID NO: 4168
accttcccaccagttaacccatcgccctcctccagatcccaacctccctaatccgtggccagcagaagcggcggcgtttctaggtagatacagatagtaatttaagggctaagctgcaaaccaagagatggacagcaaaaagaagaggaacaggaagaagaagggaaaccaagggaagaatactggtgatgcggtgaccaatgccgatgaagctgttcctcacagccacaatgatgatttggctccaaaagaaaattatagtggtgctgatgcagatgatgcagtgtccagtgttggagatgcagtgtccagtgttggagagggaacacagtaccagaatcacgagcagactccgcatgcaaagcagaatgttgcaaacgctgatgaaaccatatcgtcgtctgttggtgaggtgattccatgcgacgagaatcacgaacctaccatgacacaggagaatcacaaggccagtaatacagtctatgcagatcagatgagcattgggatttcagattctaccatggaacttggcaaggaccgactttttgaatcaaagcttgataaattacacgatacaataaagcaattggaagatgagaaaggtttatggcttcaaaaagtgaacgagatggagagcgaacttgaaaagttgcataacaaagtgggttatcatgcacaaaatgaggtcattttggaggaaaaacttaataatctacagaatgggtacgatatgctggttaaaaaggaggaagttttggataacaaagtcaagtgcgtagaggatgtcaatggtgtcctaactcatcaggagacttctcttaaagaaagattaagtttgctggaggaaaccaacaaagcattacaggagcaggtgaaggtattggatgaaacttcaaaaagtactgttgaggaaaatcagcggttggtggtaagtgtggatgaattggagtcaagattacaaacccttgaagcaaagattgcacttactgaagcctccattactaaagaggttcctgaaaatgaggtgatgaatcaaacagatctgtccggttcatttctccataagcagaccactgattttacgaccgtgatcagtaaaggtaacgaacttgctgctgatagaggtctgaacagttcgctggcagttacttcggacaatatctacagtcatgtcagcaacattcctgttggtgcctattctagtgatcatgcagatgaaacttcggtgtacgttgcagaagcaacgagcagcaatggtgctggccagagcctcatgaacgcaaatgcatgccaaggatttgatgaaccaagaacaagtggtgaaatcgtgccggttccgttggatgatatactgattcatgaagatgatccacagacagctgaggaggttccatttactgatgcccccattgttggcgcacccttccggttgatctcgtttgttgctaggtatgtcagtggtgcagacttggtgaaccaaaagtaactctacatctgcccatcgggctgctcgagatctgtgtgctggaaagaggagtcctgttttttgttgcactgacatagttttcagtaagcttttggaacttcttcgtaacattaagatggtggcgaatgtgttggacgggtgcattggattctgcagagatatggacgctatggtgatttgtggcggtgcttgctgccgatagatttttcttcctcccctgtaattttatcaggggcgtgagaagttattgttccggatttatacaagagggctttgtctgaccatgtgagaagctgtactggccagatttatattatagtaacatctgaaatgttggtatgaaaaaaaaaaaaaaaa

SEQ ID NO: 4168 - protein, 452 aa, Triticum aestivum
  misc_feature: Ceres CLONE ID no. 862004
  misc_feature: Ceres CDNA ID no. 40041351
  misc_feature (239)..(281): Pfam Name: GCFC PFAM Desc: GC
MDSKKKRNRKKKGNQGKNTGDAVTNADEAVPHSHNDDLAPKENYSGADADDAVSSVGDAVSSVGEGTQYQNHEQTPHAKQNVANADETISSSVGEVIPCDENHEPTMTQENHKASNTVYADQMSIGISDSTMELGKDRLFESKLDKLHDTIKQLEDEKGLWLQKVNEMESELEKLHNKVGYHAQNEVILEEKLNNLQNGYDMLVKKEEVLDNKVKCVEDVNGVLTHQETSLKERLSLLEETNKALQEQVKVLDETSKSTVEENQRLVVSVDELESRLQTLEAKIALTEASITKEVPENEVMNQTDLSGSFLHKQTTDFTTVISKGNELAADRGLNSSLAVTSDNIYSHVSNIPVGAYSSDHADETSVYVAEATSSNGAGQSLMNANACQGFDEPRTSGEIVPVPLDDILIHEDDPQTAEEVPFTDAPIVGAPFRLISFVARYVSGADLVNQK

SEQ ID NO: 4169 - DNA, 726 bp, Triticum aestivum
  misc_feature: Ceres CLONE ID no. 862123
  misc_feature: Ceres CDNA ID no. 25891763
  CDS (187)..(555): REFERENCED BY SEQ ID NO: 4170
acatagtgtgttaagcctcgccgactcggttgctatcagcgagtgagagtgagtgagtggttctcttgcagcaacaaggtttagtgacaccaaacagactggaaatgggtcgtggggtcagtgctggtggtggacagagttccttggattatctctttggcagtggggtacctgccagcagtgcaaatggtgctcgcactcaaaatgcaagtgctccttcaccaccggttgataagcaaagtccagcaccagcagcagcagcagcacctgcacctgcagcagcagcagcaccagcacctgcaccagcaccagcaccagcaccagctgataagcaaattccagctggaattcctggaagtctcaaaaacaattaccatcgcgctgatgggcaaaactgtggcaactttctcactgatcggccatctaccaaggttcatgctgccccgggtggtggatcttccttgcattacctctttggtggtcctccagggaactgattcatacctaccatgtgatgtatcatgtgtaaaatggatagtgttgcattgtgtttagaccagtggactttgtttcttgttcaattgaatctcttgacaatgttggtgtggcttgatggccaaactaagctgattcataggtttgttgttctgtgttattgtgtgggtttcgattaatgaaatttactgtgcgaatgagctaaagtggctcataaaaaaaaaaaaaaaa

SEQ ID NO: 4170 - protein, 130 aa, Triticum aestivum; identical to SEQ ID NO: 3430
  misc_feature: Ceres CLONE ID no. 862123
  misc_feature: Ceres CDNA ID no. 25891763
  misc_feature: Homolog of GI Number: 2765837 NR Desc: NAP16kDa protein
  misc_feature: Homolog of GI Number: 21280823 NR Desc: putative nitrilase
  misc_feature: Homolog of GI Number: 28827480 NR Desc: putative nitrilase associated protein
  misc_feature: Homolog of GI Number: 21592782 NR Desc: nitrilase associated protein
  misc_feature: Homolog of GI Number: 21592628 NR Desc: putative nitrilase
  misc_feature: Homolog of GI Number: 10945166 NR Desc: TapA protein
  misc_feature: Homolog of GI Number: 7800652 NR Desc: PspA
  misc_feature: Homolog of GI Number: 992946 NR Desc: p57KIP2
  misc_feature: Homolog of GI Number: 38099663 NR Desc: predicted protein
  misc_feature: Homolog of GI Number: 4557441 NR Desc: cyclin

SEQ ID NO: 4171 - DNA, 1258 bp, Triticum aestivum
  misc_feature: Ceres CLONE ID no. 862202
  misc_feature: Ceres CDNA ID no. 29191562
  CDS (224)..(925): REFERENCED BY SEQ ID NO: 4172
accgtataaatccatctctctcctcgcgaccaccccgtcgaaccctaacccgcaccctgatccgccgccgccaccgcctccaccaccagcccaccgaagcctcccaccgttccattcgcttccctctcaccgcttgctcctcctcataaagtctgccccgttcgaaaatctttgactccagatcgggatcctgcggcagttctccgatcgccagatcgatcggatggctgccgcggcggtggacccgatggtgcttgggctgggaacgagcggaggtgcgagcgggagcggagtggtaggaggcggtgttgggagagcaggaggagggggtgctgtgatggaaggggcgcagccggtggatctcgccaggcacccctccggcatcgtcccggtcctccagaacattgtgtcaactgttaatctggactgcaggttggatctgaaacaaattgccttacaggcccgtaatgcagagtacaacccaaagcgttttgcagcggttatcatgaggataagggaccccaagacaacagctcttatatttgcttcaggaaagatggtatgcactggagcaaagagtgaagaacactcgaagcttgctgccaggaagtatgcacgaattgtccaaaagcttggcttcccagctacattcaaggacttcaagatccagaacattgtcgcctcatgtgacgtgaaatttcccattcgtctcgagggccttgcttattcccatggtgccttctccagttatgagccagagctctttcctgggttgatttaccgtatgaaacagccaaagattgtcctccttgtatttgtctctggaaagattgttctcacgggagctaaggtgcgcgatgagatatatgctgcctttgagaacatctacccggtgctaactgagtacaggaaatctcagcaatgaggggaggatccatcagccgaagtgggagttccctgcttcttctgtacatagaaaactaaaaagatctgactgcgtctcttctctcttttaacttcttactgccaagaactaggtttagaatgccaagtactcctagaaaaagattgtattcttttcataaccgggatccgacaagcaactgtggtatgttaaaagatcatgttcatctgtaaatacatgactcaattttgctctagttctctattattgagacggttatgagtttgattgagttaaggactgaatgatgagaaaacgttctgttgttaatttgtggcaaaaaaaaaaaaaaaa

SEQ ID NO: 4172 - protein, 233 aa, Triticum aestivum
  misc_feature: Ceres CLONE ID no. 862202
  misc_feature: Ceres CDNA ID no. 29191562
  misc_feature (143)..(229): Pfam Name: TBP PFAM Desc: Transcription factor TFIID
  misc_feature: Homolog of GI Number: 21875 NR Desc: TATA binding protein
  misc_feature: Homolog of GI Number: 37534634 NR Desc: putative transcription initiation factor TFIID
  misc_feature: Homolog of GI Number: 78708692 NR Desc: Transcription factor TFIID
  misc_feature: Homolog of GI Number: 50917367 NR Desc: TATA
  misc_feature: Homolog of GI Number: 1220522 NR Desc: TATA
  misc_feature: Homolog of GI Number: 4102723 NR Desc: TATA
  misc_feature: Homolog of GI Number: 4102725 NR Desc: TATA
  misc_feature: Homolog of GI Number: 18481630 NR Desc: TATA
  misc_feature: Homolog of GI Number: 21877 NR Desc: DNA binding protein
  misc_feature: Homolog of GI Number: 21581 NR Desc: TATA
  misc_feature: Useful for delaying senescence
  misc_feature: Useful for increasing seed/fruit yield or modifying fruit content
MAAAAVDPMVLGLGTSGGASGSGVVGGGVGRAGGGGAVMEGAQPVDLARHPSGIVPVLQNIVSTVNLDCRLDLKQIALQARNAEYNPKRFAAVIMRIRDPKTTALIFASGKMVCTGAKSEEHSKLAARKYARIVQKLGFPATFKDFKIQNIVASCDVKFPIRLEGLAYSHGAFSSYEPELFPGLIYRMKQPKIVLLVFVSGKIVLTGAKVRDEIYAAFENIYPVLTEYRKSQQ

SEQ ID NO: 4173 - DNA, 613 bp, Triticum aestivum
  misc_feature: Ceres CLONE ID no. 862226
  misc_feature: Ceres CDNA ID no. 40351424
  CDS (11)..(403): REFERENCED BY SEQ ID NO: 4174
acacataaccatgtcttctcagactgttgtcctcaaagttggtatgtcatgtcaagggtgtgctggagcagtgaacagggttttgggaaaaatggaaggtgttgagtcatttgacattgatctgaaggagcagaaggtgacagtgaaaggaaatgtggagccagatgaagttctgcaagccgtttccaaatctgggaagaagactgcattctgggtggatgaagcaccacaatctaaaaacaagcctttagaaagtgcacctgttgcctcagaaaacaagccttcagaagctgcaactgttgcctcagctgagcctgaaaacaagccttcagaagctgcaattgttgattcagctgagcctgaaaacaagccttcagatactgttgttgaaactgttgcttaaggcatttgtggttctatttttctatgtggaagtaggtctgtttcatatagtatttcatgtgctttgtgcatgtcagctattatatttggtgtgttgttactggtatctaagctacaataacttgtggcctatttttcacatgagatacatttcatgggtgctataatttagaatttgaacctgtcactcttgtcaaaaaaaaaaaaaaaa

SEQ ID NO: 4174 - protein, 130 aa, Triticum aestivum; identical to SEQ ID NO: 1648
  misc_feature: Ceres CLONE ID no. 862226
  misc_feature: Ceres CDNA ID no. 40351424
  misc_feature (6)..(67): Pfam Name: HMA PFAM Desc: Heavy

SEQ ID NO: 4175 - DNA, 550 bp, Triticum aestivum
  misc_feature: Ceres CLONE ID no. 862229
  misc_feature: Ceres CDNA ID no. 40351425
  CDS (74)..(322): REFERENCED BY SEQ ID NO: 4176
ctacggcactcgttttcgttctcgttctggtttatagatctttgcgaaggaggtttacagcgctcaaccaaagatgcagaacgaggaaggacagatcactgagctttacattcctaggaagtgctccgccacaaacagattgattaccgctaaggaccatgcttcggttcagatcaacattgggcatgtggatgagaatggcgtctacaatggccatttctccacttttgccctctgcggattcatccgtgctcagggtgatgctgacagtgctctagaccgcttgtggcagaagaagaaagttgaagttaagcaacagtagacacccatgatagtttgttacttcgttatgtattaatttctactcttgctagagatatttgagtactatgattgtcgttttgagcacaaatactcattctgaattttcgtcggcatttggtgcctccagctaaggtggttacttttttgacagtttgccagtgcgttgataaatattctgtcatatttcaatcatataaattttgttaccgcaaaaaaaaaaaaaaaa

SEQ ID NO: 4176 - protein, 82 aa, Triticum aestivum; identical to SEQ ID NO: 3832
  misc_feature: Ceres CLONE ID no. 862229
  misc_feature: Ceres CDNA ID no. 40351425
  misc_feature (1)..(81): Pfam Name: Ribosomal_S21e PFAM Desc: Ribosomal protein S21e

SEQ ID NO: 4177 - DNA, 1020 bp, Triticum aestivum
  misc_feature: Ceres CLONE ID no. 862253
  misc_feature: Ceres CDNA ID no. 40351426
  CDS (87)..(686): REFERENCED BY SEQ ID NO: 4178
acacacagagctattctcatattttggagaatccgaaaaacacgttaaagaaagtcccattcccactaccgaagcaaattaagaagatgaagcagcagagagtggagtttatgggcctgggcatgggcatgggcatgggccttttggtggtgatgatggcatgtgggtcggcgagtggtgcggatgatttggcaaccaagtgttcagcggtgattcagaaggtaataccgtgtttggatttcgcgaaggggaaggaagaaacgccgaaaaagcaatgttgcgacgcagcaacgtccataaaggagagcaacccagagtgcctctgctacatcattgaagagacccacaagggtagcccacaggttaaaagcttgggcattcaagaggccaagctgcttcagctcccttctgtttgtaacgtcaaaaacgccagcatcaccaactgtcctaagcttttgggtctatctccaagttcccctgatgctgctatcttcacatcaaattcttcgaagacaactccttctgcacctgcaacctcaaactcacaaactacgaccccccagagccaaaacgcatcgtatggaagcatggttcaacccagtagtaccgttacctatgcgattgtgatggctttggccattgttctaattgctcttccaaccgaaattgtgagcatttacacatgatgatgatgatgatgatgcggcattgttgaatgaatgcttcttcatctacttacctcctgcagtgatgaagacagagagtagtagacagttggggttgtttcctgcttttgttatgcataggacttcttcgcagctttgaattaaatgaattgaattggtttgcatttgtggcctgtgatggtttctcgaattttgggacctcgctgtaatgtttggctttattgtggacttgtttcttttctgcttcccacaattaatattaaccgatagttggtgaaagttgagagacttaataatgctatgaattattttatttagaaaaaaaaaaaaaaaa

SEQ ID NO: 4178 - protein, 199 aa, Triticum aestivum
  misc_feature: Ceres CLONE ID no. 862253
  misc_feature: Ceres CDNA ID no. 40351426
  misc_feature (39)..(120): Pfam Name: Tryp_alpha_amyl PFAM Desc: Protease inhibitor/seed storage/LTP family
MKQQRVEFMGLGMGMGMGLLVVMMACGSASGADDLATKCSAVIQKVIPCLDFAKGKEETPKKQCCDAATSIKESNPECLCYIIEETHKGSPQVKSLGIQEAKLLQLPSVCNVKNASITNCPKLLGLSPSSPDAAIFTSNSSKTTPSAPATSNSQTTTPQSQNASYGSMVQPSSTVTYAIVMALAIVLIALPTEIVSIYT

SEQ ID NO: 4179 - DNA, 457 bp, Triticum aestivum
  misc_feature: Ceres CLONE ID no. 862281
  misc_feature: Ceres CDNA ID no. 40351427
  CDS (88)..(378): REFERENCED BY SEQ ID NO: 4180
aatgttataattttggttatcaaacgtggacttatggtgtttagttttaattagtagtccttgtttatagattttagttgataatacatgggttctagtctagagtcgcaagatgaattgtattcatatttcacagtgtcatcctacatatattttagcatagtagtttgcttcatgagtgggaacttgatacttgtgagggaacgttgtttgtatttatttaagttggagagtaaaatttgtgggttgatatttgctgtagtgccttataagaggatgtttggtttttcggtgactggtctcgaacttttgtttgcacaaattccaagacaaattggaggggccaccccaacacaaaggaaaaggggattctcttagtgcaccatacatatttcttatacactcaacaatttattgaaaatttcaaaattatccctgattaaaaaaaaaaaaaaaa

SEQ ID NO: 4180 - protein, 96 aa, Triticum aestivum
  misc_feature: Ceres CLONE ID no. 862281
  misc_feature: Ceres CDNA ID no. 40351427
MGSSLESQDELYSYFTVSSYIYFSIVVCFMSGNLILVRERCLYLFKLESKICGLIFAVVPYKRMFGFSVTGLELLFAQIPRQIGGATPTQRKRGFS

SEQ ID NO: 4181 - DNA, 1177 bp, Triticum aestivum
  misc_feature: Ceres CLONE ID no. 862325
  misc_feature: Ceres CDNA ID no. 25892859
  CDS (19)..(990): REFERENCED BY SEQ ID NO: 4182
atcccgcagccagcagccatgtccgcgctgagagcaccgtgtgcgacggccatcttggccgtcgtcctggcggcggccgcggtggagctggctacggcccagcagtgcggctcgcaggccggcggcgccaagtgcgccaactgcctctgctgcagccaattcgggttctgcggcagcacctccgactactgcggtggcggttgccagagccagtgcaatggctgcggcggcagcggcggtggggttgcatccatcgtttccagggacctcttcgatcggttcctcctccatcgcaacgacgcggcgtgcctggcccgcgggttctacacctacgacgccttcttggccgccgccagcgcgttcccggccttctgcaccacgggagacttggacacgcggaaacgagaggtggcggccttcttcggccagacctctcacgagaccaccggcgggtgggccaccgcacccgacggccccttctcatggggctactgcttcaagcaggagaagagtccgccggaaagctactgcagccagagcgccgactggccgtgcgcgcccggcaagcagtactacggccgcggccccattcagctcacttacaattacaactatggatcggtgggccgcgcaatcggggtggacctgttgaacaacccggacctggtggccacggacccgacggtggcgttcaagacggccatctggttctggatgaccacacagtcaaacaagccgtcatgccatgacgtgatcacagggttgtggaggccgacggctagggacagcgcagcgggacgggtacccgggtacggcgtgatcaccaatgtcatcaacggcgggatcgaatgcggcaaggggcagaacgacaaggtggccgatcggatcggattctacaagcgctattgtgacatcttcggcatcggctacgggaataacctcgactgctacaaccaattgtcgttcaacatcgggctcgcggtacagtgagatcgaaaaactatgggtcctcgatctatgaatgtgtggatgtgatcacccataaataaattatcttgggaagtactttatgaccaaataaatggatgaccagacctcccggacacctgtactagtttatgtatgttgatgcacggaaaggaagtgtcaccaccttttatcaaaaaaaaaaaaaaaa

SEQ ID NO: 4182 - protein, 323 aa, Triticum aestivum
  misc_feature: Ceres CLONE ID no. 862325
  misc_feature: Ceres CDNA ID no. 25892859
  misc_feature (28)..(66): Pfam Name: Chitin_bind_1 PFAM Desc: Chitin recognition protein
  misc_feature (79)..(310): Pfam Name: Glyco_hydro_19 PFAM Desc: Chitinase class I
  misc_feature: Homolog of GI Number: 481896 NR Desc: chitinase
  misc_feature: Homolog of GI Number: 18146827 NR Desc: chitinase 2
  misc_feature: Homolog of GI Number: 407472 NR Desc: chitinase
  misc_feature: Homolog of GI Number: 11344587 NR Desc: seed chitinase
  misc_feature: Homolog of GI Number: 12407647 NR Desc: 31.7 kDa class I endochitinase
  misc_feature: Homolog of GI Number: 38261495 NR Desc: chitinase
  misc_feature: Homolog of GI Number: 6164588 NR Desc: chitinase
  misc_feature: Homolog of GI Number: 561873 NR Desc: chitinase
  misc_feature: Homolog of GI Number: 7435361 NR Desc: probable chitinase
  misc_feature: Homolog of GI Number: 542173 NR Desc: chitinase
  misc_feature: Useful for making plants with increased biomass and foliage
  misc_feature: Useful for making shorter plants
  misc_feature: Useful for making stronger plants
  misc_feature: Useful for sterility
MSALRAPCATAILAVVLAAAAVELATAQQCGSQAGGAKCANCLCCSQFGFCGSTSDYCGGGCQSQCNGCGGSGGGVASIVSRDLFDRFLLHRNDAACLARGFYTYDAFLAAASAFPAFCTTGDLDTRKREVAAFFGQTSHETTGGWATAPDGPFSWGYCFKQEKSPPESYCSQSADWPCAPGKQYYGRGPIQLTYNYNYGSVGRAIGVDLLNNPDLVATDPTVAFKTAIWFWMTTQSNKPSCHDVITGLWRPTARDSAAGRVPGYGVITNVINGGIECGKGQNDKVADRIGFYKRYCDIFGIGYGNNLDCYNQLSFNIGLAVQ

SEQ ID NO: 4183 - DNA, 469 bp, Triticum aestivum
  misc_feature: Ceres CLONE ID no. 862500
  misc_feature: Ceres CDNA ID no. 25891764
  CDS (2)..(322): REFERENCED BY SEQ ID NO: 4184
agtcagaacctccaaagttaagttagggtttttgggggtgaagttgagcttccggcacttccacttccacttcttcatcaccatgagcaggtcaggccaaccaccggatttgaagaagtacatggacaagaagcttcagattaaactgaatggaaatcgcatgattgttggcactctccgtggctttgaccagtttatgaatttagttgttgacaacactgtggaagtgaatggcaatgagaaaaatgacatagggatggtggtaatcagaggaaatagtgtggtcactgttgaggcgcttgaacccgtgaacagggcctgattactatttcttgtaaacatttataagtagattttctggtttctgtgtttgaacaacgtagctattgagagtaacatgtaattgtgaatcttaagagtgtcatgttggctgctaatttggggttctttttcaaaaaaaaaaaaaaaa

SEQ ID NO: 4184 - protein, 79 aa, Triticum aestivum
  misc_feature: Ceres CLONE ID no. 862500
  misc_feature: Ceres CDNA ID no. 25891764
  misc_feature (8)..(72): Pfam Name: LSM PFAM Desc: LSM domain
  misc_feature: Homolog of GI Number: 30102776 NR Desc: At2g23930
  misc_feature: Homolog of GI Number: 17065484 NR Desc: putative small nuclear ribonucleoprotein polypeptide G
  misc_feature: Homolog of GI Number: 50939161 NR Desc: putative small nuclear ribonucleoprotein E
  misc_feature: Homolog of GI Number: 7451052 NR Desc: small nuclear ribonucleoprotein E homolog
  misc_feature: Homolog of GI Number: 37991869 NR Desc: putative small nuclear ribonucleoprotein polypeptide G
  misc_feature: Homolog of GI Number: 19573 NR Desc: snRNP
  misc_feature: Homolog of GI Number: 14192871 NR Desc: Putative small nuclear ribonucleoprotein G
  misc_feature: Homolog of GI Number: 47026939 NR Desc: small nuclear ribonucleoprotein polypeptide G
  misc_feature: Homolog of GI Number: 18860007 NR Desc: CG9742
  misc_feature: Homolog of GI Number: 52219152 NR Desc: zgc:103688
MSRSGQPPDLKKYMDKKLQIKLNGNRMIVGTLRGFDQFMNLVVDNTVEVNGNEKNDIGMVVIRGNSVVTVEALEPVNRA

SEQ ID NO: 4185 - DNA, 537 bp, Triticum aestivum
  misc_feature: Ceres CLONE ID no. 862515
  misc_feature: Ceres CDNA ID no. 40351428
  CDS (31)..(330): REFERENCED BY SEQ ID NO: 4186
gaaacaaagcagggataggaagaaggaaaaatggaaaagtatttcggaaacgcttatcgtggcgacccgggagtgccccattcggacccggatcgcttcgtcaacatatgggtcggatccgctgccttcgctgttctcacatatttcaatccctacatgtggcagctctctaatcagttcaattggcatgacaaagcaatgctatatgagcaatatcactggaaacaggcaaggaagaagaatcagccatatgagttcatgtggaacaagacctgggacaagaaccaccgggaacattactactacaactggcctatttactttccttaggccacttctatttttcttgcatactttgtcctatctttattttggttgcaaacctggatcaattgatgccccctcccccctacccggatcacatgcttttctctgatcacttgaaaaacaaatacaaggattcaattgttgtgatgaaacgagtaactatgtgtttggaaatgatttggtgacacagtttcaaaaaaaaaaaaaaaa

SEQ ID NO: 4186 - protein, 99 aa, Triticum aestivum
  misc_feature: Ceres CLONE ID no. 862515
  misc_feature: Ceres CDNA ID no. 40351428
MEKYFGNAYRGDPGVPHSDPDRFVNIWVGSAAFAVLTYFNPYMWQLSNQFNWHDKAMLYEQYHWKQARKKNQPYEFMWNKTWDKNHREHYYYNWPIYFP

SEQ ID NO: 4187 - DNA, 910 bp, Triticum aestivum
  misc_feature: Ceres CLONE ID no. 862567
  misc_feature: Ceres CDNA ID no. 40351429
  CDS (76)..(690): REFERENCED BY SEQ ID NO: 4188
gtggttcttgtttgcgagatagaagcgtaagcagcggctaccctaacctcgtcttcctctctactaatttcagctatggccgacgaagctgtggttgttccagatcccacccagatcgatgtcaagctctttaaccgctggagcttcgaggatattgaggttactgacatttcactggctgattacattggagttgcggcatccaagcacgccacatatgttcctcacaccgccggaaggtactccgtgaagcggttcaggaaggcgcagtgccccattgttgagaggctcaccaactctctcatgatgcacggtagaaacaatggcaagaaactcttggctgttaggatcatcaagcatgctatggagattattcatttgttgactgaccagaaccccattcaggttattgttgatgctgtcatcaacagtggtcctcgtgaagatgcaacaagaattggttctgctggagttgtaaggaggcaggctgtggatatttcaccccttcggcgtgtgaatcaggctatatatcttctaacaactggtgcacgcgaagctgctttcagaaatattaagacaattgctgaatgcttggctgatgaacttattaatgcagcaaaagggtcgtccaacagctatgctatcaagaaaaaggatgaaattgagagagttgccaaggcaaaccgttgagcagcttgtggaagcaatatttgcgattgtgaagattttgttttggtctatgttattcatttaatgatattttaatcttttgcttgcattagttactttttagttttttgcctgctggcttctcaagttacgaatgaatgattttgttgcttggacgaaaatctaaggtgagttttagtagtagtctgtttcataaagtaatccaaaaaaaaaaaaaaaa

SEQ ID NO: 4188 - protein, 204 aa, Triticum aestivum
  misc_feature: Ceres CLONE ID no. 862567
  misc_feature: Ceres CDNA ID no. 40351429
  misc_feature: The plant flowers significantly late compared to wild-type.
  misc_feature: The plant is abnormally small.
  misc_feature: Useful for making plants with modulated biomass
  misc_feature: Useful for making plants with modulated flowering time
  misc_feature (51)..(204): Pfam Name: Ribosomal_S7 PFAM Desc: Ribosomal protein S7p/S5e
MADEAVVVPDPTQIDVKLFNRWSFEDIEVTDISLADYIGVAASKHATYVPHTAGRYSVKRFRKAQCPIVERLTNSLMMHGRNNGKKLLAVRIIKHAMEIIHLLTDQNPIQVIVDAVINSGPREDATRIGSAGVVRRQAVDISPLRRVNQAIYLLTTGAREAAFRNIKTIAECLADELINAAKGSSNSYAIKKKDEIERVAKANR

SEQ ID NO: 4189 - DNA, 530 bp, Triticum aestivum
  misc_feature: Ceres CLONE ID no. 862691
  misc_feature: Ceres CDNA ID no. 40351430
  CDS (62)..(379): REFERENCED BY SEQ ID NO: 4190
atttttcgcggcgcaaagctgaagtgtctgcttcttccgattccggcacgcccccatcaccatggtgaacgttccgaaaacaaagaagacatactgcaagagtaaggagtgcaggaagcacaccctgcacaaggttacccaatacaagaagggtaaagatagcattgctgcccaaggaaaacgccgttacgatcgcaaacaatctggttatggcggacaaactaagcccgtcttccacaagaaggctaagaccaccaagaagattgttctgaggttgcaatgccagggttgcaagcatgtctcccaacacgctattaagaggtgcaagcactttgagattggtggtgacaagaaaggcaagggaacatctctgttctagtttgcgaattaggattcgcagctttttatgtttcagcaatgttggaatcttttagtttctctctggatttttctgcccagttattttattattttgcaataccctcgtgattgagaaattaaaactatttttgccaaaaaaaaaaaaaaaa

SEQ ID NO: 4190 - protein, 105 aa, Triticum aestivum; identical to SEQ ID NO: 3358
  misc_feature: Ceres CLONE ID no. 862691
  misc_feature: Ceres CDNA ID no. 40351430
  misc_feature (19)..(95): Pfam Name: Ribosomal_L44 PFAM Desc: Ribosomal protein L44

SEQ ID NO: 4191 - DNA, 685 bp, Triticum aestivum
  misc_feature: Ceres CLONE ID no. 862748
  misc_feature: Ceres CDNA ID no. 40351431
  CDS (82)..(513): REFERENCED BY SEQ ID NO: 4192
atcagtgtgattagggttacacttacccatttacgcgcgccttctttctccaaccgggcgagtcgactcagctccaactcaatgagtcaatccgccgccaccgccgaccccaacgctattgcgacaacgaatgacgcgccgtcgcagcctgaaaacgcggatgttgtggtgcagtacgtggtgctccggcgagacctgatcgacacttggccgctagggagcgtggtcactcaaggttgtcacgcttctgtttcggccgtttggtccaacaaagaagatcctttcaccgttgattattgcagccccgataaaattgattccatgcacaaagttacacttgaagtaaagggagaaccccagatcaaaaacttgtctgagaagcttacagctggtgggattattcacaaactgtggattgaacaacctgaaaacatacctacgtgccttgccacaaaaccttaccccaagtcaagcgtttcttcgtattttaagaagttgaaactctgtaagtgatttcatgtttgatgtttgcttttaatttccctcttgctcctatttggtagaaaatgcatgaactatgactggtaattcgggaatttttttattctttgccttctcccctaaaagtcacattagagcaaatgaatgttaagtttattaactaaaaagaaaaaaaaaaaaaaaa

SEQ ID NO: 4192 - protein, 143 aa, Triticum aestivum
  misc_feature: Ceres CLONE ID no. 862748
  misc_feature: Ceres CDNA ID no. 40351431
MSQSAATADPNAIATTNDAPSQPENADVVVQYVVLRRDLIDTWPLGSVVTQGCHASVSAVWSNKEDPFTVDYCSPDKIDSMHKVTLEVKGEPQIKNLSEKLTAGGIIHKLWIEQPENIPTCLATKPYPKSSVSSYFKKLKLCK

SEQ ID NO: 4193 - DNA, 805 bp, Triticum aestivum
  misc_feature: Ceres CLONE ID no. 862812
  misc_feature: Ceres CDNA ID no. 40351432
  CDS (50)..(670): REFERENCED BY SEQ ID NO: 4194
gggtagcgtgtgtgttcccattccctgtggtgaaaggctaaggaggaagatggtgctttcggaggaggaaatgggtcgtctgtaccgaataaggaagacggtgatgcaaatgcttcgggacaggggttttctggtgggtgacttcgagatcaacatgtcgaagcatgagttcaagtccaagtacggcgagcacatgaagcgcgaggacctggtcatcaacaagtccaagaaggacaactccggcgaccagatctacgtcttcttccccgacgagcccaaggtcggcgtcaagaccatgaagacctacaccaaccgcatgaactccgaaaacgtctatagagccatcctcgtcacccagaccaacctcacccccttcgcccgcacctgcatcagcgaaatctcctccaaattccacctcgaggtctttcaggaggccgaacttctcgttaacattaaagagcatgagcttgtccccgaacatcaggttctcactgacgccgagaagaaaaccttgcttgagagatacactgtcaaggaaactcagctacctaggattcaggtcacagatcctgttgcgagatattatggattgaagcgtggacaagttgtcaagattatccggccaagtgaaactgctggcagatatgttacataccgatttgttgtataagaatttgctttaacatatttggttatactgtcatagtgatggatagggatataaagccttctttttgcaaggggggaactcttgatttacaaggaaatgaaatgtgtgtttgtttctgtttaaaaaaaaaaaaaa

SEQ ID NO: 4194 - protein, 206 aa, Triticum aestivum
  misc_feature: Ceres CLONE ID no. 862812
  misc_feature: Ceres CDNA ID no. 40351432
  misc_feature (133)..(206): Pfam Name: RNA_pol_Rpb5_C PFAM Desc: RNA polymerase Rpb5
  misc_feature (2)..(91): Pfam Name: RNA_pol_Rpb5_N PFAM Desc: RNA polymerase Rpb5
MVLSEEEMGRLYRIRKTVMQMLRDRGFLVGDFEINMSKHEFKSKYGEHMKREDLVINKSKKDNSGDQIYVFFPDEPKVGVKTMKTYTNRMNSENVYRAILVTQTNLTPFARTCISEISSKFHLEVFQEAELLVNIKEHELVPEHQVLTDAEKKTLLERYTVKETQLPRIQVTDPVARYYGLKRGQVVKIIRPSETAGRYVTYRFVV

SEQ ID NO: 4195 - DNA, 587 bp, Triticum aestivum
  misc_feature: Ceres CLONE ID no. 863083
  misc_feature: Ceres CDNA ID no. 40351433
  CDS (62)..(379): REFERENCED BY SEQ ID NO: 4196
atttttcgcggcgcaaagctgaagtgtctgcttcttccgattccggcacgcccccatcaccatggtgaacgttccgaaaacaaagaagacatactgcaagagtaaggagtgcaggaagcacaccctgcacaaggttacccaatacaagaagggtaaagatagcattgctgcccaaggaaaacgccgttacgatcgcaaacaatctggttatggcggacaaactaagcccgtcttccacaagaaggctaagaccaccaagaagattgttctgaggttgcaatgccagggttgcaagcatgtctcccaacacgctattaagaggtgcaagcactttgagattggtggtgacaagaagggcaagggaacatctctgttctagtttgcgaattaggattcgcagctttttatgtttcagcaatgttggaatcttttagtttctctctggatttttctgcccagttatattttattattttgcaataccctcgtgattgagaaattaaaactatttttgctaaaaaaaaaaaaaaaaaaaaaaaaaaaaaaaaaaaaaaaaaaaaaaaaaaaaaagaaaaaaaaaaaaaaaa

SEQ ID NO: 4196 - protein, 105 aa, Triticum aestivum; identical to SEQ ID NO: 3358
  misc_feature: Ceres CLONE ID no. 863083
  misc_feature: Ceres CDNA ID no. 40351433
  misc_feature (19)..(95): Pfam Name: Ribosomal_L44 PFAM Desc: Ribosomal protein L44

SEQ ID NO: 4197 - DNA, 623 bp, Triticum aestivum
  misc_feature: Ceres CLONE ID no. 863084
  misc_feature: Ceres CDNA ID no. 40351434
  CDS (1)..(465): REFERENCED BY SEQ ID NO: 4198
tacctccattcgcagtcggccgtgtcctcggagccgcgggagatggcggatcaggagacagtagctgtggttgaggcacctaccccggttctaggggaaccgatggacctgatgactgccctgcagctcgtcatgaagaagtcaggtgctcacgatggccttgtgaagggtcttcgtgaggctgccaaagccatcgagaagcatgccgctcagctctgcgtgcttgccgaggactgcgaccagcctgattatgtcaagctggtgaaggctctctgcgctgagcacaatgtccacctggttactgtgcctagcgccaaaactcttggagagtgggctgggctttgcaagatcgactctgagggcaaggcgaggaaggttgtaggctgctcctgtgttgttgtcaaggactacggcgaagaatctgaaggccttaacatagtgcaggagtacgtcaaatcgcactagatacagtctgtcagtatctggaagttgtgttcaacactacattttgcacctgagtttaaatatgtgtttggttcttgggctttgctaggagattagaacagttttcaagtgagcctaggatccatgtgaacgatttgaataaaaaaaaaaaaaaaaaa

SEQ ID NO: 4198 - protein, 140 aa, Triticum aestivum
  misc_feature: Ceres CLONE ID no. 863084
  misc_feature: Ceres CDNA ID no. 40351434
  misc_feature (25)..(120): Pfam Name: Ribosomal_L7Ae PFAM Desc: Ribosomal protein L7Ae/L30e/S12e/Gadd45 family
MADQETVAVVEAPTPVLGEPMDLMTALQLVMKKSGAHDGLVKGLREAAKAIEKHAAQLCVLAEDCDQPDYVKLVKALCAEHNVHLVTVPSAKTLGEWAGLCKIDSEGKARKVVGCSCVVVKDYGEESEGLNIVQEYVKSH

SEQ ID NO: 4199 - DNA, 879 bp, Triticum aestivum
  misc_feature: Ceres CLONE ID no. 863302
  misc_feature: Ceres CDNA ID no. 25446241
  CDS (97)..(627): REFERENCED BY SEQ ID NO: 4200
agcaccgagctcgagctaagatcaaacacaaggcatcgagccgtcttgccttttagcatcatcttagcgtgtgtgctgctaatcctcttttcaagcatgggtggaggccacgacatgcacggcagccccaacggcggcgtgaagggcttcgtgtccagcctcgtcggcggcggcaaaggccacggctacgggtcatcatacggccaggggcacggctacggcggcggccatgtacagggctaccagcagggatacggcgggcatggacagagctacgagcacggttacggcggacatgcgcagcacggacacggcggctacgagcatgggtatggcggcgggcatgtgcagcagggacacgggcacgggtacggcggacacgggcagcagcacggatacggcggcggccacgcgcagctcgggtaccctcccgctgccggcgcctaccctccgcacgggggctaccaggcgcacggctacgcgccggcggcctacccttctcacggggcgcaccagggtcacatgggatcgtaccacaccgggcatggcggcgggcaccaccacggcggcaagtaccacggcggcaagtacaacggcggcaagcacggcagtaagtggatcaggtgaagtggcgcgcgtggcagcgcgtacgtgcgtacgtgcgcgcctccatggcatgccttagttgatcattaaccatgctctccgtatactacctaaataagggcgacgcatggtgtgtgacactatgtagctttcctttcagctggtaatgatgtgtgtggtgacctaataagtctgtgtgtggcttagtacgaaaaatttgtgtttgctgtactgatgaaatacaaggaatatgtaccaaaaaaaaaaaaaaaa

SEQ ID NO: 4200 - protein, 176 aa, Triticum aestivum
  misc_feature: Ceres CLONE ID no. 863302
  misc_feature: Ceres CDNA ID no. 25446241
  misc_feature: Homolog of GI Number: 37624740 NR Desc: phloem RNA
  misc_feature: Homolog of GI Number: 320976 NR Desc: eggshell protein precursor
  misc_feature: Homolog of GI Number: 3893085 NR Desc: glycine
  misc_feature: Homolog of GI Number: 10954052 NR Desc: ovarian fibroin
  misc_feature: Homolog of GI Number: 55233240 NR Desc: ENSANGP00000017731
  misc_feature: Homolog of GI Number: 10954048 NR Desc: ovarian fibroin
  misc_feature: Homolog of GI Number: 52140765 NR Desc: hypervariable Bacillus group
  misc_feature: Homolog of GI Number: 9246924 NR Desc: putative VrrB
  misc_feature: Homolog of GI Number: 395147 NR Desc: glycine
  misc_feature: Homolog of GI Number: 2352260 NR Desc: keratin
MGGGHDMHGSPNGGVKGFVSSLVGGGKGHGYGSSYGQGHGYGGGHVQGYQQGYGGHGQSYEHGYGGHAQHGHGGYEHGYGGGHVQQGHGHGYGGHGQQHGYGGGHAQLGYPPAAGAYPPHGGYQAHGYAPAAYPSHGAHQGHMGSYHTGHGGGHHHGGKYHGGKYNGGKHGSKWIR

SEQ ID NO: 4201 - DNA, 1276 bp, Triticum aestivum
  misc_feature: Ceres CLONE ID no. 863308
  misc_feature: Ceres CDNA ID no. 25445512
  CDS (502)..(1035): REFERENCED BY SEQ ID NO: 4202
gctagagatgctgtcacgggaagatttttagaggaggtggtggagttgctgtcagcagttctttctttgctactgctgtgcggcgttctctgaaaacctgcttcgtgcgccgaggtagctcctctgctcgtatccctgacgactcgaccaccacggcgtaccacacgggctgggttctccggcgagcgcgcctccgaagcaccgccgaatctttcttccatcggtcaccaatgaactcgctgccatctctaccgatctgaactaaagccaccggccagaacctccctaccaaggccgggcaggtggacgactcaccccctggatcagccgagcggagaggagaggcagcttgcagattgattggaggaggtcgaagatcagtcccgccggcgatcagatcgctacggtcacaataacctaggccctacatcgtcgtccctgctcgcagtttctgcttggcgccgccgtccatccgaccgctcagcccgcgcttcagcggagatgcagaggacggtggatttcaagctcccccacttcttcaactacccgccctactttactttgcagcctgtgagagaaacacgtgaaaagcaagtgcagctatggaaagagctgatacttgattactgtagaagtcaaaagatgtatataatctccctggaagaagattttccgttgttctccaatccaaagattgagagatctctaagctatgaagcaaaggaagtgttccttgcagctcttgttagtgaagggcgcgcagagtggattgacaaaaatcacaagaagtgtctcgttctttggctgcggattcaagattgggctaactgcatattagacttcgtaaaggaaaatgggttggaagtaacaacaattgaagatatacgctctggaattgaaacacatgggaccgaacttgcgggaattgatcgtggtgtcctcatgcgagctttgaggctgctggaacagaagggaaaggcagttatctttaagggcagttcagcagacgatgaaggcgtcaaattttctgtttaaactttgtgtactagcccccaactaacagatgaataatctcgaccggtgtccttgaacatgatacatcccttcttacccgtacactgatcacatccttccggcgtgtttatcggcatcattcaaaccttgatatttatttgctctattcacatttcccgaactgttgtatttagccttctattcatcttcagcatatatacctataaaactgcatgttgtgtgtccaacaaaaaaaaaaaaa

SEQ ID NO: 4202 - protein, 177 aa, Triticum aestivum
  misc_feature: Ceres CLONE ID no. 863308
  misc_feature: Ceres CDNA ID no. 25445512
  misc_feature: Homolog of GI Number: 62859513 NR Desc: LOC548832
  misc_feature: Homolog of GI Number: 50927462 NR Desc: MGC86224 protein
  misc_feature: Homolog of GI Number: 45709514 NR Desc: LOC407684 protein
  misc_feature: Homolog of GI Number: 73920458 NR Desc: Vacuolar protein sorting protein 25
  misc_feature: Homolog of GI Number: 73965636 NR Desc:  similar to Serine/threonine
  misc_feature: Homolog of GI Number: 66849236 NR Desc: DUF852 domain protein
  misc_feature: Homolog of GI Number: 57091473 NR Desc:  similar to protein kinase
  misc_feature: Homolog of GI Number: 34911986 NR Desc: P0694A04.26
  misc_feature: Homolog of GI Number: 32527717 NR Desc: Ac2
  misc_feature: Homolog of GI Number: 41688741 NR Desc: Serine/threonine
MQRTVDFKLPHFFNYPPYFTLQPVRETREKQVQLWKELILDYCRSQKMYIISLEEDFPLFSNPKIERSLSYEAKEVFLAALVSEGRAEWIDKNHKKCLVLWLRIQDWANCILDFVKENGLEVTTIEDIRSGIETHGTELAGIDRGVLMRALRLLEQKGKAVIFKGSSADDEGVKFSV

SEQ ID NO: 4203 - DNA, 824 bp, Triticum aestivum
  misc_feature: Ceres CLONE ID no. 863575
  misc_feature: Ceres CDNA ID no. 40351435
  CDS (89)..(577): REFERENCED BY SEQ ID NO: 4204
gtgctcactcatctatctattataaccaaacactcttcttcatattcttcttcttcttcttgttcttgttctatctgtgacgagcatcatggcctcgagagcagtgctattgttggctatgtgtgtgcttccggccatggttgtggccattcgcccagcaaagaaccctttttgcgtgaagggtcgcgtctactgtgacccttgccgtgctggttttgagacctcagcaaccacctacattgccggtgctgagattatgttgcaatgcaagagcagggttagcaacgaggttgtgtacaccaagaaggggtacactgactcaactggagcatacacaatgtacgtggacgaggatcacgcagatcaaatatgcagtgccaagcttgtaagcagccctcaccctcaatgcaaggaagtcaccccgggccgcgacgaagccgtcgttattctcacccgctacaacggcattgcatccgatgataggttcgccaatgccatgggcttcatgtctcaggaggttgcttctggctgtgctgaggtcctcaggcaatacgaggagttcgacaatgagaattaattacgtaattaatttcagtaatactgttattattaatctactttcgatttgggttttctaatgtctatttaattcaatcttgatgtggagtcttatctcgacattttcatattatcatgttatatatgttgatggaccgaccctgcttaattatattattacatcaagatctatcctggactatgaggatgatgtagtctattttgtgtcgttataataaactattcttataaaaaaaaaaaaaaaa

SEQ ID NO: 4204 - protein, 162 aa, Triticum aestivum
  misc_feature: Ceres CLONE ID no. 863575
  misc_feature: Ceres CDNA ID no. 40351435
  misc_feature (30)..(150): Pfam Name: Pollen_Ole_e_I PFAM Desc: Pollen proteins Ole e I family
MASRAVLLLAMCVLPAMVVAIRPAKNPFCVKGRVYCDPCRAGFETSATTYIAGAEIMLQCKSRVSNEVVYTKKGYTDSTGAYTMYVDEDHADQICSAKLVSSPHPQCKEVTPGRDEAVVILTRYNGIASDDRFANAMGFMSQEVASGCAEVLRQYEEFDNEN

SEQ ID NO: 4205 - DNA, 812 bp, Triticum aestivum
  misc_feature: Ceres CLONE ID no. 863970
  misc_feature: Ceres CDNA ID no. 40351436
  CDS (90)..(521): REFERENCED BY SEQ ID NO: 4206
ctctgttcacaagtttcgtttccaggtttcggcgcaatcggcttctgcttcaaggaaggagagcttgttattctctatcaacaagtaaaatgtcaggtgaagagggtgtcattgcagttgagccagctgctgctgctgctgccatcccaggcgagccaatggatatcatgactgccttacaacttgtgctcagaaaatctctggcttatggtggtttgtcgcgtggccttcatgaaggtgcaaaagtgattgagaagcatgctgcacaactctgtgttcttgcagaagactgtgaccagcctgactatgttaaactggttaaggccctttgtgcagagcacaatgttagcctgctgacagttccgagtgcaaagacccttggagaatgggctggtttgtgcaagattgattccgaaggaaaagcaaggaaggttactggttgctcctgtgtggttgtgaaggatttcggtgaggagcatgaagcctataacgtcgttctgcagcatgtgaaatctcaatgagttgcaagattcatagattttatgcacttcacattttcattttgggttattccttgagaatgaattttgccttgtggctggattatatctaccttgggttttgattgtttaatatgactttgccacattctcaatgttgctgttacttttttttatcctctgatgcattgctgtggctctaattaggaactcttgtttcacattaatcatataaagtagaagttaagaatttggccctttatttggcattaatgttaattcatgcgttgcccgtgaaaaaaaaaaaaaaaa

SEQ ID NO: 4206 - protein, 143 aa, Triticum aestivum; identical to SEQ ID NO: 3208
  misc_feature: Ceres CLONE ID no. 863970
  misc_feature: Ceres CDNA ID no. 40351436
  misc_feature (28)..(123): Pfam Name: Ribosomal_L7Ae PFAM Desc: Ribosomal protein L7Ae/L30e/S12e/Gadd45 family

SEQ ID NO: 4207 - DNA, 617 bp, Triticum aestivum
  misc_feature: Ceres CLONE ID no. 864106
  misc_feature: Ceres CDNA ID no. 25891766
  CDS (51)..(485): REFERENCED BY SEQ ID NO: 4208
attactgatacaggaacagcagagaaacaaagttagaagtaaagaagatcatggcttctctagcaaccttggctgctgttcaaccagctacgatcaatggccttgctggaagttccctctctggaactaagctctctttcaagccctctcgccacagtgtcaaatccaagaacttcaggagtggtgccgtggtagcaaagtatggtgacaagagtgtgtactttgatttggaggatctgggcaacactacagggcagtgggacttgtatggctcagatgcaccttcaccctacaaccctcttcagagcaagttcttcgagacatttgctgctccattcacaaagaggggattgttactcaagtttctgatattgggaggtggttccacccttgcatacttcagtgcaactgcctcaggtgacattctaccaatcaagaagggaccacaactcccaccaaagctcggtcctcgtggcaagatctaatttgatttgtatcagaactccatctattgagttcctttttaattattttttttctggtttgcataatgtgtaagtatacttacagactactattcaaagatgcttctttcccgtccaaaaaaaaaaaaaaaa

SEQ ID NO: 4208 - protein, 144 aa, Triticum aestivum
  misc_feature: Ceres CLONE ID no. 864106
  misc_feature: Ceres CDNA ID no. 25891766
  misc_feature (6)..(144): Pfam Name: PSI_PsaH PFAM Desc: Photosystem I reaction centre subunit VI
  misc_feature: Homolog of GI Number: 33520419 NR Desc: photosystem I psaH protein
  misc_feature: Homolog of GI Number: 407355 NR Desc: PSI
  misc_feature: Homolog of GI Number: 407353 NR Desc: PSI
  misc_feature: Homolog of GI Number: 397555 NR Desc: photosystem I psaH protein
  misc_feature: Homolog of GI Number: 21553440 NR Desc: Photosystem I reaction center subunit VI
  misc_feature: Homolog of GI Number: 21618081 NR Desc: photosystem I subunit VI precursor
  misc_feature: Homolog of GI Number: 21287 NR Desc: psaH
  misc_feature: Homolog of GI Number: 1916350 NR Desc: PSI
  misc_feature: Homolog of GI Number: 445928 NR Desc: photosystem I:SUBUNIT=PS I
  misc_feature: Homolog of GI Number: 445929 NR Desc: photosystem I:SUBUNIT=PS I
  misc_feature: Useful for making plants with increased biomass and foliage
MASLATLAAVQPATINGLAGSSLSGTKLSFKPSRHSVKSKNFRSGAVVAKYGDKSVYFDLEDLGNTTGQWDLYGSDAPSPYNPLQSKFFETFAAPFTKRGLLLKFLILGGGSTLAYFSATASGDILPIKKGPQLPPKLGPRGKI

SEQ ID NO: 4209 - DNA, 1019 bp, Triticum aestivum
  misc_feature: Ceres CLONE ID no. 864108
  misc_feature: Ceres CDNA ID no. 25446243
  CDS (396)..(821): REFERENCED BY SEQ ID NO: 4210
aacggatacctcacctccactcgtcttcttcccttccttggctcatcagctctgctcgtcttttctttcttctccggctcacctttctgcctttctttctcttttctgttcaagtttagctagcttgccagggctgctacctgctcccgcgcatctcgatctgtttttagtcgatctagatctgcatccgagcaagcaagcaagcttctccattttcttttgcttttgatacacacatacattctagtacatctctccgcctgtttttgttggttggagctttgatttcctttgcattcctagttcagttctcaacgtttactcggaataatcagccgactctgctcagatcagccgcttgtttcggcaccagatttggaaagaccgactcacagatggagtgtggtttgaaatccctgagcagcagctcctcccccgcagcgtcgccttctctgatgatggcctgcaggccgttcccgcagccgccgctcctgcccctgccgcagcacctccaggcctcgccgcagcagcgggcaggccagccggccgacctgcgcgccagcaagagccccaggaagccggcgagcggggcggcgtcggcgcccatcgtggtcgcggcggcgcctatgtcggcgtggacgtccatggactcgatgtactcggtgtcgccgccgccgagcagcgtcccgatgccgacgtcgctgctgctggccgccggcgccggccggaagaaggtgccgaccccgtgcgccgtgcaggtggcaggcgggggcgtggacgtcggcgccaccgacgagctccgccgcctgctccggctctagccaccgctgctctactgtgggatggcaaggcgagggagctgctgatggatgtagcccgttcatggatcgtgggtagtttttttttaccgcgcccgagacggaatcctgacgaggctgctcccccgagctgtaacaacaatgtactgatgcagtgttaccacttctaatgatgatttccttttaaaaaaaaaaaaaaaa

SEQ ID NO: 4210 - protein, 141 aa, Triticum aestivum
  misc_feature: Ceres CLONE ID no. 864108
  misc_feature: Ceres CDNA ID no. 25446243
MECGLKSLSSSSSPAASPSLMMACRPFPQPPLLPLPQHLQASPQQRAGQPADLRASKSPRKPASGAASAPIVVAAAPMSAWTSMDSMYSVSPPPSSVPMPTSLLLAAGAGRKKVPTPCAVQVAGGGVDVGATDELRRLLRL

SEQ ID NO: 4211 - DNA, 646 bp, Triticum aestivum
  misc_feature: Ceres CLONE ID no. 864413
  misc_feature: Ceres CDNA ID no. 40351437
  CDS (87)..(515): REFERENCED BY SEQ ID NO: 4212
agggtattgcactgcggctgctacttcggctccatcttctccgatctcctcaaactctatcagcgcagaaccaagcctctatcaccatggggaagacacatggaatgggagctgcccgcaagctgaagtctcaccgtaggagacaaaggtgggctgacaagtcatacaaaaagtctcatctgggaaatgaatggaagaagccttttgctggttcatcccatgccaagggtattgttcttgaaaagattggtattgaggctaagcagcccaactctgccattcgaaaatgtgccagggttcaactcatcaaaaatgggaagaagattgctgcatttgtgccaaatgacggttgcttaaattatattgaagagaatgatgaagtcttgatagctggatttggacgaaaaggtcatgccgtgggtgatattcctggagtcaggttcaaggtcgtgaaggtttctggtgtgtctctcctggcccttttcaaggagaagaaggagaagcctaggtcttaagcttgtgggtcgtgtcctctctatagtctatccaaaaaattattatgaattttgcttcttgagactggatgagttctctgaacaattttgtatctctctaatagtaatttttctgaaaaaaaaaaaaaaaa

SEQ ID NO: 4212 - protein, 142 aa, Triticum aestivum; identical to SEQ ID NO: 3802
  misc_feature: Ceres CLONE ID no. 864413
  misc_feature: Ceres CDNA ID no. 40351437
  misc_feature (9)..(141): Pfam Name: Ribosomal_S12 PFAM Desc: Ribosomal protein S12

SEQ ID NO: 4213 - DNA, 775 bp, Triticum aestivum
  misc_feature: Ceres CLONE ID no. 864811
  misc_feature: Ceres CDNA ID no. 24766528
  CDS (77)..(568): REFERENCED BY SEQ ID NO: 4214
aaggttcagacgaagtgccgagcacgaacatagcggcgctgcaacctctccgccccctacgaagagagagaaaaccatggcggcggtcggcggcgcgggcaacggagccggcgaggaggcaggcggggcggagttctacctgcggtactacgtggggcacaagggcaagttcgggcacgagttcctcgagttcgagttccgccccgacggcaagctccgctacgccaacaactccaactacaagaacgacaccatgatccgcaaggaggtcttcgtctccccttccgtgctccgcgaggcgaggaggatcatccaggactcggagataatgaaggaggacgacagcaactggccggagcccgaccgcgtcggcaggcaggagctcgagattgtcatgggcaacgagcacatctccttcaccacctccaagatcggctccctcgttgacgtccagaccagcaaggacccggagggcctccgcatcttctactacctcgtccaggaccttaaatgtttcgtgttttcacttatcaacctccactttaagatcaagcctattcaactttgagctctgtttggttctcccggttgtgttgtggtactgcgagtgttagagaattctgtacttatgtaacatgcaatgagttgctcctggtgcgatttggtatgcgttgaagattccttttggcatcgcctgaggttgttggattgtgcaaactttgagtgcccattgatatttatatgcatgtttgttttgcgaaaaaaaaaaaaaaaa

SEQ ID NO: 4214 - protein, 163 aa, Triticum aestivum
  misc_feature: Ceres CLONE ID no. 864811
  misc_feature: Ceres CDNA ID no. 24766528
  misc_feature (19)..(161): Pfam Name: Mago_nashi PFAM Desc: Mago nashi protein
  misc_feature: Homolog of GI Number: 12802873 NR Desc: mago nashi
  misc_feature: Homolog of GI Number: 42565403 NR Desc: mago nashi
  misc_feature: Homolog of GI Number: 58465200 NR Desc: mago nashi
  misc_feature: Homolog of GI Number: 3123515 NR Desc: Mago Nashi
  misc_feature: Homolog of GI Number: 13195558 NR Desc: mago nashi
  misc_feature: Homolog of GI Number: 32450349 NR Desc: Magoh protein
  misc_feature: Homolog of GI Number: 45383506 NR Desc: mago
  misc_feature: Homolog of GI Number: 57472157 NR Desc: mago
  misc_feature: Homolog of GI Number: 57087953 NR Desc:  similar to Conserved oligomeric Golgi complex component 7
  misc_feature: Homolog of GI Number: 61838147 NR Desc:  similar to mago
  misc_feature: Useful for making shorter plants
  misc_feature: Useful for making stronger plants
MAAVGGAGNGAGEEAGGAEFYLRYYVGHKGKFGHEFLEFEFRPDGKLRYANNSNYKNDTMIRKEVFVSPSVLREARRIIQDSEIMKEDDSNWPEPDRVGRQELEIVMGNEHISFTTSKIGSLVDVQTSKDPEGLRIFYYLVQDLKCFVFSLINLHFKIKPIQL

SEQ ID NO: 4215 - DNA, 714 bp, Triticum aestivum
  misc_feature: Ceres CLONE ID no. 864963
  misc_feature: Ceres CDNA ID no. 40351438
  CDS (98)..(466): REFERENCED BY SEQ ID NO: 4216
accaaacaataagcaagaatttccattgcatgcaaagcaaatacgcattatattactagttttaatttgttttgtcgtttgcttctttctttgattaatgatggctagctttaaggttgcatgtgtggttgcgatgatgtgcatggttgtggccatgagtgttacacccatggcacaggccgcaatcacgtgcgggcaggtcgccggcgacgtgtctccgtgcctcagttatcttcgaagcggcggaaaaccgtcggacgcctgctgcaacggagtgaagtcgctcagcggcgcggcgaagaccaccgccgaccgccaggcagcgtgcaattgcctgaaaaaccttgccaataatatgggacagagtttgaatgccggcaacgcagcctctctccctggcaaatgtggcgtcaacatcccttacaagatcagcacctccaccaactgcgccaccatcaagttctgaagggtggatctagtataaggaagaaactgcagggcagtttttcagtcgcaggatactatatatcataatgttgtaaaatttatattaatgaaaataaagagagggcgatgagggctctagtacttaagcgagtcccttagttttctccgcttgttgttgcatgtaatactatatgtagttctctgctactttacttttttgacaattaataatatttacacgtcccttaattgaaaaaaaaaaaaaaa

SEQ ID NO: 4216 - protein, 121 aa, Triticum aestivum
  misc_feature: Ceres CLONE ID no. 864963
  misc_feature: Ceres CDNA ID no. 40351438
  misc_feature (31)..(116): Pfam Name: Tryp_alpha_amyl PFAM Desc: Protease inhibitor/seed storage/LTP family
MASFKVACVVAMMCMVVAMSVTPMAQAAITCGQVAGDVSPCLSYLRSGGKPSDACCNGVKSLSGAAKTTADRQAACNCLKNLANNMGQSLNAGNAASLPGKCGVNIPYKISTSTNCATIKF

SEQ ID NO: 4217 - DNA, 867 bp, Triticum aestivum
  misc_feature: Ceres CLONE ID no. 865251
  misc_feature: Ceres CDNA ID no. 25446244
  CDS (187)..(612): REFERENCED BY SEQ ID NO: 4218
acaaatttagtactcgtatttacttgcaccccacttttcccccattccccttcccttccgtccgtcgccgggatcggatcgcgccgctcttctccggcaggcgcggatcgccgatcgacagccggtcggcaagcagcatcggttggcaggccgtcttaggggagcaagaagaagagggatcgaccgatggggcggctgttcctgaccagcctggcgccggcgaccggcaccatctactgctgcaagcactgcgactcccacctcgcctacgcccagcacatcatctccaagatgttccgctgcaagcacggcaaggcctacctcttcgacaaggtcgtgaacgtggtcgccggggagagcgaggacgaccggatgatgaccacgggcctgcacaccgtccgcgacatcttctgcgtcgcctgcggagccatcctcggctggaaatacgtgtctgcatttgagaaggatcagaggtataaggagggcaagttcatcctggagaggtgcaagatccattcgggcggaggcggccctcctgaccgcatccagctgtgggctgagcatgacgctcgcataagttccagcgaggatgacgaccagggcgccgtgtgaccttgcaagacaatgcaagatcagttcattaggcaggcagacatgacatgactgtaaatattagtgttaatcagcgtcgttccgttccctggcactgcaaatcatgtagctgctcgctagatgaagaaccatgaatgcttatctatctatgcatatgcaaccgtatgaaccagactagttgtcgttcatgtacatataagaatgtgtctccaccaaaataaaatctttgtcagtttagtaaaaaaaaaaaaaaaa

SEQ ID NO: 4218 - protein, 141 aa, Triticum aestivum
  misc_feature: Ceres CLONE ID no. 865251
  misc_feature: Ceres CDNA ID no. 25446244
  misc_feature (1)..(112): Pfam Name: Yippee PFAM Desc: Yippee putative zinc
  misc_feature: Homolog of GI Number: 24745964 NR Desc: yippee
  misc_feature: Homolog of GI Number: 50917987 NR Desc: putative zinc binding protein
  misc_feature: Homolog of GI Number: 42563852 NR Desc: yippee family protein
  misc_feature: Homolog of GI Number: 21617953 NR Desc: yippee
  misc_feature: Homolog of GI Number: 42571143 NR Desc: yippee family protein
  misc_feature: Homolog of GI Number: 5923664 NR Desc: Yippee
  misc_feature: Homolog of GI Number: 20259293 NR Desc: putative Yippee protein
  misc_feature: Homolog of GI Number: 21554253 NR Desc: zinc
  misc_feature: Homolog of GI Number: 61866914 NR Desc:  similar to yippee
  misc_feature: Homolog of GI Number: 34859218 NR Desc: similar to RIKEN cDNA 0610043B10 gene
  misc_feature: Useful for delaying flowering time
  misc_feature: Useful for increasing chlorophyll and photosynthetic capacity
  misc_feature: Useful for making ornamental plants with modified leaves
  misc_feature: Useful for making plants with increased biomass and foliage
MGRLFLTSLAPATGTIYCCKHCDSHLAYAQHIISKMFRCKHGKAYLFDKVVNVVAGESEDDRMMTTGLHTVRDIFCVACGAILGWKYVSAFEKDQRYKEGKFILERCKIHSGGGGPPDRIQLWAEHDARISSSEDDDQGAV

SEQ ID NO: 4219 - DNA, 719 bp, Zea mays
  misc_feature: Ceres CLONE ID no. 865334
  misc_feature: Ceres CDNA ID no. 40351439
  CDS (261)..(404): REFERENCED BY SEQ ID NO: 4220
ccaggggtaaaaatcttgattttttgtcagaataaatagtttcatatcctttgctgctcgacagttgagcattgtacttgcatatagaatttcattttgttaggggtatacctcaacatcgttggcttgttatctggtgtgcttttaatgttttgttcctatggaatcaatgatcttttttcttagttcaagttttcgactgggtgcaggcagttaaagaaatacttgaagagaagacaaggaaacgatctagtccatgtatgaacggcgctagttttaccttggagaagtcaaatatgcacaacgagttacacgcagctctccaagaagctgcggtgctgatgtctgaacagcagcaggctgatccggcgaacggcagtggcggtgatatttgctcggcataggtacctcacagtgaagctgaagcagtcgaacgccaaactgaagtttgtggcaaaataaccagcactgcagtcctgaactcctgatctcacattgagatctgtaaacatggtgccaacaagtggaggaagtttgtacatacgctctctccggcctttacactactattctgctggcaaggccgtcagggatcgtttctaccttgctatcgctgacgaggaaatgaagacaactgaacagttgagctgtggcgcttgcacgcaccatgttttctccgctgaacaagtgcgcatttttgagcaaaaaaaaaaaaaaaa

SEQ ID NO: 4220 - protein, 47 aa, Zea mays
  misc_feature: Ceres CLONE ID no. 865334
  misc_feature: Ceres CDNA ID no. 40351439
MNGASFTLEKSNMHNELHAALQEAAVLMSEQQQADPANGSGGDICSA

SEQ ID NO: 4221 - DNA, 672 bp, Zea mays
  misc_feature: Ceres CLONE ID no. 865683
  misc_feature: Ceres CDNA ID no. 29191507
  CDS (169)..(507): REFERENCED BY SEQ ID NO: 4222
gaaactgagcacttgaccccgaaccctaattcaagctactgtatttggctatctatatccggatctgatccaatcacaagcgcaagtgtctgcacgtatcgtccctgctaatttcgttctttatatcctttgttggatccgccgctgcctcctgcattccattccaggatgacgacgctcaggaacctcaagatcaagacgtcgacgtgcaagaggatcgtgaaggagctgcgctcgtacgagaaggaggtggagaaggaggctgccaagaccgccgacatgaaggagaagggcgccgatccctacgacctcaaacagcaggagaatgttttggctgagtcaaggatgatggtcccagactgccacaaacgacttgaaactgcactggctgacttgaaagcaacactggctgaactgaaggagtcaaatgagcaaggtgccgagattggagaagctgagagtacaatcgcagaagttgaagcagttgtcaagccagcagaagattaaactaaaaaaaactcttggtttgctgaactgttagcgcacatcctattttctcatattcagcccttgtgagcttattacgatatgtttgaggcgtcaaatcctgtaccattatcatcacttctgtcttgaaatttgagttttatgttcccaaaaaaaaaaaaaaaa

SEQ ID NO: 4222 - protein, 112 aa, Zea mays
  misc_feature: Ceres CLONE ID no. 865683
  misc_feature: Ceres CDNA ID no. 29191507
  misc_feature (6)..(99): Pfam Name: TBCA PFAM Desc: Tubulin binding cofactor A
  misc_feature: Homolog of GI Number: 50915868 NR Desc: putative tubulin folding cofactor A
  misc_feature: Homolog of GI Number: 20259135 NR Desc: putative TCP1
  misc_feature: Homolog of GI Number: 50915870 NR Desc: putative tubulin folding cofactor A
  misc_feature: Homolog of GI Number: 25408070 NR Desc: probable TCP1
  misc_feature: Homolog of GI Number: 49522853 NR Desc: MGC82305 protein
  misc_feature: Homolog of GI Number: 1711660 NR Desc: Tubulin
  misc_feature: Homolog of GI Number: 50755280 NR Desc:  similar to Tubulin
  misc_feature: Homolog of GI Number: 66510581 NR Desc:  similar to beta
  misc_feature: Homolog of GI Number: 30585151 NR Desc: Homo sapiens tubulin
  misc_feature: Homolog of GI Number: 30583547 NR Desc: tubulin
MTTLRNLKIKTSTCKRIVKELRSYEKEVEKEAAKTADMKEKGADPYDLKQQENVLAESRMMVPDCHKRLETALADLKATLAELKESNEQGAEIGEAESTIAEVEAVVKPAED

SEQ ID NO: 4223 - DNA, 1007 bp, Zea mays
  misc_feature: Ceres CLONE ID no. 865719
  misc_feature: Ceres CDNA ID no. 40351440
  CDS (158)..(829): REFERENCED BY SEQ ID NO: 4224
acagccgtctcggtggcataagaacacaagaaattgtgttaattaatcaaagctataaataacgctcgcatgcctgtgcacttctccatcaccaccactgggtcttcagaccattagctttatctactccagagcgcagaagaacccgatcgacaccatgagggtgttgctcgttgccctcgctctcctggctctcgctgcgagcgccacctccacgcatacaagcggcggctgcggctgccagccaccgccgccggttcatctaccgccgccggtgcatctgccacctccggttcacctgccacctccggtgcatctcccaccgccggtccacctgccgccgccggtccacctgccaccgccggtccatgtgccgccgccggttcatctgccgccgccaccatgccactaccctactcaaccgccccggcctcagcctcatccccagccacacccatgcccgtgccaacagccgcatccaagcccgtgccagctgcagggaacctgcggcgttggcagcaccccgatcctgggccagtgcgtcgagtttctgaggcatcagtgcagcccgacggcgacgccctactgctcgcctcagtgccagtcgttgcggcagcagtgttgccagcagctcaggcaggtggagccgcagcaccggtaccaggcgatcttcggcttggtcctccagtccatcctgcagcagcagccgcaaagcggccaggtcgcggggctgttggcggcgcagatagcgcagcaactgacggcgatgtgcggcctgcagcagccgactccatgcccctacgctgctgccggcggtgtcccccactgaagaaactatgtgctgtagtatagccgctggctagctagctagttgagtcatttagcggcgatgattgagtaataatgtgtcacgcatcaccatgggtggcagtgtcagtgtgagcaatgacctgaatgaacaattgaaatgaaaagaaaaaagtattgttccaaaaaaaaaaaaaaaa

SEQ ID NO: 4224 - protein, 223 aa, Zea mays
  misc_feature: Ceres CLONE ID no. 865719
  misc_feature: Ceres CDNA ID no. 40351440
  misc_feature (128)..(213): Pfam Name: Tryp_alpha_amyl PFAM Desc: Protease inhibitor/seed storage/LTP family
MRVLLVALALLALAASATSTHTSGGCGCQPPPPVHLPPPVHLPPPVHLPPPVHLPPPVHLPPPVHLPPPVHVPPPVHLPPPPCHYPTQPPRPQPHPQPHPCPCQQPHPSPCQLQGTCGVGSTPILGQCVEFLRHQCSPTATPYCSPQCQSLRQQCCQQLRQVEPQHRYQAIFGLVLQSILQQQPQSGQVAGLLAAQIAQQLTAMCGLQQPTPCPYAAAGGVPH

SEQ ID NO: 4225 - DNA, 756 bp, Triticum aestivum
  misc_feature: Ceres CLONE ID no. 866466
  misc_feature: Ceres CDNA ID no. 40351441
  CDS (84)..(365): REFERENCED BY SEQ ID NO: 4226
acaccaaatactctcaacctttcactcccgtcgcaccaaaggcatcaacgaactgccaagttagctacacgcaggaacgcacgatggcctgcgccttcttcttcgacgccgagccggtcggcgagcccggcgtgcacgccctggacgcgtgcgcgctctgcaccaagccgctggcgcgggacagcgacatcttcatgtacagaggagacacgcccttttgcagcgacgagtgccgccaggagcagatgcagctcgacgccgcctgcgccaggcaggcggccgcccggaggcagaagcagttttcttcgggaacggagtccgggcgcgcacgccgggagtcatgggaggtttccgtcgcgagctaacgggtgtcagtgccaagctgcctacgcacttgagtcaacaagatctgcgtacacggagacgccgtcgcccgtgaccaactgataagcgcgggatcgacgagactcgccctggttgaagaagcaagaggcgggtcgtcggagttgctcacggcaggccggcatgcacgggccgccggtcaagtgatttgggcataaacgcagcggaaaggggctggactggatctgagcaagtcaatcaaacaggattctccacggccttagccggccatgcgtgcccctcgcctctccttttttttcctgcgttaatgtcagttctgtatgagagcgaatttgcaacggcacttgcactgggttcgtgcaatcccgtttctgtccaaaaaaaaaaaaaaaa

SEQ ID NO: 4226 - protein, 93 aa, Triticum aestivum
  misc_feature: Ceres CLONE ID no. 866466
  misc_feature: Ceres CDNA ID no. 40351441
MACAFFFDAEPVGEPGVHALDACALCTKPLARDSDIFMYRGDTPFCSDECRQEQMQLDAACARQAAARRQKQFSSGTESGRARRESWEVSVAS

SEQ ID NO: 4227 - DNA, 625 bp, Triticum aestivum
  misc_feature: Ceres CLONE ID no. 866716
  misc_feature: Ceres CDNA ID no. 36707421
  CDS (125)..(427): REFERENCED BY SEQ ID NO: 4228
gagagtgttccttcctgagcttgcggcggcagaggttctcgatttctagggcaaactcctcgctccggttccccctcggtccgcgcgctcgaggcgagagcaggtcgtcggaggagcatccgggatggcggggcgcaaggagacggcgctcgacctggccaagttcgtcgacaagggcgtccaggtcaagctcaccggcggccgccaagttacaggaaccttgaagggatatgaccagctgctcaacttagtgctggatgaagcagtcgagtctgaaagagagcaagatgacccgttgaagctgtcaaccaagaccagacaacttggtctcattgtgtgcagaggcactgctgtcatgctggtgtcaccaactgatggaaccgacgagattgccaaccccttcctcgcagcggagggggcgtcataagctttatactgggcaattgggtcagagctgtattactcaagcatgtgccgaaagagcttctgttcttttggaaaaaactaattgtacccgtgtttgacatgtgctgatgaacttgtaatttgtatcgagctgcttaaaacatccttccatagcagccatggttgcatgtatcttcattgctgaaaaaaaaaaaaaaaa

SEQ ID NO: 4228 - protein, 100 aa, Triticum aestivum
  misc_feature: Ceres CLONE ID no. 866716
  misc_feature: Ceres CDNA ID no. 36707421
  misc_feature: The plant flowers significantly late compared to wild-type.
  misc_feature: The plant senesces significantly late copared to wild-type.
  misc_feature: Useful for making plants with modulated flowering time
  misc_feature: Useful for making plants with modulated time to senescence
  misc_feature (9)..(82): Pfam Name: LSM PFAM Desc: LSM domain
  misc_feature: Homolog of GI Number: 50941651 NR Desc: putative snRNP splicing factor
  misc_feature: Homolog of GI Number: 4582434 NR Desc: putative snRNP splicing factor
  misc_feature: Homolog of GI Number: 72131952 NR Desc:  similar to LSM7 homolog
  misc_feature: Homolog of GI Number: 55237563 NR Desc: ENSANGP00000010565
  misc_feature: Homolog of GI Number: 20129565 NR Desc: CG13277
  misc_feature: Homolog of GI Number: 73987505 NR Desc:  similar to U6 snRNA
  misc_feature: Homolog of GI Number: 7706423 NR Desc: U6 snRNA
  misc_feature: Homolog of GI Number: 54644863 NR Desc: GA12164
  misc_feature: Homolog of GI Number: 55647895 NR Desc:  similar to U6 snRNA
  misc_feature: Homolog of GI Number: 49522817 NR Desc: MGC83430 protein
MAGRKETALDLAKFVDKGVQVKLTGGRQVTGTLKGYDQLLNLVLDEAVESEREQDDPLKLSTKTRQLGLIVCRGTAVMLVSPTDGTDEIANPFLAAEGAS

SEQ ID NO: 4229 - DNA, 1036 bp, Triticum aestivum
  misc_feature: Ceres CLONE ID no. 867201
  misc_feature: Ceres CDNA ID no. 40041352
  CDS (78)..(800): REFERENCED BY SEQ ID NO: 4230
cccaatcccaatccaatctcatcgccaagcaattactccagcactccagccctccccaccagcgtgacctcggcagtatggcgagcccgcagtgctgcgcgaacccaccggcgctcaatcccgccgccggcgagggcaaggtcgtggacagcttcggcgggatcaaggcgtacgtcgccggcgccaaagagtcgaaggccgccgtcgtcctcatctccgacgtctacgggtttgaagcgccgaatctgaggaagatagccgataaagttgcttcgtctggatattttgttgtggtgccagatttcttacatggggatccatttgtacctgaagacgctgacagaccaatagcagtgtggataaaggagcataccccgggaaaagcatttgaagaggcaaaacctgttattgctgctctaaaggaacaaggagcgtctagcgttggggctgcaggttattgctggggtgcaaaggtagttgcagagttagcgaaagctaatgagatccaggcagccgttatgtcgcacccttcatttgttactgtcaatgatatagaagaggtgaaatgccccatcgctatacttggagctgaaactgacgtaatgtccccaccagaattggtcaagaagttcgagcaggttctatcctctaactcagggattgctcactttgtcaagatattccctggggtttctcatggatggaccgtgagatacaaaagcgaagacgcagctgctgtgaagagcgccgaggaagccctggcggacatgattgactggttcaacaagaacctcaagtgaacctaatgaattggcggccatccttttgtaataagccagtgtcactcttcaggagtcaccacgcgagcatccacggtttatgttatggtcttagctatagcctatagggcatgcgtctttgtctgctgcaggtctgctggtatgtgtgtgcttgctcattttggggtctgcttgtgctgaacactgaaactattgcactcagataaaatgtggtatttgcaaaaaaaaaaaaaaaa

SEQ ID NO: 4230 - protein, 240 aa, Triticum aestivum
  misc_feature: Ceres CLONE ID no. 867201
  misc_feature: Ceres CDNA ID no. 40041352
  misc_feature (29)..(239): Pfam Name: DLH PFAM Desc: Dienelactone hydrolase family
  misc_feature: Homolog of GI Number: 51854423 NR Desc: 'putative endo
  misc_feature: Homolog of GI Number: 51854424 NR Desc: 'putative endo
  misc_feature: Homolog of GI Number: 21536848 NR Desc: contains similarity to endo
  misc_feature: Homolog of GI Number: 79313339 NR Desc: hydrolase
  misc_feature: Homolog of GI Number: 51854432 NR Desc: 'putative endo
  misc_feature: Homolog of GI Number: 51964778 NR Desc: PREDICTED P0682A06.39 gene product
  misc_feature: Homolog of GI Number: 51979655 NR Desc: PREDICTED P0682A06.39 gene product
  misc_feature: Homolog of GI Number: 50942701 NR Desc: putative Endo
  misc_feature: Homolog of GI Number: 62701771 NR Desc: Dienelactone hydrolase family
  misc_feature: Homolog of GI Number: 3822036 NR Desc: endo
MASPQCCANPPALNPAAGEGKVVDSFGGIKAYVAGAKESKAAVVLISDVYGFEAPNLRKIADKVASSGYFVVVPDFLHGDPFVPEDADRPIAVWIKEHTPGKAFEEAKPVIAALKEQGASSVGAAGYCWGAKVVAELAKANEIQAAVMSHPSFVTVNDIEEVKCPIAILGAETDVMSPPELVKKFEQVLSSNSGIAHFVKIFPGVSHGWTVRYKSEDAAAVKSAEEALADMIDWFNKNLK

SEQ ID NO: 4231 - DNA, 675 bp, Triticum aestivum
  misc_feature: Ceres CLONE ID no. 867367
  misc_feature: Ceres CDNA ID no. 40351442
  CDS (101)..(367): REFERENCED BY SEQ ID NO: 4232
gttctcgcggtattctattccttgatccggttccgtcgtgggttccgacaaatcgggctattcttagatctgtttagaaccgtgccgtctgttaatagcaatgcgtcgaaaccgaagttattttcgcgtacaaattcgtcaagataaggtcctggagctggccggaaacgccgccagggacaacaagaagacccgtatcgtgccgcgccacatccagctcgccgtgcgcaatgacgaggagctgaccaagttgctcggcggcgccaccatcgccagcggcggtgtgatgcccaacatccaccagcacctcctccccaagaaggcctcttcctccaaggcgtccaccgtcgatgacgacgacaactgaggccctgtcctttccctcgctgccaccgcccgcaccatggattacatttgcatcacaaagacgaaggagtttcttgtttcgtaggatttagtgtcttggttttcaggagagtcccggatggtatggtattaggagaatttctagttggtggtcggattggttgctttcatcccatggctgtgaatatggcaaacaaattttcgggtgttcaaactcagatgtaaggctgcttgatcttgtccggtttccatggttgaagaaattgaaaggaactcaactttaagctattaccaaaaaaaaaaaaaaaa

SEQ ID NO: 4232 - protein, 88 aa, Triticum aestivum
  misc_feature: Ceres CLONE ID no. 867367
  misc_feature: Ceres CDNA ID no. 40351442
  misc_feature (16)..(47): Pfam Name: Histone PFAM Desc: Core histone H2A/H2B/H3/H4
MRRNRSYFRVQIRQDKVLELAGNAARDNKKTRIVPRHIQLAVRNDEELTKLLGGATIASGGVMPNIHQHLLPKKASSSKASTVDDDDN

SEQ ID NO: 4233 - DNA, 770 bp, Triticum aestivum
  misc_feature: Ceres CLONE ID no. 867605
  misc_feature: Ceres CDNA ID no. 36706285
  CDS (80)..(538): REFERENCED BY SEQ ID NO: 4234
aaaaaccttagacgcgaacgccctcctcctcccctcctgcccccgagcgccgccgccgccgccgccgccgactgcagccatgtcgctgatcgcgggtgaggagttccagcacatcctgcgtgtgctcaacaccaacgtcgacggtaagcagaagatcatgttcgcgctgacctccatcaagggtgtgggccgccgcttctccaacatcgtctgcaagaaggccgacatcgacatgaacaagagggccggagagctttcctcggaggagatggaccgcctgatggcggtggtgcacaacccgcgccagttcaaggtgccggactggttcctcaacaggaagaaggactacaaggacggcaggttctcccaggtcgtgtccaacgccgtggacatgaagctcagggatgaccttgagaggctcaagaagatcaggaaccatcgtggtctgcgtcactactggggcgtgcgtgtccgtggtcagcacaccaagactaccggcaggagaggaaagactgttggtgtctccaagaagcgataagctgcttcacaacgatcccccatagcttttctactactgtgttggtccatttccagaatcttaaggagtgttcttgtttagacgattaccttggatgatgttttgccctagataatgtctttgttctggaacctttaatatattgtatcttgaattccttcttgaactctttgagagtttgttttgccatgggctttagtcatttcaatggttggcaaaaaaaaaaaaaaaa

SEQ ID NO: 4234 - protein, 152 aa, Triticum aestivum
  misc_feature: Ceres CLONE ID no. 867605
  misc_feature: Ceres CDNA ID no. 36706285
  misc_feature (14)..(142): Pfam Name: Ribosomal_S13 PFAM Desc: Ribosomal protein S13/S18
  misc_feature: Homolog of GI Number: 22204120 NR Desc: putative ribosomal protein S18
  misc_feature: Homolog of GI Number: 50919149 NR Desc: putative ribosomal protein S18A
  misc_feature: Homolog of GI Number: 50934523 NR Desc: putative ribosomal protein S18
  misc_feature: Homolog of GI Number: 56236126 NR Desc: At1g22780
  misc_feature: Homolog of GI Number: 17978783 NR Desc: S18.A ribosomal protein
  misc_feature: Homolog of GI Number: 40287492 NR Desc: putative ribosomal protein
  misc_feature: Homolog of GI Number: 24266988 NR Desc: ribosomal protein S18
  misc_feature: Homolog of GI Number: 67083901 NR Desc: ribosomal protein S18
  misc_feature: Homolog of GI Number: 71040621 NR Desc: ribosomal protein S18
MSLIAGEEFQHILRVLNTNVDGKQKIMFALTSIKGVGRRFSNIVCKKADIDMNKRAGELSSEEMDRLMAVVHNPRQFKVPDWFLNRKKDYKDGRFSQVVSNAVDMKLRDDLERLKKIRNHRGLRHYWGVRVRGQHTKTTGRRGKTVGVSKKR

SEQ ID NO: 4235 - DNA, 699 bp, Triticum aestivum
  misc_feature: Ceres CLONE ID no. 867849
  misc_feature: Ceres CDNA ID no. 35383306
  CDS (92)..(493): REFERENCED BY SEQ ID NO: 4236
aaaaatcgcagttcgcaacagttcaatacacttactgacttacacgaccacacgtataatctgtagatcgatcgctgttcgtaccaccacaatggagtaccaggggcagcacggccacgccaccgacaaggtggaggagtacggccagcctgtggccgggcacggcggtttcaccggcaggcccacggggacgcacggcgcgcagctccaggcgacgagggacgaccacaagaccgacggcgtccttcgccgctccggcagctccagctccagctcgtccgaggacgacggcgtgggcggcaggaggaagaaggggatgaaggagaagatcaaggagaagctccccggcggagcccacaaggacgccaccgccgggcagcagcacacggcggtggcgggcgagtacgcgggcacgcacggcaccgaggccaccggcgagaagaagggcgtcatggacaagatcaaggagaagcttcccggcggacagcactgaggcagctatgtgtgtcttctctgtgttccgtccaagctcggcttggctagcatctgcagggatgccgttactagggataaataatggactctggtatacctcgtgtgcacgagcgcgcccgcgtgacgcatttgtgtgttcgtatggtatgatgtgtgtacatcgtaataaaaacgtttatttgtgttttaaaaaaaaaaaaaaaa

SEQ ID NO: 4236 - protein, 133 aa, Triticum aestivum
  misc_feature: Ceres CLONE ID no. 867849
  misc_feature: Ceres CDNA ID no. 35383306
  misc_feature (11)..(133): Pfam Name: Dehydrin PFAM Desc: Dehydrin
  misc_feature: Homolog of GI Number: 18966 NR Desc: dehydrin
  misc_feature: Homolog of GI Number: 296198 NR Desc: dehydrin 7
  misc_feature: Homolog of GI Number: 6017930 NR Desc: dehydrin
  misc_feature: Homolog of GI Number: 18968 NR Desc: dehydrin
  misc_feature: Homolog of GI Number: 4105105 NR Desc: dehydrin 2
  misc_feature: Homolog of GI Number: 1771076 NR Desc: dehydrin
  misc_feature: Homolog of GI Number: 59894261 NR Desc: dehydrin 1
  misc_feature: Homolog of GI Number: 59894275 NR Desc: dehydrin 1
  misc_feature: Homolog of GI Number: 59894281 NR Desc: dehydrin 1
  misc_feature: Homolog of GI Number: 59894257 NR Desc: dehydrin 1
MEYQGQHGHATDKVEEYGQPVAGHGGFTGRPTGTHGAQLQATRDDHKTDGVLRRSGSSSSSSSEDDGVGGRRKKGMKEKIKEKLPGGAHKDATAGQQHTAVAGEYAGTHGTEATGEKKGVMDKIKEKLPGGQH

SEQ ID NO: 4237 - DNA, 729 bp, Triticum aestivum
  misc_feature: Ceres CLONE ID no. 868028
  misc_feature: Ceres CDNA ID no. 25891752
  CDS (77)..(541): REFERENCED BY SEQ ID NO: 4238
acatctcgctccaccttcccctgcacacaacccaccaccggaatccccacccgccctctcgaagcagcagctagcgatggcccccaaggcggcggagaagaagccggcggcgaagaagcccgcggaggaggagccggcgacggagaaggccccggccgggaagaagcccaaggccgagaagcggctgccggcggccaagacggcggccaaggagggcgaaggcaagacgaggggccggaagaagggcggcaaggccaagaagggcgtggagacgtacaagatctacatcttcaaggtgctgaagcaggtgcacccggacgtcggcatctcctccaaggccatgtccatcatgaactccttcatcaacgacatcttcgagaagctcgccggcgaggccgccaagctcgcccgctacaacaagaagcccaccatcacctcccgggaggtccagacctccgtccgcctcgtcctccccggcgagctcgccaagcacgccgtctccgagggcaccaaggccgtcaccaagttcacctcctcgtagattctattctttgtagaaatgtagatggttctgttacttttagtggttgttgactctggttatctgcaaatcgttcaagtaatagtcatggatggaagttgctgaatgatttcccagaactgaatctctgatgctttttggcaaacggaagctaagtaatttctgatggttcaaaaaaaaaaaaaaaa

SEQ ID NO: 4238 - protein, 154 aa, Triticum aestivum
  misc_feature: Ceres CLONE ID no. 868028
  misc_feature: Ceres CDNA ID no. 25891752
  misc_feature: No seed is being produced by the plant
  misc_feature: The plant flowers significantly late compared to wild-type.
  misc_feature: Useful for biocontainment applications
  misc_feature: Useful for making plants with modulated flowering time
  misc_feature (61)..(133): Pfam Name: Histone PFAM Desc: Core histone H2A/H2B/H3/H4
  misc_feature: Homolog of GI Number: 22325 NR Desc: H2B histone
  misc_feature: Homolog of GI Number: 21801 NR Desc: histone H2B
  misc_feature: Homolog of GI Number: 577825 NR Desc: H2B histone
  misc_feature: Homolog of GI Number: 34895838 NR Desc: putative histone H2B
  misc_feature: Homolog of GI Number: 34895900 NR Desc: putative histone H2B
  misc_feature: Homolog of GI Number: 122033 NR Desc: Histone H2B.2
  misc_feature: Homolog of GI Number: 34895896 NR Desc: putative histone H2B
  misc_feature: Homolog of GI Number: 34895832 NR Desc: putative histone H2B
  misc_feature: Homolog of GI Number: 34895904 NR Desc: putative histone H2B
  misc_feature: Homolog of GI Number: 34895888 NR Desc: putative histone H2B
MAPKAAEKKPAAKKPAEEEPATEKAPAGKKPKAEKRLPAAKTAAKEGEGKTRGRKKGGKAKKGVETYKIYIFKVLKQVHPDVGISSKAMSIMNSFINDIFEKLAGEAAKLARYNKKPTITSREVQTSVRLVLPGELAKHAVSEGTKAVTKFTSS

SEQ ID NO: 4239 - DNA, 738 bp, Triticum aestivum
  misc_feature: Ceres CLONE ID no. 868154
  misc_feature: Ceres CDNA ID no. 25891753
  CDS (43)..(558): REFERENCED BY SEQ ID NO: 4240
aaaaaaccaacaataccacagcaatcaagaaagcaagaaacaatggccgtctcctcgtcggcgctcatcctcctccttgccgcggccctcaccacgggggctagcgccaggagcttctccatcacgaaccgctgctccttcactgtgtggccggcggccaccccggtgggcggcggacggcagctcaacaacggccaaacttggaacctcgacatccccgacggcaccagctccgccaggatctggggccgcaccggctgcagcttcaacggcaacagcgggagatgcagcaccggcgactgtggcggcgcgctctcctgcaccctctccggccagcccccgctgactttggcggagttcaccctcggtggcggcacagactactacgacatctcggtgatcgacgggtacaacctccccatggacttctcctgcagcaccggcgtcaacatccagtgccgcgactccagctgccccgacgcctaccaccagcccaacgacgtcaggaccaaagcttgcagcggtaacaggaggttcagtatagtcttctgcccatgatgggctagtatagctctaccatacgcatacgcatgcgtgccgtggcacggacggaccagatatacgaccataatatttgtacttccattttccatgtaataatggccccggccgcggatatatacgtgtacgagtggccaataaagtccataaataaaggtaagaaaaaaaaaaaaaaaa

SEQ ID NO: 4240 - protein, 171 aa, Triticum aestivum
  misc_feature: Ceres CLONE ID no. 868154
  misc_feature: Ceres CDNA ID no. 25891753
  misc_feature (29)..(130): Pfam Name: Thaumatin PFAM Desc: Thaumatin family
  misc_feature: Homolog of GI Number: 56090131 NR Desc: thaumatin
  misc_feature: Homolog of GI Number: 75994013 NR Desc: pathogenesis
  misc_feature: Homolog of GI Number: 75993993 NR Desc: pathogenesis
  misc_feature: Homolog of GI Number: 3290006 NR Desc: pathogenesis related protein
  misc_feature: Homolog of GI Number: 444344 NR Desc: thaumatin
  misc_feature: Homolog of GI Number: 75994017 NR Desc: pathogenesis
  misc_feature: Homolog of GI Number: 75994007 NR Desc: pathogenesis
  misc_feature: Homolog of GI Number: 662353 NR Desc: thaumatin
  misc_feature: Homolog of GI Number: 75994023 NR Desc: pathogenesis
  misc_feature: Homolog of GI Number: 75994019 NR Desc: pathogenesis
  misc_feature: Utility: Seed Bleaching Useful for making low fiber seeds with increased digestability
MAVSSSALILLLAAALTTGASARSFSITNRCSFTVWPAATPVGGGRQLNNGQTWNLDIPDGTSSARIWGRTGCSFNGNSGRCSTGDCGGALSCTLSGQPPLTLAEFTLGGGTDYYDISVIDGYNLPMDFSCSTGVNIQCRDSSCPDAYHQPNDVRTKACSGNRRFSIVFCP

SEQ ID NO: 4241 - DNA, 1198 bp, Triticum aestivum
  misc_feature: Ceres CLONE ID no. 868545
  misc_feature: Ceres CDNA ID no. 36705914
  CDS (102)..(1022): REFERENCED BY SEQ ID NO: 4242
gaagcgatttcgcacttggcctcttcctccctccgctgcgccccactccgcctccgccaaaccgcaagctagggtttccgcctcgacgcggagggctcgccatggatgccgccgcccgcaagagatcccggccggagtccgccaacggaggcgccgcaggcgggaagcgctcgagagaatcggagtcacaacaaactggtctatcaagcaaatcgaagccttgcaccaagtttttcagcactgttgggtgcccctttggtgagggctgtcacttcgcgcactttgtccctggtggataccaggcagtatcaaaatcacacagcctaggccatgctgctgtgtctgcaccgtcaagagctccagcggaccatgctgcttctggtgtcaaaacacgcatgtgcaccaagtacaacactgcagaaggctgcaagtttggtgacaagtgccatttcgcccacggcgagagggagcttggcaggccaccatcctcctacatgtcccaagaaagttcctatgctcctcctatgggtggtcgatatggaggtcgacacgaaccacctctgccagcttcgatgggtcctcctgctggaaactttggcgcctcgtctacctgcaaggtcagtgttgacgccgctctcgccggaggcataatcgggaagggcggggtcaacacgaagcagatctgccgcatcacaggggtcaagctctcgatacgtgaccacgaatcaaacccagacctgaagaacattgagctggaaggcagcttcgaccagataaagcaagccaacgacatggtgcgtgatctcattgccagcatcagcgccagcactccgtcgaagaacccagccagcgcagcagcccccgcaggccgaggcggtggcggcggcgggggcgggcctggaggcaggagcaactacaagaccaagatatgcgagaacttcctcaagggcacctgcactttcggcgagcgctgccacttcgcccatggcgagaccgagcagcggaagggtgccgccgtctgatgacaccgctgctgcggttgatcctcgctccttcttgtgctgctactgtgactattctgttctcccttgctgctggctctaggtgattaggcctgttgtattttggttctatggattgtgataagattcagcttttttgaatgaaatatggttcagaactaaaaaaaaaaaaaaaa

SEQ ID NO: 4242 - protein, 306 aa, Triticum aestivum
  misc_feature: Ceres CLONE ID no. 868545
  misc_feature: Ceres CDNA ID no. 36705914
  misc_feature (170)..(232): Pfam Name: KH_1 PFAM Desc: KH domain
  misc_feature (36)..(62): Pfam Name: zf PFAM Desc: Zinc finger C
  misc_feature: Homolog of GI Number: 50929447 NR Desc: OSJNBa0087O24.9
  misc_feature: Homolog of GI Number: 50905911 NR Desc: KH domain
  misc_feature: Homolog of GI Number: 51090454 NR Desc: KH domain
  misc_feature: Homolog of GI Number: 15292111 NR Desc: LD38872p
  misc_feature: Homolog of GI Number: 45551107 NR Desc: CG8912
  misc_feature: Homolog of GI Number: 17137136 NR Desc: CG8912
  misc_feature: Homolog of GI Number: 45552675 NR Desc: CG8912
  misc_feature: Homolog of GI Number: 56121890 NR Desc: At2g35430
  misc_feature: Homolog of GI Number: 91828 NR Desc: TPA
MDAAARKRSRPESANGGAAGGKRSRESESQQTGLSSKSKPCTKFFSTVGCPFGEGCHFAHFVPGGYQAVSKSHSLGHAAVSAPSRAPADHAASGVKTRMCTKYNTAEGCKFGDKCHFAHGERELGRPPSSYMSQESSYAPPMGGRYGGRHEPPLPASMGPPAGNFGASSTCKVSVDAALAGGIIGKGGVNTKQICRITGVKLSIRDHESNPDLKNIELEGSFDQIKQANDMVRDLIASISASTPSKNPASAAAPAGRGGGGGGGGPGGRSNYKTKICENFLKGTCTFGERCHFAHGETEQRKGAAV

SEQ ID NO: 4243 - DNA, 1009 bp, Triticum aestivum
  misc_feature: Ceres CLONE ID no. 868718
  misc_feature: Ceres CDNA ID no. 25892320
  CDS (338)..(754): REFERENCED BY SEQ ID NO: 4244
cctcctagctttccccaaactcccatacggcctcctgatccgccggcctctgctctgaatccggagatcgctgccaatccatttatttgctttcctgcatccggcgctcttcacctccgctaggcttggagaaatgggatgcggtgcaagatatgcttcttgagacagatgcttctttgatgcaagatttctagatcaaggttttagcagtcaaatatcttgcttccaagaagtaaccagacgagcagaagcagctgcatcaagcagttgagcttcgatttctccccccagtaatttccaaatacagctacagaaaggacactgctggattggatcaatgggtaggggaagaggcagaggaaggaagcccatcgccaatggcaggagccatgaagataaggtgagcagcggtgaagaggttgtgcctgcaaggaagaggagaggaaggccccaaaagcagcgcgcccccgacaaagtcgatctagcagaacccaagaactcggcagcgggtgttcatggcgatgtagaaggagacgacgcaaagctcaaggagaacgacgaccctgaaggcaatggcaacaagaggaacagggcgcccaaggaggagagctcgaacctcgacatggaagagaacagctcgagcacccggtccagcaacgacgagtcaacgacgacgaccaggtccagcggcttccggcagaacgggagccgccggaagagcacgccccggcgagccgcggaggcgggcctgtagctgccggaggaattaatggagcggcggcaacacgcgctcttggatggatatctgttaggcagctgctgctcttcagttttgtcaactttataaatttagtagcaatcttcgtcttcgtgtttacatggctctagctacatggatggatgtaaacatatactcattgcaaactattgaagttttgcttatggtgatgagaagagtgtggcgcgcttgaagttcacgattagctgttctacaaaaaaaaaaaaaaaa

SEQ ID NO: 4244 - protein, 138 aa, Triticum aestivum
  misc_feature: Ceres CLONE ID no. 868718
  misc_feature: Ceres CDNA ID no. 25892320
MGRGRGRGRKPIANGRSHEDKVSSGEEVVPARKRRGRPQKQRAPDKVDLAEPKNSAAGVHGDVEGDDAKLKENDDPEGNGNKRNRAPKEESSNLDMEENSSSTRSSNDESTTTTRSSGFRQNGSRRKSTPRRAAEAGL

SEQ ID NO: 4245 - DNA, 608 bp, Triticum aestivum
  misc_feature: Ceres CLONE ID no. 868942
  misc_feature: Ceres CDNA ID no. 36707514
  CDS (71)..(382): REFERENCED BY SEQ ID NO: 4246
atcaatctcatcgcccaccaccaaaacaatccaatccaatcccaccgtagagaggggagaagcgcggaggatgtcgggccgcggcaagggaggcaaggggctgggcaagggcggcgcgaagcgccaccggaaggtgctccgcgacaacatccagggcatcaccaagccggcgatccggcggctggcgcgcaggggcggcgtgaagcgcatctcggggctcatctacgaggagacccgcggcgtgctcaagatcttcctcgagaacgtcatccgcgacgccgtcacctacaccgagcacgcccgccgcaagaccgtcaccgccatggacgtcgtctacgcgctcaagcgccagggccgcaccctctacggcttcggaggctaggccgagggttcatcgatccagctcgcgacgccgccgtccgaccgagagtagtagtgctatctatctagttgctgtctagggttcgtggttctccgtgcaagagcagtggtatctccttggtgtttgctcccgtcttgtgagctgatgttgctgttgtagagatgtactggaagaagtttggaatggaaattgcagcagtttatccctgagaaaaaaaaaaaaaaaa

SEQ ID NO: 4246 - protein, 103 aa, Triticum aestivum; identical to SEQ ID NO: 8
  misc_feature: Ceres CLONE ID no. 868942
  misc_feature: Ceres CDNA ID no. 36707514
  misc_feature (66)..(92): Pfam Name: TAF PFAM Desc: TATA box binding protein associated factor
  misc_feature: Homolog of GI Number: 55667113 NR Desc:  similar to germinal histone H4 gene
  misc_feature: Homolog of GI Number: 57106967 NR Desc:  similar to germinal histone H4 gene
  misc_feature: Homolog of GI Number: 50729214 NR Desc:  similar to germinal histone H4 gene
  misc_feature: Homolog of GI Number: 74004215 NR Desc:  similar to germinal histone H4 gene
  misc_feature: Homolog of GI Number: 61820747 NR Desc:  similar to germinal histone H4 gene
  misc_feature: Homolog of GI Number: 62648434 NR Desc:  similar to germinal histone H4 gene
  misc_feature: Homolog of GI Number: 68441405 NR Desc:  similar to histone H2A
  misc_feature: Homolog of GI Number: 50911547 NR Desc: histone H4
  misc_feature: Homolog of GI Number: 50728592 NR Desc:  similar to histone protein Hist2h3c1
  misc_feature: Homolog of GI Number: 62663604 NR Desc:  similar to Histone H2B 291B

SEQ ID NO: 4247 - DNA, 1238 bp, Triticum aestivum
  misc_feature: Ceres CLONE ID no. 868990
  misc_feature: Ceres CDNA ID no. 25892321
  CDS (164)..(931): REFERENCED BY SEQ ID NO: 4248
gaagaaaagcacagcgttggtcaccgcgaatccccaccgtctcgcagttggacaccccgtaccgcatccccccgattcctctcctctcctcgccgaggccaaaacccaactccccgatctagccaactacccagatctcggaaccctcgccgtcgccgcggccatggcgaaggagccccccttctccctgcccccggtggtcttcaacccctccacaccggcccaccgccgccaccctatccccggccccggcgcctccccgccacctgccttcgcgcctccccgcccctccacctcctccgccgccaaccccctgcccttcatgtccttcgacatacccgctcagtccaactccacgccgcccatcttcaccgggcccatcggcggctccagcgcctccttcgaagacgagccgccgctcctcgaggagctcggcatcaacacgcgtcagatctggcggaagacgctctccatcctccacccgctccgctccgccgacccgtccctccacgccgacgccgatctctccggccccttcctgttcctcctatccttcggcctcttccagctcctggctgggaagttccacttcgggatcgtcctcgggtgggtcaccgtcgcctccctcttcctctacttcgtcttttccatgctctcgggcggacgccgtggcgaccttgacctctacaggtgcgtcagcctggtcggatactgcatgctccccatggtcatcttctctgccgtttccctcttcctgccacggggcggtgggctcatcttcgggatgggcatgggattcgtgctgtggtctaccagggtctgcaccaggttactagcagagcttgcttccagcggcgatgagcataggggactcattgcctacgcgtgctggctcgtctacatgctcttctctctgctcgtcatcttttgatgctgttcttgagatggaagatcacactcagtattcttttgccctgtggagcgttgaactgcttttgatcagcgactggagtggtttattgatgctacagaactatcgatgatctagtcagtttggaaaatattctgtaacagtctactgcttttcatcctttagtttctgtggcatggtagggggctggtatagatcttggtaaagaaatgtaaggcaagatcaggacagtgaaaatattataactaattagcttttgccgaagtttgatgggattagctagcaattttcaaaaaaaaaaaaaaaa

SEQ ID NO: 4248 - protein, 255 aa, Triticum aestivum
  misc_feature: Ceres CLONE ID no. 868990
  misc_feature: Ceres CDNA ID no. 25892321
  misc_feature (90)..(238): Pfam Name: Yip1 PFAM Desc: Yip1 domain
  misc_feature: Homolog of GI Number: 48310636 NR Desc: At3g52760
  misc_feature: Homolog of GI Number: 57042739 NR Desc:  similar to golgi membrane protein SB140
  misc_feature: Homolog of GI Number: 38571724 NR Desc: Zgc:56513 protein
  misc_feature: Homolog of GI Number: 37362290 NR Desc: golgi membrane protein SB140
  misc_feature: Homolog of GI Number: 55418076 NR Desc: FINGER5 variant C
  misc_feature: Homolog of GI Number: 41053561 NR Desc: similar to golgi membrane protein SB140
  misc_feature: Homolog of GI Number: 33115150 NR Desc: 2610311I19Rik protein
  misc_feature: Homolog of GI Number: 59858309 NR Desc: golgi membrane protein SB140
MAKEPPFSLPPVVFNPSTPAHRRHPIPGPGASPPPAFAPPRPSTSSAANPLPFMSFDIPAQSNSTPPIFTGPIGGSSASFEDEPPLLEELGINTRQIWRKTLSILHPLRSADPSLHADADLSGPFLFLLSFGLFQLLAGKFHFGIVLGWVTVASLFLYFVFSMLSGGRRGDLDLYRCVSLVGYCMLPMVIFSAVSLFLPRGGGLIFGMGMGFVLWSTRVCTRLLAELASSGDEHRGLIAYACWLVYMLFSLLVIF

SEQ ID NO: 4249 - DNA, 861 bp, Triticum aestivum
  misc_feature: Ceres CLONE ID no. 869016
  misc_feature: Ceres CDNA ID no. 36707422
  CDS (115)..(573): REFERENCED BY SEQ ID NO: 4250
ctctggaaggttcgtctattccggacgcaataaacctgcccgaagcgactggcgggtagagtgcgtgcgtacgtgagccctagcgggttcgaggaggcagcgccggcggcggagatgtcgacgccgtcgagaaagcgcctgatgcgggacttcaagcggctgcagcatgacccaccggccgggatcagcggcgcgccgcacgacaacaacatcatgctctggaacgccgtcatcttcgggccggatgatacgccatgggacggaggcacgttcaagcttaccttgcagtttacagaagattaccccaacaagccgccaactgttcgttttgtctctaggatgtttcacccaaatatttatgcagatgggagcatctgcttggatattctacagaatcagtggagccctatatatgacgttgctgccatattgacttctattcagtccttgctgtgtgatccaaaccccaactctccagcaaattcggaagctgccagaatgttcagcgagaacaagcgagagtacaaccgcaaagtccgcgagatcgtggagcagagctggactgctgactaaggcagggcgaggcggccgctgctagaaagttgcaataagcaaccatgaaacctttgtttagggctctctatagttgcttctcagatgaaatattaaacatctccagtgattgcttgcaggtcaaacctcaaagtatcttttgtctccgtggtaattttgtgttatgtctcgtgctactgttcttttatgttgtgttgttgatcctgcctcatgaatttaggggcatcacatgtaaaaagttatagcgtggaaatggttgatgaacacttgccaaaaaaaaaaaaaaaa

SEQ ID NO: 4250 - protein, 152 aa, Triticum aestivum
  misc_feature: Ceres CLONE ID no. 869016
  misc_feature: Ceres CDNA ID no. 36707422
  misc_feature (8)..(145): Pfam Name: UQ_con PFAM Desc: Ubiquitin
  misc_feature: Homolog of GI Number: 50934403 NR Desc: OsRad6
  misc_feature: Homolog of GI Number: 50919097 NR Desc: ubiquitin carrier protein
  misc_feature: Homolog of GI Number: 136640 NR Desc: Ubiquitin
  misc_feature: Homolog of GI Number: 56236462 NR Desc: ubiquitin carrier protein
  misc_feature: Homolog of GI Number: 58578278 NR Desc: ubiquitin
  misc_feature: Homolog of GI Number: 464980 NR Desc: Ubiquitin
  misc_feature: Homolog of GI Number: 8118527 NR Desc: ubiquitin conjugating protein
  misc_feature: Homolog of GI Number: 13516453 NR Desc: ubiquitin
  misc_feature: Homolog of GI Number: 83283991 NR Desc: ubiquitin carrier
  misc_feature: Homolog of GI Number: 52851176 NR Desc: Ubiquitin
MSTPSRKRLMRDFKRLQHDPPAGISGAPHDNNIMLWNAVIFGPDDTPWDGGTFKLTLQFTEDYPNKPPTVRFVSRMFHPNIYADGSICLDILQNQWSPIYDVAAILTSIQSLLCDPNPNSPANSEAARMFSENKREYNRKVREIVEQSWTAD

SEQ ID NO: 4251 - DNA, 1376 bp, Triticum aestivum
  misc_feature: Ceres CLONE ID no. 869633
  misc_feature: Ceres CDNA ID no. 36699945
  CDS (76)..(1089): REFERENCED BY SEQ ID NO: 4252
agacacttctcccgtcccgtctccagcaaacctcccatctccgtctagcgtcggcggcagttccactccctcgccatgggcaagattaagatcggaatcaacggtttcggaaggatcgggaggctcgtcgccagggtcgccctccagagcgacgatgtcgagctcgtcgccgtcaacgaccccttcatcaccaccgagtacatgacctacatgttcaagtacgacaccgttcacggccactggaagcacagcgacatcaagctcaaggacgacaagactctgctctttggcgagaagccagttaccgtctttggcgtcaggaaccctgaggagatcccgtggggtgaggctggtgccgattacgttgtggagtccaccggtgtcttcactgacaaggacaaggccgctgctcacttgaagggtggtgccaagaaggtggtcatctctgccccaagcaaagatgcccctatgtttgtggttggtgtcaatgaggacaagtacacctcagacgttaacattgtctcaaatgctagctgcaccactaactgccttgctcccctagctaagatcattaatgacaacttcggtattattgagggtttgatgaccactgttcatgccatcactgccacacagaagaccgttgatggtccctcgagcaaggactggagaggtggcagggccgcaagctttaacatcattcccagcagcactggtgctgccaaggctgttggtaaggttcttcctgagctgaatggcaagcttacgggtatgtctttccgggttcccactgtggatgtgtcagttgttgatctcactgttagaaccgagaaggctgcatcatatgatgacatcaagaaggctatcaaggctgcatccgagggaaaactcaaggggatcatgggttacgtcgaggaggatttggtctccactgattttgtcggtgacagcaggtcgagcatctttgatgccaaggctggaattgctctgaacgaccacttcgtcaagcttgtctcgtggtatgacaacgagtggggttacagcaaccgcgttgtcgacctgatccgccacatggccaagactcagtagagcgttctgctttcgtttgtggcgcctggtcagaggtgtccctgctttgtctatgcgaagaataaatgtggatggtgtcgccagacgacgcctggttcatgttagttggacatgagttaccttctgttttccgcatcaacctctagtatctgtaatggagttgctaatcaagtactcttttttggttgtggtttgtgaagaatatataaatcgttcagtccagtactcaactccctttctgtcaaaaaaaaaaaaaaaaaaaaaaaaaaccaaaaaaaaaaaaaaaa

SEQ ID NO: 4252 - protein, 337 aa, Triticum aestivum
  misc_feature: Ceres CLONE ID no. 869633
  misc_feature: Ceres CDNA ID no. 36699945
  misc_feature (159)..(316): Pfam Name: Gp_dh_C PFAM Desc: Glyceraldehyde 3
  misc_feature (4)..(154): Pfam Name: Gp_dh_N PFAM Desc: Glyceraldehyde 3
  misc_feature: Homolog of GI Number: 19699140 NR Desc: At1g13440/F13B4_8
  misc_feature: Homolog of GI Number: 295853 NR Desc: GAPDH
  misc_feature: Homolog of GI Number: 50925303 NR Desc: OJ000223_09.15
  misc_feature: Homolog of GI Number: 312179 NR Desc: glyceraldehyde 3
  misc_feature: Homolog of GI Number: 18978 NR Desc: glyceraldehyde 3
  misc_feature: Homolog of GI Number: 50940735 NR Desc: glyceraldehyde 3
  misc_feature: Homolog of GI Number: 18076094 NR Desc: glyceraldehyde
  misc_feature: Homolog of GI Number: 56069874 NR Desc: glyceraldehyde
  misc_feature: Homolog of GI Number: 18076098 NR Desc: glyceraldehyde
  misc_feature: Homolog of GI Number: 968996 NR Desc: glyceraldehyde
MGKIKIGINGFGRIGRLVARVALQSDDVELVAVNDPFITTEYMTYMFKYDTVHGHWKHSDIKLKDDKTLLFGEKPVTVFGVRNPEEIPWGEAGADYVVESTGVFTDKDKAAAHLKGGAKKVVISAPSKDAPMFVVGVNEDKYTSDVNIVSNASCTTNCLAPLAKIINDNFGIIEGLMTTVHAITATQKTVDGPSSKDWRGGRAASFNIIPSSTGAAKAVGKVLPELNGKLTGMSFRVPTVDVSVVDLTVRTEKAASYDDIKKAIKAASEGKLKGIMGYVEEDLVSTDFVGDSRSSIFDAKAGIALNDHFVKLVSWYDNEWGYSNRVVDLIRHMAKTQ

SEQ ID NO: 4253 - DNA, 1252 bp, Triticum aestivum
  misc_feature: Ceres CLONE ID no. 869920
  misc_feature: Ceres CDNA ID no. 40041353
  CDS (506)..(958): REFERENCED BY SEQ ID NO: 4254
ttccccatcgtctctacctgcttatgcattagagcccccggagttgccttcgattcgcagctaagtcctgctttctcccttccccttcttatttcagtccctgtagtttggttttccttaagagtctactccctgttccgttgcaaataagcccctgagctctgtcctattctagcctcaactccttggtctcgggaggagttcgtcgcagattcgatctagagagcctccccgcaccacccatgtttaccctccccttcctctgacggccgccgtcccccgatgaagctgcgcgtccgctgccgctcccactccttctccgtcgccttcctctactggttctacgacttctcatgaactcctcgccccccgacaacgccgcatccatccagcctctagttgattagatccagcctcgtttcttccactttcttgccttcttcctccccaccatcaaagaaaagagatctcttttctggttcttggatcaagaacccgaccgaccatgtcgtcgccgtcgcgccggagctccagccccgagagcaacatcgacggcggcagcggcagcggctccgccggtgacgagcgcaagcgcaagaggatgctgtccaacagggagtcggcgaggcggtcccgcgctcgcaagcagcagcggatggaggagctcatcgccgaggccagccgcctccaggccgagaacaagcgcgtggaggcccagatcggcgcctacacgaccgagctgaccaaggtggacggcgagaacgccgtgctccgcgcgcgccacggcgagctcgccggccggctgcaggcgctcggcggcgtcctggagatcttccaggtggccggcgcgcccgtggacatcccggagatccctgacccgctgctccgcccatggcagtccccgttcgcgccccagctggccaccgccggcggcatgcctgacgcgttccagttctgagccaagacaagtcatgccacggcgacattgcgccaccgtggataaggttgatgattactgctgctgctgctgaagaatgctagtactactagtttgtttgcttcatgtttaattatggtaatcctagaccatcattagtacttattttgtgattgtaatcttcctattgtcctagccagtggatatggataagaacaatgtcattgatgtgtggcggagcacaaatggattgtgcctatctttgggttgatttgtaataacatcttgacatggaacctaaaaaaaaaaaaaaaa

SEQ ID NO: 4254 - protein, 150 aa, Triticum aestivum
  misc_feature: Ceres CLONE ID no. 869920
  misc_feature: Ceres CDNA ID no. 40041353
  misc_feature (24)..(78): Pfam Name: bZIP_2 PFAM Desc: Basic region leucine zipper
  misc_feature: Homolog of GI Number: 62898531 NR Desc: bZIP transcription factor
  misc_feature: Homolog of GI Number: 14289165 NR Desc: glip19
  misc_feature: Homolog of GI Number: 51854369 NR Desc: putative bZIP protein
  misc_feature: Homolog of GI Number: 1060935 NR Desc: mLIP15
  misc_feature: Homolog of GI Number: 40019253 NR Desc: ocs
  misc_feature: Homolog of GI Number: 444047 NR Desc: ocs
  misc_feature: Homolog of GI Number: 2244744 NR Desc: bZIP DNA
  misc_feature: Homolog of GI Number: 72398495 NR Desc: bZIP2 protein
  misc_feature: Homolog of GI Number: 71061098 NR Desc: bZIP protein
  misc_feature: Homolog of GI Number: 9650826 NR Desc: common plant regulatory factor 6
MSSPSRRSSSPESNIDGGSGSGSAGDERKRKRMLSNRESARRSRARKQQRMEELIAEASRLQAENKRVEAQIGAYTTELTKVDGENAVLRARHGELAGRLQALGGVLEIFQVAGAPVDIPEIPDPLLRPWQSPFAPQLATAGGMPDAFQF

SEQ ID NO: 4255 - DNA, 1012 bp, Triticum aestivum
  misc_feature: Ceres CLONE ID no. 869937
  misc_feature: Ceres CDNA ID no. 25891877
  CDS (108)..(758): REFERENCED BY SEQ ID NO: 4256
gagccacagccactcctcctccccgcgccgcccctccccaaacccaaaccctaggccgcaccaggtgaaccggcgcccggtgagtcggtccgtccccgcggcgagccatgagtaagctatcgaccgacgcactcaaggaggccatcacccaggtggtggcggatgccaaggagaagaacaggaagttcaccgagaccgtcgagctccagatcggcctcaagaactacgacccgcaaaaggacaagcgtttcagcggctccgtcaagctgccccacgtccctcgccccaagatgagggtctgcatgctcggtgacgcccagcatgtgggagaggctgaaaagattggtcttgattccatggatgttgaagctcttaagaagatgaacaagaacaagaagcttgtcaagaggcttgccaagaagtaccatgctttcttggcctcggaggctatcatcaagcagattccacgtctccttggtcctggtctcaacaaggcaggaaagttcccgaccctggtttctcaccaggagtctctggaagccaaggtgaacgagacgaaagcgacaatcaagttccagctcaagaaggtgctgtgcatgggcgtcgcggtgggcaacctgtcgatggaggagaagcagatccagcagaacatccagatgagcgtcaacttcctggtttccctgctcaagaagaactggcagaacgtgaggtgtctgtacatcaagagcaccatggggaagccggtccgggtgttctaagctcgtgcccctgccgccctatatcaatgctacctacagtactggacctccttactatgttcaagcttaaatatgtctacttgtcgtagtttttatcgaattttgcgcgtgtcctggttaatgaagatgatgaaagaccactactgtttcccctgagctgtgattctgatggaacaatatatatgttcatcaagatcattccagtacctgttatatataatgttgtggttgcatgtttaaaaaaaaaaaaaaaa

SEQ ID NO: 4256 - protein, 216 aa, Triticum aestivum
  misc_feature: Ceres CLONE ID no. 869937
  misc_feature: Ceres CDNA ID no. 25891877
  misc_feature (10)..(212): Pfam Name: Ribosomal_L1 PFAM Desc: Ribosomal protein L1p/L10e family
  misc_feature: Homolog of GI Number: 50948455 NR Desc: putative 60S ribosomal protein L10A
  misc_feature: Homolog of GI Number: 57471702 NR Desc: ribosomal protein L10A
  misc_feature: Homolog of GI Number: 56785395 NR Desc: putative 60S ribosomal protein L10A
  misc_feature: Homolog of GI Number: 50252685 NR Desc: putative ribosomal protein L10a
  misc_feature: Homolog of GI Number: 9757825 NR Desc: 60S ribosomal protein L10A
  misc_feature: Homolog of GI Number: 15810665 NR Desc: putative 60S ribosomal protein L10A
  misc_feature: Homolog of GI Number: 21386915 NR Desc: putative ribosomal protein L10
  misc_feature: Homolog of GI Number: 25294932 NR Desc: 60S ribosomal protein L10A
  misc_feature: Homolog of GI Number: 47026982 NR Desc: 60S ribosomal protein L10A
  misc_feature: Homolog of GI Number: 70909673 NR Desc: ribosomal protein L10Ae
MSKLSTDALKEAITQVVADAKEKNRKFTETVELQIGLKNYDPQKDKRFSGSVKLPHVPRPKMRVCMLGDAQHVGEAEKIGLDSMDVEALKKMNKNKKLVKRLAKKYHAFLASEAIIKQIPRLLGPGLNKAGKFPTLVSHQESLEAKVNETKATIKFQLKKVLCMGVAVGNLSMEEKQIQQNIQMSVNFLVSLLKKNWQNVRCLYIKSTMGKPVRVF

SEQ ID NO: 4257 - DNA, 802 bp, Triticum aestivum
  misc_feature: Ceres CLONE ID no. 869994
  misc_feature: Ceres CDNA ID no. 36582396
  CDS (99)..(605): REFERENCED BY SEQ ID NO: 4258
cgaaaactctctcgccgtccgccgctactcccctgcctcccccagagctcgttagggttttctcctttttcgggggagaaatctcaagaggcggcaccatgctcgtgtaccaggacaagctttccggcgacgagcttctgtcggattcgttcccgtacagggagctggagaacggcgtgctctgggaagtcgacggccattgggtcgttcaaggagcagttgatgtggacattggagccaatccctctgctgagggtggtggtgatgatgagggtgtcgatgaccaggccgtgaaggtggttgacattgttgacaccttccgtcttcaggagcaacctgcttttgacaagaagcagtttatctctcacatgaagcgctacatcaagaacctctctgccaagcttgaaggggatgacctagatgttttcaagaagaatgttgagtctgccacaaagtatcttcttagcaagctcaaggaccttcagttctttgttggcgagagcatgcatgatgatggcggcgtggtgttcgcctactacaaggagggagctgctgatccaactttcctgtactttgcacatgggctgaaagaggtcaagtgctaatcgcactgtatgctaaaatctatgcggtcgtcagtatttttgctctgctctatggttgtcagtcgactctccaatgttgtgtcggtaactatcagatgttgagtgtcttgaaaactttctgataattgtgggatttgctttgtaatggtaatcgtgaaattggtgtggttatgttttgggcaaaaaaaaaaaaaaaa

SEQ ID NO: 4258 - protein, 168 aa, Triticum aestivum
  misc_feature: Ceres CLONE ID no. 869994
  misc_feature: Ceres CDNA ID no. 36582396
  misc_feature (1)..(165): Pfam Name: TCTP PFAM Desc: Translationally controlled tumour protein
  misc_feature: Homolog of GI Number: 21070379 NR Desc: translationally controlled tumor protein
  misc_feature: Homolog of GI Number: 20140865 NR Desc: Translationally controlled tumor protein homolog
  misc_feature: Homolog of GI Number: 303835 NR Desc: 21kd polypeptide
  misc_feature: Homolog of GI Number: 78191404 NR Desc: P23 tumor protein
  misc_feature: Homolog of GI Number: 49425163 NR Desc: translationally controlled tumor protein
  misc_feature: Homolog of GI Number: 76161018 NR Desc: P23
  misc_feature: Homolog of GI Number: 36963062 NR Desc: translationally controlled tumor protein
  misc_feature: Homolog of GI Number: 587546 NR Desc: P23 protein
  misc_feature: Homolog of GI Number: 4193388 NR Desc: translationally controlled tumor protein
  misc_feature: Homolog of GI Number: 20140683 NR Desc: Translationally controlled tumor protein homolog
MLVYQDKLSGDELLSDSFPYRELENGVLWEVDGHWVVQGAVDVDIGANPSAEGGGDDEGVDDQAVKVVDIVDTFRLQEQPAFDKKQFISHMKRYIKNLSAKLEGDDLDVFKKNVESATKYLLSKLKDLQFFVGESMHDDGGVVFAYYKEGAADPTFLYFAHGLKEVKC

SEQ ID NO: 4259 - DNA, 1020 bp, Triticum aestivum
  misc_feature: Ceres CLONE ID no. 870008
  misc_feature: Ceres CDNA ID no. 25892995
  CDS (132)..(722): REFERENCED BY SEQ ID NO: 4260
tttttttcctacctcccctcgccgcaccgcgcgaatcaaaccctcgccgcaagtaagaaatcgaggggcgaaatccaaaaccccgcgagccagcccgccagccacccacccacccggacccgcccgcggccatggtggtctacacgcaggagcacgtctaccagcacccgtgggaccgcgtgacggcggcggcgtggcgcaagttcacggacccggcctcccgcacggcgctctcccacgtcgccgacgtgcacaccctgcagcgccgcgtcgacacggacgccggccgcctccacgccgcgcgctccatcaccgtccgctccccgccgctccccttcatcctgcgccgcctcctcccggccgccgccgcctccccctcgggcgccgcgatctgccactgcgtcgagacctccgtcgtcgacgccccacgccgcgccatggacatcgtcgtccgcaacgtcagcctccgcgggatcatcgaggtcgaggagcgatccaccttccgcccccacccggaccgccccgacgactggacgcagttcaggcaggagaccacgatccggtgccgcccgctcgccaagctcgccgccgtcgccgagaaggtcgagacccgctgcgccgagaggttcctgcagaacagcgccaaggggagggaggtcgtcgagcggatctgccgctacctcgaggccgaggccgccggcgccgcgccttccgccgtctgatccggcctggtttgcgccccctctcttggccgttctggatctgatcgaatccaaggttccgctcgatctgtgctgcggctgaagacccaggcctcgcatcgaggcccttttttgtttgtttttttaatttcattttgttttgtatatgagctgaatcctgaatggaataaagcttgtgagcatagacttcattgctgtgttgtatgtggagaaattttaaccctcttttgcgcatattcttgttgagctacattctgatctgcaacatgtcatgggctttccaaaaaaaaaaaaaaaa

SEQ ID NO: 4260 - protein, 196 aa, Triticum aestivum
  misc_feature: Ceres CLONE ID no. 870008
  misc_feature: Ceres CDNA ID no. 25892995
  misc_feature (15)..(187): Pfam Name: MSF1 PFAM Desc: MSF1
  misc_feature: Homolog of GI Number: 67987177 NR Desc: 4Fe
  misc_feature: Homolog of GI Number: 57164013 NR Desc: similar to RIKEN cDNA 2310042G06
  misc_feature: Homolog of GI Number: 37577049 NR Desc: BCR/ABL
  misc_feature: Homolog of GI Number: 5420387 NR Desc: proteophosphoglycan
  misc_feature: Homolog of GI Number: 13592175 NR Desc: ppg3
  misc_feature: Homolog of GI Number: 72547041 NR Desc: proteophosphoglycan ppg1
  misc_feature: Homolog of GI Number: 72547018 NR Desc: proteophosphoglycan ppg3
  misc_feature: Homolog of GI Number: 72547023 NR Desc: proteophosphoglycan ppg4
  misc_feature: Homolog of GI Number: 72547036 NR Desc: proteophosphoglycan 5
  misc_feature: Homolog of GI Number: 50926032 NR Desc: OSJNBa0067K08.24
MVVYTQEHVYQHPWDRVTAAAWRKFTDPASRTALSHVADVHTLQRRVDTDAGRLHAARSITVRSPPLPFILRRLLPAAAASPSGAAICHCVETSVVDAPRRAMDIVVRNVSLRGIIEVEERSTFRPHPDRPDDWTQFRQETTIRCRPLAKLAAVAEKVETRCAERFLQNSAKGREVVERICRYLEAEAAGAAPSAV

SEQ ID NO: 4261 - DNA, 1036 bp, Triticum aestivum
  misc_feature: Ceres CLONE ID no. 870401
  misc_feature: Ceres CDNA ID no. 36707423
  CDS (204)..(755): REFERENCED BY SEQ ID NO: 4262
attcgatccgtaaaagcgtttttcgcgtactcccgaaacacccaatctgttcctcctctcgtcgcatcggcggcggcgacaggacatcgggcggcggcggctggacagccgcagaacgaaggaagggccccgtgtagcgtcgttcctcgtcccgatccgcacggatccaccccacataggtgccccgtgcacaaggatcaaagatgataaaccttttcaagatcaaggggcagaagaacgaagaggcagccaactcaaaaggggggcctcctgtcaagaagcaaagtcctggggaattacgtctgcataaagatattgctgagcttaaccttccaaagacaactaaaatttccttcccaaatggaaaggatgatctcatgaactttgaagccactctacgacctgacgaaggatactatgtaggtggggcatttactttcaccttccaagtatctccttcctaccctcacgaggctccgaaggtcaagtgcaagactaaggtttaccatcctaatattgacctagaaggaaatgtctgcctgaacattctgcgtgaagactggaagcctgtcttgaacatcaacaccataatatatggtttaaaccttcttttctcacaacccaatgacgaggaccccttgaatcatgaagccgcggccgtcctccgagacaacccacagaagttccagagaaatgttcaaactgcgatgtcgggagggtatgttaataacacccatttcccaaggtgcaagtaaggtctgctatgtggagctctggttccgactattgcccagttaccctgaatgccgttgcacagtctgaaggatgtggcatgtacccaggaaatgtatcacatttgtgttagacgtgactgttattatgcttgtttggtggatgtaccgtagtcatgcatgttgaagaaacatgctaagcagaaaaaaaactcgcctgttattgagctgaaaagtcggtggaagtgttccaagcgcagcaatcatacgagcatagaactgatttatcaaaaaaaaaaaaaaaa

SEQ ID NO: 4262 - protein, 183 aa, Triticum aestivum
  misc_feature: Ceres CLONE ID no. 870401
  misc_feature: Ceres CDNA ID no. 36707423
  misc_feature (33)..(169): Pfam Name: UQ_con PFAM Desc: Ubiquitin
  misc_feature: Homolog of GI Number: 50945065 NR Desc: putative RUB1 conjugating enzyme
  misc_feature: Homolog of GI Number: 51091477 NR Desc: putative RUB1 conjugating enzyme
  misc_feature: Homolog of GI Number: 46810481 NR Desc: putative RUB1 conjugating enzyme
  misc_feature: Homolog of GI Number: 62733448 NR Desc: Ubiquitin
  misc_feature: Homolog of GI Number: 31430663 NR Desc: putative ubiquitin
  misc_feature: Homolog of GI Number: 76573335 NR Desc: RUB1
  misc_feature: Homolog of GI Number: 32400752 NR Desc: RUB1
  misc_feature: Homolog of GI Number: 26000688 NR Desc: RUB1 conjugating enzyme
  misc_feature: Homolog of GI Number: 78708012 NR Desc: ubiquitin
  misc_feature: Homolog of GI Number: 20453317 NR Desc: AT4g36800/C7A10_560
MINLFKIKGQKNEEAANSKGGPPVKKQSPGELRLHKDIAELNLPKTTKISFPNGKDDLMNFEATLRPDEGYYVGGAFTFTFQVSPSYPHEAPKVKCKTKVYHPNIDLEGNVCLNILREDWKPVLNINTIIYGLNLLFSQPNDEDPLNHEAAAVLRDNPQKFQRNVQTAMSGGYVNNTHFPRCK

SEQ ID NO: 4263 - DNA, 633 bp, Triticum aestivum
  misc_feature: Ceres CLONE ID no. 870408
  misc_feature: Ceres CDNA ID no. 36582878
  CDS (57)..(341): REFERENCED BY SEQ ID NO: 4264
acaccgatctagggtttcctgctagggttttggtccttcggtttcggcggcgcaagatggaggagggccacatctccagggactgcccccagggcggcggcggtggcggcggatacggcggtggtggctatggaggaggcggcggcggcggccgcgagtgctacaagtgcggcgaggagggccacatctccagggactgcccccagggcggtggtggtggcggcggcggcggcggctacggaggcggtggtggccgtggcggcggcggcggcggtggcggctgcttctcctgcggcgagtccggccacttctctcgcgagtgccccaacaaggcccactaggcggcacagctcttcagatctgagtgccccgtttaccctcgctcctttacctacctcctgattctgcagcaagtcataccctatacctatcagtactagtattagtcgccgtagcgtttccccctgctgctcgatccgagcttggttccagaagaattgctggtggtgtgttcgtcgttaagatccaagttattttgttgtctctctgtgatgaggacacagatctatctatgtgttggatggactaagttatcgaagtcaagtttggtttcttgtaaaaaaaaaaaaaaaa

SEQ ID NO: 4264 - protein, 94 aa, Triticum aestivum
  misc_feature: Ceres CLONE ID no. 870408
  misc_feature: Ceres CDNA ID no. 36582878
  misc_feature (2)..(12): Pfam Name: zf PFAM Desc: Zinc knuckle
  misc_feature: Homolog of GI Number: 21322752 NR Desc: cold shock protein
  misc_feature: Homolog of GI Number: 42391858 NR Desc: cold shock domain protein 3
  misc_feature: Homolog of GI Number: 42391853 NR Desc: cold shock domain protein 2
  misc_feature: Homolog of GI Number: 50940785 NR Desc: putative cold shock protein
  misc_feature: Homolog of GI Number: 14532850 NR Desc: putative glycine
  misc_feature: Homolog of GI Number: 83318931 NR Desc: Vasa protein isoform
  misc_feature: Homolog of GI Number: 70663480 NR Desc: transcription factor
  misc_feature: Homolog of GI Number: 19743 NR Desc: nsGRP
  misc_feature: Homolog of GI Number: 60543359 NR Desc: At2g21060
  misc_feature: Homolog of GI Number: 76577745 NR Desc: putative glycine
MEEGHISRDCPQGGGGGGGYGGGGYGGGGGGGRECYKCGEEGHISRDCPQGGGGGGGGGGYGGGGGRGGGGGGGGCFSCGESGHFSRECPNKAH

SEQ ID NO: 4265 - DNA, 688 bp, Zea mays
  misc_feature: Ceres CLONE ID no. 870785
  misc_feature: Ceres CDNA ID no. 25446447
  CDS (82)..(531): REFERENCED BY SEQ ID NO: 4266
aacggggccaggccaaccggcacgttcccgaagcctcacggacgggacggggtgcatcattctcgacgcccacccaaatccatggcgcgatctccgccggcgcctacgccggaattcgagatctctcgccagtcccgcctctttgcggcgttgtccaagaaggtgataggtctcgatgaactgaggatgctggcggctcagggagtcccagacgcggcgggcgtccaggcgaccctgtggaagctgctactgggctatctgcccaatgaccgcgcgctgtggcctgtggctgtgggagcagaggagctggcaaagaagagaggacagtacgctgctttcaaaggcgagttccttagaaacccttactcggagattatggagcagattgaccgcgatgtaaagcgcgcccaccctgacatgcatttcttctgtagcgactcgtcttttgcaaagtccaatcaggaatctttgaaaaatgtactgttaatcttcgccaagctgaatgctggaataagatatgtacaaggatgaatgaaattctggcaccgctttttgtatttcggagtacggatgataaaaatgctgtatggagtaagagattgtttttaccaagttcttagtgccctacatatagtactgctgatagccgaagctttcctgttcagtttggtcaaaaaaaaaaaaaaaa

SEQ ID NO: 4266 - protein, 149 aa, Zea mays
  misc_feature: Ceres CLONE ID no. 870785
  misc_feature: Ceres CDNA ID no. 25446447
  misc_feature: Homolog of GI Number: 50902304 NR Desc: P0497A05.14
  misc_feature: Homolog of GI Number: 82621142 NR Desc: RabGAP/TBC domain
  misc_feature: Homolog of GI Number: 42572891 NR Desc: RabGAP/TBC domain
  misc_feature: Homolog of GI Number: 50923695 NR Desc: OSJNBa0083D01.9
  misc_feature: Homolog of GI Number: 77550831 NR Desc: TBC domain
  misc_feature: Homolog of GI Number: 56785363 NR Desc: RabGAP/TBC domain
MARSPPAPTPEFEISRQSRLFAALSKKVIGLDELRMLAAQGVPDAAGVQATLWKLLLGYLPNDRALWPVAVGAEELAKKRGQYAAFKGEFLRNPYSEIMEQIDRDVKRAHPDMHFFCSDSSFAKSNQESLKNVLLIFAKLNAGIRYVQG

SEQ ID NO: 4267 - DNA, 1664 bp, Zea mays
  misc_feature: Ceres CLONE ID no. 870797
  misc_feature: Ceres CDNA ID no. 36589896
  CDS (63)..(1418): REFERENCED BY SEQ ID NO: 4268
gcatcgaacgcacactcgcactcgcacgtacaccacactagttaccacagacgacgggcgccatgaaagtcccggtgcttctcctcctggtctccctgtgcttctcgctcgcgctcgcgtggcaaacggacacggaatcgggctcaggcaggccgtaccactacggcgaggagagtttccggcactggacgcgctcccggcagggccggttcagggtgctggaacggttcacccacgagctgctggaggacgccgtcggcaactaccgcgtcgccgagctggaagccgcgccgcgcacgttcctgcagcccagccactacgacgccgacgaggtgatgttcgtgaaggaaggcgagggcgtcatcgtgctgctccgcggcgggaagagggagtcgttctgcgtcagggagggcgacgtcatggtcatccccgcgggcgccgtcgtgtactcggccaacacgcaccagtcggaatggttccgcgtcgtcatgctcctcagccccgtcgtctccacgtctggacgcttcgaggagttcttccccatcggaggcgagagccccgagtccttcctcagcgtcttcagcgacgacgttatccaggcgtcgttcaacactcgccgggaggagtgggagaaagtgttcgagaagcagagcaagggggagatcacgacggcgtccgaggaacagatccgggagctgagcaggtcctgctcacgtggtggccgcggcagccgcggcgagggtggcgactcgggttcttcttcttcttccaagtgggagatcaaaccgtccagcctcacggacaagaagccgacccattccaacagccacggcaggcactacgagatcaccggcgacgagtgcccgcacctccggctgctcgacatggacgtcggcctggcaaacatcgcccgcggttctatgatggcgccgagctacaacacccgtgccaacaagatagctatcgtcctcaagggccagggctacttcgagatggcgtgtccgcacgtctccggcggccggtcatcgccgcgccgtgagcgcgggcacggccgagaggaagaggaggagcgggaagaggagcaaggcggtggcggtgggcaaaaggcgaggagctacaggcaggtgaaatcccgcatcagagagggctccgtcatcgtgatcccggcggggcacccgaccgcgctggtcgccggcgaagacaagaacctcgccgtcctctgcttcgaagtgaacgccagcttcgacgataaggtgttcctcgcgggcacgaacagcgcgcttcagaagatggataggccggcgaagctgctggcgttcggggcggacgaggagcagcaggtggaccgtgtcatcggagcacagaaggacgccgtcttccttcgcgggccccagagccacagggtctcgtcggtgtaagtgcatgcttgagatgtagcggccgctcatcggcctcgagacctcgacggtcgcggccaccccggtggtgaggttaagaagtggaataaagtaggtgatggctcgccggcgtcgcgttacgtatgaacagtagtatgtacgtccagtggagggtgacgcccggccgtacgggagtatgtaatctacctacctacctatgcaggtgaaataacgttgttgagacttgagacaaaaaaaaaaaaaaaa

SEQ ID NO: 4268 - protein, 451 aa, Zea mays
  misc_feature: Ceres CLONE ID no. 870797
  misc_feature: Ceres CDNA ID no. 36589896
  misc_feature (243)..(427): Pfam Name: Cupin_1 PFAM Desc: Cupin
  misc_feature: Homolog of GI Number: 100876 NR Desc: globulin
  misc_feature: Homolog of GI Number: 34495244 NR Desc: globulin
  misc_feature: Homolog of GI Number: 26986204 NR Desc: penicillin
  misc_feature: Homolog of GI Number: 50919131 NR Desc: putative globulin
  misc_feature: Homolog of GI Number: 13183177 NR Desc: 7S globulin
  misc_feature: Homolog of GI Number: 50917513 NR Desc: putative  globulin
  misc_feature: Homolog of GI Number: 13507023 NR Desc: 7S globulin
  misc_feature: Homolog of GI Number: 542184 NR Desc: globulin
  misc_feature: Homolog of GI Number: 121205 NR Desc: Globulin
  misc_feature: Homolog of GI Number: 22284 NR Desc: vicilin
MKVPVLLLLVSLCFSLALAWQTDTESGSGRPYHYGEESFRHWTRSRQGRFRVLERFTHELLEDAVGNYRVAELEAAPRTFLQPSHYDADEVMFVKEGEGVIVLLRGGKRESFCVREGDVMVIPAGAVVYSANTHQSEWFRVVMLLSPVVSTSGRFEEFFPIGGESPESFLSVFSDDVIQASFNTRREEWEKVFEKQSKGEITTASEEQIRELSRSCSRGGRGSRGEGGDSGSSSSSKWEIKPSSLTDKKPTHSNSHGRHYEITGDECPHLRLLDMDVGLANIARGSMMAPSYNTRANKIAIVLKGQGYFEMACPHVSGGRSSPRRERGHGREEEEEREEEQGGGGGQKARSYRQVKSRIREGSVIVIPAGHPTALVAGEDKNLAVLCFEVNASFDDKVFLAGTNSALQKMDRPAKLLAFGADEEQQVDRVIGAQKDAVFLRGPQSHRVSSV

SEQ ID NO: 4269 - DNA, 715 bp, Triticum aestivum
  misc_feature: Ceres CLONE ID no. 874235
  misc_feature: Ceres CDNA ID no. 40351443
  CDS (82)..(384): REFERENCED BY SEQ ID NO: 4270
ctcccactccattctctcttgatttgttttagcaatacaagttctcacacttacaaaacacgcatcttaagcgcttgaagaatgaaagtctcaagggtgtatggctttcaaagagatcaattcatgaagtttcataggaaaactagattgacctcttcagtgacacttggtagtgtccaaagaagggcatcacaagggtcattagggtgtttccctccatcatgcattttcaggcaagtgttttacaagttgaagagtcgattgaagcaagctttggtttggcaaaggagtagtagtccacagtatagctacgattttcgcagctattctctcaattttgatgatggcctttcaagtgaccacattccacctcgcttttgttgatgatacaaggtgtgtttgggttacagttaggttgaaacccaagtttcaacgagacaaaagacttccttctacgttttgtgcatatggaagtgggaatgtctgtttgaagtatctcaaatggcaaactaaacacactcgtattctttttgttttaattttctcttttatttgttatgaataaattgatctgtaacagtttgttgccattctatatatagccatatgatgaaatactccgcaaaatgcataattgtaaattgattcttcagatatttgtcatccaattatttttctttagccatggttgaatcttggaaaaaaaaaaaaaaaa

SEQ ID NO: 4270 - protein, 100 aa, Triticum aestivum
  misc_feature: Ceres CLONE ID no. 874235
  misc_feature: Ceres CDNA ID no. 40351443
MKVSRVYGFQRDQFMKFHRKTRLTSSVTLGSVQRRASQGSLGCFPPSCIFRQVFYKLKSRLKQALVWQRSSSPQYSYDFRSYSLNFDDGLSSDHIPPRFC

SEQ ID NO: 4271 - DNA, 483 bp, Triticum aestivum
  misc_feature: Ceres CLONE ID no. 874552
  misc_feature: Ceres CDNA ID no. 40351444
  CDS (73)..(321): REFERENCED BY SEQ ID NO: 4272
accgcattagcactcgtctttggttctggtttatagatctctgtgaagtcgctttataacactcaacctaagatgcagaacgaggaaggacagatcaccgagctttacattcctaggaagtgctctgccacaaaccgattgattaccgctaaggaccatgcttcggttcaggttaacattgggcatgtggatgagaatggcgtctacaatggccatttctccacttttgctctctgcggcttcatacgtgctcagggtgatgctgacagtgccctagatcgcttgtggcagaagaagaaagttgaagttaagcaacagtagacacccatgatagtttgttactttgctatgtattaatttctacgcttgctagagatatttgagtactatgattgtcgtcttgagcaaatactcattctaaattttcgttggtatttggtaccgccagctaaatttgcttttttgacaaaaaaaaaaaaaaaa

SEQ ID NO: 4272 - protein, 82 aa, Triticum aestivum
  misc_feature: Ceres CLONE ID no. 874552
  misc_feature: Ceres CDNA ID no. 40351444
  misc_feature (1)..(81): Pfam Name: Ribosomal_S21e PFAM Desc: Ribosomal protein S21e
MQNEEGQITELYIPRKCSATNRLITAKDHASVQVNIGHVDENGVYNGHFSTFALCGFIRAQGDADSALDRLWQKKKVEVKQQ

SEQ ID NO: 4273 - DNA, 671 bp, Triticum aestivum
  misc_feature: Ceres CLONE ID no. 874588
  misc_feature: Ceres CDNA ID no. 40351445
  CDS (162)..(329): REFERENCED BY SEQ ID NO: 4274
tcgttctagtgtgtgattgtttgttgttgtaactcgttcttcttcttttgttgttctgtgtttgtgtttgttttttctctcacctgaaaatgtcttgctgcggtggtaactgtggttgcggaagctcctgcaagtgcggcaacggctgcggaggctgcaagatgtacccagacttgagctacactgagtcaaccaccaccgagaccttggtcatgggagtggcacctgttaaggctcaatttgagggtgctgaaatgggtgtgcccgctgagaacgatggctgcaaatgtggaccaaactgctcctgcaacccctgcacttgcaagtgaggtgttgggagagcaagcttcaagcagagatagcccttaattaggaataatgataaactattaatgtgtagctaaaaacttatgtattatgtctgtgatggttttcgtgcactctggtgttttgtgttaaacaaacatccttagaataaagtggtcatgtcttgcctttcagcaagttcaagtgttttggacttgtgatgggtgtgttaagctcatggttgcttcttttttttttttttttaatgtttggtaattggtcgcttctgtataaagttcggctaatctgaattatgaatctctgcttataatattaaatactattactgaaaaaaaaaaaaaaaa

SEQ ID NO: 4274 - protein, 79 aa, Triticum aestivum; identical to SEQ ID NO: 3434
  misc_feature: Ceres CLONE ID no. 874588
  misc_feature: Ceres CDNA ID no. 40351445
  misc_feature (1)..(78): Pfam Name: Metallothio_2 PFAM Desc: Metallothionein

SEQ ID NO: 4275 - DNA, 669 bp, Triticum aestivum
  misc_feature: Ceres CLONE ID no. 874658
  misc_feature: Ceres CDNA ID no. 40351446
  CDS (34)..(444): REFERENCED BY SEQ ID NO: 4276
ctttgtattctattcttcaagattcagacacagatggctcgtacgaagcaaaccgctcgtaagtccacaggaggaaaggctcctaggaagcagcttgcaaccaaggctgcacgtaagtctgcaccaactactggtggtgtgaagaagccccaccgttatcgtcctggtaccgttgctcttcgtgaaattaggaaataccagaagagtaccgagcttttgatccggaagctccccttccagaggctggttcgtgaaattgctcaggacttcaagactgatctgcgtttccagagccacgccgtgcttgcattgcaagaagctgctgaggcataccttgttgggctctttgaggacactaacctgtgtgccattcacgccaagcgtgtaaccattatgcccaaggatattcagctggcaagaaggattcgtggtgagcgtgcttgagttggtggttggaaagatgaagatgattggtggctgcggttggtgtttttgtttttcagattcctttttttattcaatagatggggttgttagggagggtaggttttctgctggtagtagcattaattgggatataggcaaatactgccgagtgtccgtgactgtgttttcttcctttaagaaaattggcttgtaattgatttttggacaaaaaaaaaaaaaaaa

SEQ ID NO: 4276 - protein, 136 aa, Triticum aestivum; identical to SEQ ID NO: 30
  misc_feature: Ceres CLONE ID no. 874658
  misc_feature: Ceres CDNA ID no. 40351446
  misc_feature (58)..(134): Pfam Name: Histone PFAM Desc: Core histone H2A/H2B/H3/H4

SEQ ID NO: 4277 - DNA, 688 bp, Triticum aestivum
  misc_feature: Ceres CLONE ID no. 875090
  misc_feature: Ceres CDNA ID no. 25891767
  CDS (73)..(447): REFERENCED BY SEQ ID NO: 4278
accgccgttctcatctctcttcccagttctcacctcaccgctgcatcttcacgtcgtctctaacgagggaaaatgagtcgaggaggtgcagcagcagcgaagggaaagaagaagggtgctacattcaccattgactgtgcaaagccagtagaagacaagatcatggacattgcttctctcgagaagtttcttcaagagaggatcaaggttggtggcaaagctggtgctcttggtgactctgttaccgttacacgtgagaagactaagattattctcacctctgactgtaacttttccaaacggtatttgaagtacttgacgaagaagtacttgaagaaacacaatgtgcgagactggctcagagtgattgcttcaaacaaggatagaagtgtttacgaactgaggtacttcaacattgctgagaatgagggagaggaagaagattagttgtctgatagccttattgcttaagtgttttgtttacccttttcctatacctagcttcctttttggcaaatattgcttgagatacgatgctttgttttgatcggttgcaatttaacggttttgatcatttaagaattgcggtactattggtgttgaattgggaacagagattacaaattattctctgttgtttcagtttttaaattgcattatgtttctttcaacaaaaaaaaaaaaaaaa

SEQ ID NO: 4278 - protein, 124 aa, Triticum aestivum; identical to SEQ ID NO: 3406
  misc_feature: Ceres CLONE ID no. 875090
  misc_feature: Ceres CDNA ID no. 25891767
  misc_feature (9)..(124): Pfam Name: Ribosomal_L22e PFAM Desc: Ribosomal L22e protein family
  misc_feature: Homolog of GI Number: 6714454 NR Desc: putative 60S ribosomal protein  L22
  misc_feature: Homolog of GI Number: 12642842 NR Desc: putative 60S ribosomal protein L22
  misc_feature: Homolog of GI Number: 50939919 NR Desc: putative 60S ribosomal protein L22
  misc_feature: Homolog of GI Number: 42733478 NR Desc: BRI1
  misc_feature: Homolog of GI Number: 6056419 NR Desc: 60S ribosomal protein  L22
  misc_feature: Homolog of GI Number: 85392 NR Desc: development gi|118204|sp|P13732|RL22_TRIGR 60S ribosomal protein L22Development
  misc_feature: Homolog of GI Number: 72012073 NR Desc:  similar to 60S ribosomal protein L22
  misc_feature: Homolog of GI Number: 73956651 NR Desc:  similar to 60S ribosomal protein L22
  misc_feature: Homolog of GI Number: 57086899 NR Desc:  similar to ribosomal protein L22

SEQ ID NO: 4279 - DNA, 849 bp, Triticum aestivum
  misc_feature: Ceres CLONE ID no. 875476
  misc_feature: Ceres CDNA ID no. 40351447
  CDS (168)..(332): REFERENCED BY SEQ ID NO: 4280
attcaactctgcttctctctctctcttctctctcttcatctaaattccccccgaaaaatcgaatttttacttttagggttttgaaattcctgctactgcctatcctgatctgcgattagtgattgggtggcggcccccatttccgattaagagtgatgtgctaagacatggcacttaaagttcctgctcgtaaggctgccgagattgcaattgggtccatcggccgtggttatgatatatcacttgatataaggcttaagtattgtaaaggagattccataaattcacgtttaattgagatagatgaaaatgatgtaagagagggagcttgaagagaaagagaaacaaaggagagaagcattgttgggtagagctgctgctgaaccagctcctcctgcccgtccattggaatcgggatctgctgctcctgcggcagctgccgccgccgccgctgctccaacacctgggaaatacgtacctaagttcaggcgagagagaaccgaaagcgcaggagctgcgcctcctccagaaacagatcgctggaacagtagcagcaggccagatggtgacaggtggcgaagtgatgatcggagaaccgcatttggttctggtggaggttcaaggtcatcttctacttggtcatcttccaggaatgcccgttgaacattttgtggcctgatttattgctggcgactttttgggagttctctttgtaccgagttcttaaatttattatctttttaatacttacgaagtcctctattggattggggagcctgccaacaaaattttctatttatgattgagtggattgcatatggtattcgaagtttaaaaaaaaaaaaaaaa

SEQ ID NO: 4280 - protein, 54 aa, Triticum aestivum
  misc_feature: Ceres CLONE ID no. 875476
  misc_feature: Ceres CDNA ID no. 40351447
MALKVPARKAAEIAIGSIGRGYDISLDIRLKYCKGDSINSRLIEIDENDVREGA

SEQ ID NO: 4281 - DNA, 539 bp, Triticum aestivum
  misc_feature: Ceres CLONE ID no. 876361
  misc_feature: Ceres CDNA ID no. 40351448
  CDS (67)..(336): REFERENCED BY SEQ ID NO: 4282
aatttccattaggcagagcaaagtaatcgcaaaatctagggtttgttcgttcgctcgttcgcaacaatggcgctgaggagattctacaacgagatcaaggggaagagggtgagcgaggtccctgagcacgtgaagccgatgctgtccctgagctacatcaagaaagcgattcagagaggcttcgacaattaccatgccaagtacattgaaaccagttcccctgatcccatcttccatgtctgctacggcggcatgatcttctcctacctcgtcgctctcccccacgagcgccgccacctcctccacgcccaggagcacgctcagcagcatcactgattccatccaccttcaggatcctggttgaattggaggtggttggcttgcttgatctttgttttaaaatctgaaaaatcaaggcagaaagatactgtcagcttctgtgtatttcatcatttggatgataaaataagttctatttgatacaattctcaattttcttgcagttaaatgtttaattgaatgtgtgaaaaaaaaaaaaa

SEQ ID NO: 4282 - protein, 89 aa, Triticum aestivum; identical to SEQ ID NO: 3482
  misc_feature: Ceres CLONE ID no. 876361
  misc_feature: Ceres CDNA ID no. 40351448

SEQ ID NO: 4283 - DNA, 594 bp, Triticum aestivum
  misc_feature: Ceres CLONE ID no. 876436
  misc_feature: Ceres CDNA ID no. 40351449
  CDS (52)..(453): REFERENCED BY SEQ ID NO: 4284
atactactactactctgttcccattcctcatctcaagccacttcagagaaaatggcggtacctctgctctcgaagaagatcgtgaagaagagggtgaagaagttcaagaggcctcagagtgacaggaaaatttccgtcaagacaaactggcgtagaccaaagggtatagattcccgtgttaggagaaagttcaagggatgcactttgatgccaaacatcggttatggttcagacaagaagacccgccactatctccctaatggttttaagaaatttgttgttcacaatgtgaaggacttggaactgctcatgatgcacaacaggacttactgtgctgagattgctcacaatatatccacaagaaagagaaaagatatagttgagagagctgcgcaacttgatgttgttgtgacaaacaaaacagccagattacgcagccaggaggatgaatagtctaaatgacggagtcacttatttgtagtgatcctagtgacactcttgacaatggattttgatctttttttcattcttctataaattgtagcttgataaacgattaatgtggttttttttccctcaaaaaaaaaaaaaaaa

SEQ ID NO: 4284 - protein, 133 aa, Triticum aestivum; identical to SEQ ID NO: 2596
  misc_feature: Ceres CLONE ID no. 876436
  misc_feature: Ceres CDNA ID no. 40351449
  misc_feature (14)..(123): Pfam Name: Ribosomal_L32e PFAM Desc: Ribosomal protein L32

SEQ ID NO: 4285 - DNA, 924 bp, Triticum aestivum
  misc_feature: Ceres CLONE ID no. 876616
  misc_feature: Ceres CDNA ID no. 25891768
  CDS (3)..(650): REFERENCED BY SEQ ID NO: 4286
ctgcttctgctcattcttctccttccacagggatggcttatgttccacatggaaatgcaaattgcaactctttattccaaaaatttgcaaattcccatgtgggtatttctgctttgcccttcctgcaaccgggactaaaatcttgtacagttttcaacagaggaacactcattcccctgtgcttaaatggaaagaggagctttgctttatcagaaaagggatttaattgcaagtttttaaagagagagagattctctatccctagaagtagtagttcttctaactctagtggaagtacggatgaaacctctaaggagacaaatgtaaagacaccatttggatatacaaggaaagatgtcctattaattggacttggagttactttacttggcattggcttaaaaagtggactagagtttgttggagttgattcactacaagcaggaaatgtggttcagctagtgctggttttgggcctcacagttgggtggatctcaacatatatcttcagagtttcaaacaaggaaatgacatatgcacaacaactacgtgactatgaaagcaaagtgatggagaagcggttagaatccctaacagaagcagagctacaagcactgcttgaagaagttgaggaagagaagagtcgctagctagtggtacgcaggtgaattggagtagcttgtttgtatatatacactgaaatgaagttttgccaaagtaattgaaacagaaatttcaatctatatggactagttcagaaaggttttagctatgctttcttcaatttactcagacaaaaggatgagacttcaaaatccttagtgttctgctcacaaaaaattccagatggaagcaactctgtaagatatgatgataatgcttttaagttcatataattttgtgacttttaaaaaaaaaaaaaaa

SEQ ID NO: 4286 - protein, 205 aa, Triticum aestivum
  misc_feature: Ceres CLONE ID no. 876616
  misc_feature: Ceres CDNA ID no. 25891768
  misc_feature: Homolog of GI Number: 23124895 NR Desc: COG0477: Permeases of the major facilitator superfamily
MAYVPHGNANCNSLFQKFANSHVGISALPFLQPGLKSCTVFNRGTLIPLCLNGKRSFALSEKGFNCKFLKRERFSIPRSSSSSNSSGSTDETSKETNVKTPFGYTRKDVLLIGLGVTLLGIGLKSGLEFVGVDSLQAGNVVQLVLVLGLTVGWISTYIFRVSNKEMTYAQQLRDYESKVMEKRLESLTEAELQALLEEVEEEKSR

SEQ ID NO: 4287 - DNA, 720 bp, Triticum aestivum
  misc_feature: Ceres CLONE ID no. 877021
  misc_feature: Ceres CDNA ID no. 40351450
  CDS (65)..(493): REFERENCED BY SEQ ID NO: 4288
gccaccctctctcctcctttctccatttttcctctgcgcctttgcatttcagcagcacaccacaatggccaccaatgcattcactggcacatctctctccatgcgatctgtcattcctcaaacacaggcatttgcctcaatttctggcccgacatctgcttcaatttccagctttgggagaaagaatgtttcttttagcttgcagccacgcttaattcgccttaaaatttcctgtgctgccgctaaaccagagacagtagagaaggtgtgcaaaatagtaaagaagcagctggctatgcctgaaactgatgtggtgactggggagtcaaaatttgcaactcttggtgctgattcccttgacacggttgagatcgtgatggcacttgaggaagcatttggtattgccattgaagaggacagtgcacagagcatcgctacggttcaggatgctgcagatcttattgaagaaatcgttcagaagaagagttcttagagtaaacatgtaccagaaggtttgtgtaaaacatgaactcatcatagtctccatgccgatcaatatttatggtgtggggcaattctgagtctcgagtgttttagttgtgaactctgttgcgtgattaaaacaagtctgagaagaaaaacaaattagtccaaccttttgtttgtttctggaagttagttatatcaagttgtgtttttgcattaaaaaaaaaaaaaaaa

SEQ ID NO: 4288 - protein, 142 aa, Triticum aestivum
  misc_feature: Ceres CLONE ID no. 877021
  misc_feature: Ceres CDNA ID no. 40351450
  misc_feature (66)..(133): Pfam Name: PP PFAM Desc: Phosphopantetheine attachment site
MATNAFTGTSLSMRSVIPQTQAFASISGPTSASISSFGRKNVSFSLQPRLIRLKISCAAAKPETVEKVCKIVKKQLAMPETDVVTGESKFATLGADSLDTVEIVMALEEAFGIAIEEDSAQSIATVQDAADLIEEIVQKKSS

SEQ ID NO: 4289 - DNA, 590 bp, Triticum aestivum
  misc_feature: Ceres CLONE ID no. 877094
  misc_feature: Ceres CDNA ID no. 40351451
  CDS (35)..(418): REFERENCED BY SEQ ID NO: 4290
tacaatcttcaccaccaaaaaggttaataaaataatggcaatggccagtgcaacaactctagccacaatcactgttgtggcggctagccccagtgttggcagcagaaggagtgggaagaggaatgtgaacttcatcagagggttgaattcttttggagggttgaaggctcagaacaatgtgacattactaggccttcctgtgtgcactgagcagtgctttgcaaaggtggtgagctcattgaaatatccatcatcatcatcacgtaaggggagaggtggaggtgctgccttttcaacatgcaatgctgctggtgagattttccagattgcagccatcatgaatggccttgtgcttgttggggtggcaatagggtttgtccttcttcgagtcgaagcgtttgtggaagagtctgagtgagaattgcatcaacttttaatcagtttttcatatatgtatttttataaagaagaaaaaaagcgaaaaagttgtatcttccttaattcttgatatgatgtagaactacattatttttggggtgtctgaatagtaccatgtgaatttttatttggggataaaaaaaaaaaaaaaa

SEQ ID NO: 4290 - protein, 127 aa, Triticum aestivum
  misc_feature: Ceres CLONE ID no. 877094
  misc_feature: Ceres CDNA ID no. 40351451
  misc_feature (88)..(125): Pfam Name: PetM PFAM Desc: PetM family of cytochrome b6f complex subunit 7
MAMASATTLATITVVAASPSVGSRRSGKRNVNFIRGLNSFGGLKAQNNVTLLGLPVCTEQCFAKVVSSLKYPSSSSRKGRGGGAAFSTCNAAGEIFQIAAIMNGLVLVGVAIGFVLLRVEAFVEESE

SEQ ID NO: 4291 - DNA, 874 bp, Triticum aestivum
  misc_feature: Ceres CLONE ID no. 878043
  misc_feature: Ceres CDNA ID no. 36701355
  CDS (139)..(585): REFERENCED BY SEQ ID NO: 4292
aaaccaaacccgtcgcgcacgacaccacaccacaaagcgaggggcggacccggagcaaaaaagaccaccaaaggcaggcgtcctccgtccctctgtcctcgccgtccccaacctctcgctgcaaaaaggttgcttgtcatggcatcaaagcgcatcctcaaggaactgaaggacctgcagaaggacccgcccacatcatgcagcgcaggtcctgctggtgaggacatgtttcattggcaagcaacaattatgggaccccctgacagtccctatgccggtggtgttttcttagtgaacattcatttccctccggattaccccttcaagccaccaaaggtatcttttaagacaaaggtcttccatcctaatatcaacagcaatggaagcatatgccttgatattcttaaggagcagtggagccctgctttgacgatctctaaggtcttgctctctatctgttccctgctgaccgatcccaacccggatgatccccttgttcccgagattgcccacatgtacaagacggaccggtcaaagtatgagacgacagcccgcagctggacgcagaagtacgccatgggttgaagacctgcatcgtggacaactgaaatgtcgcttcaagaaaaatatttatgggccattgtttcttcgatttgttgctggttgtgtgtaatccaatcctcaaggattgtaaattgcattcggcgtcggtcctatcatcaattgccactagtatcggcagacatgcatgcctatcagcctattcacctatgcttgttgggttaaccttcatcagtgttggtgttatttggtaaatgttcattaaaacatgtttgcttaatgaccttgtccagattcaaaaaaaaaaaaaaaa

SEQ ID NO: 4292 - protein, 148 aa, Triticum aestivum
  misc_feature: Ceres CLONE ID no. 878043
  misc_feature: Ceres CDNA ID no. 36701355
  misc_feature: The plant produces a reduced number of seeds.
  misc_feature: Useful for biocontainment applications
  misc_feature (5)..(142): Pfam Name: UQ_con PFAM Desc: Ubiquitin
  misc_feature: Homolog of GI Number: 34909292 NR Desc: ubiquitin conjugating enzyme
  misc_feature: Homolog of GI Number: 2668744 NR Desc: ubiquitin conjugating enzyme
  misc_feature: Homolog of GI Number: 50929483 NR Desc: OSJNBa0043A12.6
  misc_feature: Homolog of GI Number: 30025160 NR Desc: ubiquitin
  misc_feature: Homolog of GI Number: 464981 NR Desc: Ubiquitin
  misc_feature: Homolog of GI Number: 20259611 NR Desc: putative ubiquitin conjugating enzyme 11
  misc_feature: Homolog of GI Number: 52548244 NR Desc: ubiquitin
  misc_feature: Homolog of GI Number: 441457 NR Desc: ubiquitin conjugating enzyme E2
  misc_feature: Homolog of GI Number: 5762457 NR Desc: ubiquitin
  misc_feature: Homolog of GI Number: 40287554 NR Desc: ubiquitin
MASKRILKELKDLQKDPPTSCSAGPAGEDMFHWQATIMGPPDSPYAGGVFLVNIHFPPDYPFKPPKVSFKTKVFHPNINSNGSICLDILKEQWSPALTISKVLLSICSLLTDPNPDDPLVPEIAHMYKTDRSKYETTARSWTQKYAMG

SEQ ID NO: 4293 - DNA, 910 bp, Triticum aestivum
  misc_feature: Ceres CLONE ID no. 878933
  misc_feature: Ceres CDNA ID no. 40351452
  CDS (169)..(690): REFERENCED BY SEQ ID NO: 4294
acgagcccactgcccaggcccatttttcactttgctgctcgctcctacactaacccacacgcacggtcgcacccgcacctcacctcatctcaccagagagagaaagagagagagagagagagagagagagagagagagagagagtccgaagaaaaagacggcggcgggatgtttctgcggcggatcctgagcggcgggggcgggctggcggccctgcgctctgcgcgggcggtgaaggagacgacggggatcgtgggtctggacgtggtgcccgaggcgcggaatgtgctcatcgggctctacacgcgcaccctcaaggagatcgaggccgtccccaaggacgagggctaccgcaaggccgtcgagtccttcacccgccaccgcctccagatctgccaggaggaggaggactggaagcgcatcgaggaccgcctcggctgcggccaggtcgaggagctcatcgaggaggccgaggacgagctcaagctcatcggcaagatgatcgagtgggatccctggggtgttcctgatgactacgaatgcgaggtgattgaagatgacacacctattcccaagcatgttccgcagcaccggcccgttgcactacctgaggagttcttcaagacattagatgccatcaaatcagatccagctctgcagggcgactctcctccgcaagtgaagtcatgaaactagaactcttcaagatgcatcatttttcacctgttgcagtgtgtagttgagactagtctcatgggtcctttgcctgcagtttgcttgttgtcccgagcagaataaatttgtttctgtgaatgtgaatgcgtttttaacgcagtgcttcaacacagtaaaatactgtttctgttttctattaatcgatgttgacaaaagatcaaaaaaaaaaaaaaaa

SEQ ID NO: 4294 - protein, 173 aa, Triticum aestivum; identical to SEQ ID NO: 3874
  misc_feature: Ceres CLONE ID no. 878933
  misc_feature: Ceres CDNA ID no. 40351452
  misc_feature (35)..(91): Pfam Name: ETC_C1_NDUFA5 PFAM Desc: ETC complex I subunit conserved region

SEQ ID NO: 4295 - DNA, 1155 bp, Triticum aestivum
  misc_feature: Ceres CLONE ID no. 879681
  misc_feature: Ceres CDNA ID no. 40041354
  CDS (3)..(839): REFERENCED BY SEQ ID NO: 4296
ctttatttccgcggaacggcggcgtgcgggacttggtttctcgcggctttcctttccccatggtggagttcggagaggaggacctggccgtcgcggccgccaagattctgctcagcctccggagcaggaacctcgtgcggtggccggagtggatcgcccggccgtacgacggtctccagcggccagaggaggccgagctgccgccgatcccggagggatggccgaagcggccgcggtcgcggctgcctgcgcgggctgaaggaaccgcgtgtctgccgtcgctgaagagcccctccgcgcggccggggcgccccgttctcggcggatccggcgcgtgttccggcgaggaggaggtggaggaggaggaggagagggcgtggtctgccccgaagccgaagcgcctgtctttcaccgcgcggaggccggaggtaccgccgcactacttctcaggctcggcaaccgggtccggcccttccacgagcggcgccgaccgggcgcggtcgcggcgacgggtgcgcgtgagcgagaaggcgactgccaccagcgtggagtcgagcccggagacgcccttcgacttcgccaacgccgccggatcgggagcgtcctcgagcggcgacgaagcagcgcggccgacggcggcgcaggggtcgggcggaggcggagggccgtcgagcggcaccaggggcgcggctcgccgacgaagcgctcgcggacggacctcgccgccggcgaagctgcggcgaccgaggctaaagtggaggagcacaagatcaaggaggattaccgggacgagaagggccacctgctgttcgacctcaacgaagcttggggttaactaacagcaacaggcgatcgagcagaggattctgcttagctatatagctcctagttcgtgtgctctcaaatgtacataaagaggtccggctagtaggagaggagatagtaaggtgagggttaattagcttagacaaaggggggttagtgagtgagtacactcatcatcatcattagatttgtcaggttagtttaatcggtctgctctgttcgcctgtgttgtgctatatgcactggatatcgtttgtcattcggaaagtcgatcaatggaaatatgatgcacattatatattgcagcgcacaacaaaaaaaaaaaaaaaa

SEQ ID NO: 4296 - protein, 259 aa, Triticum aestivum
  misc_feature: Ceres CLONE ID no. 879681
  misc_feature: Ceres CDNA ID no. 40041354
  misc_feature: Homolog of GI Number: 67986808 NR Desc: Aldo/keto reductase
  misc_feature: Homolog of GI Number: 67987666 NR Desc: Protein
  misc_feature: Homolog of GI Number: 66776365 NR Desc: PE
  misc_feature: Homolog of GI Number: 67986591 NR Desc: 1
  misc_feature: Homolog of GI Number: 66780099 NR Desc: PE
  misc_feature: Homolog of GI Number: 67987371 NR Desc: Aldehyde dehydrogenase
  misc_feature: Homolog of GI Number: 67987177 NR Desc: 4Fe
  misc_feature: Homolog of GI Number: 66776813 NR Desc: Phosphoribosylaminoimidazole
MVEFGEEDLAVAAAKILLSLRSRNLVRWPEWIARPYDGLQRPEEAELPPIPEGWPKRPRSRLPARAEGTACLPSLKSPSARPGRPVLGGSGACSGEEEVEEEEERAWSAPKPKRLSFTARRPEVPPHYFSGSATGSGPSTSGADRARSRRRVRVSEKATATSVESSPETPFDFANAAGSGASSSGDEAARPTAAQGSGGGGGPSSGTRGAARRRSARGRTSPPAKLRRPRLKWRSTRSRRITGTRRATCCSTSTKLGVN

SEQ ID NO: 4297 - DNA, 1258 bp, Triticum aestivum
  misc_feature: Ceres CLONE ID no. 880001
  misc_feature: Ceres CDNA ID no. 15179888
  CDS (128)..(1004): REFERENCED BY SEQ ID NO: 4298
ccgcgttatctcgttgcctccacccctccgccccattcccgctgctgctgctcctctctcctcttagcccaaacacacctcacctcgctccccgtcccgccgatctcttctcttagggtcgtccgcgatggcggctccggtggtggacgccgagtacctgcgccaggtcgacagggggcgccgcgctctccgcgccctcatcgcctccaagggatgcgcccccatcatgctccgcctcgcatggcatgatgctggcacgtatgatgtgaacacaagaactggtggtgcaaatggttcaattagatacgaggaagagtacacccatggttcaaatgctggcttaaaaattgctattgatctcctcgagcctattaaagcgaagcatccaaagattacatatgcagacctttatcagcttgctggagtagttgcagttgaagtcaccgggggtccaaccgttgagttcatccctggaagacgtgattcgtcagtttgtccccgtgaagggcgccttcctgatgctaagaaaggcgcaccacatctaagggacatcttttatcgaatgggcttaacagacaaagatattgtagcactatctggggggcacagcctgggaaaggcacatcctgaaaggtctggttttgacggtgcatggactcgtgaccctctgaagtttgacaactcatactttcttgagctactgaagggggaatcggagggtcttctgaagctccctactgataaggcattgttggatgatcctgaatttagacgttatgtggagctttatgcaaaggacgaggatgctttcttcaaggactatactgaatcacacaagaaactttctgaacttggcttcacaccacggatcagtggcccagcttctacaaaatcagatgtttcaactgctgttgtacttgcacagagtgcagtgggggtagcagttgcggcagctgtagtcatcgcgggctacctgtacgaggcttccaagaggagcaagtaaggggtttcatgagttcttggatggcattgccttatttagtaagtatcaagttattcttaaaaaaataagtgccaagttcaaataatagaactctagtgatgaacaaccaacagcagtcttaaaatatttcaggcattcttgaggacatctccttcatgtatacatcatacttgaatatttcagtgacaatgaatgcttactattaaaagcatttttgggcatgtatcttgtgcaatacgaaaaaaaaaaaaaaaa

SEQ ID NO: 4298 - protein, 291 aa, Triticum aestivum
  misc_feature: Ceres CLONE ID no. 880001
  misc_feature: Ceres CDNA ID no. 15179888
  misc_feature (17)..(224): Pfam Name: peroxidase PFAM Desc: Peroxidase
MAAPVVDAEYLRQVDRGRRALRALIASKGCAPIMLRLAWHDAGTYDVNTRTGGANGSIRYEEEYTHGSNAGLKIAIDLLEPIKAKHPKITYADLYQLAGVVAVEVTGGPTVEFIPGRRDSSVCPREGRLPDAKKGAPHLRDIFYRMGLTDKDIVALSGGHSLGKAHPERSGFDGAWTRDPLKFDNSYFLELLKGESEGLLKLPTDKALLDDPEFRRYVELYAKDEDAFFKDYTESHKKLSELGFTPRISGPASTKSDVSTAVVLAQSAVGVAVAAAVVIAGYLYEASKRSK

SEQ ID NO: 4299 - DNA, 851 bp, Triticum aestivum
  misc_feature: Ceres CLONE ID no. 880857
  misc_feature: Ceres CDNA ID no. 25891769
  CDS (40)..(696): REFERENCED BY SEQ ID NO: 4300
ccgccacactaatcttccaggtaagggagcgcagcaaaaatggtgtctctgaagatccagaagcggctcgccgcgtcggtgatgaagtgcgggaagggcaaggtttggctcgatccgaatgaatcctccgacatctccatggccaactctcgacaaaacatcaggaagctggtgaaggatggtttcatcatcaggaagccaaccaagatccactctcgttccagggctcgccgtatgaagattgccaagatgaagggtcgtcactctggatacggtaagaggaagggtaccagggaagctaggttgccgacaaaggtactttggatgcgtaggatgcgtgttctcaggcgtctcctgaagaagtaccgagagtcgaagaagattgacaagcacatgtaccatgacatgtacatgcgtgtcaagggcaacgtgtttaagaacaagcgtgtcttgatggagagcatccacaagtccaaggccgagaaggcaagagagaagactttgtctgatcagtttgaggctaagagggctaagaacaaggctagccgagagaggaaacatgctaggagagaagagcgtcttgctaagggtcctggaggagatgttgcgcctgtaactgcaccaccagctgctgctgctgctgcttcaactactgctcaaaccgcagaggtaccgaagaagaagtctaagaagtgaagaggatatagccagcaagctaccccagttcacttacttaactttaagaagtttttttgaatgtgttatgaagtttggtttgttgaaatacttttgttgccaagaaaaacataattgttatggtttcagatttttagctaaaaaaaaaaaaaaaa

SEQ ID NO: 4300 - protein, 218 aa, Triticum aestivum
  misc_feature: Ceres CLONE ID no. 880857
  misc_feature: Ceres CDNA ID no. 25891769
  misc_feature (2)..(149): Pfam Name: Ribosomal_L19e PFAM Desc: Ribosomal protein L19e
  misc_feature: Homolog of GI Number: 33589762 NR Desc: At1g02780/T14P4_3
  misc_feature: Homolog of GI Number: 18087585 NR Desc: At1g02780/T14P4_3
  misc_feature: Homolog of GI Number: 7268983 NR Desc: putative ribosomal protein L19
  misc_feature: Homolog of GI Number: 3377797 NR Desc: Similar to 60S ribosome protein L19
  misc_feature: Homolog of GI Number: 40287526 NR Desc: 60S ribosomal protein L19
  misc_feature: Homolog of GI Number: 83284003 NR Desc: 60S ribosomal protein L19
  misc_feature: Homolog of GI Number: 19699260 NR Desc: AT3g16780/MGL6_23
  misc_feature: Homolog of GI Number: 29837764 NR Desc: putative ribosomal protein L19
  misc_feature: Homolog of GI Number: 47026900 NR Desc: ribosomal protein L19
  misc_feature: Homolog of GI Number: 32401377 NR Desc: ribosomal protein L19
MVSLKIQKRLAASVMKCGKGKVWLDPNESSDISMANSRQNIRKLVKDGFIIRKPTKIHSRSRARRMKIAKMKGRHSGYGKRKGTREARLPTKVLWMRRMRVLRRLLKKYRESKKIDKHMYHDMYMRVKGNVFKNKRVLMESIHKSKAEKAREKTLSDQFEAKRAKNKASRERKHARREERLAKGPGGDVAPVTAPPAAAAAASTTAQTAEVPKKKSKK

SEQ ID NO: 4301 - DNA, 1730 bp, Triticum aestivum
  misc_feature: Ceres CLONE ID no. 881679
  misc_feature: Ceres CDNA ID no. 40041355
  CDS (176)..(1429): REFERENCED BY SEQ ID NO: 4302
accacatcggcagaaaacgcaaaacagcaaaccctcctcctacagcaccgcttttccccatctcattcgcatcgacctagtcgtgctgcgccacggccggccggccggccgcgcggccctcagctcaactcctccgctggaggacaggcctcttgcgtctgtgctcccacccgcgatgtccagcaacaaggtagctgatcattggtgcctgtcagagcgacaaggtcatcatttgcaatccaatggtgcaattgatcttgaacttgatggtgggactgcaagtcttcatccagaaataggagtcacaaaaggtaatactcgagtcaaatggagtccccaaatggctgatcgatggtgcctgtcagagcgacaaggccatcatctgcaatccaatggggcaattgatcttgaacttcatggtgggactacaagtcttcatccagaaataggactcacaaaagttaatactcgagccaaatggagtcaccaaatgaagttgttccttgttagactcttaaaagattatgatgtgcctggttttcggacacataatgcttggagtaaggaggcatggacaaatattgtttctcgactaaatcaaaggtttgatcaatcatttactctcaaccaagtcaaacaaaaggagcaggatctgaagagagactatcgaaatgttaaagaattgttggatcaaagtggctttggatgggataaggacagaaaaatggttgatgcaccagataatgtttgggcaagctttgccgctcgtaagaacagcaaggatgtcctgcaatggaaagaaaggtcattccccctttatgaagaattagctccactctatgaaggtcgttatgctgaagggagaactcgtcgaggcttggaccattatactaggaagaggaagcatgcaccagttccctcatcacaatcgacacaagtgacggatctgtatcaatcaccatcacctaccatgccagctgccggtgagtcagatatgcagtttacattagatgaaaaacttgacgagttcaatttggattctcccccgcacctatctacacctattcagcatgtgcaagccccgccaagatctacacaaatggagaaacatgacactaggcgtgggaaaaaacagaaacgtggtgctaatgatgatttccatgagaagtatctaaaactgaagaaggaagaaattgatcgatttgctgcaattgaggagaagaagctagaggacccctacaccatcaacaagtgcatcacagcagttgaagggttggaaggtttacaactaggagatatgttgatggcatcagatatcttcaaatgcaaggagaacagggaagttttcttgtcatattctactaatgaactacgactggcttggcttaaaagagagattgcgcgtgcccaaactacccatcaaaattagccattgtggtgatccactgagaccataggttctattttagggaagcttttggtctgtaggtgtcatatatttatgtttagttcagttggtcatagaactgaccatgatggtttagtatattttggtagttatgttgagaggcttttggttaggcatgcatgaaaatttgtagtactattgcaaatttgaagtccaagaatggtattacaacttgcatgtcatatttcaagtacaagaatggtagctgaacttggataacatattacatattctatgatctttgtgaaaaaaaaaaaaaaaa

SEQ ID NO: 4302 - protein, 417 aa, Triticum aestivum
  misc_feature: Ceres CLONE ID no. 881679
  misc_feature: Ceres CDNA ID no. 40041355
  misc_feature: Homolog of GI Number: 77554714 NR Desc: transposon protein
  misc_feature: Homolog of GI Number: 34907580 NR Desc: B1078G07.31
  misc_feature: Homolog of GI Number: 50924854 NR Desc: B1358B12.21
MSSNKVADHWCLSERQGHHLQSNGAIDLELDGGTASLHPEIGVTKGNTRVKWSPQMADRWCLSERQGHHLQSNGAIDLELHGGTTSLHPEIGLTKVNTRAKWSHQMKLFLVRLLKDYDVPGFRTHNAWSKEAWTNIVSRLNQRFDQSFTLNQVKQKEQDLKRDYRNVKELLDQSGFGWDKDRKMVDAPDNVWASFAARKNSKDVLQWKERSFPLYEELAPLYEGRYAEGRTRRGLDHYTRKRKHAPVPSSQSTQVTDLYQSPSPTMPAAGESDMQFTLDEKLDEFNLDSPPHLSTPIQHVQAPPRSTQMEKHDTRRGKKQKRGANDDFHEKYLKLKKEEIDRFAAIEEKKLEDPYTINKCITAVEGLEGLQLGDMLMASDIFKCKENREVFLSYSTNELRLAWLKREIARAQTTHQN

SEQ ID NO: 4303 - DNA, 902 bp, Triticum aestivum
  misc_feature: Ceres CLONE ID no. 883318
  misc_feature: Ceres CDNA ID no. 24766533
  CDS (154)..(600): REFERENCED BY SEQ ID NO: 4304
acaagaggacagggaagaatcttgttcgcgttgagccgccgcagaccttccctttccccacgcccaggcgatcccctcaaatcccccgcaccatccccctctccttcgatcggatccgcccgcccgcccgcctgccgcaccggtcgatcgacgatgacgctgggcagctccggcgccggatcgagcgtcgtcgttcctcggaacttcaggctgctagaagagcttgagcgcggggagaagggcattggagatggaacggtcagctatggaatggatgatgctgatgacatatacatgcggtcatggactggcaccattattggtcctcacaatactgtccatgagggtcgcatctaccagctgaagctgttctgtgacaaggactaccccgagaaggcaccatctgttagatttcattcaagaatcaacatggcttgtgttaatcacgagaccggggcggttgacccgaagaagttcagtgtgctggcgaactggcagcgagagtacactatggaacatgtcttgacccagctgaagaaagatatggcggcgacgcagaaccgcaagctagtgcagcctccagaagggacattcttctagcggggtgttttcctgcccatctccagttccaacagcagcgatctatgtcactcccatgggatttgaaatgtagattcagcgtctgctgcctgcagatcttttcccagttttatgtgaaaccgtgttcctcgcgatctgcccgattgccgttaaggagatggaatgaaacatgtaccggtttgccgttaaggagtactaattaaggtctgtaattgaagaaacaacccgtgtcaaggaaatataatatgtgtttgtgtgtgtccaaaaaaaaaaaaaaaaaaaaaaaaaaaaaaaaaaaaaaa

SEQ ID NO: 4304 - protein, 148 aa, Triticum aestivum
  misc_feature: Ceres CLONE ID no. 883318
  misc_feature: Ceres CDNA ID no. 24766533
  misc_feature (19)..(147): Pfam Name: UQ_con PFAM Desc: Ubiquitin
  misc_feature: Homolog of GI Number: 50725506 NR Desc: putative ubiquitin
  misc_feature: Homolog of GI Number: 20260068 NR Desc: putative ubiquitin
  misc_feature: Homolog of GI Number: 30686662 NR Desc: ubiquitin
  misc_feature: Homolog of GI Number: 78191460 NR Desc: ubiquitin
  misc_feature: Homolog of GI Number: 30693656 NR Desc: ubiquitin
  misc_feature: Homolog of GI Number: 46577794 NR Desc: ubiquitin
  misc_feature: Homolog of GI Number: 77557031 NR Desc: ubiquitin
  misc_feature: Homolog of GI Number: 75755857 NR Desc: TO38
  misc_feature: Homolog of GI Number: 2982253 NR Desc: CROC
  misc_feature: Homolog of GI Number: 71040677 NR Desc: ubiquitin
MTLGSSGAGSSVVVPRNFRLLEELERGEKGIGDGTVSYGMDDADDIYMRSWTGTIIGPHNTVHEGRIYQLKLFCDKDYPEKAPSVRFHSRINMACVNHETGAVDPKKFSVLANWQREYTMEHVLTQLKKDMAATQNRKLVQPPEGTFF

SEQ ID NO: 4305 - DNA, 1045 bp, Triticum aestivum
  misc_feature: Ceres CLONE ID no. 883372
  misc_feature: Ceres CDNA ID no. 25445851
  CDS (110)..(733): REFERENCED BY SEQ ID NO: 4306
gaattaggacaagcacaagaaaaatccttcaaaaaaaaaggacaagcacaagaaacggagagtaagaagcagagaggggttggatccaagaagagggtggggaggctacatggaggcggcgatggatctgatgcggcggatgccgccggggagcaccgagacggcgctcaacgcgctgctctccctcctccccgaccactccctcgacctcctctcccaggtcgacctccggctccaggtttgcatggataaggagaacaataaggaatacattctttgcgagtataaccgcgacaccgattcctatcgatcaccttggtcaaacatatatgagcctcctttagaagatgggacagttccctcagaagagatgaggaatcttgaagtcgaggcaaatgaggttttctctgtctatcgtgatcagtactatgaaggtgggatctcatctgtgtacatttgggaggatgaagacgagagtttcattgcatgcttcttaataaagaaagatggacaagggaaaagaagttatatgcaaataggttcgtgggatgctattcatgttatccaggttggtcctgaagaggaaggagcagcacattactgcttgaacagcactgttatgctgtcattgacaacagataacaagcaatcgggaactttcaacttgtccggatcaattaggcggcaggttatccattcctccctcttcatatcaacggaaggtgctatgtgagatatatgcatgtcttgcatcgccgctttccacaactgttgatgtgtgtattaacagaacagattcgattctgtcatcaacataaactgtacttgttgtagatcaattgtctgtcaacattacaatctagcagtaaaccagtatgcctatctgtaattctaggttctaaatggcgccactggtttttggtttggggatattgaggcctaactgtgctggatggatggccaaggctatctgttttagctagctaggcaggaatttgattttcgttgattagaaactgcttgctaagcaaaaaaaaaaaaaaaa

SEQ ID NO: 4306 - protein, 207 aa, Triticum aestivum
  misc_feature: Ceres CLONE ID no. 883372
  misc_feature: Ceres CDNA ID no. 25445851
  misc_feature (1)..(206): Pfam Name: F_actin_cap_B PFAM Desc: F
  misc_feature: Homolog of GI Number: 50920805 NR Desc: putative capping protein beta subunit
  misc_feature: Homolog of GI Number: 7239506 NR Desc: Similar to the F
  misc_feature: Homolog of GI Number: 48107011 NR Desc: similar to Capzb
  misc_feature: Homolog of GI Number: 66531704 NR Desc:  similar to ENSANGP00000019124
  misc_feature: Homolog of GI Number: 17136938 NR Desc: CG17158
  misc_feature: Homolog of GI Number: 54644876 NR Desc: GA14356
  misc_feature: Homolog of GI Number: 31225884 NR Desc: ENSANGP00000019124
  misc_feature: Homolog of GI Number: 27370869 NR Desc: Capzb
  misc_feature: Homolog of GI Number: 56417837 NR Desc: capping protein
  misc_feature: Homolog of GI Number: 1345668 NR Desc: F
MEAAMDLMRRMPPGSTETALNALLSLLPDHSLDLLSQVDLRLQVCMDKENNKEYILCEYNRDTDSYRSPWSNIYEPPLEDGTVPSEEMRNLEVEANEVFSVYRDQYYEGGISSVYIWEDEDESFIACFLIKKDGQGKRSYMQIGSWDAIHVIQVGPEEEGAAHYCLNSTVMLSLTTDNKQSGTFNLSGSIRRQVIHSSLFISTEGAM

SEQ ID NO: 4307 - DNA, 977 bp, Triticum aestivum
  misc_feature: Ceres CLONE ID no. 883670
  misc_feature: Ceres CDNA ID no. 25892862
  CDS (132)..(818): REFERENCED BY SEQ ID NO: 4308
ccgcaaaattgccttcctctttccccgtcgtctctctccaccaacgccagtccaaatccaaacccgaaggaggaagagaggccagcgcagctagggttccgcctcccgccggccggagagagagagagaggatgacgacggcggcgcggccgacgtgggcgccagcgaagggcgggaacgagcaggggggcacgcgcatcttcgggccctccgggaagtactcctcccgcgacctcgccgcccacacctccctcaagcccagaaaagagggacaacaaactcaagaggaggtacagaagaggaatcttagggatgaacttgaggagcgtgaacgcaagcacttctcatccaaggataagtcctatgttgacgagagggaccggcgaaaaagttcaagcctgctcttagaaggttcaaaacgggatgaggataagatagttccacgtgaaattgatgcagatgactctgacgtggaactcaaaagtgatgatgaaagcgacgatgacgacgacgacgatgacactgaggcactaatggcagagcttgaaaggattaaaaaagaaagagctgaggacaggcttagaaaggagcgtcagcaagcagaagaagaggccaagatgaaggaggccgagctgatgcgaggaaacccactgatcaatatgaacaactctggctccttcaatgtgaagagaaggtgggatgatgatgttgtattcaagaaccaggctcgtggagagaccaagacaccgaaacggttcatcaacgacaccatcagaagtgatttccaccgcaagtttctgcataggtacatgaaatgatgctgctgtacgctttatgttgcctggacagtatgcatgctgaaagagcctgtgatgtttctgtattctgaagatcgatttgtatgacataactgtaacagctacgttatcttaatggtgatatgtttaccctgttcctaaacaaaaaaaaaaaaaaaa

SEQ ID NO: 4308 - protein, 228 aa, Triticum aestivum
  misc_feature: Ceres CLONE ID no. 883670
  misc_feature: Ceres CDNA ID no. 25892862
  misc_feature (1)..(228): Pfam Name: Cwf_Cwc_15 PFAM Desc: Cwf15/Cwc15 cell cycle control protein
  misc_feature: Homolog of GI Number: 46329463 NR Desc: MGC81091 protein
  misc_feature: Homolog of GI Number: 49522089 NR Desc: MGC81909 protein
  misc_feature: Homolog of GI Number: 66852859 NR Desc: cell cycle control protein
  misc_feature: Homolog of GI Number: 28829868 NR Desc: similar to T10C6.5.p
  misc_feature: Homolog of GI Number: 23612595 NR Desc: cell cycle control protein cwf15 homologue
  misc_feature: Homolog of GI Number: 23489775 NR Desc: Dictyostelium discoideum HSPC148. 10/100
  misc_feature: Homolog of GI Number: 62640840 NR Desc:  similar to RIKEN cDNA 0610040D20
  misc_feature: Homolog of GI Number: 57095370 NR Desc:  similar to Cohen syndrome 1 protein isoform 5
MTTAARPTWAPAKGGNEQGGTRIFGPSGKYSSRDLAAHTSLKPRKEGQQTQEEVQKRNLRDELEERERKHFSSKDKSYVDERDRRKSSSLLLEGSKRDEDKIVPREIDADDSDVELKSDDESDDDDDDDDTEALMAELERIKKERAEDRLRKERQQAEEEAKMKEAELMRGNPLINMNNSGSFNVKRRWDDDVVFKNQARGETKTPKRFINDTIRSDFHRKFLHRYMK

SEQ ID NO: 4309 - DNA, 1424 bp, Triticum aestivum
  misc_feature: Ceres CLONE ID no. 883700
  misc_feature: Ceres CDNA ID no. 25401169
  CDS (81)..(1139): REFERENCED BY SEQ ID NO: 4310
gatccacttgggcaccagccgtccgggaccgagaccgagaccgcgccctgccccgccgtgtccgctgccgcgccgccgccatgccgccgtccgtccgcacggtctccatccccttcgccgacctcaaggagcggggcagggacctgagcggcaagatcgaggaggggctcggccccgacgggctcggcatcatctccatttccggcgtgccggatttcccagctctaaggagaacgctcctgcacttggcgccgaaagttgcaaaccttcctgaagatgtgaagaaaggacttgaggacccggacagcaggtataatttcggctggagccatgggaaagagaaacttgaatctgggaaactcgacacattcaaaggctcctactatgccaacccaattttggatgtccctactgctgatgatgtccttgtaagtaggtatccatcgtactgccgaccaaatatctggccagctgatcatctgcctgagcttgaaatagcatttaaagctcttggaaagctaatgttggaagttggcttgatgttggctcgtcattgtgatctctacgtaatgcagcacggagtgggaccatatgatggtgaaagtcttgagcagacaatttcccgttcaaggtgtcacaaggggcgtctcctgtattatttccccagacaattcagcacacaaaaagaagatggtgattctgtttcatcgtggtgtggatggcatactgaccatgggtctttaactggtcttacatgtggcctgtttatgaaaaattcagtggaggtcccctgtcctgatagtgcagctgggctgtacatccggactcgtgatgaccgagttgttaaggttacatttggggaggatgaattagcttaccaaattggggaaactactgaaatactatcaagaggtcgtctatgtgcaactccacactgtgtacaggcacccagcggtgtgaatgcttcaaatgttgagcgctctacttttgcaatgttcatgcaaccagattggaatgagacgcttaactttccaagtgaaattccttaccaccaagagttgattccaccaaacggagcgcttacgtttggagagtactcagagagactggtgaacaagtattaccaaggaaagacgtgattcacgtggattgtcacgatgaggtgcagagtagaagaggcgttggtgaagacgctgtgctaccaggaaactaaaatcttcaactagtcgtgcctgcaaatacacttccaagtccctagaaagcatagacagatttatagatatacattacatcatttccataccatgttcgcttgtaaaaaagatgcaaaaacgtgacctcctgaaaactgtataaaataagatgaaattgtgtacatgtagtttgttatatagtcctaatttgtgcgaaaaaaaaaaaaaaaa

SEQ ID NO: 4310 - protein, 352 aa, Triticum aestivum
  misc_feature: Ceres CLONE ID no. 883700
  misc_feature: Ceres CDNA ID no. 25401169
MPPSVRTVSIPFADLKERGRDLSGKIEEGLGPDGLGIISISGVPDFPALRRTLLHLAPKVANLPEDVKKGLEDPDSRYNFGWSHGKEKLESGKLDTFKGSYYANPILDVPTADDVLVSRYPSYCRPNIWPADHLPELEIAFKALGKLMLEVGLMLARHCDLYVMQHGVGPYDGESLEQTISRSRCHKGRLLYYFPRQFSTQKEDGDSVSSWCGWHTDHGSLTGLTCGLFMKNSVEVPCPDSAAGLYIRTRDDRVVKVTFGEDELAYQIGETTEILSRGRLCATPHCVQAPSGVNASNVERSTFAMFMQPDWNETLNFPSEIPYHQELIPPNGALTFGEYSERLVNKYYQGKT

SEQ ID NO: 4311 - DNA, 831 bp, Triticum aestivum
  misc_feature: Ceres CLONE ID no. 885763
  misc_feature: Ceres CDNA ID no. 25087596
  CDS (149)..(643): REFERENCED BY SEQ ID NO: 4312
actagtagagcatacgcacacacgacacaccctcctgcctgccattacaaaccacccaccattttcgtacaccacgcgagatcagggcacccggcccaggccagcctcccccagctccaccacgggaccaagaagctcgagggcagccatggccggcgcctccgccagcagcacccgcaagggcggcatcaaggcctactggaagcaccgcgggtacgaccgcctggacgcggccgccgcgcagcgccgcccggccctcgccacggccgagctcggcgccgggggcggggcggcgaccgcgaccgcgggccgtcggcgcgggtggcgcgtgcggcgccgcggcctcgggcggcgccttctgcgcgcgctctcgccgcggcggctgctctcgcggctccgggacgcgtacgtgagcgccatgctccggctcgcgtcctccgccgccgtgggctacgggagcgctcccttctgcgccgcccccgagcccttcgcgcggccgcggccgctcaaggagtacgaggagaaggtgctggtggagatgtaccgctccatcctggcccgcggcggcgtcattcctctctccggcgacgcctccctggtggtcagccccgccccgctgccggccacggccaccgtggcctgagcgcccacaccggtcgactgagcgcggcccggacgctagcttgtcacgccatttgcaccttcgtctcgccgcgcagaactcgtgaactgtactagcaccatctactagcgtgtatgttggaatttctgcggtactacgtcttgctgcaatttgcaaaatggtctacctacgcaaaaaaaaaaaaaaaa

SEQ ID NO: 4312 - protein, 164 aa, Triticum aestivum
  misc_feature: Ceres CLONE ID no. 885763
  misc_feature: Ceres CDNA ID no. 25087596
  misc_feature: Homolog of GI Number: 66779249 NR Desc: similar to ATP
  misc_feature: Homolog of GI Number: 55234580 NR Desc: ENSANGP00000028786
  misc_feature: Homolog of GI Number: 67987177 NR Desc: 4Fe
  misc_feature: Homolog of GI Number: 66779226 NR Desc: Response regulator receiver:ATP
  misc_feature: Homolog of GI Number: 7487567 NR Desc: probable mitochondrial carrier protein
  misc_feature: Homolog of GI Number: 27375632 NR Desc: blr0521
  misc_feature: Homolog of GI Number: 66777714 NR Desc: TPR repeat:Response regulator receiver
  misc_feature: Homolog of GI Number: 15145795 NR Desc: basic proline
  misc_feature: Homolog of GI Number: 15145793 NR Desc: basic proline
  misc_feature: Homolog of GI Number: 67987629 NR Desc: Thymidylate kinase
MAGASASSTRKGGIKAYWKHRGYDRLDAAAAQRRPALATAELGAGGGAATATAGRRRGWRVRRRGLGRRLLRALSPRRLLSRLRDAYVSAMLRLASSAAVGYGSAPFCAAPEPFARPRPLKEYEEKVLVEMYRSILARGGVIPLSGDASLVVSPAPLPATATVA

SEQ ID NO: 4313 - DNA, 914 bp, Triticum aestivum
  misc_feature: Ceres CLONE ID no. 886296
  misc_feature: Ceres CDNA ID no. 25445762
  CDS (148)..(693): REFERENCED BY SEQ ID NO: 4314
acgctctcctcttcttctccaaagcaaccacacctccctccgtgtctcagtagcctctactcgctcgtgctttgggcgattccattccatccgaggagagaagaggagaggaggaggcggcggaggagaagtttggtagggagatcgatggggctgtcgttcgggacgctgttcggggcgctgttcgccaagaaggagatgcggatcctgatggtcggcctcgacgccgccgggaagaccaccatcctgtacaagctgaagctcggcgagatcgtcaccaccatccccaccatcgggttcaacgtggagacagtagagtataagaacatcagcttcactgtttgggatgttggtggccaggacaagataaggcctttgtggaggcactacttccagaacactcagggccttatctttgttgttgacagcaacgacagagaccgtattgctgaggcaagagatgagctccacaggatgctgaatgaggatgagctgcgcaatgctgtattgcttgtttttgctaacaagcaagatcttcccaatgccatgaatgctgctgaaataacagataagcttggtctacactctctgcgtcagcgacactggtatatccagagtgcttgcgccacaagtggagagggtctgtatgaagggctggactggctctccaacaacatagccagcaagtcctgaaggcttccaatggattggcagggccgcagaagcaactagcggctggacaaatgactggaatatgtaggcatgttaaaatgctgccagagtgttgacatgtctttgtaagctctatctttgagcagttatcacactgttactatgttgtatcaatgattgaatgtacacacgaggaaaacctttatgctatagtgaaaatgatgccaaaaaaaaaaaaaaaa

SEQ ID NO: 4314 - protein, 181 aa, Triticum aestivum
  misc_feature: Ceres CLONE ID no. 886296
  misc_feature: Ceres CDNA ID no. 25445762
  misc_feature: null
  misc_feature: Useful for making plants with altered Lignin content
  misc_feature: Useful for making plants with altered alkaloid content
  misc_feature: Homolog of GI Number: 21592942 NR Desc: ADP
  misc_feature: Homolog of GI Number: 21553518 NR Desc: ADP
  misc_feature: Homolog of GI Number: 37791223 NR Desc: ARF
  misc_feature: Homolog of GI Number: 76160984 NR Desc: ARF
  misc_feature: Homolog of GI Number: 50198855 NR Desc: At1g10630
  misc_feature: Homolog of GI Number: 6573751 NR Desc: F20B24.7
  misc_feature: Homolog of GI Number: 47026845 NR Desc: ADP
  misc_feature: Homolog of GI Number: 77999271 NR Desc: ADP
  misc_feature: Homolog of GI Number: 29028258 NR Desc: ADP
  misc_feature: Homolog of GI Number: 52548250 NR Desc: ADP
  misc_feature: Useful for increasing seed/fruit yield or modifying fruit content
  misc_feature: Useful for making ornamental plants with modified leaves
  misc_feature: Useful for sterility
MGLSFGTLFGALFAKKEMRILMVGLDAAGKTTILYKLKLGEIVTTIPTIGFNVETVEYKNISFTVWDVGGQDKIRPLWRHYFQNTQGLIFVVDSNDRDRIAEARDELHRMLNEDELRNAVLLVFANKQDLPNAMNAAEITDKLGLHSLRQRHWYIQSACATSGEGLYEGLDWLSNNIASKS

SEQ ID NO: 4315 - DNA, 1589 bp, Triticum aestivum
  misc_feature: Ceres CLONE ID no. 886770
  misc_feature: Ceres CDNA ID no. 25892048
  CDS (60)..(1307): REFERENCED BY SEQ ID NO: 4316
aagacagcaaaggagtagagtagttggtgttgttgcagagttccgttggcaggcacaccatgtccctctccaccgcctcccgccgcgccctcagccggatcggtggcgccctccggcggtccttctcgtcgtcgtcggtgccggacgcctcggggtaccacgtgtccggtgggccgagcttcatgcgcgcggccgtgttctgggagcccggccgcccgctcaccatggaggagttccgcatgccgcgccccaaggccggcgaggtcctcgtcaagaccaaagcttgtggagtctgccactctgatctccatgtcatgaaaggcgaactccctttcgccagcccttgtgttgttggccatgagatcaccggggaggttgtcgaccatggcatgcacacgcccgctgagatcgtcaataggttcccagttggcagtcatgttgttggagccttcataatgccctgtgggaattgcttttactgtgtgaagggccaggaagacctctgtgagtctttctttgcgtataatcgtgctaaaggaacactatacgatggtgaaacccgactgtttctacgcagcaacggaaaaccagtgtacatgtacagtatgggcgggcttgcggagtactgtgttgtgccggccaatgcactagcaattcttcctaactcgttgccgtacacagagtcagccattctaggatgtgctgtgttcaccgcgtatggcgctttgaggcatgctgctgaaatgcgtgccggtgattcagtagcagtgattggggttggaggggtcggatcaagctgtttacagatagcaagagcctttggagcttccgaagtcattgcggtagatgttcttgatgagaaacttcagaatgcaaaaacacttggagcaacccacactgtaaacgcagctaaagaagacgctgttgaaaggatcaaggaaattactggtgggagaggtgtggatgtggctgtggaggcacttggcaaggcattaacattttcccagtgcacccaaagtgtgcgagatggaggtaaagctgttatgattgggcttgctgcaacaaacgtagtaggcgaggtggatataacccgtcttgttcgccgacaggtcaaaatcattggctcgtatggtgcaagagccaggcaagatcttcctcagatagtcaagcttgctgagagcggcgccttcaatctcgagaacgccatatcaaggaaatgcaaattcgaagaggcaaacagcgcctatgaggatctcaaccagggcaagatcgttggccgggctgtagttgaaatcatgcagtgctgacgagatgatcatgtggtcgaaagtctgggtcaaacaaataagaatatgccgcgacaaccctgcgaactcggtttgtcttgcagcatggtctcactccctgatttgtgttggatgcaaaaaattgttgattgaaagattgttgtgctcacaaggagatgtctatctcagtttgttcttctttccatcacatactgtgaatattgggtatacaatttgcttatacagttctgcagccagatttctggtttctaatgttacaaaatcgtcgcaaaaaaaaaaaaa

SEQ ID NO: 4316 - protein, 415 aa, Triticum aestivum
  misc_feature: Ceres CLONE ID no. 886770
  misc_feature: Ceres CDNA ID no. 25892048
  misc_feature (231)..(374): Pfam Name: ADH_zinc_N PFAM Desc: Zinc
  misc_feature: Homolog of GI Number: 15982719 NR Desc: AT5g63620/MBK5_9
  misc_feature: Homolog of GI Number: 10177043 NR Desc: alcohol dehydrogenase
  misc_feature: Homolog of GI Number: 21554156 NR Desc: alcohol dehydrogenase
  misc_feature: Homolog of GI Number: 30697875 NR Desc: oxidoreductase
  misc_feature: Homolog of GI Number: 50940385 NR Desc: putative alcohol dehydrogenase
  misc_feature: Homolog of GI Number: 67988729 NR Desc: Zinc
  misc_feature: Homolog of GI Number: 15897400 NR Desc: Alcohol dehydrogenase
  misc_feature: Homolog of GI Number: 15922376 NR Desc: hypothetical alcohol dehydrogenase
  misc_feature: Homolog of GI Number: 70607861 NR Desc: conserved alcohol dehydrogenase
  misc_feature: Homolog of GI Number: 41033589 NR Desc: Zn
MSLSTASRRALSRIGGALRRSFSSSSVPDASGYHVSGGPSFMRAAVFWEPGRPLTMEEFRMPRPKAGEVLVKTKACGVCHSDLHVMKGELPFASPCVVGHEITGEVVDHGMHTPAEIVNRFPVGSHVVGAFIMPCGNCFYCVKGQEDLCESFFAYNRAKGTLYDGETRLFLRSNGKPVYMYSMGGLAEYCVVPANALAILPNSLPYTESAILGCAVFTAYGALRHAAEMRAGDSVAVIGVGGVGSSCLQIARAFGASEVIAVDVLDEKLQNAKTLGATHTVNAAKEDAVERIKEITGGRGVDVAVEALGKALTFSQCTQSVRDGGKAVMIGLAATNVVGEVDITRLVRRQVKIIGSYGARARQDLPQIVKLAESGAFNLENAISRKCKFEEANSAYEDLNQGKIVGRAVVEIMQC

SEQ ID NO: 4317 - DNA, 1121 bp, Triticum aestivum
  misc_feature: Ceres CLONE ID no. 886813
  misc_feature: Ceres CDNA ID no. 40351454
  CDS (27)..(947): REFERENCED BY SEQ ID NO: 4318
accacactgcgtgtcgcggaccggccatgtcttgcctagccgcggcctcggcgacgccgccagcgtcaaggcctacggcccagcgtctgtttgttgcggtggccgctcctccccgttggcggtccgttgagcctcatcccgctgtatggaggagtgaaggcccccgggctctaacgatgctacggaggtgctctcccgccggcgactccagggcgcccggagacggcagcctttccagtttttgcattattgaaggcccagagacaatacaagacttcgttcagatgcaatcacaagagattcaagacaacatcaagagtcggcgcagcaaaatattcgttttgatggaagaggtcagacgactgcgggtgcagcagcgaatcagagctgctgaaagcagatgttccagcagtgaagaaaatgagatgccggagatgccatctaccattccgtttttgccttatacgttgtcaccaaagacaatgaagcaactctacttgacatcattctctttcatatctgggataatcatttttggtggcttaatagccccaatacttgaactgaaattagggcttggtggtacctcttatgaagattttatacggaacatgtatttgcctcttcagttaagtcaggtagatcccatagtggcgtccttttcaggtggtgcagttggtgtaatttcagccttaatgttggttgaagtgaaaaatgtgaggcagcaagaaaagaacagatgcacatattgccatgggacaggatacctgccatgtgcccgttgctctgccagcaaaatgttgttgggcaccaaacgcttttcactttctacaactgaacgctgttccaattgttcaggagctgggaaggtgatgtgcccaacatgcttgtgcacgggaatggcaatggcaagtgagcatgacccacgtatagatccctttgattaatgttgggcaatttgacgggtgcctgcttgttatgctatttcctttttctatctagctgttgttttctatggctgtggtagggcttgaatcagtctttgatgtatactacgagttatagcgagatgaagttcgcattaatgatgatcagatcaaataccaaaaaaaaaaaaaaaa

SEQ ID NO: 4318 - protein, 306 aa, Triticum aestivum
  misc_feature: Ceres CLONE ID no. 886813
  misc_feature: Ceres CDNA ID no. 40351454
MSCLAAASATPPASRPTAQRLFVAVAAPPRWRSVEPHPAVWRSEGPRALTMLRRCSPAGDSRAPGDGSLSSFCIIEGPETIQDFVQMQSQEIQDNIKSRRSKIFVLMEEVRRLRVQQRIRAAESRCSSSEENEMPEMPSTIPFLPYTLSPKTMKQLYLTSFSFISGIIIFGGLIAPILELKLGLGGTSYEDFIRNMYLPLQLSQVDPIVASFSGGAVGVISALMLVEVKNVRQQEKNRCTYCHGTGYLPCARCSASKMLLGTKRFSLSTTERCSNCSGAGKVMCPTCLCTGMAMASEHDPRIDPFD

SEQ ID NO: 4319 - DNA, 715 bp, Triticum aestivum
  misc_feature: Ceres CLONE ID no. 887001
  misc_feature: Ceres CDNA ID no. 25891770
  CDS (88)..(423): REFERENCED BY SEQ ID NO: 4320
accattacaatcacttagcaaatctagctatttcatcatctctgcctgagctcaccaccactactagtgctagctagcttgatcgtgatggcccattctgctgttgctcaggtcgtgctcgtcgccgtggtggccgctatgctcctcgcagccacggaggcggccgtatcgtgcggtcaggtgagctctgccttgagcccctgcatctcctatgcacgcggcaacggcgccaacccgtctgcggcctgctgcagcggcgttaggagtctagccagctcagcccggagcaccgctgacaagcaagcggcgtgcaagtgtatcaagagcgctgctgctgggctcaacgctggcatccccacaaagtgcggcgttagcgtcccctacgccatcagctcttcggtcgactgctctaagattcgctgatcgagcacttgctgccatcgctgttgccatcgtcccctgcgccatcgttgctggatctacgcttagtatgttgaggtcacacacacgcacacacacacatatatatgaacaaatgctctcatattatctcactgcgtgagagagagagaagtacgtacgtcaagcagctctgcatggccggcccgagtttggttgttcctccactccccgagtatgctgtactttgtaccatgtgtaattttgatatatggattgtatactcagctgatcagctccaaaaaaaaaaaaaaaa

SEQ ID NO: 4320 - protein, 111 aa, Triticum aestivum
  misc_feature: Ceres CLONE ID no. 887001
  misc_feature: Ceres CDNA ID no. 25891770
  misc_feature (29)..(107): Pfam Name: Tryp_alpha_amyl PFAM Desc: Protease inhibitor/seed storage/LTP family
  misc_feature: Homolog of GI Number: 56713113 NR Desc: type 1 non
  misc_feature: Homolog of GI Number: 56713117 NR Desc: type 1 non
  misc_feature: Homolog of GI Number: 1098265 NR Desc: lipid transfer protein
  misc_feature: Homolog of GI Number: 443799 NR Desc: Cw
  misc_feature: Homolog of GI Number: 1045199 NR Desc: lipid transfer protein
  misc_feature: Homolog of GI Number: 1045201 NR Desc: lipid transfer protein
  misc_feature: Homolog of GI Number: 1098266 NR Desc: lipid transfer protein
  misc_feature: Homolog of GI Number: 54111986 NR Desc: lipid transfer protein
  misc_feature: Homolog of GI Number: 587446 NR Desc: lipid transfer protein precursor
  misc_feature: Homolog of GI Number: 642017 NR Desc: phospholipid transfer protein precursor
MAHSAVAQVVLVAVVAAMLLAATEAAVSCGQVSSALSPCISYARGNGANPSAACCSGVRSLASSARSTADKQAACKCIKSAAAGLNAGIPTKCGVSVPYAISSSVDCSKIR

SEQ ID NO: 4321 - DNA, 1442 bp, Triticum aestivum
  misc_feature: Ceres CLONE ID no. 887373
  misc_feature: Ceres CDNA ID no. 40041356
  CDS (280)..(1179): REFERENCED BY SEQ ID NO: 4322
attttccaccacctgctctactctgctctgctcctccccagcccacgcccccgcccccgcccccgtcccccgcctccatctcctcgcatcgcacgcacgcacgcacgcacgcactcacctgcgctgctcagattccttattacatcaccgccggccagtgcgcaaccaccgctccgccgcgcctcctgctgctagctgccgccccgccgccggcgcctaatgcgggccggtggctaagcctaagccctccgggtccgggcgtgtgagagacagagagacatgggggagggcgcggtggtggtgctggaggcgcccaagcccaggtcgccgccgaggtacccggacatgtgcggccgccggcgcctgcagctggaggtgcagatccttgaccgcgagctcacgttcctcaaggacgagctacatttacttgaaggggctcaaccagtctcacgttctggttgcttgaaagaggtaaatgagtttgttggtacaaaacaagacccgctaataccaattaacaaaaggaagcaccggtcctgccgtctttactggtggatcagatcaaaactgtgcatatgtgcttcatggctgtgctgctcctgccaatgcctaccaacttgcaaaagaccaatgtgcttggactgttcatgctgcaaaccaaattgctcatgctgcagcccaaactgctgcagctgcttcaagatcccttcatgctgcaaaccaagctgcggctgcttcgagtgctgcagctgcagcaagccacagtgctgcagcagcggctgtaacccttgcggcgagtgcaagcccgagtgcggctcatgttcgggcggcggcggctgctgcggcgactgcaagccaagctgcagctgctgcggcgagcagtgctgcagctgcgcaggctgctcctgccctcggtgcacggggggctgcttcaagctccccaaatgctcgtgcgcgcggtgcttcaactgccagtcgtcgtgctgcaaggggcagccgtcgtgcttcaggtgccagtcgtcgtgctgcgacaagggaggctgctgcagcggcgggtcgtgcctgagctgcccgaagccgtcgtgccccgagtgctcctgcgggtgcgtgtggtcgtgcaaaaactgtacagacggatgccgatgcgcccggtgctgtgctggcgggtgcctgtgttaaattaggccacatggtgtttaagcctttctcttttggtagtagttgcctttgtgcttgctgtttaagccgttgtttgggtccgttcggggccttgacatacggtggtgtttcacatgtatgtaaagaaataacttgacctccggatcacaaggcggagtgagtagctctagtatcagtagccaagttatatatattggtgatgcacattgtcaaccattttacagggattttatttttattttttattaaaaaaaaaaaaaaaa

SEQ ID NO: 4322 - protein, 299 aa, Triticum aestivum
  misc_feature: Ceres CLONE ID no. 887373
  misc_feature: Ceres CDNA ID no. 40041356
  misc_feature: Homolog of GI Number: 51535990 NR Desc: putative keratin associated protein
  misc_feature: Homolog of GI Number: 82915649 NR Desc:  keratin associated protein 5
  misc_feature: Homolog of GI Number: 83715996 NR Desc: keratin associated protein 5
  misc_feature: Homolog of GI Number: 82915651 NR Desc:  keratin associated protein 5
  misc_feature: Homolog of GI Number: 7657283 NR Desc: keratin associated protein 5
  misc_feature: Homolog of GI Number: 7657285 NR Desc: keratin associated protein 5
  misc_feature: Homolog of GI Number: 34223444 NR Desc: UHS KERB
  misc_feature: Homolog of GI Number: 54400749 NR Desc: keratin associated protein 5
  misc_feature: Homolog of GI Number: 60593038 NR Desc: keratin associated protein 5
  misc_feature: Homolog of GI Number: 38258233 NR Desc: Keratin associated protein 4
MGEGAVVVLEAPKPRSPPRYPDMCGRRRLQLEVQILDRELTFLKDELHLLEGAQPVSRSGCLKEVNEFVGTKQDPLIPINKRKHRSCRLYWWIRSKLCICASWLCCSCQCLPTCKRPMCLDCSCCKPNCSCCSPNCCSCFKIPSCCKPSCGCFECCSCSKPQCCSSGCNPCGECKPECGSCSGGGGCCGDCKPSCSCCGEQCCSCAGCSCPRCTGGCFKLPKCSCARCFNCQSSCCKGQPSCFRCQSSCCDKGGCCSGGSCLSCPKPSCPECSCGCVWSCKNCTDGCRCARCCAGGCLC

SEQ ID NO: 4323 - DNA, 1339 bp, Triticum aestivum
  misc_feature: Ceres CLONE ID no. 889137
  misc_feature: Ceres CDNA ID no. 40351455
  CDS (144)..(962): REFERENCED BY SEQ ID NO: 4324
acacggcagagttttcccctttcccccctcctccctccccactcgccaaaaatcctcgatccaaatccccactcccggcgacgcgacgcggccatgcgcagctgccgataggcgacgactgcagcgaccacgcacgagcggccatggacgagggctacgccagcctccccaccagccacctcctcggctccgtccccgctgtggctgtggctcccgatgagaggaagcccggtgcccccgccgaagttggaaatgccgctgccacctcgcgccttcagcagtttccgcctgctcctgctgccaacggaggagggtaccagcctccagggagtcctctaggtggagatgtagaaacacagacaaactggaaaggatacttcaatgttgcctcttatactccatatttcaatgttgatactgatgtcgttgttgacagacttatcagttcagtttatccaatggatgggtttttcaggaagatagatgctaatcctgacatgtatggacccttatggatcaccactacactgatattcatgctggctgcattcggaaactttgccacttatctaatgcaaaggaaaagtgatctgaatatatggaactttgatgtcagctatttcagtttggcggcatcagtcatgtacggttatgctatcgtggtacctgctgcattctttttcctgtttcagtactttggatcacgcccaagccttctccggttttggtgtatgtggggctattctctgttcatcttcgtgccggcatctatactgctccttattcctgtggaatttcttcgctgggtcatcatagctggtgctggtggtgcatcatcttggttcatctttttaaacttgaaggaatgcaccgaaggagctgatatgatggctttaatcgcaagtgcagcagtgctgcagtttgctctggcactgttcatcaaagttttcttttttgcctgagatctattctgtgttgcttcaggtgagctggatgttttctttgtgtccccgtcgttctgttctgccattcatctttccgaggaccaggcagtggactagtttcaccctacatacatattgaccctagatttgatagaccttgggagtgtctgttttcaagatttttgactcctgtagttaagggaatttcactgtgtgcgttccagtgcgaagttactaagtttgcatctaaatttgtacctggtgaactttctgccaccgtgttgtacaacaacggtggttagcaagaatgtgaagctcttttttgtttgtacaatccattgctgtgaatgcatggttttctcatgtttctatccagcataaaaaaaaaaaaaaaa

SEQ ID NO: 4324 - protein, 272 aa, Triticum aestivum
  misc_feature: Ceres CLONE ID no. 889137
  misc_feature: Ceres CDNA ID no. 40351455
  misc_feature (88)..(252): Pfam Name: Yip1 PFAM Desc: Yip1 domain
MDEGYASLPTSHLLGSVPAVAVAPDERKPGAPAEVGNAAATSRLQQFPPAPAANGGGYQPPGSPLGGDVETQTNWKGYFNVASYTPYFNVDTDVVVDRLISSVYPMDGFFRKIDANPDMYGPLWITTTLIFMLAAFGNFATYLMQRKSDLNIWNFDVSYFSLAASVMYGYAIVVPAAFFFLFQYFGSRPSLLRFWCMWGYSLFIFVPASILLLIPVEFLRWVIIAGAGGASSWFIFLNLKECTEGADMMALIASAAVLQFALALFIKVFFFA

SEQ ID NO: 4325 - DNA, 1650 bp, Triticum aestivum
  misc_feature: Ceres CLONE ID no. 889198
  misc_feature: Ceres CDNA ID no. 25447174
  CDS (211)..(1533): REFERENCED BY SEQ ID NO: 4326
acgcctattctcgtcactgtttcatgtcgatcgactgcgactgccagtagtagtaggagagagcgccaaggacgcgcccgcgtactgccaaacacaagccgcggtgcacccgtgccaccgttcgcccggctcctgtcgtccgcacacacgataatcctcaccggcgagcgcgcagctctcgatctggtaccttcctgctctgtcgtccccatgtcgcccgtgaggattatcgacgcgagctatgtgggcgtgccggagaccgccgcgactccgccggggccgatcaggttcaccgccatggaggcgctctgggtcgtcttccccgtgctgcagcacgtcctgctctacgagggcgacgacatgccgccattcaacgccattatcgagtccctccgctcctccctcgccgcgactttggaaagcttcgtgccgctcgccggcaagctggtccacctcgaggagacgggggacgtcggcatcagctgctccgcctccgacggcgtcaggttcgtcgtcgccgagtgcgacgcagacatcggacgtctggccggcgacgaggagcacgacctgcgcgtgctcgaggcgctcgtgccggaggtggacatgagccagcttcccaccgccgtgctggccgtgcaggccacccgtttagtgggcggcgtggccctcggggtgacggtgcaccacggtgccgccgacgggcgggcgctgtggacgttcgtcgaggcgtgggcgacggcgtgccggggcgagacgccggccgccacgccgtgcttcgaccgctcgctcgtcaagatgcccggcggcgacgacctggccaggagtgtcctgcggaagttcgctccaaatttgccctcggtggcactagcatcatcagtcttcgaagaccgaaagcggctcattcgccgaacgttcaccttggacgaaggagacatccaacgcctgaagcagcacatcgtccacctcaacgagtcgggcggcacgcccctgcctcgcccgccgtctgctttcgccaccgtcgtcgcactcgcgtggacgtgcttcgcccggtgcaagtcgttctccttggaggacgacgtgtggctcttcttcttcgccgacatccgtgagcgccttgaccctcccgtcggcgcggggtacattggctcgtgcctcaccaagtgcttggcaaggctccccgcccgggagcttcatggcgagcgcgccctggcggctgcggctgcggcggtccaaggcgagatcaacaagatgaaggaagaccctatcgctgggtggaatttcttctcattcgatcccatgccttccatggaccggctaatgaacatatcaggctcgtcgggttttagtgcataccagatcgccgactttgggtggggcaagccaaggcgaacagagccgattaggatgaactcggatggtcaggtggcactgatgggcagcagggatggccggggtgtgcaggtctcagtggcactgctccaagcggcacaaatggacgagttcaaatctaactttctggcgctacttgagtgacaatatttgttctcaaagagacctacttaggtcacttcaaaacagtacaccgaaatgttttataaacattaatacattataattgaattgtttatttaactaaaaaaaaaaaaaaaa

SEQ ID NO: 4326 - protein, 411 aa, Triticum aestivum
  misc_feature: Ceres CLONE ID no. 889198
  misc_feature: Ceres CDNA ID no. 25447174
  misc_feature (8)..(284): Pfam Name: Transferase PFAM Desc: Transferase family
  misc_feature: Homolog of GI Number: 50929053 NR Desc: OSJNBb0034I13.21
  misc_feature: Homolog of GI Number: 50929055 NR Desc: OSJNBb0034I13.22
  misc_feature: Homolog of GI Number: 50941591 NR Desc: putative Anthocyanin 5
  misc_feature: Homolog of GI Number: 31431959 NR Desc: putative anthocyanin 5
  misc_feature: Homolog of GI Number: 55297127 NR Desc: putative anthocyanin 5
  misc_feature: Homolog of GI Number: 50929051 NR Desc: OSJNBb0034I13.20
  misc_feature: Homolog of GI Number: 57899019 NR Desc: acyltransferase
  misc_feature: Homolog of GI Number: 55297123 NR Desc: putative anthocyanin 5
  misc_feature: Homolog of GI Number: 29824113 NR Desc: putative anthocyanin 5
  misc_feature: Homolog of GI Number: 11994162 NR Desc: anthocyanin 5
MEALWVVFPVLQHVLLYEGDDMPPFNAIIESLRSSLAATLESFVPLAGKLVHLEETGDVGISCSASDGVRFVVAECDADIGRLAGDEEHDLRVLEALVPEVDMSQLPTAVLAVQATRLVGGVALGVTVHHGAADGRALWTFVEAWATACRGETPAATPCFDRSLVKMPGGDDLARSVLRKFAPNLPSVALASSVFEDRKRLIRRTFTLDEGDIQRLKQHIVHLNESGGTPLPRPPSAFATVVALAWTCFARCKSFSLEDDVWLFFFADIRERLDPPVGAGYIGSCLTKCLARLPARELHGERALAAAAAAVQGEINKMKEDPIAGWNFFSFDPMPSMDRLMNISGSSGFSAYQIADFGWGKPRRTEPIRMNSDGQVALMGSRDGRGVQVSVALLQAAQMDEFKSNFLALLE

SEQ ID NO: 4327 - DNA, 1107 bp, Triticum aestivum
  misc_feature: Ceres CLONE ID no. 889341
  misc_feature: Ceres CDNA ID no. 35383307
  CDS (119)..(787): REFERENCED BY SEQ ID NO: 4328
ctcatcactccagtacacagtgccacggttcgacagacttccagagacggacaccatcatccaccggcgaggcttccacctccgacgaacccgccccgcccgctcggggcccgacaccatgtccatctcgctgcgcctcgccatccccaccgcggcgccctgccccgtgccgccgcggacggcccggcccgccgggaatgcggcctgctcccccgcccccgccgcgcggacggccgcgctcaggggatgcgccgctctgccgatgaggccgctgcccctgggcgcgggcgcggcgcggccgtgccggggccgggggagcggcatcgtgtgcaacgcgtcggcgtacctcagcccgcccacgacgcagtgggtctccgtcgcggccgccgcagtgctattgcttgctaaaggcactggcatacacaaatctttcctcgtgccattgtttgttctgcaagcacctaccgccgtgatctcatggatcaagagtgaatatgggctgtggactgcttttcttgcgcttgtggtgcgtttgttcttaccctttccaggtgagctagagcttccgctgtcaacgatgctggcagtcagcgttgccccttaccaggtgatgaatgtgaggggaactcaaggtggcgcgatagtgtcgttggcactagccgcgtacctcgcctttcagcacttcaccaggaccggaggaataggaaaagccttcgatcagggatcgatagttgcaaccatggccatcatctgtatcgcagttatcaatgtgatcctgctgttctgagttgccaagagcctcttcagagtgcagatataaataaaaaagaaaccttgtagcgcatcatcctgtcagattttgtagcttgttttatcataataagaatgacctctgagttgtgacatgactgatggtatatatctccatgtgcggtattgtttgcgcagtagttgtgtcttgtgtgatacagtgttagtgttcagttattcctgatggccagtttctctcctcctttgtcgatcctcttgctcatcttggcatcaaaactttggtgcaaagagctatctgatacttcccctttgtttcacataaaaaaaaaaaaaaaa

SEQ ID NO: 4328 - protein, 222 aa, Triticum aestivum
  misc_feature: Ceres CLONE ID no. 889341
  misc_feature: Ceres CDNA ID no. 35383307
  misc_feature (17)..(215): Pfam Name: WCOR413 PFAM Desc: Cold acclimation protein WCOR413
  misc_feature: Homolog of GI Number: 18449100 NR Desc: cold acclimation WCOR413
  misc_feature: Homolog of GI Number: 27902669 NR Desc: cold acclimation protein COR413
  misc_feature: Homolog of GI Number: 27902677 NR Desc: cold acclimation protein COR413
  misc_feature: Homolog of GI Number: 51854280 NR Desc: cold acclimation protein COR413
  misc_feature: Homolog of GI Number: 18397074 NR Desc: stress
  misc_feature: Homolog of GI Number: 42571691 NR Desc: stress
  misc_feature: Homolog of GI Number: 27902671 NR Desc: cold acclimation protein COR413
  misc_feature: Homolog of GI Number: 27902673 NR Desc: cold acclimation protein COR413
  misc_feature: Homolog of GI Number: 21360378 NR Desc: stress
  misc_feature: Homolog of GI Number: 19919 NR Desc: Pistil extensin like protein
  misc_feature: Useful for making ornamental plants with modified leaves
MSISLRLAIPTAAPCPVPPRTARPAGNAACSPAPAARTAALRGCAALPMRPLPLGAGAARPCRGRGSGIVCNASAYLSPPTTQWVSVAAAAVLLLAKGTGIHKSFLVPLFVLQAPTAVISWIKSEYGLWTAFLALVVRLFLPFPGELELPLSTMLAVSVAPYQVMNVRGTQGGAIVSLALAAYLAFQHFTRTGGIGKAFDQGSIVATMAIICIAVINVILLF

SEQ ID NO: 4329 - DNA, 825 bp, Triticum aestivum
  misc_feature: Ceres CLONE ID no. 889354
  misc_feature: Ceres CDNA ID no. 35383308
  CDS (242)..(634): REFERENCED BY SEQ ID NO: 4330
aagactttgggctcacccgatgcttttcccctcccccacagccctcgtcctcttggtcggatcttctctctcgagtcttgtccaggccgcgccgccacagccacgccgcctagtgctatagttcttccctcccctcccctccctccatcccaccggccgcctgcgtccaatccgtcctgttgattccgaattttcaatcaatctttctaacaacagctagcttcttctcccccttccgcagatggagatgccgacgggttcttcgcaggcaggtggccgcttccctgtgccgcacaagtccctctccttggatatcaagggcaacaagactgacattgttatcagcaaatacgaagataactttctggtcattgtgacacagattggatgcatgggaaccatattagctgctaagaaagatgaaagtgttttctctgatccaacctacaatgtatctgttctttttgggaagagggatgagccactcctgctagcttgtgcacgccaacttatcgagcatataagtggtagtggctcagctcggccgttggtgatctctcttggtttgaaggatcattcccagggaacattgaaagatgtagtttctgccattgttgacaaccgcctatggtgataactttgcaaaggttgggatgggcatttacagtttcggttcatctacagagatattgacatacacaagctgtcagagcaaaaccagcccttccttaccatgcatgaatctctagaaactatgtaattggaatttattccagattcagttatcatgaggtgatttcccaactaacaaaaaaaaaaaaaaaa

SEQ ID NO: 4330 - protein, 130 aa, Triticum aestivum
  misc_feature: Ceres CLONE ID no. 889354
  misc_feature: Ceres CDNA ID no. 35383308
  misc_feature: Homolog of GI Number: 55741043 NR Desc: putative integral membrane protein
  misc_feature: Homolog of GI Number: 34894978 NR Desc: B1088D01.11
  misc_feature: Homolog of GI Number: 50540128 NR Desc: zgc:92917
MEMPTGSSQAGGRFPVPHKSLSLDIKGNKTDIVISKYEDNFLVIVTQIGCMGTILAAKKDESVFSDPTYNVSVLFGKRDEPLLLACARQLIEHISGSGSARPLVISLGLKDHSQGTLKDVVSAIVDNRLW

SEQ ID NO: 4331 - DNA, 918 bp, Triticum aestivum
  misc_feature: Ceres CLONE ID no. 889519
  misc_feature: Ceres CDNA ID no. 15224270
  CDS (95)..(593): REFERENCED BY SEQ ID NO: 4332
ataatatctctctctcctctccccctcccctctctctcctccactcgtcgccgccgtccaatctccggcgagatcccctcccccgccggcagccatggcttccaccttcagcggcgacgagaccgcccccttcttcggcttcctcggcgccgccgccgccctcgtcttctcctgcatgggcgcggcgtacgggacggccaagagcggggtgggggtggcgtcgatgggggtgatgcggccggagctggtgatgaagtccatcgtgcccgtcgtcatggccggggtgctcgggatctacggcctcatcatcgccgtcatcatctccaccgggatcaaccccaaggccaagccctacttcctcttcgacggctacgcgcacctctcctccggcctcgcctgcggcctcgcggggctcgccgccggcatggccatcggcatcgtcggcgacgccggcgtcagggccaacgcgcagcagcccaagctgttcgtcggaatgatcctcatccttatctttgccgaagcccttgccctgtacggcctcatcgtcggcatcatcctctcctcgcgtgccggccaatcccgcgccgactagaaacaaatcgcttgcaagcaaggagcatacggtccatcattgtattctgtttgaaagggtttatttcttcttagagacttgtttggcattacactgtggttctacttctgtgttcatgatcaaggaacataatgtggttgggatcatagggatttccacgccctccatctgtaattttattctatgttcggcaacacaaagctacctgtatctactcgtcgtacctagcacctgttgtatttattgtttggagtaataatcggcgatgagcctcttgggacgtgatgagtgaataagcaaagttagacccaaaaaaaaaaaaaaaa

SEQ ID NO: 4332 - protein, 165 aa, Triticum aestivum
  misc_feature: Ceres CLONE ID no. 889519
  misc_feature: Ceres CDNA ID no. 15224270
  misc_feature (14)..(79): Pfam Name: ATP PFAM Desc: ATP synthase subunit C
MASTFSGDETAPFFGFLGAAAALVFSCMGAAYGTAKSGVGVASMGVMRPELVMKSIVPVVMAGVLGIYGLIIAVIISTGINPKAKPYFLFDGYAHLSSGLACGLAGLAAGMAIGIVGDAGVRANAQQPKLFVGMILILIFAEALALYGLIVGIILSSRAGQSRAD

SEQ ID NO: 4333 - DNA, 2123 bp, Triticum aestivum
  misc_feature: Ceres CLONE ID no. 890246
  misc_feature: Ceres CDNA ID no. 40351457
  CDS (36)..(1751): REFERENCED BY SEQ ID NO: 4334
atacaaaattcctggctccgtccctggcagaggccatggatggagaagacgcgcaccacaggccctcttcctcctcctcgtccggcggcccctttctctccggcctctgcgccgccgcgctccgccgcaagcccatctccgcgcgcgcctctgccgccgcctccggcgagggcctcgtgcggcagctcggcgtcctcgagctcgtgctcctcgggatcggcgcgtccatcggtgccggcatcttcgtcatcaccggaaccggcgcccgcgacgccggcccaggtgttacaatcagttttgctctcgctggagctgcgtgtgtgctcaatgcattgtgctatgctgaactggcatctcgttttcctgccgtggtcgggggagcatacttgtacacatatgcagcgtttaatgaactcacggccttcttggttttcacccagttgatgcttgattaccatattggggctgcaagcattgctcgtagcctagcaagctattttatccaattcttggagctgattccttctgtgaaaggcaatgttccgagttggattgggcatggagaagagttttttggtggtgtcgtttcagttaacatattggctccaatccttcttgtcatcctgactgtgatcctatgccgcggtgtcaaagaatcatctgcagtgaatacctttatgactacattgaagataatcatcgtcatagtcgttgtatttgctggtgtgtttgaggtggatgtatcaaactggtcaccatttatgccgaatggtttcaaagctgttgtaaccggatctacagtagtcttctttgcatatgttggattcgatgcagttgctaattctgccgaggaagctaaaaacccacagcgggacttgcctattggcatcctaggaagccttctggcatgtgtcatcctatatgttgctgtatgcttggtgattactggaatgttgccatatacattactgggtgaagatgctcccttggctgaggctttttctgcaaaggggctgaaatttgtaactgttttgatcagcattggagctgttgctggtcttactacaacacttcttgttggtctgtatgttcagtcacgtttgtatcttggacttggaagggatggcctactaccttcaatattttctaaagttcatccaacactgcatactcctctgcactctcagatctgggttggttgtgttgcagcagtcttagctggcctctttaatgtgcatgcactctctcatattctctcagttggcacactgacaggctactcggttgtatcagcttgtgtgatcacacttcgatggagcgacaaagcaactaattctcgctcccttggaaaattttcaatctggcaggagggtgttttttgtcttgtcatagtggctctctgtggtttcatagcaggaatatcctaccggtttagctattctattgccttcatcatcatagcttttctgatagctacagtcggcagtttttctctgctgtttcgacaggtgtatgttcctgtggacccacctcgcttttcttgtcctggagttcctatggttccgattgtctctgttttcttcaatatgtttttgtttgctcagctacatgaagaagcttggtacagatttgtcatccttagtctcatcgcggtgggggtatatgctggatatggtcagtacaacgctgttccgtctacttcggaccactcgtctgttgcgtatcatggagtgccttcggaagccccatgatctattgcaagcctccaagtttatctgaaaatccatgtaccattggatcgtcaggggaggccatggccgtaagcctacctgtattgctcgaagccgtatgtgtagtatgttctccatagttccatatgtacatctgtatgatattttggaggtcagccaccatatcatttaccaatgaaatgacagcgaaagttttgttgagcaggatacacacacacagacacaccaaagattcacttggaaaggctttgaaagtcacgattgaaagctttatgtacttgtagtattacagttcataacttcatacatgtacttaattcatctgaaaaaaaacttagttcgtaagtgttgttaccaaaaaaaaaaaaaaaa

SEQ ID NO: 4334 - protein, 571 aa, Triticum aestivum
  misc_feature: Ceres CLONE ID no. 890246
  misc_feature: Ceres CDNA ID no. 40351457
  misc_feature (181)..(374): Pfam Name: AA_permease PFAM Desc: Amino acid permease
MDGEDAHHRPSSSSSSGGPFLSGLCAAALRRKPISARASAAASGEGLVRQLGVLELVLLGIGASIGAGIFVITGTGARDAGPGVTISFALAGAACVLNALCYAELASRFPAVVGGAYLYTYAAFNELTAFLVFTQLMLDYHIGAASIARSLASYFIQFLELIPSVKGNVPSWIGHGEEFFGGVVSVNILAPILLVILTVILCRGVKESSAVNTFMTTLKIIIVIVVVFAGVFEVDVSNWSPFMPNGFKAVVTGSTVVFFAYVGFDAVANSAEEAKNPQRDLPIGILGSLLACVILYVAVCLVITGMLPYTLLGEDAPLAEAFSAKGLKFVTVLISIGAVAGLTTTLLVGLYVQSRLYLGLGRDGLLPSIFSKVHPTLHTPLHSQIWVGCVAAVLAGLFNVHALSHILSVGTLTGYSVVSACVITLRWSDKATNSRSLGKFSIWQEGVFCLVIVALCGFIAGISYRFSYSIAFIIIAFLIATVGSFSLLFRQVYVPVDPPRFSCPGVPMVPIVSVFFNMFLFAQLHEEAWYRFVILSLIAVGVYAGYGQYNAVPSTSDHSSVAYHGVPSEAP

SEQ ID NO: 4335 - DNA, 811 bp, Triticum aestivum
  misc_feature: Ceres CLONE ID no. 890291
  misc_feature: Ceres CDNA ID no. 25446245
  CDS (359)..(562): REFERENCED BY SEQ ID NO: 4336
ctcatccagaaataatcactttctccattcgattcttcctcttgctcttgcacccaatctcctcgctacgtagttagctaatctaaccatcagtccaccaaagccaatccactgagtgcgagagctccatctccatctcgatctcgaccaaggagaggaagctagctagctagcaacaggcagcagcaatggcgggcgtgggtcgtaacatggtggcgccgctgctggtgctgaacctcatcatgtacctcattgtcatcggcttcgcaagctggaacctcaaccacttcatcaacggcctcagctgcgtcccggctgtcggcgacccgccgacggtcccgtcgtcgtcgtcgtcgccatgactacctcaagacgtgttgctgataggaaaattgcagtatttgagaagaatatcacgaagaggggttctgttcccgagacagtcaagaaaggaaatgattatcctgttggacctatcgtgcttggattttttgtcttcgttgttgttgggtcatctctgttccagatcatcaggacagcctcaaacgccggtctcttctgagtagattggtgctatgcttatagtgaccatgaacagggctgtcatatgcagttggttgtcggtttaaaactagaactgaatgagatagctggtactcttgtgatgcttgttatacctcttaccattgtacttggtggagtttaagttatatggagatcgtcataccattggactgctaatctgtgttgctcggggcctcatgccattggaaatgttccaatttatatccagttaaaaaaaaaaaaaaaa

SEQ ID NO: 4336 - protein, 67 aa, Triticum aestivum
  misc_feature: Ceres CLONE ID no. 890291
  misc_feature: Ceres CDNA ID no. 25446245
  misc_feature (1)..(64): Pfam Name: RAMP4 PFAM Desc: Ribosome associated membrane protein RAMP4
  misc_feature: Homolog of GI Number: 25403305 NR Desc: protein F17L21.12
  misc_feature: Homolog of GI Number: 77552122 NR Desc: sorbitol transporter
  misc_feature: Homolog of GI Number: 1724112 NR Desc: ABA induced plasma membrane protein PM 19
  misc_feature: Homolog of GI Number: 6851373 NR Desc: plasma membrane associated protein
  misc_feature: Homolog of GI Number: 50936401 NR Desc: putative plasma membrane associated protein
  misc_feature: Homolog of GI Number: 50931285 NR Desc: putative plasma membrane associated protein
  misc_feature: Homolog of GI Number: 310570 NR Desc: a Lea protein with hydrophobic domain
MTTSRRVADRKIAVFEKNITKRGSVPETVKKGNDYPVGPIVLGFFVFVVVGSSLFQIIRTASNAGLF

SEQ ID NO: 4337 - DNA, 1363 bp, Triticum aestivum
  misc_feature: Ceres CLONE ID no. 890364
  misc_feature: Ceres CDNA ID no. 25445504
  CDS (71)..(1171): REFERENCED BY SEQ ID NO: 4338
acagaaacacacggcagaggcagtctaaaccctgtacacgcacagcagcaggagaggtagcttggcagccatggcgaagaaggcggcggtgatcgccacgctgctggccctgaacctgctcttcttcaccttcgccgacgcctgcggctgccactgcggatcctcccgctccgcccactccacatcgcctcccgtcccccacccaccgccgccccgcgcccgcgcccgccaaatgtcggaagacggcggcgctggcgagccgctcagcggcgaccagaagcgggagatcgccgtctggttcctcgccaacgcccccaccggcgagatccactacgtcgccaaagatgtgcgggcgctgctcggggacgacgccgcgtacgaggccgcggccgcggaggcctacccggagtacaacaagacgcacctcctctccctccagctccccgaccgcagcggcgatataatcatcacaacttatggggagattgacaggaacaactatctggaccctaggaccgcacaaattgctaccgtggaccatgttaagcagacttgtacaaaattgaggcctgctgcagatgaggagcttccttcagcatatattgaagagtttaggagtgctatagattatgaagtgtccaaatatgttggtgaagcttatccaaaaggtgtttctgccgtttattgtaccaatggaaaggatctagaggaaccaggagctgattttggtttggcagtagttatctccgctgctaggcgaagcccacgaaacttttgcaatggcagctggcgttccatttggactttggaattcagttatgcgtttcaacttgtagaaattaaaggaaagatacaggtagatgctcattattttgaagagggaaatgtgcagctggatactgacgttgattgcaaggactccacaataatgcagtcgcccgaagacactggacacacagtcgctaacatcattcggcatcacgagtccgagtatttttcatctctcgaggaatcatacttgaatctctccgacgcaacgtttaaggatcttcggaggaaacttccggttacccgcacccttttcccatggcataacacgcatgccatcaccctcacgcgggacctcgccaaagagctagggatagggaaaggaagccatgtcactaggtagcttcgtgtggaatttttatctccatgcaatttgctgttctgtaggctgtacaattcttatcctgtataatcagcagttttcttctttcggttactgtggtttcacatagcggtgtaaatcaagagcttgacctttcttttgtggagaaatcgcatcgccagaatatatgttcatccaaaaaaaaaaaaaaaa

SEQ ID NO: 4338 - protein, 312 aa, Triticum aestivum
  misc_feature: Ceres CLONE ID no. 890364
  misc_feature: Ceres CDNA ID no. 25445504
  misc_feature (15)..(297): Pfam Name: F PFAM Desc: F
  misc_feature: Homolog of GI Number: 34903422 NR Desc: putative alpha subunit of F
  misc_feature: Homolog of GI Number: 3702368 NR Desc: alpha subunit of F
  misc_feature: Homolog of GI Number: 7596760 NR Desc: alpha subunit of F
  misc_feature: Homolog of GI Number: 115593 NR Desc: F
  misc_feature: Homolog of GI Number: 42761509 NR Desc: similar to Dictyostelium discoideum
  misc_feature: Homolog of GI Number: 38322788 NR Desc: capping protein
  misc_feature: Homolog of GI Number: 19922662 NR Desc: CG10540
  misc_feature: Homolog of GI Number: 68270997 NR Desc: capping protein
  misc_feature: Homolog of GI Number: 38322686 NR Desc: capping protein
MSEDGGAGEPLSGDQKREIAVWFLANAPTGEIHYVAKDVRALLGDDAAYEAAAAEAYPEYNKTHLLSLQLPDRSGDIIITTYGEIDRNNYLDPRTAQIATVDHVKQTCTKLRPAADEELPSAYIEEFRSAIDYEVSKYVGEAYPKGVSAVYCTNGKDLEEPGADFGLAVVISAARRSPRNFCNGSWRSIWTLEFSYAFQLVEIKGKIQVDAHYFEEGNVQLDTDVDCKDSTIMQSPEDTGHTVANIIRHHESEYFSSLEESYLNLSDATFKDLRRKLPVTRTLFPWHNTHAITLTRDLAKELGIGKGSHVTR

SEQ ID NO: 4339 - DNA, 1155 bp, Triticum aestivum
  misc_feature: Ceres CLONE ID no. 890667
  misc_feature: Ceres CDNA ID no. 25892864
  CDS (345)..(869): REFERENCED BY SEQ ID NO: 4340
aaaagaaacgccttcgtctccatccacggatccacctcccgcccccgcgcgccgccgctcgccggagcccgcctcgctgcccctgtcaaacccgcccccaatcgtcaactgtgagcctgaattgctagcggacgacagggggcgttagtgagcttcggagggaactattcagagccagccagtcttcttctgttccatagttgcactagggtgaacttccttctttgggaaccggtctcagtcccatccttcctcactaccagatagacggcactcaggagatctacgcaggtggagttccctgtttgtctgcggtgcaccgtacccggcagtcctttgtagccatggtttatcactctagtttcattgacgatgatgggatcacaaaagcctgtgggtgtcctttgcttccactaaaaactcatataaagggcccagccccagccgcggattcagataaggcggatatagttgatgaagcgataactttcttccgagcaaatgttttcttcaaaaacttccatgtcaaaagcccagcagacaaattgctcatctatctgacatcttacatcaatattgccttgaaaagattagaaacctgccggacgctggctgtcggaactaaggcaatcattaacctggggttggaaaaagttcctgtgcctggggaaccagggtttccattccctggacttttcactctcccccaatctggggaggaagcagaactgttgaggaactatctgaagcagataagggaggaaacgagcgggaggctgctcaactgcgcatacagggctaatggcactccaaacaaatggtggttggcttttgcaaagaggaagttcatgaacgttgtcatcctttagagcgtaagcatatcagcaacagcttaagaggcgttcatgtaaatcctgattgcacctgcacatttattcctccggtgatgtaaagattctttctcttgaagacttcaagtatacaatgctgaaaacattttctggcaatgcacctgctgttatcgtggccttcactggatgaatccttcatgttcttcctgtgggtctggcctgaaactggaccgggtttactgtcgatgctgttatgcagattggataatctatctcggttacaattccaaaaaaaaaaaaaaaa

SEQ ID NO: 4340 - protein, 174 aa, Triticum aestivum
  misc_feature: Ceres CLONE ID no. 890667
  misc_feature: Ceres CDNA ID no. 25892864
  misc_feature (1)..(173): Pfam Name: P21 PFAM Desc: P21
  misc_feature: Homolog of GI Number: 50251225 NR Desc: putative actin related protein 2/3 complex
  misc_feature: Homolog of GI Number: 18406746 NR Desc: ARP2/3 complex 21 kDa subunit family
  misc_feature: Homolog of GI Number: 21536845 NR Desc: Contains similarity to 21 KD subunit of the Arp2/3 protein complex
  misc_feature: Homolog of GI Number: 57105594 NR Desc:  similar to ARP2/3 complex 21 kDa subunit
  misc_feature: Homolog of GI Number: 62899893 NR Desc: Actin
  misc_feature: Homolog of GI Number: 5031597 NR Desc: actin related protein 2/3 complex subunit 3
  misc_feature: Homolog of GI Number: 40642998 NR Desc: actin related protein 2/3 complex
  misc_feature: Homolog of GI Number: 62901838 NR Desc: p21
  misc_feature: Homolog of GI Number: 73994597 NR Desc:  similar to Actin
  misc_feature: Homolog of GI Number: 2209347 NR Desc: p21
MVYHSSFIDDDGITKACGCPLLPLKTHIKGPAPAADSDKADIVDEAITFFRANVFFKNFHVKSPADKLLIYLTSYINIALKRLETCRTLAVGTKAIINLGLEKVPVPGEPGFPFPGLFTLPQSGEEAELLRNYLKQIREETSGRLLNCAYRANGTPNKWWLAFAKRKFMNVVIL

SEQ ID NO: 4341 - DNA, 1148 bp, Triticum aestivum
  misc_feature: Ceres CLONE ID no. 890968
  misc_feature: Ceres CDNA ID no. 40351458
  CDS (352)..(954): REFERENCED BY SEQ ID NO: 4342
agacacgagcggagcaccgagcaggcgcgcagcacatcatctgtcacaccggcggcggcggcggcatggggatgggcggtcgaggtgtggttggcgacaggtggtcgcagcgcgtcctctggatgtgcgccatcggcagcgccgtgagcctgtacttcgtggcggtggagaggcaggcgcagaaccgcgcgcgggcggtgtccgagggctttaagggcctggacggcgcagacggaggtggcagccgtggcggggaggacgtgtgactttggcggcgccgattccactaggttttccagctctcccgcacccgccgccgccacctccccactccccaccaccccctcagccatggcggtcgtcgagccggtgcccgggggcgacgtgaagctattcaaccgctggaccttcgaggatgttcaggtgagcgacatctcgctgaacgactacctcgcggtgacgtcgatgaagcactacaccttcctgccgcactcggccggccgctactcggccaagcgcttccgcaaggcgcagtgccccatcatcgagcgcctcaccaactccctcatgatgcacgggcgcaacaacggtaagaagatcatggccgtccgcatcatcaagcacaccatggagatcatccacctcctcaccgacgccaaccccatccagatcatcgttgacgccatcatcaacagtggtccacgtgaggatgctacccgtattgggtctgctggtgttgtgaggaggcaggctgtggatatctcccccctgaggagggtgaaccaggccatctaccttctgaccactggtgccagggagagcgccttcaggaatgtcaagaccattgctgagtgcctcgctgatgagctgatcaatgctgccaagggctcatccaacagctatgccatcaagaagaaggacgagattgagcgtgttgccaaggctaaccgttaagatggatgtgcatctgagggtctcatgcttttggctggagattttggactgaatgtgttttacaagatatctagaactgttttagctatgctttaagtttgtgatgaaagaacatttcgatgtagcggcaaggacttgcctgtctttatgaaaccaattcctgttcagacaaatttggaaaaaaaaaaaaaaaa

SEQ ID NO: 4342 - protein, 200 aa, Triticum aestivum; identical to SEQ ID NO: 4056
  misc_feature: Ceres CLONE ID no. 890968
  misc_feature: Ceres CDNA ID no. 40351458
  misc_feature: The plant flowers significantly late compared to wild-type.
  misc_feature: The plant is abnormally small.
  misc_feature: Useful for making plants with modulated biomass
  misc_feature: Useful for making plants with modulated flowering time
  misc_feature (47)..(200): Pfam Name: Ribosomal_S7 PFAM Desc: Ribosomal protein S7p/S5e

SEQ ID NO: 4343 - DNA, 2077 bp, Triticum aestivum
  misc_feature: Ceres CLONE ID no. 891029
  misc_feature: Ceres CDNA ID no. 40041358
  CDS (114)..(1901): REFERENCED BY SEQ ID NO: 4344
gcttacagtttctttccacacacttcccatccccatgcccctctgatcccgcgccgctccgctccggcattccacccccgatcagcaccgccgcccgatccaatccccaaatcatggcgctcagcctcatgcccccttcaagcattgcccttctcaccccacggggtcccatcggagtcgggccagcggcgccgcctccgccggcgtccagattccgcgccgcctcctcttcaagaaggcgcagcagcagtaggaggagggggccggccgtcgtggcggccacggagggcggacagaaggaggatgaggagggtcccgcagcggcggcggggaggatgaacctcaacgagtacatggtcgccgtcgaccgcccgctcggcctccgcttcgcgctcgccgtcgacggccgcgtcttcgtacactctctcaagagagggggaaatgcagagaagtcgcggatcataatggttggggacactctcaagaaagcaggcactgtccacaacgagggtcttgtcagcataaaagacctaggtgacacggagatggttctaaaacaagagtcaggaccatgcaatcttgtccttgaaaggccagttgcgccttatccaatacaccagttgcatcaaaatgaagattatcatgtcctatttaacagagggagggtttctcttccgacctggaatagtgctatgttgtcctcaaagctgaataaatcatctccaggaaatgggaaatctggttttgctgtattttccccgaggctactaagttcccaaggatgggcgcttttatctagtgagaaagatggactcaataggaggagtacgaaccttgcaaattggatgagtgagattgttggcttttactctgatgaggatgacatggatgctgaatgggcacatggtagttttcctttggaggagtacattaaagccctagaccgtgctaaaggtgaactgtactataatcattcacttggtatgcaatacagcaagattactgagcaaatatatgttggatcatgcatacaaacacaaaaggatgtgaagatgttatcagagacggtgggtattactgctgtcctgaatttccaaagtgaaagtgagcgcattaattggggaataaattccgaggcaatcaacaattcttgtcgtcagaacaacatcttgatgattaactaccctattcgagaggttgattccatggacttgagaaagaagcttcctttttgtgttggtcttcttctgcggctgatacggaagaactaccgtatatatgtgacttgtaccactggatatgatagatcaccagcatgtgtgattgcgtatctacattgggttcaagatacacctcttcatattgctcacaagttcatcactgggttgcattcatgtagacctgacagagctgcaattgtttgggcaacttgggatctcattgcattagttgaaaatggaagacatgatggcactcctacacattcagtgtgctttgtttggaacaatggtcgggagggtgatgacgtggaattggtgggggattttacaagtaactggaaagacaaattaaagtgcaaccacaagggtggatccagatatgaagctgaagttcgacttcgacatggaaagtactactacaagttcatagttgggggtgactggaggcactcgagttcgttgccgtcagagacagatgaacacggaaacgtcaacaatgtgatcagagtcggtgacatcgcccggattcgtcctgctcccagccaattgcagataaaggatccatctgttgttaaggtgatagagaggacactgaccgaggatgagcggttctcgctggcctttgcggcacgcctcatggcatttgcaatctgcccaatcagattggctccaaagcagtaggcatgccagtagttcccaacccatcccaacccccgccggaggatcgacgattccgtagtttacataaacctcatgaacagggagcaatctttatgtaccgtatgctccttgaaatcaatggttgggcacaatatatatatatacatatatcttgtagttcaaaaaaaaaaaaaaaa

SEQ ID NO: 4344 - protein, 595 aa, Triticum aestivum
  misc_feature: Ceres CLONE ID no. 891029
  misc_feature: Ceres CDNA ID no. 40041358
  misc_feature (292)..(407): Pfam Name: DSPc PFAM Desc: Dual specificity phosphatase
  misc_feature: Homolog of GI Number: 18395843 NR Desc: 5'
MALSLMPPSSIALLTPRGPIGVGPAAPPPPASRFRAASSSRRRSSSRRRGPAVVAATEGGQKEDEEGPAAAAGRMNLNEYMVAVDRPLGLRFALAVDGRVFVHSLKRGGNAEKSRIIMVGDTLKKAGTVHNEGLVSIKDLGDTEMVLKQESGPCNLVLERPVAPYPIHQLHQNEDYHVLFNRGRVSLPTWNSAMLSSKLNKSSPGNGKSGFAVFSPRLLSSQGWALLSSEKDGLNRRSTNLANWMSEIVGFYSDEDDMDAEWAHGSFPLEEYIKALDRAKGELYYNHSLGMQYSKITEQIYVGSCIQTQKDVKMLSETVGITAVLNFQSESERINWGINSEAINNSCRQNNILMINYPIREVDSMDLRKKLPFCVGLLLRLIRKNYRIYVTCTTGYDRSPACVIAYLHWVQDTPLHIAHKFITGLHSCRPDRAAIVWATWDLIALVENGRHDGTPTHSVCFVWNNGREGDDVELVGDFTSNWKDKLKCNHKGGSRYEAEVRLRHGKYYYKFIVGGDWRHSSSLPSETDEHGNVNNVIRVGDIARIRPAPSQLQIKDPSVVKVIERTLTEDERFSLAFAARLMAFAICPIRLAPKQ

SEQ ID NO: 4345 - DNA, 653 bp, Triticum aestivum
  misc_feature: Ceres CLONE ID no. 891052
  misc_feature: Ceres CDNA ID no. 40041359
  CDS (93)..(416): REFERENCED BY SEQ ID NO: 4346
actcaacattattgccagatccattcctcccgtgcgagagcgacaggcagacagcggcggtgcagtgccggtggcggcaagccacgacgaccatggagctcctacgggacagcatccccatggtgtccctggccgccgcggccgccgcactgtacgcgcgcatggcctcgtcgctcctccgccccggcctcccgcgcctcgtcgcgctgctcccgctcttcccattcctcgccgccgctcccctggccctcacttcctccgccatcgtccgggccaccgccgccttcttcctggcctggctctgcgcgttcaagctgctggaggagtgggctgccgtggcggccttcttcctcgacgccggcagaaagattaatggcgttgtacgttcaacggactcactagcagtaggaaaataaatttcagattgattgggactctaaccaagcaaccaaacaggattgcattgtcttgtttaccatgataaagtcttagagatgaaacaataaacatcgccagctctgatgattcccagccaaaaacaagtcatgatccaccaaccttgggagtcgtcctcaaactgagattgtacttttacagtgccaagtttgccaaaaaagttcagtgttaaaagagctttaaaaaaaaaaaaaaaa

SEQ ID NO: 4346 - protein, 107 aa, Triticum aestivum
  misc_feature: Ceres CLONE ID no. 891052
  misc_feature: Ceres CDNA ID no. 40041359
  misc_feature: Homolog of GI Number: 58532043 NR Desc: OSJNBa0009K15.16
  misc_feature: Homolog of GI Number: 50925233 NR Desc: OSJNBb0011N17.14
MELLRDSIPMVSLAAAAAALYARMASSLLRPGLPRLVALLPLFPFLAAAPLALTSSAIVRATAAFFLAWLCAFKLLEEWAAVAAFFLDAGRKINGVVRSTDSLAVGK

SEQ ID NO: 4347 - DNA, 1760 bp, Triticum aestivum
  misc_feature: Ceres CLONE ID no. 891471
  misc_feature: Ceres CDNA ID no. 40041360
  CDS (113)..(1519): REFERENCED BY SEQ ID NO: 4348
ctgcccccaccccacccctctcccacctcccactctcccaatcctatcccctttgcttctcgcgtgggagctgggattcctctcttcggcagccatcttatttagttccaccatggtgccgtcccggatccgcttcgcccgccaaatccccctcccctgctgctctgacaccgaagaggaggaggaggaggaggaggaggaagaggaggaggaggtgggggaggaagaggtgccggtcgcgtcgccgctgatactgccggcgtcgaggggaggggtctccgtggtggatatggtcgcggcggcgctgcggaggtcgctgctgctgtgcagcagcgtgcgcgccgaggaaggcaccggcactgcggctgcggggatgcagatagggcagcccacggaggtgcgccacgtctcgcacgtcaccttcgaccgcttcgtcggcttcctcggcctccctgccgacctcgagcccgaggtgccgcgccccgcgcccagcgccagtgtaagtgtatttggagtttcaccaacgtccatgcaatgctcgtttgataaaagaggaaacagtgtaccaacaatactattgaccatgcaaaggaagctatatttacttgggggccttcaggctgaaggggtcttcagaataaatgctgacaatagacaggaacagcatgtcagggagcaactaaacagaggtgttgttccagatggagttgacttgcattatcttgcaggccttataaaggcatggttccgagaacttccaagtggagtattagactcattgactccagaacaagtgatgcattgcaacactgaagaagagtgttctcgtattgcgagtattgtacctccagtggaagcagcattactggattgggccattaatctgatggcagatgttgtggagcatgaaaactacaacaagatgaatgctcgcaacgttgctatggttttcgcgccaaacatgactcagatggccgatcccttaactgctttgatacatgcagttcaagtgatgaattttttgaagacattgatactgaagactgtcaaagaaagggaggaggcagctgccgcaacaaggggattcacctccagctctggttccccgagtgacaaagatgcgcctcaggcattaaatcttttggacaaccccttaaattgctcaagtcgggaaaatgtcgaacgccccatgattagtggggctactctcgaccactttctctttagcatggaacaagcgcttcaccaagatgcgcaagccagtgtcggagaacccaagaagtgtgacaccggtacagcacatgacaaatacaatgacgaattttctcctgtggacagtgattttagtaatagccaagatgacagcagttctggaaacaaattcagtaacgacagtgtggaaggtttgtttgacagattcaaatttaggaaaggggtaggcagaatctgcaggcacccagtgtttcagttgagtaggtccatgaagaagtctgatgaagcaggacaggcttgtgcatgacatggtaggatgtgtatgtaattgatgattcccctgttttgcagctgtttagcgcttaactcatacgccatttctcctagttcgtctgtagaagctataagcccatttgattgtactagtactgaactgctgatgtggagttcttggcgtgtacagtatatagttcaactatatcgtaccagcatcctgttgtttgaaaagatgaatgtatctattatttgagccaaaaaaaaaaaaaaaa

SEQ ID NO: 4348 - protein, 468 aa, Triticum aestivum
  misc_feature: Ceres CLONE ID no. 891471
  misc_feature: Ceres CDNA ID no. 40041360
  misc_feature (152)..(289): Pfam Name: RhoGAP PFAM Desc: RhoGAP domain
  misc_feature (89)..(137): Pfam Name: PBD PFAM Desc: P21
  misc_feature: Homolog of GI Number: 50928153 NR Desc: OSJNBa0020J04.11
  misc_feature: Homolog of GI Number: 34451568 NR Desc: Rho GTPase activating protein 2
  misc_feature: Homolog of GI Number: 50253132 NR Desc: putative Rho GTPase activating protein 2
  misc_feature: Homolog of GI Number: 3695061 NR Desc: rac GTPase activating protein 2
  misc_feature: Homolog of GI Number: 28951019 NR Desc: At2g46710
  misc_feature: Homolog of GI Number: 77553689 NR Desc: rac GTPase activating protein 1
  misc_feature: Homolog of GI Number: 62733119 NR Desc: rac GTPase activating protein 1
  misc_feature: Homolog of GI Number: 3695059 NR Desc: rac GTPase activating protein 1
  misc_feature: Homolog of GI Number: 3695063 NR Desc: rac GTPase activating protein 3
  misc_feature: Homolog of GI Number: 50936273 NR Desc: rac GTPase activating protein 3
MVPSRIRFARQIPLPCCSDTEEEEEEEEEEEEEEVGEEEVPVASPLILPASRGGVSVVDMVAAALRRSLLLCSSVRAEEGTGTAAAGMQIGQPTEVRHVSHVTFDRFVGFLGLPADLEPEVPRPAPSASVSVFGVSPTSMQCSFDKRGNSVPTILLTMQRKLYLLGGLQAEGVFRINADNRQEQHVREQLNRGVVPDGVDLHYLAGLIKAWFRELPSGVLDSLTPEQVMHCNTEEECSRIASIVPPVEAALLDWAINLMADVVEHENYNKMNARNVAMVFAPNMTQMADPLTALIHAVQVMNFLKTLILKTVKEREEAAAATRGFTSSSGSPSDKDAPQALNLLDNPLNCSSRENVERPMISGATLDHFLFSMEQALHQDAQASVGEPKKCDTGTAHDKYNDEFSPVDSDFSNSQDDSSSGNKFSNDSVEGLFDRFKFRKGVGRICRHPVFQLSRSMKKSDEAGQACA

SEQ ID NO: 4349 - DNA, 939 bp, Triticum aestivum
  misc_feature: Ceres CLONE ID no. 891573
  misc_feature: Ceres CDNA ID no. 25446246
  CDS (117)..(578): REFERENCED BY SEQ ID NO: 4350
acagacaaacaagcaagcgtgccgaggcgcaccacccgagcacgcacgcacgcatcactctcctctccggagcaacggcggccgtgcctgccacgcgcgcgcgagcgtacgtacacatgggagaagaggtcgcctccaccgctgcgccggcgtcgctctcgtcggcgtcctcgctgatggctgcggcggccgtgaaagggaacgaggagcggtacgtcatggtggcgtcgaggttcttccgggtgaagccggccgccgtggccggcgctgcccgccaccaccaccacttcctcgactcctgcttcctctgcaagaggagcatctcccgcgaccgcgacatcttcatgtacaagggtgacgcggcgttctgcggcgaggagtgcaggcaggaccagatggccatggacgaggcgctccacgcggcggcgcgccggcaccgcaagcaggccgcggcagagcaggccgccggcaccgcgcgccgcgaggtggcgggcgcgacgacggcgtcgatgatgcaccgccggccgaccatcgccaacctcggcgcggtggcgcgcactcccgtggccgccagctagttgtaggttgacggcgagcgggtgcagctgcgcatgcaccatggatcgatcttccttggctatagatcgctaggtggctaaaaaacgaactgatgtcataacagcggttcgaccgaatgctagcaagcaagaggggagagatgtatagttaagaagacatggatctcaagaatgttttcctgcgtgttattgctgcgtatgctaaagtaaagtgggtcatcagctccatactactagctggagttcatcgatctagctctcgagtgatcagagtcttcttcagcgcaaattaatctgagcgtgtgttcttcttctcaatgatatgatatcctgcttcctcttgtgaaaaaaaaaaaaaaaa

SEQ ID NO: 4350 - protein, 153 aa, Triticum aestivum
  misc_feature: Ceres CLONE ID no. 891573
  misc_feature: Ceres CDNA ID no. 25446246
  misc_feature: Homolog of GI Number: 50928301 NR Desc: OSJNBa0013K16.15
  misc_feature: Homolog of GI Number: 50928303 NR Desc: OSJNBa0013K16.16
  misc_feature: Homolog of GI Number: 15238001 NR Desc: senescence
  misc_feature: Homolog of GI Number: 66776365 NR Desc: PE
  misc_feature: Homolog of GI Number: 30692533 NR Desc: senescence
MGEEVASTAAPASLSSASSLMAAAAVKGNEERYVMVASRFFRVKPAAVAGAARHHHHFLDSCFLCKRSISRDRDIFMYKGDAAFCGEECRQDQMAMDEALHAAARRHRKQAAAEQAAGTARREVAGATTASMMHRRPTIANLGAVARTPVAAS

SEQ ID NO: 4351 - DNA, 1152 bp, Triticum aestivum
  misc_feature: Ceres CLONE ID no. 892214
  misc_feature: Ceres CDNA ID no. 25446247
  CDS (442)..(939): REFERENCED BY SEQ ID NO: 4352
atttgtttccagccggagttttactaaacttggacggagcggttccgttcccttcccgagctttccagatagccggagagccttctggacctcgatctaccatcatagctttgcccatctggcaaggacccaacagccgtgagaaaaaggaaagaatccatcagagcaacagttttgctccaaggaataaagccaccaccccgcccccctctgcccaaaaaggcgaataaaaccaaaagccaacctagtctgcaacttcgcgatcatcaggggctattttgctgtagaccatccaatccaaccaccttaaataccgctgattggggcacaatccttaacccagaaatagcactgctgcacattggttagtgcctcctctcccaacacctcctctttgctcacagcttccttcaacaccttcgtccagaaactctcgcagacatggcggccgggaagcgcaccatcggcctcgcgatggactactcgccgtccagcaaggcggcgacgaggtgggtggtcgagaacctggtgaaggccggcgaccgcatcatcctcatccacgtcctacccaagggagcagacgccagccacaagggcctctggaagagcaccggttcacctctgatccctctgctggagttcatggagatgaacgtgcaggcgcggtacggggtcaacccggacaaggaggtgctggagatcctgcaggctgagtccaagtccaagcaggtggaaatactggcaaaaatatactggggtgatgcaagggagaaactttgtgaggcagtagatgatctcaaggtcgactcagttgtgcttggttgcaggggattagggcccttaaaaagggcactccttggaagcgtcagcaactatgttgtcaacaatgcaacctgccccgtcacagtggtgcgcggaccaaatggatcacttgcttgaagatgtcacttctggaatgatgggctagcttgcgtgttcattggtccgtcagcataggtgcaaatggtgctatttaagaggatagtgatatttgcctctttggatttcctggctatccttgtagtgcaaattcagtgtgttttcatctgttatattctagttatactacatttctgttgtttcttacatactatttgtaagaaaaaaaaaaaa

SEQ ID NO: 4352 - protein, 165 aa, Triticum aestivum
  misc_feature: Ceres CLONE ID no. 892214
  misc_feature: Ceres CDNA ID no. 25446247
  misc_feature (5)..(158): Pfam Name: Usp PFAM Desc: Universal stress protein family
  misc_feature: Homolog of GI Number: 50913251 NR Desc: universal stress protein / early nodulin ENOD18
  misc_feature: Homolog of GI Number: 50902088 NR Desc: P0414E03.3
  misc_feature: Homolog of GI Number: 50931659 NR Desc: putative universal stress protein
  misc_feature: Homolog of GI Number: 60100214 NR Desc: USP family protein
  misc_feature: Homolog of GI Number: 50900762 NR Desc: P0583G08.8
  misc_feature: Homolog of GI Number: 11602751 NR Desc: ENOD18 protein
  misc_feature: Homolog of GI Number: 11602747 NR Desc: early nodulin ENOD18
  misc_feature: Homolog of GI Number: 25402657 NR Desc: protein T23J18.3
  misc_feature: Homolog of GI Number: 21594903 NR Desc: ethylene
  misc_feature: Homolog of GI Number: 45548059 NR Desc: COG0589: Universal stress protein UspA and related nucleotide
  misc_feature: Useful for making bigger plants
  misc_feature: Useful for making ornamental plants with flowers and leaves fused
  misc_feature: Useful for making ornamental plants with modified flowers
MAAGKRTIGLAMDYSPSSKAATRWVVENLVKAGDRIILIHVLPKGADASHKGLWKSTGSPLIPLLEFMEMNVQARYGVNPDKEVLEILQAESKSKQVEILAKIYWGDAREKLCEAVDDLKVDSVVLGCRGLGPLKRALLGSVSNYVVNNATCPVTVVRGPNGSLA

SEQ ID NO: 4353 - DNA, 1144 bp, Triticum aestivum
  misc_feature: Ceres CLONE ID no. 892742
  misc_feature: Ceres CDNA ID no. 35383309
  CDS (56)..(907): REFERENCED BY SEQ ID NO: 4354
acatttcgcctctagcttcagccggcgtcatattggatccaccgcccacgagtagatgtgctcggactccaaggaagttgctgctgtaccacagtcaacacacgccacctgcgcccccgcttcgccgcgcagcgcacaccaatctgcccacgcgccgccccgccccgcctcgcctctcctctcctctcctctctcttcttcctacgcgcgccgagagaagatggggaagcgatggatcccgctcgaggccaaccccgacgtcatgaaccagttcatctggggactgggagtcaccgagggggaggcgcagttctgcgacgtctacggcctcgacgacgagctgctcgccatggtgccccagcccgtcctcgccgtcatcttcctctacccgctcacctccctggatgagaaggtggaggaatacgatgcttctgccacctctacggcagggggcaaggattcaagcaagaaggtgtactttacaaaacagactgttggcaacgcttgtggaacagttggtgttattcatgcaatagggaatgctgcatccgacatcaagctggttgagggatcttattttgataggttttataaacaaacagctgatatggatccagttcagcgtgctgtctttctcgaggaggatgatgagatggagggtgctcattctgttgctgctactgctggtgacactgacgtaaacgttgaggtgaatgaacattttgtctgtttctcctgtgttgatggtgaactttacgagcttgatgggcgaaaatcaaaaccgatatctcatggcccttcatcacctgagaccttgctgcaggatgctgcaaaagtcatcaaggccagaattgcgacgaaccctaactcgttgaacttcaacgtcatggttctttcaaaacagtgaatcggtgatgtaaggtggaatggataggcttggtcttttccattctcatgggctggtgcctgatagtcagcatagcccgtcggaaaaacagagacttgttgcctaaagtaaactgtgctctttgtgcaaaagttatgtctttgtcttctggcttttgtatcagaaataaaaaaggagtattagttgctggattgaaaaatgtgtactatacttttggtgctaaaaaaaaaaaaaaaa

SEQ ID NO: 4354 - protein, 228 aa, Triticum aestivum
  misc_feature: Ceres CLONE ID no. 892742
  misc_feature: Ceres CDNA ID no. 35383309
  misc_feature (4)..(214): Pfam Name: Peptidase_C12 PFAM Desc: Ubiquitin carboxyl
  misc_feature: Homolog of GI Number: 50911393 NR Desc: carboxyl
  misc_feature: Homolog of GI Number: 50927490 NR Desc: OSJNBa0079A21.11
  misc_feature: Homolog of GI Number: 28973167 NR Desc: putative carboxyl
  misc_feature: Homolog of GI Number: 50929477 NR Desc: OSJNBa0043A12.3
  misc_feature: Homolog of GI Number: 7268503 NR Desc: carboxyl
  misc_feature: Homolog of GI Number: 73989372 NR Desc:  similar to Ubiquitin carboxyl
  misc_feature: Homolog of GI Number: 28913414 NR Desc: Ubiquitin carboxyl
  misc_feature: Homolog of GI Number: 54695588 NR Desc: ubiquitin carboxyl
  misc_feature: Homolog of GI Number: 55622416 NR Desc:  similar to Ubiquitin carboxyl
MGKRWIPLEANPDVMNQFIWGLGVTEGEAQFCDVYGLDDELLAMVPQPVLAVIFLYPLTSLDEKVEEYDASATSTAGGKDSSKKVYFTKQTVGNACGTVGVIHAIGNAASDIKLVEGSYFDRFYKQTADMDPVQRAVFLEEDDEMEGAHSVAATAGDTDVNVEVNEHFVCFSCVDGELYELDGRKSKPISHGPSSPETLLQDAAKVIKARIATNPNSLNFNVMVLSKQ

SEQ ID NO: 4355 - DNA, 883 bp, Triticum aestivum
  misc_feature: Ceres CLONE ID no. 893136
  misc_feature: Ceres CDNA ID no. 40351459
  CDS (134)..(553): REFERENCED BY SEQ ID NO: 4356
aacggctcgccacaaagccaacaaacccagcagccccagccctttccgcctccccccgctcccaaaccaagccccgcccccgttctgtccctccgcaaaaccctagctccgtacacgcgcggcgacctccaccatgaagggcaaggccgacacctccaagaagggcgagggcaggctcaaggccgccggcggcgccagcaagaggaagaaggacgccgctgccgctggcaagcccaagcgcccaccctccgccttcttcgtcttcatgtctgagttcaggcagcagtacaacgcggagaaccccaacaacaagagtgtcgccaacgtgagcaaggcggcgggtgagaagtggagagctatgtctgatgaggacaaagcaccttatgtggaaaaggctgaacagaagaagaaggactatgagaagaccaaagccacctttgataacaaggagagtgcgagctccaagaaggccaagactcagaacgatgaggaggtcaaatctgaggtcgaagatgagggtagcgatgaggaaaacgaggacgatgatgagtaaatagtgtatcagagtatgaggtagcaaattgggtgtttggtccccgcttagtgtactagtttgctatcctgctatcctcagtgttagatgatgagatttggaagtagatgttgtgtttgtgtgttaagggggcccttttagacttgtggactcatggtttgagaagttgcttagtagtgtattagcagagaggaagctgagaatgctaccagctgttccaatgcttttctcttgctaaccacctgtgtaagaacttgttttcattcgctaatctgatgactgcccagccattggctcttggttaatttcgccttaaaaaaaaaaaaaaaa

SEQ ID NO: 4356 - protein, 139 aa, Triticum aestivum
  misc_feature: Ceres CLONE ID no. 893136
  misc_feature: Ceres CDNA ID no. 40351459
  misc_feature (34)..(103): Pfam Name: HMG_box PFAM Desc: HMG
MKGKADTSKKGEGRLKAAGGASKRKKDAAAAGKPKRPPSAFFVFMSEFRQQYNAENPNNKSVANVSKAAGEKWRAMSDEDKAPYVEKAEQKKKDYEKTKATFDNKESASSKKAKTQNDEEVKSEVEDEGSDEENEDDDE

SEQ ID NO: 4357 - DNA, 1185 bp, Triticum aestivum
  misc_feature: Ceres CLONE ID no. 893173
  misc_feature: Ceres CDNA ID no. 25401093
  CDS (66)..(1061): REFERENCED BY SEQ ID NO: 4358
attcaagcgtcctctgctcgtgcttgattcttctacctccagccagaacagtcgcagaggcgtgcatgtgttgcttctggaccatggacacggcgccggtctgcctcgacctcatggtcgggcgtcccatggaccacgagccgtctcgggcgagatgcaccggaacaagaaccgaggccaacgttgctagctctgcctgtggcagagcaccttccatgaccaacgacgaggctaagatcctggaggcgaagctggcgcaggtgagcgaggagaaccggaagctgactgaaatgattgcctacctgtacggcaaccaggtctcgcgccagagccccgacggcgagggccagccgcgcgccagcacggcagcgtcgccgacgcccccggcgagcaagaagaggagccgggacagcatggacacctcccattcttgcgatgtggaaattagcaacaggaacgtaggcacgggcgaggccgaacatgtcgatgtggacagccctctgagcaatggcacttgccggagaatcaaggtcaagaaggtctgcaccaggatcgacccatcggacacgagcctcgttgtgaaagatggatatcaatggcggaagtacgggcagaaggtgacacgggacaacccgtccccaagggcctacttccgatgcgccttcgcaccgtcctgccgtgtcaagaagaaggtccagagaagcgcggaggacagctcggtggtggaggcgacgtacgagggcgagcacaaccacccgcaccccacgcgggccggcgagctgccgagctgcgccacgcagggcggcggctcggtgccgtgctccatctccatcaactcctccggtccgaccatcacgctggacctcaccaagaacgggggaggcgtgcaggtcgtcgatgccggggaggcgcaaccggacatgaagaaggtgtgtcgggaggtcgcgtcgccagaattccagagggcgttggtggagcagatggcccgcgagctcaccggcgaccaaaagttcaccgacgcgctcgccgcggcgatcctgcggaagctgccggattattagcataactaattatagagactacgcgaacttcagaaactttctaattttgtagcatttggaacactaaggctgacgtagtacaaaatttcatctacaatattgaaatcgaaaaaaaaaaaaaaaa

SEQ ID NO: 4358 - protein, 331 aa, Triticum aestivum
  misc_feature: Ceres CLONE ID no. 893173
  misc_feature: Ceres CDNA ID no. 25401093
  misc_feature (172)..(232): Pfam Name: WRKY PFAM Desc: WRKY DNA
  misc_feature: Homolog of GI Number: 46394406 NR Desc: TPA: WRKY transcription factor 76
  misc_feature: Homolog of GI Number: 50253028 NR Desc: putative WIZZ
  misc_feature: Homolog of GI Number: 33087063 NR Desc: putative wrky protein
  misc_feature: Homolog of GI Number: 40060529 NR Desc: putative WRKY4 transcription factor
  misc_feature: Homolog of GI Number: 18698678 NR Desc: putative transcription factor RPR1
  misc_feature: Homolog of GI Number: 83630937 NR Desc: WRKY78
  misc_feature: Homolog of GI Number: 11493822 NR Desc: transcription factor WRKY4
  misc_feature: Homolog of GI Number: 50253030 NR Desc: putative WIZZ
  misc_feature: Homolog of GI Number: 41057633 NR Desc: transcription factor WRKY1
  misc_feature: Homolog of GI Number: 40645752 NR Desc: WRKY transcription factor 1
MCCFWTMDTAPVCLDLMVGRPMDHEPSRARCTGTRTEANVASSACGRAPSMTNDEAKILEAKLAQVSEENRKLTEMIAYLYGNQVSRQSPDGEGQPRASTAASPTPPASKKRSRDSMDTSHSCDVEISNRNVGTGEAEHVDVDSPLSNGTCRRIKVKKVCTRIDPSDTSLVVKDGYQWRKYGQKVTRDNPSPRAYFRCAFAPSCRVKKKVQRSAEDSSVVEATYEGEHNHPHPTRAGELPSCATQGGGSVPCSISINSSGPTITLDLTKNGGGVQVVDAGEAQPDMKKVCREVASPEFQRALVEQMARELTGDQKFTDALAAAILRKLPDY

SEQ ID NO: 4359 - DNA, 659 bp, Triticum aestivum
  misc_feature: Ceres CLONE ID no. 893187
  misc_feature: Ceres CDNA ID no. 40351460
  CDS (69)..(479): REFERENCED BY SEQ ID NO: 4360
accccaaatcccccaaccctcccagcgctcccccctcctcaacaacctcccggcgcatctccgactccatggcccgcaccaagcagacggcgaggaagtccaccggcggcaaggcgccgaggaagcagctggccaccaaggcggcccgcaagtccgccccggccaccggcggcgtcaagaagccccaccgcttccgccccggcaccgtcgcgctccgggagatccgcaagtaccagaagagcaccgagctgctcatccgcaagctacccttccagcgcctggtgagggagatcgcccaggacttcaagaccgacctccgcttccagtcctccgccgtctccgccctgcaggaggccgccgagtcctacctcgtggggctcttcgaggacaccaacctctgcgccatccacgccaagcgcgtcaccatcatgcccaaggacatccagctcgcccgccgcatccgtggagagagggcctaagctctgtgcgtcgtcgtctgttagtcgtcgtcttagccagatgtgttcagcggtgaaattgtgcgtgtttgtagtgtctgttcgtgccatggtggatgtagtgttcctgatctgatgtcacctccttgctgtcatcagtaactgaaatgaaaatgtttgttaacaaaaaaaaaaaaaaaa

SEQ ID NO: 4360 - protein, 136 aa, Triticum aestivum
  misc_feature: Ceres CLONE ID no. 893187
  misc_feature: Ceres CDNA ID no. 40351460
  misc_feature (58)..(134): Pfam Name: Histone PFAM Desc: Core histone H2A/H2B/H3/H4
MARTKQTARKSTGGKAPRKQLATKAARKSAPATGGVKKPHRFRPGTVALREIRKYQKSTELLIRKLPFQRLVREIAQDFKTDLRFQSSAVSALQEAAESYLVGLFEDTNLCAIHAKRVTIMPKDIQLARRIRGERA

SEQ ID NO: 4361 - DNA, 462 bp, Triticum aestivum
  misc_feature: Ceres CLONE ID no. 893208
  misc_feature: Ceres CDNA ID no. 40351461
  CDS (55)..(288): REFERENCED BY SEQ ID NO: 4362
accaaatttccgccgaagcagaaaaagcatcgtctcgtcgaggaatcaacagccatgggcggcggcaacgcgcagaagtccaagatggcgagggagaggaacctcgagaagctgaagggcggcaaggggagccagctcgaggccaacaagaaggccatgaacatccagtgcaagatatgcatgcagactttcatctgcaccacctctgaagcaaagtgcaaggagcatgctgaggcgaagcatccgaagagcgacctcgtccagtgcttcccccacctcaagcagtgatatctgcccaatcagatggagagagagataaaagagagagagaagctgtcataatccacctagtattatcatgttccgcaatgactgattgttgacctaagcttgggtctgaactctggtgtgctgctgtcccagctgctttggttgtgtgcccatctaaaaaaaaaaaaaaaa

SEQ ID NO: 4362 - protein, 77 aa, Triticum aestivum; identical to SEQ ID NO: 2566
  misc_feature: Ceres CLONE ID no. 893208
  misc_feature: Ceres CDNA ID no. 40351461

SEQ ID NO: 4363 - DNA, 668 bp, Triticum aestivum
  misc_feature: Ceres CLONE ID no. 893229
  misc_feature: Ceres CDNA ID no. 25891899
  CDS (82)..(519): REFERENCED BY SEQ ID NO: 4364
atctcagcatcagcacttcagcagctcccctcacatcccacgccaagccccacgctcgaaccaccaccaccaccagcacccatggcacccaaggcggcggagaagaagccggtggcggtggccgcggagaagacggcggcggggaagaagcccaaggcggagaagcgggcggcggcgaccaaggaggccggcggcgaggggaagacgaggggccggaagaagggcagcaaggccaagaagggcgtggagacgtacaagatctacatcttcaaggtgctcaagcaggtgcacccggacgtcggcatctcctccaaggccatgtccatcatgaactccttcatcaacgacatcttcgagaagctcgccggcgagtccgccaagctggcgcgatacaacaagaagcccaccatcacgtcccgggagatccagacctccgtccgcctcgtcctccccggcgagctcgccaagcacgccgtctccgagggcaccaaggccgtcaccaagttcacatcatcataggtttcgtcgtctgtttcatggattgatggcggcaggcgtcgtgcatgtagttggcagcagtacgatgttacaatctctgtaagaattgtgctgcttgcggccttgaagaaatagtgatgttgctgtttgaatcaaaaaaaaaaaaaaaa

SEQ ID NO: 4364 - protein, 145 aa, Triticum aestivum
  misc_feature: Ceres CLONE ID no. 893229
  misc_feature: Ceres CDNA ID no. 25891899
  misc_feature: No seed is being produced by the plant
  misc_feature: The plant flowers significantly late compared to wild-type.
  misc_feature: Useful for biocontainment applications
  misc_feature: Useful for making plants with modulated flowering time
  misc_feature (52)..(124): Pfam Name: Histone PFAM Desc: Core histone H2A/H2B/H3/H4
  misc_feature: Homolog of GI Number: 122033 NR Desc: Histone H2B.2
  misc_feature: Homolog of GI Number: 34895900 NR Desc: putative histone H2B
  misc_feature: Homolog of GI Number: 21801 NR Desc: histone H2B
  misc_feature: Homolog of GI Number: 34895838 NR Desc: putative histone H2B
  misc_feature: Homolog of GI Number: 34895896 NR Desc: putative histone H2B
  misc_feature: Homolog of GI Number: 34895888 NR Desc: putative histone H2B
  misc_feature: Homolog of GI Number: 34895832 NR Desc: putative histone H2B
  misc_feature: Homolog of GI Number: 577825 NR Desc: H2B histone
  misc_feature: Homolog of GI Number: 50947133 NR Desc: putative Histone H2B.2
  misc_feature: Homolog of GI Number: 34895904 NR Desc: putative histone H2B
  misc_feature: Useful for delaying flowering time
  misc_feature: Useful for increasing chlorophyll and photosynthetic capacity
  misc_feature: Useful for making plants with altered leaf shape eg curled leaves
  misc_feature: Useful for making plants with altered leaf shape eg curled leaves
  misc_feature: Useful for making plants with increased biomass and foliage
  misc_feature: Useful for making plants with increased biomass and foliage
  misc_feature: Useful for sterility
  misc_feature: Useful for sterility
MAPKAAEKKPVAVAAEKTAAGKKPKAEKRAAATKEAGGEGKTRGRKKGSKAKKGVETYKIYIFKVLKQVHPDVGISSKAMSIMNSFINDIFEKLAGESAKLARYNKKPTITSREIQTSVRLVLPGELAKHAVSEGTKAVTKFTSS

SEQ ID NO: 4365 - DNA, 1345 bp, Triticum aestivum
  misc_feature: Ceres CLONE ID no. 893332
  misc_feature: Ceres CDNA ID no. 40041361
  CDS (121)..(732): REFERENCED BY SEQ ID NO: 4366
atcgcactgccatcagacgcttcctctcgtcctccatctccaccttcgccttcaccttcgcccctgctccggggagagcttccagaaggttctccggcccgtaccccggccatcttccggatggaggcggcgcgtcacgcagggaagaagcggggtccggacgacgaggcggaggcggaggtgcaccacacgttccggggcgccgccaacgcgctctcgcagctctacgcgcaggccgtcgccaaccagaaggcctccttcatcgccggcgagcgccacgccatggagcgtgcccatcggtggatatccagtcagcatgaagaagcatcgggagtgtctgttgctgatgtacttgcttacttgcagaatgagattgagagcagaggcggcatggcagggtcttcccaacatccaactccacagccagcatatggtcttccttctgcaaatgtccaaatcaactccttctcatttggaaatgtggcggctgcacttgactctcagctgtaccaaaccgaccaaacaagaactgcgggcatctcaaatgctttcagcagtccttcacagcaaaattcccgttcaaaccatctggttcagtgttcaggaaatggccctgtaaactccccgccaattggaagcagagctcgggatgaccattctccccagaaccaggactctgtgcatcccaattcgtacgagccctccatggatatgaatcatgatgctccttgaagttgtgaaccaccatatgaaaggtggcaacaacatcagtcagtttattggaacctccaatatctgatccttatttgctggagaagtcccatgaactagaggtacatgtgattcccttccagaactctcttgccctttgtctgcgtctcttggcacaaagctcctgccttgtgaccatactgctcactcttctggcaccatgtacataacaacctgaaactatccttctggtctctgctgttgattgcggattgcgatcaccggctttcgcgcttgctgaatggaagctgtgaacctgcaggctgtctcggcataatagtgcctgcattaccagttcttttctggtcattattaccagacaagagaccatgctctggtcaacaaggatcattgtggtgttgttgcatatttgtgttactgatatcgctgctatgtatgttctatatacacctgtaaaagatgcagcggcgcagaaagagatagaaccttgtttcgtttttgttggttgagtgtctttaccttgtagatgttacacagaaagcctgtgtgtgtaacctgaataagcaccgaaataatatacagttgacgatggttgagaaaaaaaaaaaaaaaa

SEQ ID NO: 4366 - protein, 203 aa, Triticum aestivum
  misc_feature: Ceres CLONE ID no. 893332
  misc_feature: Ceres CDNA ID no. 40041361
  misc_feature: Homolog of GI Number: 32400851 NR Desc: holocarboxylase synthetase
  misc_feature: Homolog of GI Number: 50899610 NR Desc: putative holocarboxylase synthetase
  misc_feature: Homolog of GI Number: 51964876 NR Desc: PREDICTED OJ1198_B10.8 gene product
  misc_feature: Homolog of GI Number: 50945429 NR Desc: putative holocarboxylase synthetase
MEAARHAGKKRGPDDEAEAEVHHTFRGAANALSQLYAQAVANQKASFIAGERHAMERAHRWISSQHEEASGVSVADVLAYLQNEIESRGGMAGSSQHPTPQPAYGLPSANVQINSFSFGNVAAALDSQLYQTDQTRTAGISNAFSSPSQQNSRSNHLVQCSGNGPVNSPPIGSRARDDHSPQNQDSVHPNSYEPSMDMNHDAP

SEQ ID NO: 4367 - DNA, 433 bp, Triticum aestivum
  misc_feature: Ceres CLONE ID no. 893433
  misc_feature: Ceres CDNA ID no. 40351462
  CDS (35)..(208): REFERENCED BY SEQ ID NO: 4368
gcggaaaccctagtggtagtggagttgggtgagaatgggaatagcaggtaaggttggggattatgctttcaaggcattcaccgccactcttggagtcgccactatttacctcactgcaaccttctctgtcaacgtttacagaggcctctcttggcacaatgctcaaaccaaacttgacaaacaagatgctgatgagcaagcaccgtgacttgatctcataagcccaccatcttaaatttcaaatcatgttgtgtagaaatataatgtgagtttctttcttacaatttttcacttaattagccaataattaaatggaaaatcacgagtaataacctagtaaattggcaaaagtagattgtggtttttgatagattgtacttatacattattatttgtttacgtgttatatggacttccaaaaaaaaaaaaaaaa

SEQ ID NO: 4368 - protein, 57 aa, Triticum aestivum; identical to SEQ ID NO: 3118
  misc_feature: Ceres CLONE ID no. 893433
  misc_feature: Ceres CDNA ID no. 40351462

SEQ ID NO: 4369 - DNA, 657 bp, Triticum aestivum
  misc_feature: Ceres CLONE ID no. 893802
  misc_feature: Ceres CDNA ID no. 40351463
  CDS (3)..(428): REFERENCED BY SEQ ID NO: 4370
acaactacatgccatcaccatcatccatggaacaagaagataacactatcatacccacattcctcagaaaacctgcagaagaccagaacaacaacaactctcccaccccttctcacaagtctttgcatgttttccgccgcagcaggaggcggtggaagaaggaagtggcagtgaaagatgctgtgcaagaagaagaagatgaagaaaaagaagaaggagaagatgggggtgatgacagagaagagatagagaggaagattcatgcattacagaggattgtgcctggtggtgagtctttaggtgtggacaagctctttgatgaaactgctggctatattcttgctttgcagtaccaagtcaaagccttgagggctctcactggtttctttgagaagttggagaaggagaaaacaaagtttggaggttgatgatgaacatcaacgtgagatgatgaatgaatgaatataatccatggtgatgaccatgatggattatggaagcaagcaagcagcctaggttaggtccttttggtttttcccacagacccccattagttagaatttttatttttcttcttttaatttttatgttttcctttgttgtacttttggaagttgggatcaaggaaaatgtttatccctaaaaaaaaaaaaaaaa

SEQ ID NO: 4370 - protein, 139 aa, Triticum aestivum
  misc_feature: Ceres CLONE ID no. 893802
  misc_feature: Ceres CDNA ID no. 40351463
MPSPSSMEQEDNTIIPTFLRKPAEDQNNNNSPTPSHKSLHVFRRSRRRWKKEVAVKDAVQEEEDEEKEEGEDGGDDREEIERKIHALQRIVPGGESLGVDKLFDETAGYILALQYQVKALRALTGFFEKLEKEKTKFGG

SEQ ID NO: 4371 - DNA, 639 bp, Triticum aestivum
  misc_feature: Ceres CLONE ID no. 893806
  misc_feature: Ceres CDNA ID no. 40041362
  CDS (35)..(325): REFERENCED BY SEQ ID NO: 4372
aacgaagcacttacacaatcctacaattagtcgcatggcgaccggcggcgggaaggcgacggcctcatcgtgggcgaccgcgatgagcgtgggcgcgggcacggtggaggcgctcaaggagcggcacgccggactgtgccgctggaactaccacgcgctcccgtgcgtccagcagcgcgccggcaccgcggccggcgggaacggcaagaccatggcggcgcccgctgccggcggggcggcggcgaggaggaggaaggcgaggcaggagcaggaggaggagctccggacggtcatgtacatcagcaactggggaccaaacaattagctagctgatgagtcatcagtcctctgttcttcttagatggccacaatggtgcaccgtgcacaagctgcaccagttcgtctggctggatctgaatgtgtaggaacacagcacgcgcattctcgagcttgtgtaagacacggtacggtgcagaacatgcctccatccggcaggatttcagtacatattacggtcgctctgaatttacagatgcctccgtatggtccatcctttttttttaatgttcgtccgaatttcgcaaacctggtcaccggactgggaaaagtactcccaaaaagataaaaaaaaaaaaaaaa

SEQ ID NO: 4372 - protein, 96 aa, Triticum aestivum
  misc_feature: Ceres CLONE ID no. 893806
  misc_feature: Ceres CDNA ID no. 40041362
  misc_feature: Homolog of GI Number: 50928989 NR Desc: OSJNBa0043L09.18
  misc_feature: Homolog of GI Number: 50928991 NR Desc: OSJNBa0043L09.19
  misc_feature: Homolog of GI Number: 50928999 NR Desc: OSJNBa0043L09.23
  misc_feature: Homolog of GI Number: 50929003 NR Desc: OSJNBa0043L09.25
  misc_feature: Homolog of GI Number: 50929001 NR Desc: OSJNBa0043L09.24
  misc_feature: Homolog of GI Number: 21553934 NR Desc: probable wound
  misc_feature: Homolog of GI Number: 6688818 NR Desc: putative wound
MATGGGKATASSWATAMSVGAGTVEALKERHAGLCRWNYHALPCVQQRAGTAAGGNGKTMAAPAAGGAAARRRKARQEQEEELRTVMYISNWGPNN

SEQ ID NO: 4373 - DNA, 708 bp, Triticum aestivum
  misc_feature: Ceres CLONE ID no. 893812
  misc_feature: Ceres CDNA ID no. 40351464
  CDS (61)..(402): REFERENCED BY SEQ ID NO: 4374
ataccaaaaacaaaacacaagccaagtgaaagtgagaaaaaataaaaatcaaagagcataatgtcagggatcattcacaagattggggagacccttcatgtgggagggcacaagaaggaggaggagcataagggtgagcaccatgctggagaatacaaaggggagcaccatggtgaacacagtagtgagtacaaaggagagcatcatggtgaacacaaagctggagagtaccatggtgagcacaagccagagcacaaagaggggttcctagacaaagtcaaggacaagatccatggtgagggcggcgccgccgagggcgagaagaagaagaaggagaagaagaagaaggagcatggccatgagcatggccatgacagcagcagcagcagtgacagtgattaaactgctgcatcacctatatatttaaaaggtttatgggaccatagtagcgagggctgtgccttaatttctctctctctctctctctctctctctctctctctctctttttcctttttccctatcttgtgatctatttatgagtgagaaaaacaaaagtgagaaattgtgcgtgtatctggttgctaattcgagtgctattagtctgtggtttggttggtttgtaaccccgctacttgggttatgtttgattgtatattatcctagagaaataaaaattttaaattatcagtaaaaaaaaaaaaaaaa

SEQ ID NO: 4374 - protein, 113 aa, Triticum aestivum; identical to SEQ ID NO: 3490
  misc_feature: Ceres CLONE ID no. 893812
  misc_feature: Ceres CDNA ID no. 40351464
  misc_feature (2)..(113): Pfam Name: Dehydrin PFAM Desc: Dehydrin

SEQ ID NO: 4375 - DNA, 543 bp, Triticum aestivum
  misc_feature: Ceres CLONE ID no. 893817
  misc_feature: Ceres CDNA ID no. 36699837
  CDS (52)..(423): REFERENCED BY SEQ ID NO: 4376
aatatgttctaaagtaacgaaggaaacgttgtggtgtgatgcgagagagagatggccggtacctaccataaccaccagcggcacgtgctacagctggtgatgtcgtgccggaaaatcaccgcccaggtcacaaacaccaccacatcctccatcatagccatggcttcatcatcggagcaggaattcgtggctcactaccgcgctcagcttaatcgcttccccagatcgcaccgcttctgggacgctaaagtggcctctcgcgtcggggagaagctagggttccgcctcagagaaatcggcgtcaccaccgtccaaatcgaccctcgcgaggaacagtcccgtcccgtccattaccgcgtcatgctctcccccttgttccattccataaaaaacgccggcatccacgtttccggcgttgactaagtcaaattacctttctgacctcacctgtaagcttcaattttgagtgctgtaatttggggattttccatttttgtgccaataaaatttgaccctattattattattaaaaaaaaaaaaaaa

SEQ ID NO: 4376 - protein, 123 aa, Triticum aestivum
  misc_feature: Ceres CLONE ID no. 893817
  misc_feature: Ceres CDNA ID no. 36699837
MAGTYHNHQRHVLQLVMSCRKITAQVTNTTTSSIIAMASSSEQEFVAHYRAQLNRFPRSHRFWDAKVASRVGEKLGFRLREIGVTTVQIDPREEQSRPVHYRVMLSPLFHSIKNAGIHVSGVD

SEQ ID NO: 4377 - DNA, 2724 bp, Triticum aestivum
  misc_feature: Ceres CLONE ID no. 893859
  misc_feature: Ceres CDNA ID no. 25891345
  CDS (231)..(2363): REFERENCED BY SEQ ID NO: 4378
cccttcttcctcgcctccgtccgtcccgtcttatcggcccctccccaaatccctcctcccttccccaaacaaatccatccccccggcgacatctcccgcaagctgagaccaggcgccgtgcgtgcatccctcggcgcggcggtccctctcctcttcttctggcgctggcactgggctagcacggagtggggatcgatcggccgccggcctctccgtcccctcgcccacagatgaaggaagcctttgatccgcccgcctcggcggcagcagcaacgccagaagcagataacggcgcctccatcttcacgaggaaaaacatttggagtgatgcggctgccgagggagacgacgattcctcgccttggccgtgggacggtgtgaagagtgaagaggatgccgattttctttctcatgcaaacagggctttgtcgtttctggattatgaagcagagtcttcggagtgcaagtatgctactgacattgggtcacatgtatatcccaaggaagcaatgtcaccacaaagtgaatatgataggcagcgcccttaccttcctttatcgagctgttcttgggattcttcttcatcactggaagcgatgtcaggcaatcgagatgcatcaggtcatgtaatggcaaaaggcggaaccaaaagtgatatctttgcgccaaggcatgattatcttgcgtcatgtcctactactggtcctcacatgagaagatcgtatactgaagcagctaaagttgattgtagcttcgattgtcactcagagcagcactacaaaggattggatcgatttactcccttcgcaaactgcaatggtcaatctattgaatgccgcagtgagatagctgatatgcccagagggggccgctgtgttgacgaggctacttcgttttcaagtcgatggtgcttcgaaaatgggggccggggctcttcactacctggagggctgacatatggcgatgagatcccttctctgtctagtcggaggtgtaatggcagtggggtgctttcacgctcaagccaatggcattatggtgctgaaatttcctcgctctcaagtaggcaaggttatggcgatgaaatcccttctctgtctaatcagaagtttaatggcatttcacgctcaaatcattggaactacagtgctgaaatcccctccctctcacgtagacagagttatcgtgatgagatcccttctctgtcttctcaaaagtctaatggcatttcatacccaagacagtggcagcagtatggtgcagacatcccctcgttctcaagtagacaaggttatggtgaggaggttccaacaatgtctcaccattggcgctgccgagataagatacctttgtattctggtcagaggtgccatgatgctgaggcacgtcgattatcaagctaccagcaaggtccttttcgtgggaacaggcagccaagagacagttttgcccatggtattgttagtaatcagcaagtcaagatgactgcaaccagacatactggcacaagaccacgggtgtctaatagagttgtaaacagcactagcaactacagaaatggcaggagggataacccaccgagaaattctgaggaaataagggaccaagtctgtggtccccgtgcaagcaaagtgaataacacatcaacaccgactgcgaagaaagatatcttgagcccattggtccgtagagaccaatttaacaaatcagacttttcaattcagtatgaacaggccaagttcttcatgataaagtcatatagtgaagatgatattcataaaggtatcaaatacaatgtttgggcaagtacaccaaatgggaacagtaagctggataccgctttccatgatgcccagattttaatgaaggaaaagggtacaaaatgtcctgtcttcctcttgttttcggttaataccagtgggcagtttgtaggattggctgagatgttaggtcctgttgatttcaagaagaccatggacttctggcaacaaaataaatggaatggctttttccctgttgtttggcacattgtaaaggacattccaaataggctcttcaaacatatcactctagaaaataatgacaacagacctgttacattcagcagggacactcaagagattggcttgccccagggtctggaagtgttgaaaattttcaaggcttatcgccatggaacatcaattctggatgactttgacttctatgaagaaaaggaaaacactcgctgtgcacgcaagggaataaatgcagactcgttacatgaagccagactatcgtactttggaacagatgacttgaaatcaatgggagacatcgaggcgaacatggagagcctgaacctccacgagccttgggactaatccggatggttcttcaccatgtcgcaaaaaattaacgagccattgacgcggtcgaacgagaaacgtttgatccgacgagtgggcgctactacacaagttaacctgaaatatgctatagaatgtttgtactttgtatggaccatatatagtttgccggtaaacacatccatatatatctagtttcggtcgtcggggtaagatagttttacaaatcggtacaacaatcttatggtgactgccatgtgtgtccgtttggttggttgtatgtggctgatggaatattttggttgacaagaaggattgaaccagcaaatgatatctaaggctgcacgtagcatgcctgttaaaaaaaaaaaaaaaa

SEQ ID NO: 4378 - protein, 710 aa, Triticum aestivum
  misc_feature: Ceres CLONE ID no. 893859
  misc_feature: Ceres CDNA ID no. 25891345
  misc_feature (556)..(646): Pfam Name: YTH PFAM Desc: YT521
  misc_feature: Homolog of GI Number: 50921571 NR Desc: OSJNBa0027H09.15
  misc_feature: Homolog of GI Number: 50918685 NR Desc: putative RNA
  misc_feature: Homolog of GI Number: 34911170 NR Desc: B1144G04.32
  misc_feature: Homolog of GI Number: 56202150 NR Desc: rubisco subunit binding
  misc_feature: Homolog of GI Number: 56202151 NR Desc: rubisco subunit binding
  misc_feature: Homolog of GI Number: 56202152 NR Desc: rubisco subunit binding
  misc_feature: Homolog of GI Number: 50948413 NR Desc: putative rubisco subunit binding
  misc_feature: Homolog of GI Number: 50919793 NR Desc: Putative RNA
  misc_feature: Homolog of GI Number: 15912287 NR Desc: AT5g61020/maf19_20
  misc_feature: Homolog of GI Number: 30697464 NR Desc: YT521
MKEAFDPPASAAAATPEADNGASIFTRKNIWSDAAAEGDDDSSPWPWDGVKSEEDADFLSHANRALSFLDYEAESSECKYATDIGSHVYPKEAMSPQSEYDRQRPYLPLSSCSWDSSSSLEAMSGNRDASGHVMAKGGTKSDIFAPRHDYLASCPTTGPHMRRSYTEAAKVDCSFDCHSEQHYKGLDRFTPFANCNGQSIECRSEIADMPRGGRCVDEATSFSSRWCFENGGRGSSLPGGLTYGDEIPSLSSRRCNGSGVLSRSSQWHYGAEISSLSSRQGYGDEIPSLSNQKFNGISRSNHWNYSAEIPSLSRRQSYRDEIPSLSSQKSNGISYPRQWQQYGADIPSFSSRQGYGEEVPTMSHHWRCRDKIPLYSGQRCHDAEARRLSSYQQGPFRGNRQPRDSFAHGIVSNQQVKMTATRHTGTRPRVSNRVVNSTSNYRNGRRDNPPRNSEEIRDQVCGPRASKVNNTSTPTAKKDILSPLVRRDQFNKSDFSIQYEQAKFFMIKSYSEDDIHKGIKYNVWASTPNGNSKLDTAFHDAQILMKEKGTKCPVFLLFSVNTSGQFVGLAEMLGPVDFKKTMDFWQQNKWNGFFPVVWHIVKDIPNRLFKHITLENNDNRPVTFSRDTQEIGLPQGLEVLKIFKAYRHGTSILDDFDFYEEKENTRCARKGINADSLHEARLSYFGTDDLKSMGDIEANMESLNLHEPWD

SEQ ID NO: 4379 - DNA, 1686 bp, Triticum aestivum
  misc_feature: Ceres CLONE ID no. 893963
  misc_feature: Ceres CDNA ID no. 40041363
  CDS (41)..(1333): REFERENCED BY SEQ ID NO: 4380
agagaaaaggcaccaagtctttctcggctcgacaacgagaatggcggcgctcctcttactccgaaggctggcggccggcggcgcggtggcaaggctgcagcaaccatacgccggcctagccaccgcagctgcgagagccatttttcgagggcagggaggagatgagatagaagggagctccaactccaccgccatcagatgggtccggcgatgctgcccccacctgcccgcctcgctggtgcagaagctcttccgcctccgcaaggttaagaagaatgctgtgactgctgagacatcttccacagatgctagtgctgagcaattccggttgagaagggtttcggcgaaagatcacctagtacctggcgataccctctttctacctgttaatattcaagaatctcctgttgctgagaaggccaggaaatttgataacaggaatgagattgattttttacgtagccttgagatttacaaggataaagccatcattgtggtcaacaaaccccctggaatgccggttcaaggtggtgttggcataaaaaacagtatagatgtgcttgccccgatgtttgaagaaaattcttctgatgcacctcgcctggtccacagacttgatagggattgtagcggcgtccttgttctgggtagaactcaacttagtgcttccattttgcatgctatctttcgtgagaaaactgctgatgctttagctgatggtactcaacaagtattgcaacgaaaatatgttgcacttgttatgggaacacctagacatcccaagggtttactttcggctccacttgcgaaggttttattacaagatggcaagtctgagcgtctgacagttagagctggtccaaatactacgtctgttcaggatgctttgacagaatacagagtgattgaatcttgcccccgagggttcacttggttggaactatttcctcttactggaagaaagcatcagctccgagtccactgtgcagaggttctcggaacgccgatcgtaggggactacaagtacgggcggcaagcgcaccaggactggacgcctcttcccgtgccgcaaaccgtcgacgaggaactgctcaggaagcagaggcttccctttggccttgtcctgggtggcgggagcgtcgcggaggagcagcctcagttgcatctgcactgcaagcagatgatgctccctgatatctcaactgccgtccaagggttgcagtctgaagacgccgagcgtgacttctcgggtctcgagaagctcagcttcgttgctccattgccgcttcacatgcggctgagctgggaggttttgaagtccgttgacaagtaatcgaagagtggcgtctgagtctgtccgttctctacgccgacctactgtgatacagatgctgtgttgctcaagactatagccacagaagttcaccaaaagatctcattttagtactatagcacagtgacagcggttccttttttctttttgttagggaattcactatccaccacattttcattttctgtttggagccttaacgctcaagggatgtactttaatggttacattgttttcaatcggcaacatcgtttatagtagatcactagtgatctataaacgatcttatatgtatctaacatcttgtcagctaagtatgaagcaatcactgagcacgaaaaaaaaaaaaaaaa

SEQ ID NO: 4380 - protein, 430 aa, Triticum aestivum
  misc_feature: Ceres CLONE ID no. 893963
  misc_feature: Ceres CDNA ID no. 40041363
  misc_feature (149)..(317): Pfam Name: PseudoU_synth_2 PFAM Desc: RNA pseudouridylate synthase
  misc_feature: Homolog of GI Number: 51091882 NR Desc: ribosomal large subunit pseudouridine synthase C
  misc_feature: Homolog of GI Number: 53850479 NR Desc: At1g78910
  misc_feature: Homolog of GI Number: 50947673 NR Desc: putative ribosomal large subunit pseudouridine synthase C protein
  misc_feature: Homolog of GI Number: 3834304 NR Desc: Contains similarity to gi1786244 hypothetical 24.9 kD protein in surA
  misc_feature: Homolog of GI Number: 17987266 NR Desc: RIBOSOMAL LARGE SUBUNIT PSEUDOURIDINE SYNTHASE C
  misc_feature: Homolog of GI Number: 62289923 NR Desc: ribosomal large subunit pseudouridine synthase C
  misc_feature: Homolog of GI Number: 52430461 NR Desc: ribosomal large subunit pseudouridine synthase C
  misc_feature: Homolog of GI Number: 68193526 NR Desc: Pseudouridine synthase
  misc_feature: Homolog of GI Number: 83838395 NR Desc: ribosomal large subunit pseudouridine synthase C
  misc_feature: Homolog of GI Number: 58040098 NR Desc: Ribosomal large subunit pseudouridine synthase C
MAALLLLRRLAAGGAVARLQQPYAGLATAAARAIFRGQGGDEIEGSSNSTAIRWVRRCCPHLPASLVQKLFRLRKVKKNAVTAETSSTDASAEQFRLRRVSAKDHLVPGDTLFLPVNIQESPVAEKARKFDNRNEIDFLRSLEIYKDKAIIVVNKPPGMPVQGGVGIKNSIDVLAPMFEENSSDAPRLVHRLDRDCSGVLVLGRTQLSASILHAIFREKTADALADGTQQVLQRKYVALVMGTPRHPKGLLSAPLAKVLLQDGKSERLTVRAGPNTTSVQDALTEYRVIESCPRGFTWLELFPLTGRKHQLRVHCAEVLGTPIVGDYKYGRQAHQDWTPLPVPQTVDEELLRKQRLPFGLVLGGGSVAEEQPQLHLHCKQMMLPDISTAVQGLQSEDAERDFSGLEKLSFVAPLPLHMRLSWEVLKSVDK

SEQ ID NO: 4381 - DNA, 619 bp, Triticum aestivum
  misc_feature: Ceres CLONE ID no. 894067
  misc_feature: Ceres CDNA ID no. 40351465
  CDS (48)..(281): REFERENCED BY SEQ ID NO: 4382
aggaacaattcccagtgttctcagattggaatcccattgactctaccatggccacgccctctgatccttccaaccaagaagctgttgtaagaaggagaaacaacggaccccctattaagttcctccttcctctcatatatgcccctgttctccctctaattcgtctatcgctgcggcataaacccgtcttgagagatcgcttgtttactgctgtgttggctggggcctttgctcatggcttctatttggtaacagatctgtatgatattgagagcaagtgattaagcagagcatgtttcagacatttcttcggcatcatttacatcacaacctcaggtcttcaataaatttcttcgaccactatttacagctaaacattctggtaatgccttaaatagcattggtcgattttcaagatgtaagaatatttttttcaattatattgacagattattatgttatgtacgccttatagttgcatcttgtattgcggattttgctttctctagaataactatggaattcggaggctgttctttgatcttttttttctctcttgatatcaatgctatttcttgtcagcttgatgttgatttctgtaacaaaaaaaaaaaaaaaa

SEQ ID NO: 4382 - protein, 77 aa, Triticum aestivum
  misc_feature: Ceres CLONE ID no. 894067
  misc_feature: Ceres CDNA ID no. 40351465
MATPSDPSNQEAVVRRRNNGPPIKFLLPLIYAPVLPLIRLSLRHKPVLRDRLFTAVLAGAFAHGFYLVTDLYDIESK

SEQ ID NO: 4383 - DNA, 945 bp, Triticum aestivum
  misc_feature: Ceres CLONE ID no. 894089
  misc_feature: Ceres CDNA ID no. 40351466
  CDS (89)..(574): REFERENCED BY SEQ ID NO: 4384
aaaattgaatttgaactagaaaggaagagagtaactacgatttgaaggaagagacgcagacataggaggttttccgccaaattcgaaaatggtgaaagaaatcgaaactctgacagaagatgaaagacgcgcacttcgtggaagcaaattcgcccctcttccccgcccttccaattccaaacctaggttggctcatccaggtggacccttggcgacgaataaagcagcggctttggccaagtttctggagagaaagctgaaagacccaaatggattggcgtctattaaccctgatatccttgaacttgctgtcaataatgccaaagaaactgtctatgcaagtggtacttctaattcacgaagaaatgttcggcatgtggactcctttggtgactctgattctaaggattctagtgatgaagagcagaatgaactatctgaggtaaaggaatgcaagaagaagaagaagaagaagaaaaagaagaaagagaaaaacaaaaacaaaaagccaaagaatacagaggaccctggatgtgccgtgatgaaaaagcctaaacagaagtttaaattctgatcttatttgtactggcaaaattttgaaagaggattggagctcaaaatttttagccatggtttctttccttgcccaaatttgctacttacaagtaacatggagtttagatgcaatattgtgcaggagcttttgattcgatcgacctttccaacaagctacaacatagattacgaacctttatatatatatattgttagattctttcatgttgtgaaggtggagggaattattgttgaaacaagtccaatttccaaatattaaatggcaaaaatgcaggtcgggcgatgggatttcaaatcgttgttgtaatttgtaaacattcaatttcaatcgggataaacactttcatttgtccaaaaaaaaaaaaaaaa

SEQ ID NO: 4384 - protein, 161 aa, Triticum aestivum
  misc_feature: Ceres CLONE ID no. 894089
  misc_feature: Ceres CDNA ID no. 40351466
MVKEIETLTEDERRALRGSKFAPLPRPSNSKPRLAHPGGPLATNKAAALAKFLERKLKDPNGLASINPDILELAVNNAKETVYASGTSNSRRNVRHVDSFGDSDSKDSSDEEQNELSEVKECKKKKKKKKKKKEKNKNKKPKNTEDPGCAVMKKPKQKFKF

SEQ ID NO: 4385 - DNA, 704 bp, Triticum aestivum
  misc_feature: Ceres CLONE ID no. 894105
  misc_feature: Ceres CDNA ID no. 25891901
  CDS (88)..(519): REFERENCED BY SEQ ID NO: 4386
attcacaacttcacccactcttcattctatcaattccaatcaccaattcaaaacccttcttcccttggaacaaattgagagatcgtgatggcaccaaaggcggagaagaagcccgcagaggagaagaagtccacggtgggagacaaggctccggcggagaagaagccaaaggccggaaagaagcttccgaaggagggaggcgccggcggagaagggaagaagaagaagaggaacaagaagagcgtggagacatacaagatctacatcttcaaggttctgaagcaggttcaccctgacattggtatctcaagcaaggccatgggaatcatgaacagcttcatcaacgacatcttcgagaagcttgcccaggaatcttctagacttgcccgctacaacaagaaacccaccatcacttcgagggaaattcagaccgcggtcaggcttgtgctgcccggtgaattggctaagcacgccgtctctgagggtaccaaggccgtcaccaagtttactagctcttaaactgttgtttatgggcttgttgcacgcccaagtctgttctatgtatctggacacctatgttcagattttaatcaattgtaggggtggtgatatagtatagtgtagcatattgttggtacggtacattgaattgctgttgagaattaatacatttgagattctctaacttaaaaaaaaaaaaaaaa

SEQ ID NO: 4386 - protein, 143 aa, Triticum aestivum; identical to SEQ ID NO: 3306
  misc_feature: Ceres CLONE ID no. 894105
  misc_feature: Ceres CDNA ID no. 25891901
  misc_feature: No seed is being produced by the plant
  misc_feature: The plant flowers significantly late compared to wild-type.
  misc_feature: Useful for biocontainment applications
  misc_feature: Useful for making plants with modulated flowering time
  misc_feature (50)..(122): Pfam Name: Histone PFAM Desc: Core histone H2A/H2B/H3/H4
  misc_feature: Homolog of GI Number: 2558962 NR Desc: histone H2B1
  misc_feature: Homolog of GI Number: 82400146 NR Desc: histone H2B
  misc_feature: Homolog of GI Number: 21536602 NR Desc: histone H2B
  misc_feature: Homolog of GI Number: 30102580 NR Desc: At3g45980
  misc_feature: Homolog of GI Number: 21554180 NR Desc: histone H2B
  misc_feature: Homolog of GI Number: 21553526 NR Desc: putative histone H2B
  misc_feature: Homolog of GI Number: 3021485 NR Desc: histone H2B
  misc_feature: Homolog of GI Number: 3021483 NR Desc: histone H2B
  misc_feature: Homolog of GI Number: 1848210 NR Desc: histone H2B1
  misc_feature: Homolog of GI Number: 21617908 NR Desc: histone H2B

SEQ ID NO: 4387 - DNA, 485 bp, Triticum aestivum
  misc_feature: Ceres CLONE ID no. 894147
  misc_feature: Ceres CDNA ID no. 40351467
  CDS (25)..(339): REFERENCED BY SEQ ID NO: 4388
cagtattcagattacattgcaaaaatggcatcattcaccatgacagcttccatccttggcagcccagccgtcaccaaccggtcggcagtagcaacgcagaggagatcactcgtagtgaatgctgccaaagctgttgaagcagaaaaggtcagttatgacaatgacatggatggtagcaatggaaggaggaacttgatgttcgccgcggcggcggctgctgtttgctctgttgctgggatggcagtggcagatgagcctaaaccaggaaccccagaagccaagaaaaagtatgctccgatttgtgtcaccatgccaactgctaggatttgtcgcaattgagggactttggtttttattttacttctgatgattggaaatgtacaatggggttgttgtaatgctttgatgatttcatttgatcctcactgtacaagatgttcataaaactatcgagctttgctttgaaaagaaaaaaaaaaaaaaaa

SEQ ID NO: 4388 - protein, 104 aa, Triticum aestivum
  misc_feature: Ceres CLONE ID no. 894147
  misc_feature: Ceres CDNA ID no. 40351467
MASFTMTASILGSPAVTNRSAVATQRRSLVVNAAKAVEAEKVSYDNDMDGSNGRRNLMFAAAAAAVCSVAGMAVADEPKPGTPEAKKKYAPICVTMPTARICRN

SEQ ID NO: 4389 - DNA, 610 bp, Triticum aestivum
  misc_feature: Ceres CLONE ID no. 894152
  misc_feature: Ceres CDNA ID no. 25891902
  CDS (45)..(479): REFERENCED BY SEQ ID NO: 4390
gatacaggaacagcagagaaacaaagttagaagtaaagaagatcatggcttctctagcaaccttggctgctgttcaaccagctacgatcaatggccttgctggaagttccctctctggaactaagctctctttcaagccctctcgccacagtgtcaaatccaagaacttcaggagtggtgccgtggtagcaaagtatggtgacaagagtgtgtactttgatttggaggatctgggcaacactacagggcagtgggacttgtatggctcagatgcaccttcaccctacaaccctcttcagagcaagttcttcgagacatttgctgctccattcacaaagaggggattgttactcaagtttctgatattgggaggtggttccacccttgcatacttcagtgcaactgcctcaggtgacattctaccaatcaagaagggaccacaactcccaccaaagctcggtcctcgtggcaagatctaatttgatttgtatcagaactccatctattgagttcctttttaattattttttttctggtttgcataatgtgtaagtatacttacagactactattcaaagatgcttctttcccgtcaaaaaaaaaaaaaaaa

SEQ ID NO: 4390 - protein, 144 aa, Triticum aestivum; identical to SEQ ID NO: 4208
  misc_feature: Ceres CLONE ID no. 894152
  misc_feature: Ceres CDNA ID no. 25891902
  misc_feature (6)..(144): Pfam Name: PSI_PsaH PFAM Desc: Photosystem I reaction centre subunit VI
  misc_feature: Homolog of GI Number: 33520419 NR Desc: photosystem I psaH protein
  misc_feature: Homolog of GI Number: 407355 NR Desc: PSI
  misc_feature: Homolog of GI Number: 407353 NR Desc: PSI
  misc_feature: Homolog of GI Number: 397555 NR Desc: photosystem I psaH protein
  misc_feature: Homolog of GI Number: 21553440 NR Desc: Photosystem I reaction center subunit VI
  misc_feature: Homolog of GI Number: 21618081 NR Desc: photosystem I subunit VI precursor
  misc_feature: Homolog of GI Number: 21287 NR Desc: psaH
  misc_feature: Homolog of GI Number: 1916350 NR Desc: PSI
  misc_feature: Homolog of GI Number: 445928 NR Desc: photosystem I:SUBUNIT=PS I
  misc_feature: Homolog of GI Number: 445929 NR Desc: photosystem I:SUBUNIT=PS I
  misc_feature: Useful for making plants with increased biomass and foliage

SEQ ID NO: 4391 - DNA, 658 bp, Zea mays
  misc_feature: Ceres CLONE ID no. 894620
  misc_feature: Ceres CDNA ID no. 36692603
  CDS (61)..(501): REFERENCED BY SEQ ID NO: 4392
aactgcaaccccggaacagagcgaggcgacgccgaggcacctcatctccggcgaagggaaatggcgaccgttccaggggatctgatctggcagattgtgaggaagaacaactccttcctggtgaagcagtttggcaacggcaatgccaaggtgcagttcaccaaggagcccaacaacctctacaatttacactcctacaagtactctggcttagcaaacaagaaaactgtaacgatccagccagctgctggaaaggactcggctgtggtcctctctactaccaagaccaagaagcagaacacacccgcgaagctcagccacaagtctgtgatgcgcaaggagttccgcaagatggccaaggctgtgaaaaaccaggttggcgacaactattacaggcctgatctgaccaagtcggcccttggtaggctgagctctgtgtaccgcagcctccaggttgccaagtctggtgtcaagaagaagaacaggcagcctacgcactaagcctgtgttctgtcgttggtgcccatagtctcagcttatatttatccaatgtctccaacagttttgagacttgttagaactagagcaaatcgtgttaagatgttgccgtttgtcattctatagcaagaattccatgaaacaaaaaaaaaaaaaaaaa

SEQ ID NO: 4392 - protein, 146 aa, Zea mays
  misc_feature: Ceres CLONE ID no. 894620
  misc_feature: Ceres CDNA ID no. 36692603
  misc_feature: null
  misc_feature: Useful for making plants with altered oil content
  misc_feature (5)..(137): Pfam Name: Ribosomal_L28e PFAM Desc: Ribosomal L28e protein family
  misc_feature: Homolog of GI Number: 50915960 NR Desc: putative 60S ribosomal protein L28
  misc_feature: Homolog of GI Number: 55908881 NR Desc: putative 60S ribosomal L28 protein
  misc_feature: Homolog of GI Number: 34910390 NR Desc: ribosomal protein L28
  misc_feature: Homolog of GI Number: 19310757 NR Desc: putative ribosomal protein L28
  misc_feature: Homolog of GI Number: 55908882 NR Desc: putative 60S ribosomal L28 protein
  misc_feature: Homolog of GI Number: 32411169 NR Desc: predicted protein
  misc_feature: Homolog of GI Number: 66845184 NR Desc: Ribosomal L28e protein family
  misc_feature: Homolog of GI Number: 20976820 NR Desc: GH04183p
MATVPGDLIWQIVRKNNSFLVKQFGNGNAKVQFTKEPNNLYNLHSYKYSGLANKKTVTIQPAAGKDSAVVLSTTKTKKQNTPAKLSHKSVMRKEFRKMAKAVKNQVGDNYYRPDLTKSALGRLSSVYRSLQVAKSGVKKKNRQPTH

SEQ ID NO: 4393 - DNA, 966 bp, Zea mays
  misc_feature: Ceres CLONE ID no. 894733
  misc_feature: Ceres CDNA ID no. 25446448
  CDS (495)..(701): REFERENCED BY SEQ ID NO: 4394
aaaactctactccgtaacctttccgtctctaaccttcccgtctcctgctgccacctcccgcatccgtgaagaacgactgaaccagccgccacccgcccgtccgactccggctccggccacctgcctccgtccctccgccgagctgcccgtctgccttcgtccctccggcctaggcgagcagatctccacccccacccgccccgagccgagcagcagccagcagagccgcatcgccgccggggaacgctgagttgccggcccgtcgccctgagaagatctccatcccagcagcatagccgcagcgccgcctccccaaggcaaggcccgagcgccctacgccctgccacaggccccagattaggttgatgtctttcatgagactattgcctcaaaggctaccccaacttatcaggtgtgttttagctttcactcctaccaatatgatagatacttcatttatgtgtccataatttcattgaaaatgacatggggttatgtttccgttttcttgcttgatgcactctctcaggcaggtggagcaagatgttgagactgtaatccacgttctccagccaggtccaataggaattgtggagcacaaattcacagacacggagatcttagaggccagggctacagtgaaaagagcagtggataattggcgaagaaattggacccttgagaaaaatgttggcagataaatggaaataatataccccttgtgtcttctatcaacagtacttgaaataaataggatgctatggctggatgcagctgttgccattagttagatttgagcacgatctgcttatcgggagttatgttaactgttctaaatgatcagtctgcctctctttgtttcatggtttgaaacgttcatatttagagaatttctttttgttcattgccttgtcggcagccggctgtcatattgaatgtgatctttctttaaaaaaaaaaaaaaaa

SEQ ID NO: 4394 - protein, 68 aa, Zea mays
  misc_feature: Ceres CLONE ID no. 894733
  misc_feature: Ceres CDNA ID no. 25446448
  misc_feature: Homolog of GI Number: 7441828 NR Desc: extensin
  misc_feature: Homolog of GI Number: 7441829 NR Desc: proline
MFPFSCLMHSLRQVEQDVETVIHVLQPGPIGIVEHKFTDTEILEARATVKRAVDNWRRNWTLEKNVGR

SEQ ID NO: 4395 - DNA, 824 bp, Zea mays
  misc_feature: Ceres CLONE ID no. 894772
  misc_feature: Ceres CDNA ID no. 36589889
  CDS (232)..(591): REFERENCED BY SEQ ID NO: 4396
agaccatccatatcagatgaaggtgctggtaatctcaagtcacagatcggaccgcccattctcttggaaaatcatctcccgccgtcagatctaggtcacccggcagccatcctataaaacctctccatctctcctccttacttccgtccccgccgccacgccagagaggagaggaagagcgcgcggagagtgagagcccgggagccgggagaagcagcggctgggagcaagatggtgcagcgcctcacctaccggaagcggcacagctacgccaccaaatcgaaccagacccgcgtcgtcaagacacctggtgggaaacttgtgtaccagtacaccaagaagcgcgcgagcggaccgaagtgcccagtcaccgggaagaagatccaaggaattccacacctgagacctgctgagtacaagaggtccaggttggcaaggaaccaaaggactgtgaatcgtccatatggtggtgttctgtctggtactgcagttagggagaggatcatccgtgcctttttggtcgaggaacagaagatagtgaagaaggtgttgaagatccaaaagaccaaggataaggcctccaagagctagacgatataggccacaatgtttgagtccattcgaatttatttcagcaggaaaatttctcgcgggtatggggaatcttggtacttatgctagtagtatgtgagatgggtgtggtttaaattttgagcgtaagttgagttctgttaacttgttaagttcggtggaatgttttaaactatgtggatgtcagattttgttaatgtttgcgcagtttgcccctaaaaaaaaaaaaaaaa

SEQ ID NO: 4396 - protein, 119 aa, Zea mays
  misc_feature: Ceres CLONE ID no. 894772
  misc_feature: Ceres CDNA ID no. 36589889
  misc_feature (5)..(103): Pfam Name: Ribosomal_L34e PFAM Desc: Ribosomal protein L34e
  misc_feature: Homolog of GI Number: 50941301 NR Desc: putative ribosomal protein L34
  misc_feature: Homolog of GI Number: 50946109 NR Desc: putative ribosomal protein
  misc_feature: Homolog of GI Number: 57471712 NR Desc: ribosomal protein l34
  misc_feature: Homolog of GI Number: 1076636 NR Desc: ribosomal protein L34
  misc_feature: Homolog of GI Number: 47824936 NR Desc: Ribosomal protein L34e
  misc_feature: Homolog of GI Number: 2119150 NR Desc: ribosomal protein L34
  misc_feature: Homolog of GI Number: 21436403 NR Desc: putative 60S ribosomal protein L34
  misc_feature: Homolog of GI Number: 20259165 NR Desc: putative 60S ribosomal protein L34
  misc_feature: Homolog of GI Number: 21594659 NR Desc: 60s ribosomal protein L34
  misc_feature: Homolog of GI Number: 13194822 NR Desc: putative 60S ribosomal protein L34
MVQRLTYRKRHSYATKSNQTRVVKTPGGKLVYQYTKKRASGPKCPVTGKKIQGIPHLRPAEYKRSRLARNQRTVNRPYGGVLSGTAVRERIIRAFLVEEQKIVKKVLKIQKTKDKASKS

SEQ ID NO: 4397 - DNA, 876 bp, Zea mays
  misc_feature: Ceres CLONE ID no. 894790
  misc_feature: Ceres CDNA ID no. 40351468
  CDS (1)..(708): REFERENCED BY SEQ ID NO: 4398
acgcctcaaaaagaattgcgttttgatttgtatatccattatccaagctgccacacctgcaggcagtcggtggcaaaaaagaaaaaaactaatttgtttgcttttgcagcgatcgagacgacactgtggtcgatcgagtggggcatcgccgagctggtgaaccacccggccatccagcacaagctccgggaggagctcgcctcggtgctgggcgccggcgtgcctgtgacggagccggacctcgagcgcctcccctaccttcaggccatcgtcaaggagacgctccgcctgcgcatggccatcccgctgctggtcccccacatgaacctcaacgacggcaagctcgccggctacgacatccccgccgagtccaagatcctcgtcaatgcctggttcctcgccaacgaccccaagaggtgggtgcggcccgacgagttccggcccgagcgcttcctggaggaggagaagtccgtggaggcccacggcaacgacttccgcttcgtgccctttggggtcggccgccggagctgccctgggatcatcctcgcgctgcctatcatcggcatcaccctgggccggctggtgcagaacttccagctgctgccgccgccggggctggacaagatcgacaccacggagaagcccggccagttcagcaaccagatcgccaagcatgccaccatcgtctgcaagcccctcgaggcctagaaatcaatgcctgtttcctgcacgcgcccccgcagatgaagcactatgtattttgtcttttttttgtgtgttgtgtttttttactaagaggagatgtatttcttgtttgtaaaatgcacttagtcaaatgagtcgagattatgttgatcatcaaaaaaaaaaaaaaaa

SEQ ID NO: 4398 - protein, 137 aa, Zea mays
  misc_feature: Ceres CLONE ID no. 894790
  misc_feature: Ceres CDNA ID no. 40351468
  misc_feature (3)..(131): Pfam Name: p450 PFAM Desc: Cytochrome P450
MAIPLLVPHMNLNDGKLAGYDIPAESKILVNAWFLANDPKRWVRPDEFRPERFLEEEKSVEAHGNDFRFVPFGVGRRSCPGIILALPIIGITLGRLVQNFQLLPPPGLDKIDTTEKPGQFSNQIAKHATIVCKPLEA

SEQ ID NO: 4399 - DNA, 926 bp, Zea mays
  misc_feature: Ceres CLONE ID no. 895023
  misc_feature: Ceres CDNA ID no. 35387068
  CDS (144)..(548): REFERENCED BY SEQ ID NO: 4400
atccgatccactctcccagctgcgctgcgcctcctcggtctctccttccacctccacacctaccgcggctcctctcggttcttccaatccaagaaacaaactacaaccaagcagatacctagctagcagcatatacgaacgaaatggagctgccgcagggccagggccagggccacgagaagccgccgcccgccgccaacggccggggggcgtggcgcggcggcgcgtcgtcctcctccgcgtccgcggcgaccccgcccaaggtgtaccgcgtggagccccgcgagttccgggacctggtgcagaggctgaccggcgcgccgccgcccacggccctgcggcggccgcagcagcaccagcaccagcaccgcgcggccgtcgtggcgcccgtggtgcatccgcagcccgtgcgcgccggcgccggcgccggcgccggcggagatcagctggcgtacggcgcgccggcgccgtggtcgttctcgttcccgatggccggcgccggggtggaggcggcggcggcgcagccccagcacggcgctttcctctagtctagccgcccgtggtggcgtggtgctgtgtgctactgcgctactcatgcgcgcatgcacggtggacggtgcatcgtcgtcacaaagagagaaggcgatcaatcactccttttgtaatagttacaataattaaaaacaaaaaccctgcatgtacgtacgtgcggccggcatgggatgatgtcggctatagctccaggtggtaacatcgcatcgcatgcatgtacgtgttgtgtgttaactacagcagttaattagcgcgagggagtagtgaactagtgacacatatactgtactagataggcgcggcgtacgctgtactgtatatgttcaataatattaccccaacgtcatgtcgtattattaaaaaaaaaaaaaaaa

SEQ ID NO: 4400 - protein, 134 aa, Zea mays
  misc_feature: Ceres CLONE ID no. 895023
  misc_feature: Ceres CDNA ID no. 35387068
  misc_feature (35)..(65): Pfam Name: VQ PFAM Desc: VQ motif
  misc_feature: Homolog of GI Number: 66780099 NR Desc: PE
  misc_feature: Homolog of GI Number: 71366701 NR Desc: Respiratory
  misc_feature: Homolog of GI Number: 67985780 NR Desc: Oxidoreductase
MELPQGQGQGHEKPPPAANGRGAWRGGASSSSASAATPPKVYRVEPREFRDLVQRLTGAPPPTALRRPQQHQHQHRAAVVAPVVHPQPVRAGAGAGAGGDQLAYGAPAPWSFSFPMAGAGVEAAAAQPQHGAFL

SEQ ID NO: 4401 - DNA, 839 bp, Zea mays
  misc_feature: Ceres CLONE ID no. 895033
  misc_feature: Ceres CDNA ID no. 29191508
  CDS (124)..(651): REFERENCED BY SEQ ID NO: 4402
atgccttctcttcccttcctgctttgcgagtcccagcgccaaacacccaaaccctaactatttggctattggctatttgatgcctactacgaacattttggcaaaagaaaaaggtattcagccatggtttttcttgaggcagagatgtcatggaatgtgttgatctcacctagccagctggaccgcaagggcctcctgctccgcaaggctatcattgtgcgtcttctggaggatgtcacaaacaggagggcttcgaaagagcatggctactacattgctgttaatcagctgaaggcaatatctgaagggaaagtgcgtgagctaactggagatgttctgttcccagtttcatttacttgcattacacagaagcctatgaagggagaggtcatggttgggcacgtggacaggatcctcaagcatggcgtgttcctcaaatccggacccgtggagagcatcttcctggctgagaagtcgatgagtaattacaagtacataggtggggagaatgcgatgttcatgaacgaccactcgaagctggagaaggacaccgccgtgcgcttcaaggtcctagggttccgctggatggaggctgaccgccaattccagctccttgctacgatcgctggtgacttccttgggccgctgtgaactgcttccacaggtcaaacaggttctaatgtacattgctcgttagatggtggatggatggttggatctgatgtgtagaattaaactttgctaccagtggtttggtcttgtagaacctgagacatggtaggttttctagatgctgttgccagtgatatttagctctggtttgaaaaaaaaaaaaaaaa

SEQ ID NO: 4402 - protein, 175 aa, Zea mays
  misc_feature: Ceres CLONE ID no. 895033
  misc_feature: Ceres CDNA ID no. 29191508
  misc_feature (1)..(82): Pfam Name: RNA_pol_Rpb7_N PFAM Desc: RNA polymerase Rpb7
  misc_feature: Homolog of GI Number: 50932157 NR Desc: putative RNA polymerase II fifth largest subunit
  misc_feature: Homolog of GI Number: 57863806 NR Desc: putative receptor kinase
  misc_feature: Homolog of GI Number: 50933363 NR Desc: putative receptor kinase
  misc_feature: Homolog of GI Number: 42566796 NR Desc: RNA polymerase Rpb7 N
  misc_feature: Homolog of GI Number: 7268172 NR Desc: RNA polymerase II fifth largest subunit like protein
  misc_feature: Homolog of GI Number: 21553765 NR Desc: RNA polymerase II fifth largest subunit
  misc_feature: Homolog of GI Number: 11994719 NR Desc: RNA polymerase II fifth largest subunit
  misc_feature: Homolog of GI Number: 38603938 NR Desc: At4g14520
  misc_feature: Homolog of GI Number: 322700 NR Desc: RNA polymerase II fifth largest subunit
  misc_feature: Useful for making stronger plants
MVFLEAEMSWNVLISPSQLDRKGLLLRKAIIVRLLEDVTNRRASKEHGYYIAVNQLKAISEGKVRELTGDVLFPVSFTCITQKPMKGEVMVGHVDRILKHGVFLKSGPVESIFLAEKSMSNYKYIGGENAMFMNDHSKLEKDTAVRFKVLGFRWMEADRQFQLLATIAGDFLGPL

SEQ ID NO: 4403 - DNA, 638 bp, Zea mays
  misc_feature: Ceres CLONE ID no. 895043
  misc_feature: Ceres CDNA ID no. 25446449
  CDS (178)..(384): REFERENCED BY SEQ ID NO: 4404
gcgagaatctgggcgtttggtttcagcttcagcttctggcggccagaagccgcccagaagctgaaccaaacagccacatcccttcctctctttctcctcgaggctcgagcattcgtgctgctccgaccccaccgccacaggctcggcggtccggcgatctcgctcaccggcgggaacatgactacttcaaggcgcctcgctgacaggaagaccgcaaagttccagaagaacatcaccaggaggggttctgtgcctgaaaccactgtcaagaagggaaatgactaccctgttggccctctagtgcttgggttcttcatctttgtcgtcattggatcatcgttgtttcagatcatcaggacggcaaccagcggcggggtggcttgagagagccggcccacatctaatccccagtatagagagttgcttgttatacatgcgtccagctaggattgggtagcagctaaaatgttaaacgtgacaagactgccctgcattccgttcatttggtgggccttgaatctggaactgaaccataaagcagaatcatgtaccttatataaagtgttgaatgggtaactggatctcagtgtttcatttaaactttccccggtgttggatttttaaaaaaaaaaaaaaaa

SEQ ID NO: 4404 - protein, 68 aa, Zea mays; identical to SEQ ID NO: 1624
  misc_feature: Ceres CLONE ID no. 895043
  misc_feature: Ceres CDNA ID no. 25446449
  misc_feature (1)..(65): Pfam Name: RAMP4 PFAM Desc: Ribosome associated membrane protein RAMP4
  misc_feature: Homolog of GI Number: 25403305 NR Desc: protein F17L21.12
  misc_feature: Homolog of GI Number: 77552122 NR Desc: sorbitol transporter
  misc_feature: Homolog of GI Number: 23479574 NR Desc: Arabidopsis thaliana F17L21.12
  misc_feature: Homolog of GI Number: 67084013 NR Desc: ribosome associated membrane protein 4

SEQ ID NO: 4405 - DNA, 789 bp, Zea mays
  misc_feature: Ceres CLONE ID no. 895123
  misc_feature: Ceres CDNA ID no. 40351469
  CDS (219)..(503): REFERENCED BY SEQ ID NO: 4406
agtcacggtctcaccgtctctttctcagccagtcaccaccagccgccagaaaccgagcgccagcctccaaggctcccatccctccatggctccatctccatagttgctctacggctgtacgcctgtaccgagcaaccgccggcgtcgacactgccgtccaggcccgtccctgcccagccatccggccgcttcccttctatctgccctgcagcttccaaatggctagtgaggactcgaaagatatgctgaagaacgtggactggaagaccgtgggcggtgctgtgactactgaatctagccagccagtcgtcaagaaacgccttccgaagaagatcagacaagtccctgagtgctattttctgcctcggcgatctttgccttctgcactggcaatctatggtgccgtgtgtgctgctggagttggtgcgggaatgctgatcgaggtgtggataaacaaaaagatcaaagaggatagtgctattatctgggagatggataaatgatgtgcagttctgcaccacactttgatatggtggaagcagtttcggcactgcgatatttgctagctctcaagttaagaattttgtttataggattccttcgtccgtttgttttattttgattggggtattgccaagatggattcaagaacgttcatccgcagttcatttaccagaacacgagtaaaaactctggctgctgaaaatatagctccaccacaactctaaaataacttataatctgaaatcgaggaagtatttctgttatcatgctaaaaaaaaaaaaaaa

SEQ ID NO: 4406 - protein, 94 aa, Zea mays
  misc_feature: Ceres CLONE ID no. 895123
  misc_feature: Ceres CDNA ID no. 40351469
MASEDSKDMLKNVDWKTVGGAVTTESSQPVVKKRLPKKIRQVPECYFLPRRSLPSALAIYGAVCAAGVGAGMLIEVWINKKIKEDSAIIWEMDK

SEQ ID NO: 4407 - DNA, 1016 bp, Zea mays
  misc_feature: Ceres CLONE ID no. 895962
  misc_feature: Ceres CDNA ID no. 40041364
  CDS (226)..(753): REFERENCED BY SEQ ID NO: 4408
accgcagcgtctcgactggtcccctccttcctcttctcttcctcttcctctcacatcccggacaaatccaatccgaaatcatctccccctcgcctcgcctagaagaggaaggaagaacagagataagcgacaacgcgtccctcctcgccttcctcccgcctcgagctcttcccggagcaaccggagccacagacgtcaggacagcctagcgcgttccacgccggtatgcagaaccagatcatgtgccatgcttgccggacccttctgctctacccgcgtggcgcgtccagcgtctgctgcgcggtttgccaggccatcaccaccgtgccgccaccaggattggagatggctcagcttatatgtggtggctgtcgaactttgctgatgtatactcgcagtgcagacaccgtaaggtgttcatgttgcaacacagtgaaccttgttagaccagtgaataatatagctcatgtgaactgcggccagtgccggacaactttgatgtatccatacggcgcaccttcagtaaaatgtgccgtatgcaattatgtcacagctactggagtaaatactgtggcacccaccccatctgcgaggccaacatcagatgggtcttcatatagtggctcatctacttctgctcctaaatctcaatctcagaatgtaactgttgttgttgagaaccctatgacagttgatgacaagggaaaacttgtcagcagcgttgtagttggagtcacagctgggaaagagtgattttattgacacttcgtacatcattgttgtgttttctatacacgaagttggaaaataccatgtagcatccaatgatgggttgcttggacttccttgaagaacagagatacaccacgaaatatttgtaggaccttcctaatgaaaccatggtcggacgttgtgtattgattcttttgtgtgtataatatgagctccgttagacttgtgtaatcagatatttgggggaaatacagcatagtttcgctgtaaaaaaaaaaaaaaaa

SEQ ID NO: 4408 - protein, 175 aa, Zea mays
  misc_feature: Ceres CLONE ID no. 895962
  misc_feature: Ceres CDNA ID no. 40041364
  misc_feature (46)..(70): Pfam Name: zf PFAM Desc: LSD1 zinc finger
  misc_feature: Homolog of GI Number: 50881432 NR Desc: zinc finger protein
  misc_feature: Homolog of GI Number: 77556573 NR Desc: zinc finger protein LSD1
  misc_feature: Homolog of GI Number: 7268834 NR Desc: zinc
  misc_feature: Homolog of GI Number: 17981380 NR Desc: zinc finger protein LSD2
  misc_feature: Homolog of GI Number: 79325187 NR Desc: LSD1
  misc_feature: Homolog of GI Number: 32400832 NR Desc: 18S subunit ribosomal protein
  misc_feature: Homolog of GI Number: 33867796 NR Desc: LSD1
  misc_feature: Homolog of GI Number: 40809629 NR Desc: zinc finger protein
  misc_feature: Homolog of GI Number: 62751057 NR Desc: LSD
  misc_feature: Homolog of GI Number: 42406064 NR Desc: zinc finger protein LSD1
MQNQIMCHACRTLLLYPRGASSVCCAVCQAITTVPPPGLEMAQLICGGCRTLLMYTRSADTVRCSCCNTVNLVRPVNNIAHVNCGQCRTTLMYPYGAPSVKCAVCNYVTATGVNTVAPTPSARPTSDGSSYSGSSTSAPKSQSQNVTVVVENPMTVDDKGKLVSSVVVGVTAGKE

SEQ ID NO: 4409 - DNA, 822 bp, Zea mays
  misc_feature: Ceres CLONE ID no. 896286
  misc_feature: Ceres CDNA ID no. 25446083
  CDS (97)..(543): REFERENCED BY SEQ ID NO: 4410
aacatttcagattaccgttttcatccctattcccggctacccacaccgcgcgagatctccgatccccgcccaaatcccacgacgccggcggcggccatgggcggcaaggacctgacggaggaccagatcgcctcgatgcgggaggccttctcgctgttcgacacggacggggacggccgcatcgcgccctcggagctgggcgtcctcatgcgctccctcggcgggaaccccacgcaggcgcagctccgggacatcgcggcgcaggagaagctcaccgcacccttcgacttcccgcgctttctcgacctcatgcgcgcccacctcaagcccgagcccttcgaccgcccgctccgcgacgccttccgcgtcctcgacaaggacggctccggcaccgtcgccgtcgccgacctccgccacgtcctcacctccatcggcgagaagctcgaggcccacgagttcgacgagtggatccgcgaggtcgacgtcgcgcccgacggcaccatccgctacgacgacttcatcctccgcatcgtcgccaaatgatcccgtcccttctccctcgagtctccgattcgccgatccaccacccccgcgctcttcgtctgtaatgacttcgtctcccgtccgccgtgatttcattttgtttacccgctagctcatttgaattcagtttggcctcttcgttccgggactgcaacctagggtctggataaacacataatggttggtgtgtgagtgtgtgtgattatcgcccaaacaatggatcgattaattaatggatctggctagtgatgttgcttttgcttaaaaaaaaaaaaaaaa

SEQ ID NO: 4410 - protein, 148 aa, Zea mays
  misc_feature: Ceres CLONE ID no. 896286
  misc_feature: Ceres CDNA ID no. 25446083
  misc_feature: The plant is abnormally small.
  misc_feature: Useful for making plants with modulated biomass
  misc_feature (84)..(112): Pfam Name: efhand PFAM Desc: EF hand
  misc_feature: Homolog of GI Number: 50940533 NR Desc: putative calmodulin
  misc_feature: Homolog of GI Number: 47027065 NR Desc: serine/threonine kinase
  misc_feature: Homolog of GI Number: 28629126 NR Desc: putative serine/threonine kinase
  misc_feature: Homolog of GI Number: 48209896 NR Desc: putative calmodulin
  misc_feature: Homolog of GI Number: 20334852 NR Desc: At1g12310/F5O11_2
  misc_feature: Homolog of GI Number: 8778650 NR Desc: F5O11.4
  misc_feature: Homolog of GI Number: 17529028 NR Desc: putative calmodulin protein
  misc_feature: Homolog of GI Number: 6630454 NR Desc: F23N19.18
  misc_feature: Homolog of GI Number: 46099694 NR Desc: CLM_PLEOS Calmodulin
  misc_feature: Homolog of GI Number: 4959636 NR Desc: calmodulin mutant SYNCAM36
  misc_feature: Useful for making stronger plants
MGGKDLTEDQIASMREAFSLFDTDGDGRIAPSELGVLMRSLGGNPTQAQLRDIAAQEKLTAPFDFPRFLDLMRAHLKPEPFDRPLRDAFRVLDKDGSGTVAVADLRHVLTSIGEKLEAHEFDEWIREVDVAPDGTIRYDDFILRIVAK

SEQ ID NO: 4411 - DNA, 589 bp, Zea mays
  misc_feature: Ceres CLONE ID no. 896380
  misc_feature: Ceres CDNA ID no. 29191889
  CDS (87)..(296): REFERENCED BY SEQ ID NO: 4412
aaggccataccctccaaccgctggatcgggtatcggcattactgggcgcacgagactagggatttcccccttgcaatcacgaatccatggcggatgctgaacctgttgatcagaagaattaccttgaggaacgttgcaagccgcaatgtgtaaaaacattgtatgattatgagaaatgcgtcaagagagtcgagagcgacggaagtgggcagaagcactgcaccggccaatacttcgactactggtcatgcgttgacaagtgtgttgcaccaaagctcttcgacaaactgaaatgataacggaacgcaactttgaaggcgcggctcctttcaggaagtcaaatagctccaataaacccatgccttggcctctggaatttgtttgctgaacctgtggcagggagcctcattttgatacgttttgctgaaccgtctttgttttttttttcccctgaatctgtgtggtatcccaagcgtcgagcccaatttcttttgtataagaataatgaggtgcccataaaaaataggccccaagaagattgttcgaatgtacacaagcaaaacaaatttcctcaaaaaaaaaaaaaaaa

SEQ ID NO: 4412 - protein, 69 aa, Zea mays; identical to SEQ ID NO: 746
  misc_feature: Ceres CLONE ID no. 896380
  misc_feature: Ceres CDNA ID no. 29191889
  misc_feature (7)..(69): Pfam Name: UCR_hinge PFAM Desc: Ubiquinol
  misc_feature: Homolog of GI Number: 62732974 NR Desc: ubiquinol
  misc_feature: Homolog of GI Number: 21554004 NR Desc: putative ubiquinol
  misc_feature: Homolog of GI Number: 15218058 NR Desc: ubiquinol
  misc_feature: Homolog of GI Number: 488712 NR Desc: ubiquinol
  misc_feature: Homolog of GI Number: 5103810 NR Desc: Similar to gbX79273 cytochrome c reductase hinge protein subunit from Solanum tuberosum.
  misc_feature: Homolog of GI Number: 50252217 NR Desc: putative ubiquinol
  misc_feature: Homolog of GI Number: 14532878 NR Desc: putative ubiquinol
  misc_feature: Homolog of GI Number: 68128316 NR Desc: ubiquinol
  misc_feature: Homolog of GI Number: 23509470 NR Desc: ubiquinol
  misc_feature: Homolog of GI Number: 56522690 NR Desc: ubiquinol

SEQ ID NO: 4413 - DNA, 859 bp, Zea mays
  misc_feature: Ceres CLONE ID no. 896512
  misc_feature: Ceres CDNA ID no. 29191602
  CDS (112)..(522): REFERENCED BY SEQ ID NO: 4414
ccctcctcacaacacaggacgcaacgcatccaacgcgccccgcccgcccggttggattcgattcctcccaaacttgtcgtccccaagcagcagcctttccctctctttcccatggccaccaagcccggcagggcggccgccgcggtgctgctcctcaccctgctcgccgctctacacgcggccgcccgcaacaacaacaacaacgagaaccgcaacccgggcggcggcggcggcgacccgggcgccttcttcgccgggatgccgcggttcagcggcggcggggtgccaggcggcggcgggttcttcggcggctggggcgagggcggtctcgggtaccggcgcggcgctgtggtgccgccctccacggtgtgcccgcaggacgggccctgccgcgggaagcgcctcacctgcccgccgcgctgcttccggaccttcagctacggcggcaagaacgggggcggcggcggaggcggcggaggctgcagcttcgactgcaccgagcgctgcgccgccacctgctgagtgaatctgggatgtattagaggagggcgtggccgtagctatagctaaagctcgtgtactccttcctctactggcatgcggtgcactgcttcttcctgctcgtccactgatacgaattatcgctactactaatagtatcgaggtggtttggtttggtttagctgttggtttgttgcgagttgtgatcggtcgtgatcacgtacgtgatgactgatgagatcatttatgcatgtgtgtctgtaaatttggtgtctgccagtgccagtgccagactgatcaataatagcagaggagaggagatgaataaagagaaatttagacaaaaaaaaaaaaaaaa

SEQ ID NO: 4414 - protein, 136 aa, Zea mays
  misc_feature: Ceres CLONE ID no. 896512
  misc_feature: Ceres CDNA ID no. 29191602
  misc_feature (1)..(124): Pfam Name: GRP PFAM Desc: Glycine rich protein family
  misc_feature: Homolog of GI Number: 67987177 NR Desc: 4Fe
  misc_feature: Homolog of GI Number: 55236070 NR Desc: ENSANGP00000025431
  misc_feature: Homolog of GI Number: 78495908 NR Desc: cell wall surface anchor family protein
  misc_feature: Homolog of GI Number: 2078483 NR Desc: antifreeze glycopeptide AFGP polyprotein precursor
  misc_feature: Homolog of GI Number: 27777568 NR Desc: putative secreted protein
  misc_feature: Homolog of GI Number: 72547041 NR Desc: proteophosphoglycan ppg1
  misc_feature: Homolog of GI Number: 13592175 NR Desc: ppg3
  misc_feature: Homolog of GI Number: 11359723 NR Desc: proteophosphoglycan
  misc_feature: Homolog of GI Number: 72547023 NR Desc: proteophosphoglycan ppg4
  misc_feature: Homolog of GI Number: 320980 NR Desc: eggshell protein 2A precursor
MATKPGRAAAAVLLLTLLAALHAAARNNNNNENRNPGGGGGDPGAFFAGMPRFSGGGVPGGGGFFGGWGEGGLGYRRGAVVPPSTVCPQDGPCRGKRLTCPPRCFRTFSYGGKNGGGGGGGGGCSFDCTERCAATC

SEQ ID NO: 4415 - DNA, 825 bp, Zea mays
  misc_feature: Ceres CLONE ID no. 896630
  misc_feature: Ceres CDNA ID no. 29191509
  CDS (127)..(636): REFERENCED BY SEQ ID NO: 4416
atatatagtggttgagaaggagaggagattctcgtaccatgttcaaaacgaaaagtctgatctgaagccagcagacgtgaaaccgacagcacgtacgtacgtacgtgtgagggctgctcggcggccatgggagaatggtgcttcaagaaacgcgcagctctggtgattattgtggccattattagctcgctgcagctgctcctgataactgctcaagaagctggaggagaccacgaggtgtggtcgtcgtcatcctcgccggccggtggtcgtggtggcggcgccgtcgtcgtcccgacggcgcggatggggccggacgggtcgtcgtcgtgttcgggggaggaggcggtggtggtgtaccagagcagcgccaaccctctgcccagcggcatcccggcctacaccgtgcagatcatcaacgtctgcggcggagggtgcaccgtgtacgacgtgcacgtctcctgcggcgacttcgcctccacggagctcgtcgacccggccaagttccagcgcgtcgccttcgacgactgcgtcgtcaagggcggcgccgccttggaacccagcgagaccgtctccttccagtactccaactccttctcctaccagctcagtgtcgcctccgtcgcgtgccactagagatcatcgaccactactactagatgatcatcgtcggtcgtcgttacgttgtgctgtactagtactactgctgttgttatgctaaccagctagttccacgtacgttaattgttgagtctatctgcatgcacttctgtttaatttccatcgtgtgtgtgtaactatatatttctaaaaaaaaaaaaaaaa

SEQ ID NO: 4416 - protein, 169 aa, Zea mays
  misc_feature: Ceres CLONE ID no. 896630
  misc_feature: Ceres CDNA ID no. 29191509
  misc_feature: Homolog of GI Number: 77555669 NR Desc: TPD1
  misc_feature: Homolog of GI Number: 67987177 NR Desc: 4Fe
  misc_feature: Homolog of GI Number: 1076237 NR Desc: arabinogalactan
MGEWCFKKRAALVIIVAIISSLQLLLITAQEAGGDHEVWSSSSSPAGGRGGGAVVVPTARMGPDGSSSCSGEEAVVVYQSSANPLPSGIPAYTVQIINVCGGGCTVYDVHVSCGDFASTELVDPAKFQRVAFDDCVVKGGAALEPSETVSFQYSNSFSYQLSVASVACH

SEQ ID NO: 4417 - DNA, 680 bp, Triticum aestivum
  misc_feature: Ceres CLONE ID no. 897172
  misc_feature: Ceres CDNA ID no. 40351470
  CDS (77)..(505): REFERENCED BY SEQ ID NO: 4418
attattttcttgtcgttgagaagcttcgcgaacaaaagcaaagaaccctagacagtcacagaaccattccatagaaatgtcaggtgttggccctctttctcaagattgggaacccgtcgtcctccgcaagaaggctcccactgccgccgccaagaaggatgagaaagccgtcaacgccgcccgccgctccggcgccgaaatcgaaaccctaaaaaaatataatgctgggacaaataaagcagcatctagcagcacttcattgaacactaagaggctggatgatgatactgagagtctagctcatgagaaggtaccaactgaacttaagaaggccataatgcaagctaggatggacaagaaacttactcagtctcagcttgctcaactgatcaatgagaagcctcaagtgatccaggagtacgagtcaggaaaggccattccaaaccagcagataattggcaagttggaaagagcccttggagctaaattgcgtggcaagaaataaggaacttaatgtcatgttgcgcgtttattttgctatgcatgtcactatgggagtgttttgtgtttgttagctaattgtgtatatttaagacagttaaaatggttgtgttgacatgtgcctttctcctgttcggataaataaagttgcattttcagtaataaaaaaaaaaaaaaaa

SEQ ID NO: 4418 - protein, 142 aa, Triticum aestivum
  misc_feature: Ceres CLONE ID no. 897172
  misc_feature: Ceres CDNA ID no. 40351470
  misc_feature: null
  misc_feature: Useful for making plants with altered Lignin content
  misc_feature: Useful for making plants with modulated heat sensitivity
  misc_feature (87)..(141): Pfam Name: HTH_3 PFAM Desc: Helix
MSGVGPLSQDWEPVVLRKKAPTAAAKKDEKAVNAARRSGAEIETLKKYNAGTNKAASSSTSLNTKRLDDDTESLAHEKVPTELKKAIMQARMDKKLTQSQLAQLINEKPQVIQEYESGKAIPNQQIIGKLERALGAKLRGKK

SEQ ID NO: 4419 - DNA, 1091 bp, Triticum aestivum
  misc_feature: Ceres CLONE ID no. 897933
  misc_feature: Ceres CDNA ID no. 40351471
  CDS (231)..(653): REFERENCED BY SEQ ID NO: 4420
aaatcacattcgtcccgttctctatctcggtatctccattcccgaacagaaaaaaagggaacacacacacaggcggacgcgtagagcccaatccccgcagggccgagatccccgccccactcctccggacaaccgccgccgactcgccggccctcgccgccttccgcgtcgccggcaccgccgccgtattgcagggcttcgtgtgctgttcctcaccagtgccgtctaagatggtgtcctttgagatgaatgaccttaagaagatagggctaggcctgacaggctttggagtattcttctccttcctgggaatcgttttcttctttgacaaggggcttattgctatgggcaatatactcttcctgtcaggtttgggtatgacaattggtctgaaatcaactatgcagttcttcacaaagcctaagaattacaagggtaccatctcatttggcgcaggctttttcctggttctcattggatggcctttctttggcatgctcttagaggcatatggttttatcgtgctcttcagtggattctggccaacactcgcagttttcctgcaaaggattcctatccttggctggatttttcaacaaccatttgtcacttcgttccttgaccgttacagagggaaacgagtgccggtgtagtatcacttcgcgctatgtttcttatgatgtagcagctgaagtttttttccttccctggggataacagcaagtagttgtgccatcctggcctttccctttgcctgtttacttactggtgactgtcctttgtaaattacacccctggatggttttatcaaagaccaagatgcaaattgtcccatggtatgggctgaagaaacttcataagcgaacccggacgattcaaatatgtagctgtagagggatgctgttgaagtagaagctacatcctatccgtctcttctgtacttatgttcagatatagatattctgttctctcgagtcttgagcttgtgtttgctttatttttgtgcgcgcttcatagcttgaagaaagtcaaatatgtgctggaactgaaattaattcatgattcatacaaaagcaaaaaaaaaaaaaaaa

SEQ ID NO: 4420 - protein, 140 aa, Triticum aestivum
  misc_feature: Ceres CLONE ID no. 897933
  misc_feature: Ceres CDNA ID no. 40351471
  misc_feature (30)..(130): Pfam Name: Got1 PFAM Desc: Got1
MVSFEMNDLKKIGLGLTGFGVFFSFLGIVFFFDKGLIAMGNILFLSGLGMTIGLKSTMQFFTKPKNYKGTISFGAGFFLVLIGWPFFGMLLEAYGFIVLFSGFWPTLAVFLQRIPILGWIFQQPFVTSFLDRYRGKRVPV

SEQ ID NO: 4421 - DNA, 996 bp, Triticum aestivum
  misc_feature: Ceres CLONE ID no. 898246
  misc_feature: Ceres CDNA ID no. 25891754
  CDS (96)..(776): REFERENCED BY SEQ ID NO: 4422
atcacctcccctcctcccctttgcgccgccacttctcttctctctcgccgccccctcgatccagctagcggttagggttcccgaaaccggcgaccatggcgaacgagcagccggcggagacctacacggtggaggagctcgtggcggtgaacccctacaaccccgacatcctcaacgacctcgaggtctttgtcaacgaccaggtttcttctaaaacatataacctggatgcaaatctcagccttctacgcctttaccagtttgagccagaaaggttgagcgtgcaaattgtagcccgcatattgattaaggctctcatggcaatgccggcccccgacttcagcttatgcttgttcttaattcctgaacacgtgcaaatggaggagcagttcaagacgttgatagttctttctcactacctggagactggtaggttccgccagttttgggatgaggcatcaaagagccgtaacatactggatgttgtaccaggttttgagcaggcaatccaaagctatgcgattcatgtgctttccttgacataccagaaagttcctaggccagttctagccgaggccatcaacattgaagggcttgcgttggacaagtttatggagtatcatgctgcaaactcaggatgggtcattgagaagggatcacgctcccaactgattgtccttccgcgcaacgagttcaatcaccccgaactcaagaagaacacagccgacactgttccgttcgagcacgtgacccgcatattccccatcctgagctgattcagcaaccatgatcagattgacatcaagcacttttgtcgtctcggctgcacccagacccactgagggggtttaatagaatttgagccagtgaagaagctagtcttggcaattgtattctctcttgtatggtgtaccgcattttgatacacgagtaccggatgcgcctgttttagctaaatgagtaccagattatgttttctcaaaaaaaaaaaaaaaa

SEQ ID NO: 4422 - protein, 226 aa, Triticum aestivum
  misc_feature: Ceres CLONE ID no. 898246
  misc_feature: Ceres CDNA ID no. 25891754
  misc_feature (1)..(226): Pfam Name: eIF PFAM Desc: Eukaryotic translation initiation factor 3 subunit 11
  misc_feature: Homolog of GI Number: 54635543 NR Desc: GA10234
  misc_feature: Homolog of GI Number: 57036583 NR Desc:  similar to RIKEN cDNA 1200009C21
  misc_feature: Homolog of GI Number: 19922704 NR Desc: CG10306
  misc_feature: Homolog of GI Number: 31322564 NR Desc: eukaryotic translation initiation factor 3 subunit k
  misc_feature: Homolog of GI Number: 5114051 NR Desc: HSPC029
  misc_feature: Homolog of GI Number: 55649025 NR Desc:  similar to eukaryotic translation initiation factor 3 subunit k
  misc_feature: Homolog of GI Number: 54635542 NR Desc: GA15733
  misc_feature: Homolog of GI Number: 72086707 NR Desc:  similar to eukaryotic translation initiation factor 3
  misc_feature: Homolog of GI Number: 66852329 NR Desc: eukaryotic translation initiation factor 3 subunit EifCk
  misc_feature: Homolog of GI Number: 57226498 NR Desc: eukaryotic translation initiation factor 3 subunit 11
MANEQPAETYTVEELVAVNPYNPDILNDLEVFVNDQVSSKTYNLDANLSLLRLYQFEPERLSVQIVARILIKALMAMPAPDFSLCLFLIPEHVQMEEQFKTLIVLSHYLETGRFRQFWDEASKSRNILDVVPGFEQAIQSYAIHVLSLTYQKVPRPVLAEAINIEGLALDKFMEYHAANSGWVIEKGSRSQLIVLPRNEFNHPELKKNTADTVPFEHVTRIFPILS

SEQ ID NO: 4423 - DNA, 564 bp, Triticum aestivum
  misc_feature: Ceres CLONE ID no. 898823
  misc_feature: Ceres CDNA ID no. 40351472
  CDS (28)..(393): REFERENCED BY SEQ ID NO: 4424
acaaatctccttcttgaactcaaggagatggctctgggaagaggcagtgcagtggttctactactttgcttcttgctgcttcactctcagatggctcgtgctgccacctacacagttggagattctgggggttggacctttaacactgttgcctggcccaaaggaaagctctttcgggctggtgacacacttgctttcaattatagccctgggactcacaatgtggtggccgtgaacaaggctggatatgatagctgcaagactccaagaggagccaaagtgtataagtcagggacggatcagatcagacttgccaagggacagaactacttcatctgcaattatgttggtcactgcgagtctgggatgaaaattgccatcaacgctgcctgagtttaataatatggttaacttcccatacatattgtattgtaatgcaaattgcaccctttagtgggaagttagctcctttaaataatgttaagaaaaaaagtagctatgtgtgctcttctataaatgtcacttatctataaagaataaatgtcggcaaaaaaaaaaaaaaaa

SEQ ID NO: 4424 - protein, 121 aa, Triticum aestivum
  misc_feature: Ceres CLONE ID no. 898823
  misc_feature: Ceres CDNA ID no. 40351472
  misc_feature (36)..(114): Pfam Name: Cu_bind_like PFAM Desc: Plastocyanin
MALGRGSAVVLLLCFLLLHSQMARAATYTVGDSGGWTFNTVAWPKGKLFRAGDTLAFNYSPGTHNVVAVNKAGYDSCKTPRGAKVYKSGTDQIRLAKGQNYFICNYVGHCESGMKIAINAA

SEQ ID NO: 4425 - DNA, 529 bp, Triticum aestivum
  misc_feature: Ceres CLONE ID no. 900066
  misc_feature: Ceres CDNA ID no. 40351473
  CDS (75)..(323): REFERENCED BY SEQ ID NO: 4426
ctaccgcattagcactcgtctttggttctggtttatagatctctgtgaagtcgctttataacactcaacctaagatgcagaacgaggaaggacagatcaccgagctttacattcctaggaagtgctctgccacaaaccgattgattaccgctaaggaccatgcttcggttcaggttaacattgggcatgtggatgagaatggcgtctacaatggccatttctccacttttgctctctgcggcttcatacgtgctcagggtgatgctgacagtgccctagatcgcttgtggcagaagaagaaagttgaagttaagcaacagtagacacccatgatagtttgttactttgctatgtattaatttctacgcttgctagagatatttgagtactatgattgtcgtcttgagcaaatactcattctaaattttcgttggtatttggtaccgccagctaaatttgcttttttgacagtttgccagtgcgttgataaatatttggttgtcttatatttctaaaaaaaaaaaaaaaa

SEQ ID NO: 4426 - protein, 82 aa, Triticum aestivum; identical to SEQ ID NO: 4272
  misc_feature: Ceres CLONE ID no. 900066
  misc_feature: Ceres CDNA ID no. 40351473
  misc_feature (1)..(81): Pfam Name: Ribosomal_S21e PFAM Desc: Ribosomal protein S21e

SEQ ID NO: 4427 - DNA, 658 bp, Triticum aestivum
  misc_feature: Ceres CLONE ID no. 900165
  misc_feature: Ceres CDNA ID no. 25891906
  CDS (1)..(534): REFERENCED BY SEQ ID NO: 4428
ttttttagcctaggaaccgtgttcatctactctgagccgcataacttcccggaatcgtgcatacctacgttcaatatgtcgctggtggcaaacgaggatttccagcacatacttcgtgttttgaacacgaacgtagatgggaagcagaagataatgttcgctcttacctcaatcaaaggtattgggaggcgattttctaacatttgctgcaagaaggctgatgttgacatgaacaaaagagctggtgaactgagtgctgctgagttggatagtgtgatgactgtggttgccaacccccggcaattcaagattccggactggtttttgaacagaaagaaggactacaaggatggcaagtattctcaggtggtgtcaaatgcactggatatgaagttgagggatgacttggagagacttaagaaaatcaggaaccatcgaggtttgagacactactggggtcttcgtgtacgtggccagcataccaagaccactggtcgtaggggtaaaactgttggtgtgtctaagaagcgctgagctttcacttcctttttcttctgtttttttaagaatgagatatattatttttttgttaaagccgacaaaattttattttgagaatggatttggattttgttgcatttgaaaaaaaaaaaaaaaa

SEQ ID NO: 4428 - protein, 152 aa, Triticum aestivum
  misc_feature: Ceres CLONE ID no. 900165
  misc_feature: Ceres CDNA ID no. 25891906
  misc_feature (14)..(142): Pfam Name: Ribosomal_S13 PFAM Desc: Ribosomal protein S13/S18
  misc_feature: Homolog of GI Number: 56236126 NR Desc: At1g22780
  misc_feature: Homolog of GI Number: 17978783 NR Desc: S18.A ribosomal protein
  misc_feature: Homolog of GI Number: 40287492 NR Desc: putative ribosomal protein
  misc_feature: Homolog of GI Number: 50919149 NR Desc: putative ribosomal protein S18A
  misc_feature: Homolog of GI Number: 22204120 NR Desc: putative ribosomal protein S18
  misc_feature: Homolog of GI Number: 50934523 NR Desc: putative ribosomal protein S18
  misc_feature: Homolog of GI Number: 24266988 NR Desc: ribosomal protein S18
  misc_feature: Homolog of GI Number: 67083901 NR Desc: ribosomal protein S18
  misc_feature: Homolog of GI Number: 71040621 NR Desc: ribosomal protein S18
MSLVANEDFQHILRVLNTNVDGKQKIMFALTSIKGIGRRFSNICCKKADVDMNKRAGELSAAELDSVMTVVANPRQFKIPDWFLNRKKDYKDGKYSQVVSNALDMKLRDDLERLKKIRNHRGLRHYWGLRVRGQHTKTTGRRGKTVGVSKKR

SEQ ID NO: 4429 - DNA, 803 bp, Triticum aestivum
  misc_feature: Ceres CLONE ID no. 900230
  misc_feature: Ceres CDNA ID no. 40351474
  CDS (625)..(783): REFERENCED BY SEQ ID NO: 4430
acgatccacccaattatataacaacaacaaagccttatcccactagataaggtcgaatacatggatcacactacctcattcgaccttaagtaaaacaaaaaacacaaccgacccaacaaaattagatccacccaacaaaaccaaccctcgaaaaaaaaaccattttttcaaccatttaaaagaagggcttttgacatgaaactggggtatccattagttgattaagcgtgatcttgcaatgtgggggggaaggggaaaaaaataaaacctttcttggcctgcggtgtcccagatctgggccttgatgactttggaatcgacgttcaaggtgcgggtggcgaactcgacgccaatggtggacttggactccaagttgaactcgttcttggtgaagcgagagaggaggttggacttgcccacgccggaatcgccgatcaggaccaccttgaagaggtagtcgtagtcgtcgtcggctctgtaacccgccattggtggagctttttttgctctgtttgtgttgtggtgttgttctggaaagaagggaagaaaagtagtggaaacaaggaaaggaagaaagaaaagaaacactagagtatgaaaacgctttaaaaagcgccactactaatgattttttatttttatttttattttcttctttgtattgatttgcacgtacatctgagactagtctggcactttggagtttggggactcagggttgaaatttatttttcattttttaccatattaagcatgaaacttaaagataaaaaatgtttttagtttttaaaaaaaaaaaaaaa

SEQ ID NO: 4430 - protein, 50 aa, Triticum aestivum
  misc_feature: Ceres CLONE ID no. 900230
  misc_feature: Ceres CDNA ID no. 40351474
MTLESTFKVRVANSTPMVDLDSKLNSFLVKRERRLDLPTPESPIRTTLKR

SEQ ID NO: 4431 - DNA, 1338 bp, Triticum aestivum
  misc_feature: Ceres CLONE ID no. 900331
  misc_feature: Ceres CDNA ID no. 35383310
  CDS (103)..(1128): REFERENCED BY SEQ ID NO: 4432
aaaactcaactcgaaaagctctcgcgcttgctcgatcaagccttctcttgccctgctttctcctctgtttcctcgagaacaaggaagaagaaaaagccgaccatggtggtccttgccaagggcgagctggagcagatagcgctgccggcggcccagccgccgctggcccacgtgcgggaggtcgacctgtccgccgccccggggcccggccgcgcggccgcggcgcgcgcgctggtgtccgcgtgcgaggagcagggcttcttcaaggtgaccggccacggggtgccgccggagctcgtgcgcgccgcggaggcggccgcggcggagttcttcgcgctgccgcaggccgagaaggaggccgccgctggccggccgctcgggtacgacagcaagcgcatcggcgtctccggcgacctcgggtggatcgagtacctcatgctgggcgtcacccccgccggcgcgctgcccgccgcctccttcgcgtcctggacattgccgtgcgcaggcgccgccgtcgcgtcgctgtccgagcccccctgccccttacgggatcttctggaggagtacgcggcggcggtgcggcggatggcgtgcggcgtgctggagctgatggcggaggggctggggatcgcgccggcggacgcgctgtcccggctggtggcggacgcggagagcgacagcatgctccgggtgaaccactacccgccgcggccggagctgcagggccgcctcctgacggggttcggcgagcacacggacccgcaggtcatctccgtgctccgctccaacggcacctccgggctggagatctgcgcgcgcgatggctcctgggccgccgtgccgcccgaccccgactccttcttcgtcaacgtcgccgacgccctgcaggtgctgacgaacgggaggttcaggagcgtgaggcacagggtggtggtgagcagcgagaggccgagggtgtccatgatcttcttcggcggcccgccgttcggccagaggctggcgccgctgcgccagctgctaggggacggcggccggagccgctacagggagttcacctggaaggagtacaagagcagcacccacaagggcaggctcgccaccgaccgcctctgcagcttcgagaactagccagcgaccacctgcctgacagactagcttccgtgcgttacgtatatactgcaggctatatacttatgtgtgtgtgtgatgaatgcatgatcatgatcctagttaactaatgaagcccggatattgaaaacggatttgctaaatctcatctactacctccgtccttatttattggtgctttcgctttttgtgtcaaaaaaaaaaaaaaaa

SEQ ID NO: 4432 - protein, 341 aa, Triticum aestivum
  misc_feature: Ceres CLONE ID no. 900331
  misc_feature: Ceres CDNA ID no. 35383310
  misc_feature (191)..(293): Pfam Name: 2OG PFAM Desc: 2OG
  misc_feature: Homolog of GI Number: 49065956 NR Desc: GA 2
  misc_feature: Homolog of GI Number: 34909676 NR Desc: putative GA 2
  misc_feature: Homolog of GI Number: 51011366 NR Desc: GA 2
  misc_feature: Homolog of GI Number: 50293061 NR Desc: gibberellin 2 oxidase
  misc_feature: Homolog of GI Number: 67077812 NR Desc: gibberellin 2
  misc_feature: Homolog of GI Number: 21553670 NR Desc: gibberellin 2
  misc_feature: Homolog of GI Number: 9971227 NR Desc: gibberellin 2
  misc_feature: Homolog of GI Number: 27123665 NR Desc: gibberellin 2
  misc_feature: Homolog of GI Number: 32127337 NR Desc: Gibberellin 2
  misc_feature: Homolog of GI Number: 34914788 NR Desc: leucoanthocyanidin dioxygenase
MVVLAKGELEQIALPAAQPPLAHVREVDLSAAPGPGRAAAARALVSACEEQGFFKVTGHGVPPELVRAAEAAAAEFFALPQAEKEAAAGRPLGYDSKRIGVSGDLGWIEYLMLGVTPAGALPAASFASWTLPCAGAAVASLSEPPCPLRDLLEEYAAAVRRMACGVLELMAEGLGIAPADALSRLVADAESDSMLRVNHYPPRPELQGRLLTGFGEHTDPQVISVLRSNGTSGLEICARDGSWAAVPPDPDSFFVNVADALQVLTNGRFRSVRHRVVVSSERPRVSMIFFGGPPFGQRLAPLRQLLGDGGRSRYREFTWKEYKSSTHKGRLATDRLCSFEN

SEQ ID NO: 4433 - DNA, 693 bp, Triticum aestivum
  misc_feature: Ceres CLONE ID no. 900618
  misc_feature: Ceres CDNA ID no. 40351475
  CDS (7)..(507): REFERENCED BY SEQ ID NO: 4434
ataaccatggcgtctaactctgcttccgctctttacttccttttatgcctatcgcccatcactttgcttctttctgcgtttcgtgctcaagctcaatctcatgctccagctcccactttcaagtactgtgaaaagaatgcagactatgctgtgaaggtgagtggagtggaaatattgcctgaccccgtggagagaggagtgccattcacctttaagatcccagcttatactcctgaaccaattcaaagcggggacttgttatatgaaatttcttatgctggaatagaagcacaacctgctacatttctccatgatctctgtgaggaagcaccatgcccagtacctgcaggcaactttgtgctcgttcacaccgaattattgcctccggttaccccaccaggcacctataatgtgaagctgaattttaaggatcataacgacaagctgttaacttgcatcatctttcccttcaaaatcggttctaaatcttcagtgtctgctatctaactgtccagcgcaaaactgctcctagatgctacctcaactttgcgtattacttttgtttagggtgtagttttagtgtgtactagttgagtgcaatgctgtgggctatgaatgatgctttttcgcacccaataatggtataaatagccctacgagaagtgattgtcacatccaaaaaaaaaaaaaaaa

SEQ ID NO: 4434 - protein, 166 aa, Triticum aestivum
  misc_feature: Ceres CLONE ID no. 900618
  misc_feature: Ceres CDNA ID no. 40351475
  misc_feature (34)..(157): Pfam Name: E1_DerP2_DerF2 PFAM Desc: ML domain
MASNSASALYFLLCLSPITLLLSAFRAQAQSHAPAPTFKYCEKNADYAVKVSGVEILPDPVERGVPFTFKIPAYTPEPIQSGDLLYEISYAGIEAQPATFLHDLCEEAPCPVPAGNFVLVHTELLPPVTPPGTYNVKLNFKDHNDKLLTCIIFPFKIGSKSSVSAI

SEQ ID NO: 4435 - DNA, 739 bp, Triticum aestivum
  misc_feature: Ceres CLONE ID no. 900627
  misc_feature: Ceres CDNA ID no. 40351476
  CDS (68)..(463): REFERENCED BY SEQ ID NO: 4436
aacgcagccaagaaaagaaaatcctcacccattttcttcgtagccaaacactctgaaattctcagttatgtcgtggcaagcgtatgtggatgatcacctactgtgtgaaatcgaaggtaaccacctcactcacgccgctatcatcggccaagacggaagcgtttgggctcagagcaccaacttccctcagttcaaacctgaggaaataactgccatcaataatgactttaatgagcctggatcacttgctccaactggattgtatatcggtggcaccaaatacatggtcatccagggtgagcctggtgctgtcattcgagggaagaagggtcctggtggtgttactgtgaagaagaccggtgcggccttgatcattggcatttatgatgaaccaatgactccaggtcaatgcaacatggtagttgaaaggcttggcgattatctcattgatcagggtctctaatctttgctttatgtcttgttatcgtgcatatttcattggcttctgtacaagtttttgcatcgacctggactggaatgctttgattgcagtgtaataatcttgttgtgagtatgaaaagtcacgggatctgcgtgtagtgaagaaagtgtttgatgcttgagaaatgatgactataatctctatctttgtacttttttagtggggtacctgtatacattacagtggttttaaaattttaatgctatgttataatggttggcaaaaaaaaaaaaaaaa

SEQ ID NO: 4436 - protein, 131 aa, Triticum aestivum
  misc_feature: Ceres CLONE ID no. 900627
  misc_feature: Ceres CDNA ID no. 40351476
  misc_feature: The plant is abnormally small.
  misc_feature: The plant produces a reduced number of seeds.
  misc_feature: Useful for biocontainment applications
  misc_feature: Useful for making plants with modulated biomass
  misc_feature (2)..(126): Pfam Name: Profilin PFAM Desc: Profilin
MSWQAYVDDHLLCEIEGNHLTHAAIIGQDGSVWAQSTNFPQFKPEEITAINNDFNEPGSLAPTGLYIGGTKYMVIQGEPGAVIRGKKGPGGVTVKKTGAALIIGIYDEPMTPGQCNMVVERLGDYLIDQGL

SEQ ID NO: 4437 - DNA, 776 bp, Triticum aestivum
  misc_feature: Ceres CLONE ID no. 901143
  misc_feature: Ceres CDNA ID no. 25891907
  CDS (57)..(518): REFERENCED BY SEQ ID NO: 4438
atctcccatcctttgtttgttgatccatctcttgtttcttgctttctttcttcaccatgtcacttgctgggaaaatcaccactgaaatcggggttcatgcaaccgctacaaagtggttcaacctcttcgcaacacaactccatcatgttcaaaacctaactgatagagtgcatggaaccaagctgcatcaaggtgaagactggcatcacaacgagacagtcaagcactggacttataccatagatggtaaggttacaacatgtctggagagtattgaatccattgatgaacagagcaaaacaatcacctacaagctcttcagtggtgacattgatcataattataagaactttaagttcatctttcaagccattgatgataatgatcatggcggtactattatcaaatggaccgttgaatacgagaggcttcgtgaggaggttgatcctccatatggccacattgaatacctgcacaaatgcactaaagatattgatggtcatcttctcaaagcatagctagctctaaaagttatgcactaaaaaataatgggcttgacctttggataagtgcttatatgtataataaaatcggtgtgaagtttgacgagaagaatgcttagttatgtagatccttcctttgtatggaaaataaacttggatatgcatgtcggtgatatcttgaagtgtgttaaattatatttggaagtgctcaatgtgatgcatgggaatattattaatgaatggatgtttatgattttaaaaaaaaaaaaaaaa

SEQ ID NO: 4438 - protein, 153 aa, Triticum aestivum; identical to SEQ ID NO: 3220
  misc_feature: Ceres CLONE ID no. 901143
  misc_feature: Ceres CDNA ID no. 25891907
  misc_feature (2)..(153): Pfam Name: Bet_v_I PFAM Desc: Pathogenesis
  misc_feature: Homolog of GI Number: 5739198 NR Desc: ripening related protein
  misc_feature: Homolog of GI Number: 20975622 NR Desc: putative ripening related protein
  misc_feature: Homolog of GI Number: 34452233 NR Desc: ripening
  misc_feature: Homolog of GI Number: 48714607 NR Desc: putative Bet v I family protein
  misc_feature: Homolog of GI Number: 7406710 NR Desc: putative ripening
  misc_feature: Homolog of GI Number: 2465015 NR Desc: ripening
  misc_feature: Homolog of GI Number: 3164115 NR Desc: major latex
  misc_feature: Homolog of GI Number: 13172242 NR Desc: major latex
  misc_feature: Homolog of GI Number: 30698759 NR Desc: Bet v I allergen family protein

SEQ ID NO: 4439 - DNA, 599 bp, Triticum aestivum
  misc_feature: Ceres CLONE ID no. 901184
  misc_feature: Ceres CDNA ID no. 40351477
  CDS (69)..(347): REFERENCED BY SEQ ID NO: 4440
acctcaagcataacttgcatagactattgattaagaaagctattgtcattgatttgctagctccaacaatgggttctagcagattatcattcattttagtacttgtgcttgtaacattttcatccatgatcattgactcaagggttgcagaggcacgtaccctgccaaaatcagccttattgccttccaaagttgatatacctactgctgttcctcttccagccttagtgccattgccaccactggcaaatttgcctgttactctccctccagtgcctgaactacctgcagtacctaaagtaccaattcctgaagtaatagttaataacgccaaaataatcccttgagtacctatgatctatccagtcactactacttattttgtcacttgctaaattaacttgttgttgccatcccagggtggttctggttctgttgggatttaatttctgtcattcaattacatgctatgttcagtttatatgttgcttcagtcagttgaacttcagcatattatttattgtgacctgtgtaatgtaatgtatcaacttatcttctagttcaataaattctggaatttcttaaaaaaaaaaaaaaaa

SEQ ID NO: 4440 - protein, 92 aa, Triticum aestivum
  misc_feature: Ceres CLONE ID no. 901184
  misc_feature: Ceres CDNA ID no. 40351477
MGSSRLSFILVLVLVTFSSMIIDSRVAEARTLPKSALLPSKVDIPTAVPLPALVPLPPLANLPVTLPPVPELPAVPKVPIPEVIVNNAKIIP

SEQ ID NO: 4441 - DNA, 665 bp, Triticum aestivum
  misc_feature: Ceres CLONE ID no. 901674
  misc_feature: Ceres CDNA ID no. 25891099
  CDS (27)..(398): REFERENCED BY SEQ ID NO: 4442
atgtttgagtgcagaaggtataaaaaatggtggtgaagattcgattggcaaggctcgggtgcaggaaccacccattctatcgcgtggttgttactgatagcaaaacaacaagagatggcaagcaacttgaagttttaggtttctacaatcccgtcgcaggcaaggatgatgagaaaagaatgagtctcaaactggaaagagtcaagtattggctttctgtcggagctaagccttcagagcctgttgagcatcttctgtttcgagcaggtttaggacaatctcatcaattccctgttgctgctctaaatggacatttcctcaaccaagaccaaccaaccaatgctgatcacaatggtgtatctccagaagctatattttctattggcctacaagtttgaagagaatagctaccatacatttggagaaggtgggtggtgttgtgatcaaattttttgcaccctgttcaataccacctagaaacaaattgataggttatcttgctgtctagaaactggttagatttgtttcctgggaagatgttatcacagtagcaaaagtagcttcatttgattttggcttatgtatgcatttctgacattgttgtcaacacaccagttggtttttatgcttatgcaatttttcttgatccaaaaaaaaaaaaaaaa

SEQ ID NO: 4442 - protein, 123 aa, Triticum aestivum; identical to SEQ ID NO: 3140
  misc_feature: Ceres CLONE ID no. 901674
  misc_feature: Ceres CDNA ID no. 25891099
  misc_feature (9)..(70): Pfam Name: Ribosomal_S16 PFAM Desc: Ribosomal protein S16
  misc_feature: Homolog of GI Number: 34905148 NR Desc: 30S ribosomal protein S16
  misc_feature: Homolog of GI Number: 23505749 NR Desc: At4g34620/T4L20_200
  misc_feature: Homolog of GI Number: 21554119 NR Desc: 30S ribosomal protein S16
  misc_feature: Homolog of GI Number: 16323518 NR Desc: putative 30S ribosomal protein S16
  misc_feature: Homolog of GI Number: 58416463 NR Desc: 30S ribosomal protein S16
  misc_feature: Homolog of GI Number: 57238863 NR Desc: 30S ribosomal protein S16
  misc_feature: Homolog of GI Number: 77464629 NR Desc: 30S ribosomal protein S16
  misc_feature: Homolog of GI Number: 48765006 NR Desc: COG0228: Ribosomal protein S16
  misc_feature: Homolog of GI Number: 15966995 NR Desc: PROBABLE 30S RIBOSOMAL PROTEIN S16
  misc_feature: Homolog of GI Number: 83370357 NR Desc: Ribosomal protein S16

SEQ ID NO: 4443 - DNA, 616 bp, Triticum aestivum
  misc_feature: Ceres CLONE ID no. 901689
  misc_feature: Ceres CDNA ID no. 25891100
  CDS (89)..(397): REFERENCED BY SEQ ID NO: 4444
acaaataggaaagacacccacaagtcatcaaacttcgattgagtttcaaagagatcagtggtagtgtggtacattgtgttgatcaaggatggaacaaaagaagtttgtggcactattaatggtggtggtggtgatggcttcttctatgtggaaaggatccaaaggtcttagtctctgtaacatggatgaagatggattggaggcttgcaagccctcagtgactcagccaaacccagttgatccatcccctgattgctgcaaggctctggatggtgctgacttgaagtgcctttgctcttacaagaactcatcagagttgcctcttctaggaattgatctaactcttgctgcttcacttcctgcaaagtgcaatctcactcctccagataattgctagttagcttctctgagctatttctgctttttgtttttgtgtgttataatcttttttctgcagatgacctattgagaaaaaagaaaattattgtactctaatttttatccctcttatttttgtggtacaatataagtacctttattttcttctacttggttgtatacattattataataagtctatgtatttaaacgtttgagaccaaaaaaaaaaaaaaaa

SEQ ID NO: 4444 - protein, 102 aa, Triticum aestivum; identical to SEQ ID NO: 2594
  misc_feature: Ceres CLONE ID no. 901689
  misc_feature: Ceres CDNA ID no. 25891100
  misc_feature (30)..(102): Pfam Name: Tryp_alpha_amyl PFAM Desc: Protease inhibitor/seed storage/LTP family
  misc_feature: Homolog of GI Number: 25044847 NR Desc: PVR3
  misc_feature: Homolog of GI Number: 1420887 NR Desc: non

SEQ ID NO: 4445 - DNA, 499 bp, Triticum aestivum
  misc_feature: Ceres CLONE ID no. 901694
  misc_feature: Ceres CDNA ID no. 40351478
  CDS (48)..(359): REFERENCED BY SEQ ID NO: 4446
atcacaatccctaattccccaaaattttctctgaagaagaagcaacaatgtctggtcgcggaaagggaggcaagggtttgggaaagggtggagcgaagaggcatcgcaaggtgctccgcgacaacatccagggaatcacgaaacccgcgattcggaggctagccagaagaggcggcgtgaaaagaatcagcggcttgatctacgaggaaaccaggggtgtgctcaagatcttcctcgagaacgtcattcgcgacgccgtcacctacaccgagcacgctaggagaaagaccgtcacggccatggacgtcgtttacgcgctcaagaggcagggaagaaccctctacggtttcggaggctgagggcttgggctttttctgggcctggatttgttcttcgctgggctttaaaatgttgttgggaatttgtgttttgtttaatggttatgtatattatcttctgctcggtaatgcaagacttactcacaaaaaaaaaaaaaaaa

SEQ ID NO: 4446 - protein, 103 aa, Triticum aestivum; identical to SEQ ID NO: 8
  misc_feature: Ceres CLONE ID no. 901694
  misc_feature: Ceres CDNA ID no. 40351478
  misc_feature (66)..(92): Pfam Name: TAF PFAM Desc: TATA box binding protein associated factor

SEQ ID NO: 4447 - DNA, 573 bp, Triticum aestivum
  misc_feature: Ceres CLONE ID no. 901846
  misc_feature: Ceres CDNA ID no. 40351479
  CDS (59)..(370): REFERENCED BY SEQ ID NO: 4448
aattcaaaccaaaatcccaaatcctcaaattcgatttgtaccaaattttcttcacaaaatgtctggtcgtgggaaaggtggcaagggtttgggaaagggaggtgccaagaggcacagaaaagttcttcgtgataacattcaaggtatcacgaaacctgcgattcgtaagttagcgagaagaggtggcgttaagaggatcagtggtttgatctatgaggaaaccagaggagttctgaagattttcttggagaacgtgattcgagatgctgtgacctacaccgagcacgctaggaggaagacggtgactgccatggatgtggtttatgcgctcaagaggcagggaaggaccctctatggtttcggaggctgaatgattgattcttagtattattaaattatgttgcaggatataatattatgcctgttcttctgaaattcggtgtgatgtttagtttagattcgttctgtaacatatgaatcttcaaaggttctgttcggcacagaaaatgtactactttaattgaaattaaaatgaaggagcagcgttttcgtggtgcaaaaaaaaaaaaaaaa

SEQ ID NO: 4448 - protein, 103 aa, Triticum aestivum
  misc_feature: Ceres CLONE ID no. 901846
  misc_feature: Ceres CDNA ID no. 40351479
  misc_feature (66)..(92): Pfam Name: TAF PFAM Desc: TATA box binding protein associated factor
MSGRGKGGKGLGKGGAKRHRKVLRDNIQGITKPAIRKLARRGGVKRISGLIYEETRGVLKIFLENVIRDAVTYTEHARRKTVTAMDVVYALKRQGRTLYGFGG

SEQ ID NO: 4449 - DNA, 671 bp, Triticum aestivum
  misc_feature: Ceres CLONE ID no. 902680
  misc_feature: Ceres CDNA ID no. 40351480
  CDS (162)..(329): REFERENCED BY SEQ ID NO: 4450
tcgttctagtgtgtgattgtttgttgttgtaactcgttcttcttcttttgttgttctgtgtttgtgtttgttttttctctcacctgaaaatgtcttgctgcggtggtaactgtggttgcggaagctcctgcaagtgcggcaacggctgcggaggctgcaagatgtacccagacttgagctacactgagtcaaccaccaccgagaccttggtcatgggagtggcacctgttaaggctcaatttgagggtgctgaaatgggtgtgcccgctgagaacgatggctgcaaatgtggaccaaactgctcctgcaacccctgcacttgcaagtgaggtgttgggagagcaagcttcaagcagagatagcccttaattaggaataatgataaactattaatgtgtagctaaaaacttatgtattatgtctgtgatggttttcgtgcactctggtgttttgtgttaaacaaacatccttagaataaagtggtcatgtcttgcctttcagcaagttcaagtgttttggacttgtgatgggtgtgttaagctcatggttgcttctttttttttttttttaatgtttggtaattggtcgcttctgtataaagttcggctaatctgaattatgaatctctgcttataatattaaatactattactggaaaaaaaaaaaaaaaa

SEQ ID NO: 4450 - protein, 79 aa, Triticum aestivum; identical to SEQ ID NO: 3434
  misc_feature: Ceres CLONE ID no. 902680
  misc_feature: Ceres CDNA ID no. 40351480
  misc_feature (1)..(78): Pfam Name: Metallothio_2 PFAM Desc: Metallothionein

SEQ ID NO: 4451 - DNA, 552 bp, Triticum aestivum
  misc_feature: Ceres CLONE ID no. 902701
  misc_feature: Ceres CDNA ID no. 36527551
  CDS (47)..(334): REFERENCED BY SEQ ID NO: 4452
gaatagagagctcctccaattagggtttttgtgatctgcagctacgatgggtaagggaacggggagtttcggtaagaggaggaacaagacccacaccctctgtgtgaggtgtggccgccgcagcttccacctccagaagagtcgttgctctgcgtgcgcttaccccgctgcgcgcaccaggaaatataactggagcgtgaaggccattaggagaaagaccaccggaactggaaggatgaggtacttgcgtaacgtgcctcgcagattcaagagcggcttcagagagggtaccgaagctgcacccaggaagagaggagctgctgcctctgcctaagctttgaatgaatgacagcaatttttgctgggtcagtgaattataggagttaatgtttctgtgttggtgccaaactctttggaacacattttctttctgtcgttttaatttcatttaatatgtagtggctttgtatttcgaaatgaggattgtaaggaattttggtttttcaatgggagtttttgacatccatattctggctaaaaaaaaaaaaaaaa

SEQ ID NO: 4452 - protein, 95 aa, Triticum aestivum
  misc_feature: Ceres CLONE ID no. 902701
  misc_feature: Ceres CDNA ID no. 36527551
  misc_feature (2)..(55): Pfam Name: Ribosomal_L37e PFAM Desc: Ribosomal protein L37e
  misc_feature: Homolog of GI Number: 44662866 NR Desc: ribosomal protein L37
  misc_feature: Homolog of GI Number: 50915832 NR Desc: putative ribosomal protein L37
  misc_feature: Homolog of GI Number: 21553481 NR Desc: putative ribosomal protein
  misc_feature: Homolog of GI Number: 21280805 NR Desc: putative 60S ribosomal protein L37
  misc_feature: Homolog of GI Number: 50904689 NR Desc: putative 60S ribosomal protein L37
  misc_feature: Homolog of GI Number: 21537060 NR Desc: putative 60s ribosomal protein L37
  misc_feature: Homolog of GI Number: 45934571 NR Desc: 60S ribosomal protein L37
  misc_feature: Homolog of GI Number: 24642107 NR Desc: CG9091
  misc_feature: Homolog of GI Number: 49256539 NR Desc: MGC82973 protein
  misc_feature: Homolog of GI Number: 62548130 NR Desc: ribosomal protein L37
MGKGTGSFGKRRNKTHTLCVRCGRRSFHLQKSRCSACAYPAARTRKYNWSVKAIRRKTTGTGRMRYLRNVPRRFKSGFREGTEAAPRKRGAAASA

SEQ ID NO: 4453 - DNA, 698 bp, Triticum aestivum
  misc_feature: Ceres CLONE ID no. 902762
  misc_feature: Ceres CDNA ID no. 40351481
  CDS (85)..(510): REFERENCED BY SEQ ID NO: 4454
tatcagaagcgcagacctaggatttcggccgtttgctccccaaggaaagaagcagagtgtttcttttgaaatcagctagaaaagatgtcaggtgaagaggtagctgttgcagctgaggcacctgctgcttcaattccaggtgagccaatggacatcatgactgctctacagcttgtgctgagaaaatctctggcctatggtggtcttgcacgaggtcttcatgaaggtgctaaggtgatcgagaagcatgctgcacagctctgcgttctagcagaagattgtgaccaacctgattatgtgaaactggtgaaggctctttgtgcagagcacaatgttagccttttgacagttccaagtgcaaagacccttggagaatgggctggtttgtgtaagattgattcagagggaaaggctaggaaggtaactggttgctcatgtgtggttgtcaaggatttcggggaggaacatgaagcctataatgttgttctgcagcatgtgaaagccaactgagttgctgcaggcatgcctagatttgtgggttttatttagcttgaagttattgtatgaggaatatttttgcctctatcctagggattttgacggtttagtcaattattatacccgttctcattgttgctggatgaatgttttttaattactattggttttctgtgtttttttgaaaaaaaaaaaaaaaa

SEQ ID NO: 4454 - protein, 141 aa, Triticum aestivum
  misc_feature: Ceres CLONE ID no. 902762
  misc_feature: Ceres CDNA ID no. 40351481
  misc_feature (26)..(121): Pfam Name: Ribosomal_L7Ae PFAM Desc: Ribosomal protein L7Ae/L30e/S12e/Gadd45 family
MSGEEVAVAAEAPAASIPGEPMDIMTALQLVLRKSLAYGGLARGLHEGAKVIEKHAAQLCVLAEDCDQPDYVKLVKALCAEHNVSLLTVPSAKTLGEWAGLCKIDSEGKARKVTGCSCVVVKDFGEEHEAYNVVLQHVKAN

SEQ ID NO: 4455 - DNA, 606 bp, Triticum aestivum
  misc_feature: Ceres CLONE ID no. 902802
  misc_feature: Ceres CDNA ID no. 40351482
  CDS (21)..(437): REFERENCED BY SEQ ID NO: 4456
aacaactagtctcagctgaaatggcctcttcagtgatggcatctgtggccctcaaacctgcccctttcactgttgagaagtcctcagtgagaggccttccctctctctcaaggaactcttcttcattcagagttgtggccagtggcaagaagatcaagactgacaaaccttatggaattaatggtggcatggctttgagggatggaactgatgcatctggcaggaaaggaaagggaaagggtgtttaccagtttgtagacaaatacggtgctaatgtcgatggttacagtcctatctacgacaccaaggactggtctccaaccggtgatgtctacgctggcggtacgactggcttggctatctgggctgtgactctacttggtcttttagctggtggtgcacttcttgtctacaacacaagtgctttggttcaatagactttgcaaatcgatgtttaagttataacatagtccatgtaactatctaaaaatgaagaactattcgtgaagtactttgtggatatgttccttctgttctataaatgagtggatgtgaaaaaacttttttgttagtaatcatgcttcttcatcaaaaaaaaaaaaaaaa

SEQ ID NO: 4456 - protein, 138 aa, Triticum aestivum
  misc_feature: Ceres CLONE ID no. 902802
  misc_feature: Ceres CDNA ID no. 40351482
  misc_feature (40)..(138): Pfam Name: PsbR PFAM Desc: Photosystem II 10 kDa polypeptide PsbR
MASSVMASVALKPAPFTVEKSSVRGLPSLSRNSSSFRVVASGKKIKTDKPYGINGGMALRDGTDASGRKGKGKGVYQFVDKYGANVDGYSPIYDTKDWSPTGDVYAGGTTGLAIWAVTLLGLLAGGALLVYNTSALVQ

SEQ ID NO: 4457 - DNA, 902 bp, Triticum aestivum
  misc_feature: Ceres CLONE ID no. 903366
  misc_feature: Ceres CDNA ID no. 40351483
  CDS (108)..(725): REFERENCED BY SEQ ID NO: 4458
gtcgcagtaactccctttgcttgcgcctccacagcccccactttccaacttagggttctagggtttctccagcagcgccggcgcctccacccgcctacccaaccaccatgacggccgagaccgcgaagcaggcggagctgctccgcgccgtcctggatgagcagaagctcgcggcgcagggagatgagcctgtagttgaggatgatgatgatgaggaagatgaggatgatgatgacgaggatgacaaagacgatgatattgaaggagttgatgcaagtggaagatctaagcagagtaggagtgagaagaagagcaggaaggccatgctgaagcttggcatgaagactatcactggcgtgagccgtgtaactgtcaagaagagcaagaatatcctgtttgtcatctccaagccagatgtattcaagagccctgcctctgacacctatgtcattttcggtgaggctaagattgaggatctgagctcacagctgcagtcccaggccgctgagcaattcaaggcgcctgatcttagcagcgtcatctcaaaccctgaggcttctacagctattcaggaggatgacgaggattgtgatgagaccggagttgagccgaaggacattgagctggtgatgacccaggccggcgtgcctaggcccaaggctgtgaaggcgctcaagtctgctgacggtgacatagtcagtgctatcatggaactgacgaactagccgtgcccaacctgtgatattatgtcagtttttccttgtttacatgggaatacatgagttgtaacgtttggtggtcatgtgtgaactttgagctgctctgtattagcaaagacctgaggcaatgtcgaatgagcttctttttcatgcattggaacaaatccaaaaaaaaaaaaaaaa

SEQ ID NO: 4458 - protein, 205 aa, Triticum aestivum
  misc_feature: Ceres CLONE ID no. 903366
  misc_feature: Ceres CDNA ID no. 40351483
  misc_feature (166)..(205): Pfam Name: UBA PFAM Desc: UBA/TS
  misc_feature (65)..(123): Pfam Name: NAC PFAM Desc: NAC domain
MTAETAKQAELLRAVLDEQKLAAQGDEPVVEDDDDEEDEDDDDEDDKDDDIEGVDASGRSKQSRSEKKSRKAMLKLGMKTITGVSRVTVKKSKNILFVISKPDVFKSPASDTYVIFGEAKIEDLSSQLQSQAAEQFKAPDLSSVISNPEASTAIQEDDEDCDETGVEPKDIELVMTQAGVPRPKAVKALKSADGDIVSAIMELTN

SEQ ID NO: 4459 - DNA, 886 bp, Triticum aestivum
  misc_feature: Ceres CLONE ID no. 903605
  misc_feature: Ceres CDNA ID no. 24766535
  CDS (67)..(654): REFERENCED BY SEQ ID NO: 4460
atcaactcgaccacagagcggcggcggcggcggcggcagcggaagaaagaggagagagctccagccatggtgcacgtcaacttctaccgcaactatggtaagacattcaagaaaccaaggcgtccttatgagaaggagcgtcttgatgcagaactaaagctggtcggtgaatatggactgaggtgcaagcgtgagctctggagggttcagtatgcactgagcaggattcgtaatgctgcaagacacttgctcacactggatgagaaaaatccccgccgtatctttgagggcgcggcccttctccgtcgcatgaaccgctatggtctccttgctgagggccaggataagcttgattacgtccttgccctgactgctgagaacttccttgcaaggcgccttcagactcttgtcttcaaggctggcatggcaaaatccatccaccatgcccgtgtcttgatcaggcaacgccacatcagggttggcaggcagatcgtcaatgtcccctcgttcatggtgagggttgaatctgagaagcacatcgacttctcactgacaagtccattcggtggaggccctgcaggcagggtgaagagaaagaaccagaagaaggcaagtggtggcggtgacgccggtggtgacgaggaagaggaatgaggaactagtagctatcaccttatatttatcaaatgttggtgttatgagtactttagctgagaggcctgagactttcatgggttatcctcttgtcattttgtcactttatcactgttgttagcatgtatgcactgctttatgtttggagctatttggtcgtgatgaaagttatctaaaaatgttcttgactaaaaaaaaaaaaaaaaaaaaaaaaaaaaaaaaaaaaaaaaaa

SEQ ID NO: 4460 - protein, 195 aa, Triticum aestivum
  misc_feature: Ceres CLONE ID no. 903605
  misc_feature: Ceres CDNA ID no. 24766535
  misc_feature (109)..(156): Pfam Name: S4 PFAM Desc: S4 domain
  misc_feature (7)..(108): Pfam Name: Ribosomal_S4 PFAM Desc: Ribosomal protein S4/S9 N
  misc_feature: Homolog of GI Number: 77551804 NR Desc: ribosomal protein S4
  misc_feature: Homolog of GI Number: 77551805 NR Desc: ribosomal protein S4
  misc_feature: Homolog of GI Number: 49524072 NR Desc: 40S ribosomal protein S9
  misc_feature: Homolog of GI Number: 53793731 NR Desc: putative ribosomal protein
  misc_feature: Homolog of GI Number: 21593688 NR Desc: 40S ribosomal protein S9
  misc_feature: Homolog of GI Number: 38566648 NR Desc: At5g15200
  misc_feature: Homolog of GI Number: 47027041 NR Desc: 40S ribosomal protein S9
  misc_feature: Homolog of GI Number: 6440857 NR Desc: 40S ribosomal protein S9
  misc_feature: Homolog of GI Number: 40741183 NR Desc: RS9_PODAN 40S ribosomal protein S9
MVHVNFYRNYGKTFKKPRRPYEKERLDAELKLVGEYGLRCKRELWRVQYALSRIRNAARHLLTLDEKNPRRIFEGAALLRRMNRYGLLAEGQDKLDYVLALTAENFLARRLQTLVFKAGMAKSIHHARVLIRQRHIRVGRQIVNVPSFMVRVESEKHIDFSLTSPFGGGPAGRVKRKNQKKASGGGDAGGDEEEE

SEQ ID NO: 4461 - DNA, 582 bp, Triticum aestivum
  misc_feature: Ceres CLONE ID no. 904134
  misc_feature: Ceres CDNA ID no. 40351484
  CDS (33)..(434): REFERENCED BY SEQ ID NO: 4462
ctcagtctctacctcaagccactctaaagaaaatggcggtgcctctactctcgaagaagatcgtgaagaagagggtgaagaagttcaagaggcctcagagtgacaggaaaatttctgtcaagacaaactggcgcagaccaaagggtatcgattcccgtgttaggagaaagttcaagggatgcactttgatgccaaacattggttatggttcagacaagaagacccgccactatctccctaatggttttaagaaatttgttgttcacaatgtgaaggacttggaactgctcatgatgcacaacaggacttactgtgctgagattgcccacaatatatccacaagaaagaggaaagatatagttgagagagccgcgcagcttgatgttgttgtgacaaacaaaacagccagattacgcagccaggaggatgaatagtctaaatgactaaaaaagtcacttatctgtagtgattcagtagttcaatatcaaatttgcagtttaattttaaattgaattctgcttcaatgtattttgcttattgagaaccaagtttgattttgttgtgtcaaaaaaaaaaaaaaaa

SEQ ID NO: 4462 - protein, 133 aa, Triticum aestivum; identical to SEQ ID NO: 2596
  misc_feature: Ceres CLONE ID no. 904134
  misc_feature: Ceres CDNA ID no. 40351484
  misc_feature (14)..(123): Pfam Name: Ribosomal_L32e PFAM Desc: Ribosomal protein L32

SEQ ID NO: 4463 - DNA, 1049 bp, Triticum aestivum
  misc_feature: Ceres CLONE ID no. 904170
  misc_feature: Ceres CDNA ID no. 40351485
  CDS (60)..(818): REFERENCED BY SEQ ID NO: 4464
accacaacaacacacaataatctaaaactagtactatatcgaataattctctaattaacatggcttccacatgtacaccctccacactcattctcctcaccctcaccacattcctcattgccctagcccaagcccaagcccaagccccggcaccgtccccgtcgggcgcggtgaacctcaccgcgatcctggaaaagggtgggcaatacaccaccctaatgaaactcctgaaggacacacagcagctcactcaaatcgagtcccagctcaaatcaaactcacaaggcttcacgctcttcgcgccgaccgacaacgccttccagagcctgaaacccggtgccctaaacgagctcagcgacgaccagaaggtgaagctcattctcttccacgtcactcccaaatactacaccatctccgatctgttaaccgtgagcaaccccgtgaggacgcaggccacggagaaagaagggacctgggggctgaacttcaccggccaaggtggtaaccaggtgaacatctccacaggggtggtgcagacgcagctcaacaacccactgagggagaagtttcctctggctgtgtaccaggttgacaaggttctgttgccgttggaactcttcggaaccaccaagactcgtgcttcttctgcggctccttctcctaagggttctaagagcactcctgagattcccagcgttggtaaggctggttctgctccttcggattctcctaaggatactaatgctgccaatgggatgaatgtgggtttcggacttgttcttggacttggcttcatttgcatgggagctctctcttgatcaccagaaaatacttcattgtcaatgtgtcgtcttatcttttttcttttactctcacttcttcatttcctaatctttcttttcttctacgggcaaaggaactgtgttgggttttcttgagcctcattctttctatttaatgccctcttttttatgtatttaatttaatccttgtcttgtatttactatttaatttggatcacatgattttgtttaaaaaaaaaaaaaaaa

SEQ ID NO: 4464 - protein, 252 aa, Triticum aestivum
  misc_feature: Ceres CLONE ID no. 904170
  misc_feature: Ceres CDNA ID no. 40351485
  misc_feature (49)..(183): Pfam Name: Fasciclin PFAM Desc: Fasciclin domain
MASTCTPSTLILLTLTTFLIALAQAQAQAPAPSPSGAVNLTAILEKGGQYTTLMKLLKDTQQLTQIESQLKSNSQGFTLFAPTDNAFQSLKPGALNELSDDQKVKLILFHVTPKYYTISDLLTVSNPVRTQATEKEGTWGLNFTGQGGNQVNISTGVVQTQLNNPLREKFPLAVYQVDKVLLPLELFGTTKTRASSAAPSPKGSKSTPEIPSVGKAGSAPSDSPKDTNAANGMNVGFGLVLGLGFICMGALS

SEQ ID NO: 4465 - DNA, 1317 bp, Triticum aestivum
  misc_feature: Ceres CLONE ID no. 906590
  misc_feature: Ceres CDNA ID no. 25446084
  CDS (107)..(1165): REFERENCED BY SEQ ID NO: 4466
agtcaaatcgaaactcgcagggaactctccatggtggacggcgagctcgggggaatcagggcgtggcgtcagtagcccaaatctcaggttccgtatccacgccgtaatgccgggatcgagctcggatccgggcaatggcaagggcaagaggagcctaccctcctggatgggctccggcgacggcggcggcggcggaggcggaggcgggggaagtccaggcaagaagaatcacgcggaggagacccacaagagggctcaagcagggccggatttctccaaactcttggatggtgtggtctttgtgctgtcagggttcgtgaaccccgagaggggcaggctgcgctcccaggcgctggatatgggggcggtgtaccggcccgattggtctgatgattgcacgcttcttgtctgcgcgtttgccaacacccccaagtttcggcaagtccagtcggagaatggaaccatcgtcgctaaggaatggatctcagaatctcacagccaaagaaaactcgttgatattgagccttaccttatgcatgctggaaatccattgcgcaaaaataaagtgccagttgattccagtcaagatcagaagaagccacgtaaagagcatgaaaagcaacctgagaagactcatgctaagacaccgccctctgctgccactaaggcaggacgttcagatgctataaacaaacaattttcgccttcaaaaattaaacaatgggcaatggatgattttgcaaagacaatatcttggttggagagccaagaagagaagccagagccaaacgaattaaaggcaatagctgctgaaggggttatcacttgtcttcaggatgccattgaatcccttgagcaaggcaatgatatcagcggagtggcggagcagtggagcttcgtcccccatgttgtggacgagctagtgcggctggacagagagggctcatcgctgtctaaagagcagctggccaaactagcaaccaaatgcaagaaaatctaccaggccgagcttgcgcacatggacggtggtgacaagaagggcaaggagcgccccgggaaggctgggacggacgacgctgagtatgacagcgatgatacaattgagatgacggaggaagagatcgacctcgcttgtagacagttctcggggattagtagtagctaggtcgggaaatgttagtttgtttctgaagagaagaaccctggctgtatatgagtgaggatggtacggtcggcagtgatcgaatcgctgttgtcgaggattgataagcttaaattttcaaattgtgctgttcttggttaaaaaaaaaaaaaaaa

SEQ ID NO: 4466 - protein, 352 aa, Triticum aestivum
  misc_feature: Ceres CLONE ID no. 906590
  misc_feature: Ceres CDNA ID no. 25446084
  misc_feature (55)..(130): Pfam Name: BRCT PFAM Desc: BRCA1 C Terminus
  misc_feature: Homolog of GI Number: 55296355 NR Desc: DNA repair protein XRCC1
  misc_feature: Homolog of GI Number: 19919074 NR Desc: putative DNA repair protein XRCC1
  misc_feature: Homolog of GI Number: 30699510 NR Desc: DNA repair protein
  misc_feature: Homolog of GI Number: 25406663 NR Desc: probable DNA repair protein
  misc_feature: Homolog of GI Number: 27924221 NR Desc: Xrcc1
  misc_feature: Homolog of GI Number: 76641807 NR Desc:  similar to DNA
  misc_feature: Homolog of GI Number: 51571935 NR Desc: zgc:91996
  misc_feature: Homolog of GI Number: 9954649 NR Desc: XRCC1 DNA repair protein
  misc_feature: Homolog of GI Number: 40226177 NR Desc: X
  misc_feature: Homolog of GI Number: 62087142 NR Desc: X
MPGSSSDPGNGKGKRSLPSWMGSGDGGGGGGGGGGSPGKKNHAEETHKRAQAGPDFSKLLDGVVFVLSGFVNPERGRLRSQALDMGAVYRPDWSDDCTLLVCAFANTPKFRQVQSENGTIVAKEWISESHSQRKLVDIEPYLMHAGNPLRKNKVPVDSSQDQKKPRKEHEKQPEKTHAKTPPSAATKAGRSDAINKQFSPSKIKQWAMDDFAKTISWLESQEEKPEPNELKAIAAEGVITCLQDAIESLEQGNDISGVAEQWSFVPHVVDELVRLDREGSSLSKEQLAKLATKCKKIYQAELAHMDGGDKKGKERPGKAGTDDAEYDSDDTIEMTEEEIDLACRQFSGISSS

SEQ ID NO: 4467 - DNA, 1457 bp, Triticum aestivum
  misc_feature: Ceres CLONE ID no. 907473
  misc_feature: Ceres CDNA ID no. 24766536
  CDS (278)..(1240): REFERENCED BY SEQ ID NO: 4468
gtttttaactcgacttagccaagtttggcaaacgaacaggccccgtggccccgcccccgcgcgacagcgaccgggcgcccgaagtgtctcgcgctcgcccacggcacccgagcggagcccccgcccctaccatgtgctctccctgcccgcagacccctcaaaacccacccgcgcccgcacccaggcaccgagcacccagcagaaagaaacgcaccaaatctttatcccctgccctcagcagtgccgacctgagcgccggagatctgcggcgagcgagatgaaagtggaggagcagacggtggtgggaggaggaggaggggggctctgggggctggccgggcggccgtgcgacacgtgcgccgtggacgcggcgcggctctactgccggtcggacggcgcctacctctgcgccgggtgcgacgcgcgcgctcacggggccggctcccgccacgcgcgcgtctggctctgcgaggtctgcgagcacgcgcccgccgcggtcacctgccgcgccgacgccgccgcgctctgcgccacgtgcgacgccgacatccactccgccaacccgctcgccagccggcacgagcgcctccccgtcacgcctttcttcggcgcgctcgccgacccgccccagcccgccccctccccgtcctccgccgccgcgacgcaggaggacgcggacgacgacgggagcaacgaggccgaggcggcctcctggcttcttcccgagcctggcgatagccccgaggacagcaccgctaccttcttccctgactcggacgcgtacctcgatctggacttcgtccggtctatggacgggatcaaggccatcggggtgcccgtcgccccttccgagctcgacgtcgccggcggcgctctcttctaccccgaacactccatgaaccacagcatgtcaacgtccgaggtcgcggtggtgccggacgcgctgtcagccggcggggccccggcgccggcgccgtcggtggcggtggtggctagcaaggggaaggagcgggaggcccggctgatgcggtaccgggagaagcgcaagaaccggaggttccagaagaccatccgctacgcgtcccgcaaggcgtacgccgagacgcggccgcgcatcaagggccggttcgccaagcgcaccgccgaggacgacgcgctggagcgggacgggccgttctcgcccgcgtcgtcggcgcacctggcgtcggacggtgactacggcgtcgtgccgtccttctgaggagaccggcgacggcgacggcgactctgctgtagttttggcgcgcgcatccatccgagtgcgctcgcgtgcggtggctgcgacgcgcgctccgtgtaacattgaataatctgtacagttttgttccatgggattagtgccgtgaccgtgccgacctgaaaaaaaaaaaaaaaaaaaaaaaaaaaaaaaaaaaaaaaaaagaaaaaaaaaaaaaaaa

SEQ ID NO: 4468 - protein, 320 aa, Triticum aestivum
  misc_feature: Ceres CLONE ID no. 907473
  misc_feature: Ceres CDNA ID no. 24766536
  misc_feature (251)..(289): Pfam Name: CCT PFAM Desc: CCT motif
  misc_feature (64)..(106): Pfam Name: zf PFAM Desc: B
  misc_feature: Homolog of GI Number: 21655154 NR Desc: CONSTANS
  misc_feature: Homolog of GI Number: 51964156 NR Desc: PREDICTED OJ1476_F05.18 gene product
  misc_feature: Homolog of GI Number: 21667487 NR Desc: CONSTANS
  misc_feature: Homolog of GI Number: 4091806 NR Desc: CONSTANS
  misc_feature: Homolog of GI Number: 21594050 NR Desc: CONSTANS
  misc_feature: Homolog of GI Number: 41323976 NR Desc: CONSTANS
  misc_feature: Homolog of GI Number: 21281083 NR Desc: putative CONSTANS B
  misc_feature: Homolog of GI Number: 4091804 NR Desc: CONSTANS
  misc_feature: Homolog of GI Number: 41323978 NR Desc: CONSTANS
  misc_feature: Homolog of GI Number: 11037308 NR Desc: constans
  misc_feature: Useful for making larger plants
  misc_feature: Useful for making ornamental plants with modified leaves
  misc_feature: Useful for making plants with increased biomass and foliage
  misc_feature: Useful for making shorter plants
  misc_feature: Useful for making stronger plants
MKVEEQTVVGGGGGGLWGLAGRPCDTCAVDAARLYCRSDGAYLCAGCDARAHGAGSRHARVWLCEVCEHAPAAVTCRADAAALCATCDADIHSANPLASRHERLPVTPFFGALADPPQPAPSPSSAAATQEDADDDGSNEAEAASWLLPEPGDSPEDSTATFFPDSDAYLDLDFVRSMDGIKAIGVPVAPSELDVAGGALFYPEHSMNHSMSTSEVAVVPDALSAGGAPAPAPSVAVVASKGKEREARLMRYREKRKNRRFQKTIRYASRKAYAETRPRIKGRFAKRTAEDDALERDGPFSPASSAHLASDGDYGVVPSF

SEQ ID NO: 4469 - DNA, 776 bp, Triticum aestivum
  misc_feature: Ceres CLONE ID no. 907498
  misc_feature: Ceres CDNA ID no. 40351486
  CDS (88)..(549): REFERENCED BY SEQ ID NO: 4470
ctagccgccgccgcctcctccgcctcttcgtcctgcaagcagcgccgccgccttccaccggcccgagcttcagccttcccttcaaccatggcggacgttgatgtcgatcccgaggtggcggccgccggtcccaagaagaggacgttccgcaagttcagctaccgcggcgtggacctcgacgctctcctcgacatgtccagcgaggacctcgtcggcctcttccccgcgcgcgcccgcagaaggttctcgaggggtctgaagaggaagccgatggcgctcgtcaagaagctgcgcaaggcgaaaagcgaagcccctgctggtgagaagcctgagcaagtgaggacccacctccgcaacatgatcatcatgcctgagatgatcggaagcgttgtgggcatctacaatggcaagtgcttcaaccaggtggagatcaagccggagatgattgggcactacctggcagagttctccctgtcgtacaagccggtgaagcacgggaggcccggtatcggtgccacccactcgtcgaggttcattcctctcaagtgagcatatggtcaggaaaattgtctttggtgtctggaatccagtgttcttatcgttgtcaaatgtagcgcctgatataccgactgtcagtctagtggtggagcagcaccctttgaaccctgaactaatcctgttccagattttgttccagattttgaagttatcgtaaggaaggtcgaacatgtttatctcctttggcagttgtcaaatgttcaaaaaaaaaaaaaaaa

SEQ ID NO: 4470 - protein, 153 aa, Triticum aestivum
  misc_feature: Ceres CLONE ID no. 907498
  misc_feature: Ceres CDNA ID no. 40351486
  misc_feature (55)..(136): Pfam Name: Ribosomal_S19 PFAM Desc: Ribosomal protein S19
MADVDVDPEVAAAGPKKRTFRKFSYRGVDLDALLDMSSEDLVGLFPARARRRFSRGLKRKPMALVKKLRKAKSEAPAGEKPEQVRTHLRNMIIMPEMIGSVVGIYNGKCFNQVEIKPEMIGHYLAEFSLSYKPVKHGRPGIGATHSSRFIPLK

SEQ ID NO: 4471 - DNA, 1312 bp, Triticum aestivum
  misc_feature: Ceres CLONE ID no. 908014
  misc_feature: Ceres CDNA ID no. 25892865
  CDS (251)..(904): REFERENCED BY SEQ ID NO: 4472
aaaacctttccattaatctcgcatccacaccaacccggcaaccccactccacactatctatagcctgttactccatcagagtaggaggtccataggtctaagctcgccgggctctcccagctctcgcctccatctccatgagcgggaaccacgcacattgcgcattggcaactccgtcgccatacatctaggttggctagctagcaatccctgccggcctcgatccacagatctctcctcgctggtaaacatggagctggcgacgatggtgacgctgacgctgctggccctctcggcggcgacgctggcgcggctgctggtggagcgggcgcgccggcggcggtgctatctgctggactacgtgtgctacaaggggacggacgaccgcaagctccccacggatctgtgcggcgagatcatccagcggaacaagctgctggggctggaggagtacaagttcctgctcaaggtcatcgtcaactccggcatcggcgaggagacgtacggcccgcgcaacatcatcgcggggggcgacgcgagccccgaccgcgtcgccgagggcatggaggagatggacgagacgttccacgccgtgctcgacgagctcttcaccaggtcggccgcgccgggcgggctgggcctgcgccccgccgacgtggacctgctcgtcgtcaacgtgtccatgttctccccggcgccgtcactgtcggcgagggtggtgcgccgctacggcctccgggaggacgtgaaggtgttcaacctcaccggcatgggctgcagcgccaccctcatcgccctcgacctcgccaacaacttcttcaggtgcccttgttttctccccgcatctccaaccagcattatcctctctgttgcgcagctaatacaacgggctagtgtccaataattcaacggcctggattgattcaagcagcactaccaattgtttggtacgctcggctctcgctcgatccgggtccgagcgtagtcgtacgacaagtcgtgcagtcggtgagagtttgagacgctcgaatagtgtactgcgtcagtaaataacgttgtggcaggcaaaagcctaaagttgggccgcagtggcccctagcaatttatttgctgtatggtcatccttctggtgagagctattctgatcctgatcagaccatttatcttctccactgtagggtagtcgagtacagcttgctgctgaactgagctaggagtagatggcagtaggtaggtagatgatcagtaccatttcctttgtcacccgggaagaagaaaaaactcagtgagaaatgcaaaaaaaaaaaaaaaa

SEQ ID NO: 4472 - protein, 217 aa, Triticum aestivum
  misc_feature: Ceres CLONE ID no. 908014
  misc_feature: Ceres CDNA ID no. 25892865
  misc_feature: Homolog of GI Number: 31432631 NR Desc: putative fatty acid elongase 3
  misc_feature: Homolog of GI Number: 50915800 NR Desc: putative fatty acid elongase 3
  misc_feature: Homolog of GI Number: 50920821 NR Desc: putative fatty acid elongase
  misc_feature: Homolog of GI Number: 28951053 NR Desc: At5g04530
  misc_feature: Homolog of GI Number: 50920841 NR Desc: putative fatty acid elongase
  misc_feature: Homolog of GI Number: 21536949 NR Desc: putative fatty acid elongase
  misc_feature: Homolog of GI Number: 20259583 NR Desc: putative fatty acid elongase
  misc_feature: Homolog of GI Number: 4091810 NR Desc: fatty acid elongase 3
  misc_feature: Homolog of GI Number: 20465993 NR Desc: putative fatty acid elongase 3
  misc_feature: Homolog of GI Number: 49355351 NR Desc: fatty acid elongase 3
MELATMVTLTLLALSAATLARLLVERARRRRCYLLDYVCYKGTDDRKLPTDLCGEIIQRNKLLGLEEYKFLLKVIVNSGIGEETYGPRNIIAGGDASPDRVAEGMEEMDETFHAVLDELFTRSAAPGGLGLRPADVDLLVVNVSMFSPAPSLSARVVRRYGLREDVKVFNLTGMGCSATLIALDLANNFFRCPCFLPASPTSIILSVAQLIQRASVQ

SEQ ID NO: 4473 - DNA, 1566 bp, Triticum aestivum
  misc_feature: Ceres CLONE ID no. 908051
  misc_feature: Ceres CDNA ID no. 25446862
  CDS (142)..(1236): REFERENCED BY SEQ ID NO: 4474
acaccaccggccggccgcccgcgtctgtcaaccgaaagcagcacagctcccccacggtcggtctacatctactacccagtgcgcagtttccctccaaaaccacgcgcgtgcgtacgagtgccagttgaagcgcgtacgtgaatgcagcggcagatcttccacatggctaccgctgtggcgtgggcgccgctgctgctggtgctgctgtcggcgtcgttgtcgtcgcggtgcgcggggcaggcgctggtgccgggcgtgatgatcttcggggactcggtggtggacgccggcaacaacaaccggctggccacgctggtgcgcgccgacttcccgccctacggccgcgacttcccggccacccacgcgcccaccggccgcttctgcaacggcaagctcgccaccgactacaccgtggagagcctggggctgagctcgtacccgccggcgtacctcagcgacgaggcgcagagcgacaacaggaccctcctccacggcgccaacttcgcctccggcgccgccggctacctcgacgccaccgccgcgctctacggcgccatctcgctggggcggcagctggactacttcaaggagtaccagtccaaggtggcggcggtggccggcgagaagcgcgcggcggcgctcacgtccgggtccatctacgtggtgagcgccgggacgagcgactacgtgcagaactactacgtgaacgccatgctggccgccgcctacaccccggaccagttcgccgacgcgctcatgcaacccttcaccgccttcgtcgagaggctgtacgggctgggagcgcggcggatcggggtgacgtcgctgccgcccatggggtgcctgccggcgtccgtcaccctcttcggcggcggcggcgggggcggctgcgtggagcggctcaacaacgactccctcaccttcaacgccaagctgcaggcggcgtcggacgcggccaagaagcggcactcggacctcaagctcgtcgtcttcgacatctacaacccgctgctcaacctcgtcgccgaccccatgagcgccgggttcttcgagtctcggcgcgcgtgctgcgggacggggacgatcgagacgtcggtgctgtgccaccagggggcgccggggacgtgcgccaacgccaccggctacgtcttctgggacggcttccaccccaccgacgccgccaacaaggtgctcgccgacgcgctgctcctccaggggctgcagctcatctcctagctagctgctccatcagtccttccttcctcgtcgctccaatggcgctcatgccatgactgacaccgcaccggccgtcttgtgcatgtctgtctgtttacttcagagcttttcttgcttgtgatctctactaccggatcgtctctcctgctgttttgtttgctttgaactactactaggtactactactgtgtttccgtgctttgtgtgatgtgaatgtggtccgtaatgtaatatagcggcactgaaaactaggcttttgctgattttatttagttattatccgtgtggcattattatcaataaaaatgttgaacaaaaaaaaaaaaaaaa

SEQ ID NO: 4474 - protein, 357 aa, Triticum aestivum
  misc_feature: Ceres CLONE ID no. 908051
  misc_feature: Ceres CDNA ID no. 25446862
  misc_feature (32)..(348): Pfam Name: Lipase_GDSL PFAM Desc: GDSL
  misc_feature: Homolog of GI Number: 9758010 NR Desc: proline
  misc_feature: Homolog of GI Number: 37780986 NR Desc: putative lipase
  misc_feature: Homolog of GI Number: 10177228 NR Desc: GDSL
  misc_feature: Homolog of GI Number: 30693763 NR Desc: GDSL
  misc_feature: Homolog of GI Number: 9279719 NR Desc: proline
  misc_feature: Homolog of GI Number: 2062167 NR Desc: Proline
  misc_feature: Homolog of GI Number: 10638955 NR Desc: putative proline
  misc_feature: Homolog of GI Number: 51970398 NR Desc: putative GDSL
  misc_feature: Homolog of GI Number: 56785182 NR Desc: putative family II extracellular lipase 3
  misc_feature: Homolog of GI Number: 8778808 NR Desc: T4O12.13
MATAVAWAPLLLVLLSASLSSRCAGQALVPGVMIFGDSVVDAGNNNRLATLVRADFPPYGRDFPATHAPTGRFCNGKLATDYTVESLGLSSYPPAYLSDEAQSDNRTLLHGANFASGAAGYLDATAALYGAISLGRQLDYFKEYQSKVAAVAGEKRAAALTSGSIYVVSAGTSDYVQNYYVNAMLAAAYTPDQFADALMQPFTAFVERLYGLGARRIGVTSLPPMGCLPASVTLFGGGGGGGCVERLNNDSLTFNAKLQAASDAAKKRHSDLKLVVFDIYNPLLNLVADPMSAGFFESRRACCGTGTIETSVLCHQGAPGTCANATGYVFWDGFHPTDAANKVLADALLLQGLQLIS

SEQ ID NO: 4475 - DNA, 2482 bp, Triticum aestivum
  misc_feature: Ceres CLONE ID no. 908089
  misc_feature: Ceres CDNA ID no. 35383311
  CDS (218)..(2188): REFERENCED BY SEQ ID NO: 4476
gcctcgattttgccggccgagcgtttacttgcctgctgtattcttctctttctcctcctcgatctcgagggcggacggagagatagagagaggcctggtctcggggtcgggagcgcccatgttttgacctcgcccgggtcgcctcctcgtcctcgccccgcgatccagatctgaggtggaattcttggttggtcgatcagaggaatttggtgtcgccatgctgcccaagatgccgtcaggccggtggatctcggcttccctgctggtcattctcctgagcctgcaccccatcgccgacgccttctacctcccgggcactttcatgcacacctacgaagccggtgaaacgatcgcggccaaggtcaactcgctcacgtccatcgagaccgagctgcccttcagctactacagcctcccctactgcaagccccaggaaggtgtcaagaagagcgccgagaacctcggcgaggtcctcatgggtgaccagatcgacaactcgccgtaccacttccacgtcaacgtcaacgagtcgctgtacctttgcaccaccgacccgctcaccaaggagcaggccgagctgttgaagaaccgggcgcggaatctgtaccaggtcaacatgatcctcgacaacctgccggtcatgaggttcaccgagcagaatgggatgacgatccagtggactgggtacccggtcgggtacaaccccatggggagcagcgaggattatatcattaaccatctcaagttcagggttttggttcatccgtaccaggcgcaaggtgatgttgtggtcacgagtgaggatggtgttgctatggttgagtctgaccgcaagagcggcttccagatcgttggttttgaggttgttccttgcagtgtcaagcgtgatcctgcagccatggccaagctcaagatgtatgagaaggttgagtctgtgaactgcccgttggagctcgagaaatctcaggtgatccatgagaaggagcagattacatttacctatgaggttgagtatgtcaagagcaacatcaagtggccgtcaaggtgggatgcctacttgaagatggatggtgctaaggtgcactggttctcaatcatgaactccatgatggttgtcttcttcttggccggtattgtgtttgtcatattcttgaggactgtccgaagggatctgacacgttatgaggagatggacaaagaagcccaagctcagatgaatgaggagctttcaggatggaagcttgttgttggtgatgtcttcagggagccctgctgctcaaagctgctgtgtgttatggtcgctgatggtatccagatcaccggcatggcagtcgttacaatcgtgtttgctgctctgggttttctctcacctgcttccaggggaatgctcttgaccggaatgatcatcctctacctcttccttggaattattgctggatatgttggtgtccgtctctggaggaccatcaaacaatccacagaagggtggaaatctgtcgcttggctgacctcctgcttcttccctggcattgttttcatcatcttgacggtgctgaactccatcctgtggggtaagaagagcactggagctttacccatttcactcttcttcaccctcttggccctgtggttctgcatctccgtgccactcactcttattggaggcttgctaggcacacgggctgcaagcatagaattccctgtccgtaccaaccaaatcccaagagagatccctgagcgcaagttcccttcatggctccttgtgctcggtgcaggaacattgcctttcggcacccttttcattgagctcttcttcatcctttctagcatctggctggggaggttctactatgtattcggcttcctgttcatcgtcctcttcctgttggtcatagtctgtggtgaggtttctttggtcctgacctacatgcacctctgtgttgaggactggaagtggtggtggaaagccttctttgcctctggctccgttgcgttcttcgtcttcctatactccatcaactacctggtgttcgacctcaggagcctgagcgggccagtctccgcgacactctacctgggctactccttgatcatggcatttgccatcatgctgtcaactggcgccatcggcttcttgctctcgttctacttcgtccactacctcttctcgtccgtcaagattgactagaagccccctgcagtagtgtcacctgattctggtgatagttatcccttagaaacacaaacacaaataactgtcaaactgaaaaatggaagcatatgtcgatttacatggcttagcacagttactccagcttatgtttacttcttagacatgtttgtaatgcttcggctatgttctcttgcctttttttgtaatagtattatgttttgcttgctctgggcgtttgtgagcagcaaattttgttatcggggacttgaaatatgaaatgggcaaatttgattaaaaaaaaaaaaaaaa

SEQ ID NO: 4476 - protein, 656 aa, Triticum aestivum
  misc_feature: Ceres CLONE ID no. 908089
  misc_feature: Ceres CDNA ID no. 35383311
  misc_feature: null
  misc_feature: Useful for making plants with altered cell wall content and/or composition
  misc_feature (59)..(614): Pfam Name: EMP70 PFAM Desc: Endomembrane protein 70
  misc_feature: Homolog of GI Number: 15238407 NR Desc: endomembrane protein 70
  misc_feature: Homolog of GI Number: 10176814 NR Desc: endosomal protein
  misc_feature: Homolog of GI Number: 50943557 NR Desc: endosomal protein
  misc_feature: Homolog of GI Number: 50912247 NR Desc: putative endomembrane protein
  misc_feature: Homolog of GI Number: 51091315 NR Desc: putative endomembrane protein emp70 precursor
  misc_feature: Homolog of GI Number: 50947259 NR Desc: putative transmembrane 9 superfamily protein member 2 precursor
  misc_feature: Homolog of GI Number: 53982147 NR Desc: putative transmembrane protein
  misc_feature: Homolog of GI Number: 50758867 NR Desc:  similar to Transmembrane 9 superfamily protein member 4
  misc_feature: Homolog of GI Number: 70878818 NR Desc: endosomal integral membrane protein
  misc_feature: Homolog of GI Number: 66536937 NR Desc:  similar to ENSANGP00000001148
MLPKMPSGRWISASLLVILLSLHPIADAFYLPGTFMHTYEAGETIAAKVNSLTSIETELPFSYYSLPYCKPQEGVKKSAENLGEVLMGDQIDNSPYHFHVNVNESLYLCTTDPLTKEQAELLKNRARNLYQVNMILDNLPVMRFTEQNGMTIQWTGYPVGYNPMGSSEDYIINHLKFRVLVHPYQAQGDVVVTSEDGVAMVESDRKSGFQIVGFEVVPCSVKRDPAAMAKLKMYEKVESVNCPLELEKSQVIHEKEQITFTYEVEYVKSNIKWPSRWDAYLKMDGAKVHWFSIMNSMMVVFFLAGIVFVIFLRTVRRDLTRYEEMDKEAQAQMNEELSGWKLVVGDVFREPCCSKLLCVMVADGIQITGMAVVTIVFAALGFLSPASRGMLLTGMIILYLFLGIIAGYVGVRLWRTIKQSTEGWKSVAWLTSCFFPGIVFIILTVLNSILWGKKSTGALPISLFFTLLALWFCISVPLTLIGGLLGTRAASIEFPVRTNQIPREIPERKFPSWLLVLGAGTLPFGTLFIELFFILSSIWLGRFYYVFGFLFIVLFLLVIVCGEVSLVLTYMHLCVEDWKWWWKAFFASGSVAFFVFLYSINYLVFDLRSLSGPVSATLYLGYSLIMAFAIMLSTGAIGFLLSFYFVHYLFSSVKID

SEQ ID NO: 4477 - DNA, 454 bp, Triticum aestivum
  misc_feature: Ceres CLONE ID no. 908121
  misc_feature: Ceres CDNA ID no. 25445721
  CDS (3)..(281): REFERENCED BY SEQ ID NO: 4478
gaatgagaagaaaagaaatggcatccttagcccgcgccgccgccaccgccgcgagagcggcgctccgcccggcgcccctcgccggccgtggcctcggctcctccctgccgtcttcctcccccgcacgggccgcccgcctcctccgcaggtcggccgtggcggggctggagacgctgctgcccctgcacaccgcggtcgcgtcggcgcgcctcaagtcctgcatcgccgtcgactccacctgctggtgctccctctcccaaggttttaaaaaacgcatctgatcatggttaggagctgcacagctgagaagtgaagccaccgagttaaaaacaaagtgcatttgtttgctgatagtgcttagaacatgtatcccagctattttggccattgctcttgatgaatgtactcttaacaaaataatggagctttgccccctttaaaaaaaaaaaaaaaa

SEQ ID NO: 4478 - protein, 87 aa, Triticum aestivum
  misc_feature: Ceres CLONE ID no. 908121
  misc_feature: Ceres CDNA ID no. 25445721
  misc_feature: Homolog of GI Number: 34913910 NR Desc: OSJNBa0024F24.29
MASLARAAATAARAALRPAPLAGRGLGSSLPSSSPARAARLLRRSAVAGLETLLPLHTAVASARLKSCIAVDSTCWCSLSQGFKKRI

SEQ ID NO: 4479 - DNA, 1973 bp, Triticum aestivum
  misc_feature: Ceres CLONE ID no. 908412
  misc_feature: Ceres CDNA ID no. 40041365
  CDS (265)..(1602): REFERENCED BY SEQ ID NO: 4480
aaatttgcggcccaacccgatagactccctcacggtttcgtggggtgggccgagcgcaccgtgagggagtccggcctgagccaggccagtgtcactctgctgccacggtgacgcctcaccgcttccatcgccgacgaaaccacggagcgcgcccgcggcggataaatttgggcgcgggcgggaaggagacgagagagaaaccccacagaccgctccaaaccccacccacgcccctcccccacaactccgccgccgccggtcgccatggagaggaagcaggccgactacagcaacctggacgagaggtacaccatccagggggagaggtaccagggtcagcagtacagccacatctactacacccgcctccaccacatgcgcaccctcctccacgtcctcgtcccctcccggaagccgcacctccccgtcactacagtgcttggactcgaagaaggaaaagattgtgtgcttgttgggactttatacaagcacatgaaactgaagccttctattctcgatgaatactcaaaggagaggtcggcaatccctcttgttaagccacacaatttcatgcattctgatgataatcttattctggaagatgaaagtggaagagttgcacttgcaggagccatacctccagcagcttatgtgactggagttgtagtagctcttcatgggaaggaaacaagtgctggcaactttcttgttgaagatgttatggaggctggtcttcctcctcaaactgtgttgcccagcataaatgaggacaagtatgttgtttttgtgtcgggattaagtgttgggagcagcacattcaatcctctgcagttccaacttcttattgaccatatcactgggcatttgggtgatgaaaatgagcaaaccatagcatcgaagatagttcgtgttgtggttgctggaaattcagtacatattgcaccaaggttcttgaatggccagacagtagctgcaaaagatcaaccaaggatagctgagccaatcaaagaactagatataatgctgactcagctggtggcgtcattacctgtagatataatgccaggttgtaacgatccagcgaattttgctttgcctcagcagcctttgcatagatgccttttctctggagcatccatctataatacgttttcatcatgtccgaatccacatcaattcgatcttgacaatgtcaagtttattggaacatctgggcagaacatagatgacctctacaggtactcggatgccaaagataggctggaattcatggaaaggacattgaaatggcgccatcttgctccgactgcaccgaacagcctaggatgttatccatacacagacaaggaccctttcctcgtcgaaacctgcccccatgtttacttcgtcgggaatcaagatagatatgagactcgactgttaaaaggaacggagaagcagcaagtcaggctaatcagcattccaagattttgcgagagtggaatcgctgtcatggcatccttaccctttggcaagaaattccgggtggtttcagaatgcaacaaggttgaggacagaagacccaaagaagactctgtttgcatcagattcagattctcctagcaccgaggtttcaaaacagagcagcactggtgacgccagcgcttctccggatggcccgccagtcctcaccattttggctggtatcgttgtgttcttcctgctcttgtgggtaatcggatcaatcttcacctggaccgtcggtctggtcttcggggctgcgaaatcttagatgtccatcaatcataggatagttctgcaccttttcagttgtatatacacttgtccctggctgctgtttgatgatagccctggatcattgcatcctctgctgtcatttccagccgaaattcttgaataattgtatcacatgttttagcgaaatctcatggattaccgcgtttcacgctgttatttcaaaaaaaaaaaaaaaa

SEQ ID NO: 4480 - protein, 445 aa, Triticum aestivum
  misc_feature: Ceres CLONE ID no. 908412
  misc_feature: Ceres CDNA ID no. 40041365
  misc_feature (147)..(411): Pfam Name: DNA_pol_alpha_B PFAM Desc: DNA polymerase alpha subunit B
  misc_feature: Homolog of GI Number: 31376377 NR Desc: At2g42120
  misc_feature: Homolog of GI Number: 42569857 NR Desc: DNA polymerase delta small subunit
  misc_feature: Homolog of GI Number: 50948889 NR Desc: similar to DNA polymerase delta small subunit.
  misc_feature: Homolog of GI Number: 9188572 NR Desc: OsPol delta small subunit
  misc_feature: Homolog of GI Number: 23306120 NR Desc: Putataive DNA polymerase delta small subunit
  misc_feature: Homolog of GI Number: 2673906 NR Desc: putative DNA polymerase delta small subunit
  misc_feature: Homolog of GI Number: 28279582 NR Desc: Polymerase
  misc_feature: Homolog of GI Number: 47086937 NR Desc: polymerase
  misc_feature: Homolog of GI Number: 72043034 NR Desc:  similar to polymerase
  misc_feature: Homolog of GI Number: 74010360 NR Desc:  similar to DNA polymerase delta subunit 2
MERKQADYSNLDERYTIQGERYQGQQYSHIYYTRLHHMRTLLHVLVPSRKPHLPVTTVLGLEEGKDCVLVGTLYKHMKLKPSILDEYSKERSAIPLVKPHNFMHSDDNLILEDESGRVALAGAIPPAAYVTGVVVALHGKETSAGNFLVEDVMEAGLPPQTVLPSINEDKYVVFVSGLSVGSSTFNPLQFQLLIDHITGHLGDENEQTIASKIVRVVVAGNSVHIAPRFLNGQTVAAKDQPRIAEPIKELDIMLTQLVASLPVDIMPGCNDPANFALPQQPLHRCLFSGASIYNTFSSCPNPHQFDLDNVKFIGTSGQNIDDLYRYSDAKDRLEFMERTLKWRHLAPTAPNSLGCYPYTDKDPFLVETCPHVYFVGNQDRYETRLLKGTEKQQVRLISIPRFCESGIAVMASLPFGKKFRVVSECNKVEDRRPKEDSVCIRFRFS

SEQ ID NO: 4481 - DNA, 1409 bp, Triticum aestivum
  misc_feature: Ceres CLONE ID no. 908455
  misc_feature: Ceres CDNA ID no. 25445731
  CDS (331)..(1269): REFERENCED BY SEQ ID NO: 4482
gtcaaaaccacaacatgggccattatcttgcccgtacaacggctgttattttagtggaaaggcggatctgcgggagagatcctcttattaggaattcgctacactgttcataatcgagcacgcgatttccgtaaaacccgcgtgttcacctttccaccaccagttcacccaccagagtccaacggaatctttcttccccctctacactactacagtagatgccgagagggtgctgactcgagtgcagtgtactgcgtttccttctcgtcgtcggtcttcttcttatctcatccccgactccgacgagccccggcgaccgaccggcgagggatggcggcgacggcgacgaagctgagcagcggccacgagatgccggccgtggggctcggcgtctggcggatggactccgccgccgtccgcggcctcatccactccgccctccgcgccggctaccgccacttcgactgcgccgctgactacaaaaacgaggctgaggttggcgatgcgctcgcggaggcattcaaaactgggcttgtcaagagggaggatcttttcatcactaccaagttgtggaactcagatcacggccatgtggtcgaagcctgcaaggatagcctgaagaagctgcgattggattatctagatctctaccttattcacttccctgtagctactaagcatactggagtcggcacaactggcagtgctcttggtgatgatggcgtgcttgatatcgataccactatcacattggagacaacgtggcatgcaatggaagatcttgtttccatgggacttgttcgtagcatcggaattagcaactacgacatcttcctcaccagagactgcttggcctacgctaagataaagcccgcggtgaaccaaatcgagacacacccttacttccagcgcgactctcttgtgaagttctgccagaagcatggaatctctgtcaccgcacatacacccctgggcggctccactgccaacaccgaatggttcggctcggtctcatgcctcgacgatcctgtcatcaagtccctggctgagaaatacggcaagacgccggcccagctggtcctccggtggggcctccagaggaacacggtggtcatccccaagacctccaaggtagagaggctggaggagaactttgcggtcttcgacttcgacatctccgccgaggacatggagaagatcaaggccctcgatcgcaactaccgcaccaaccagccggccaagttctggggcatcaacctctacgcttgattccactgcatgttttgcttcccggacagtgcaaccaataatatgggagcttgtcattagtgtaaacgaacttgagttgtagatgatgtatttgcagcacaatttatcagttcaccattctattaaaaaaaaaaaaaaaa

SEQ ID NO: 4482 - protein, 312 aa, Triticum aestivum
  misc_feature: Ceres CLONE ID no. 908455
  misc_feature: Ceres CDNA ID no. 25445731
  misc_feature (8)..(295): Pfam Name: Aldo_ket_red PFAM Desc: Aldo/keto reductase family
  misc_feature: Homolog of GI Number: 10334991 NR Desc: NADPH
  misc_feature: Homolog of GI Number: 51963828 NR Desc: PREDICTED P0575F10.14 gene product
  misc_feature: Homolog of GI Number: 21554266 NR Desc: putative NADPH dependent mannose 6
  misc_feature: Homolog of GI Number: 21592829 NR Desc: putative NADPH dependent mannose 6
  misc_feature: Homolog of GI Number: 20198120 NR Desc: putative NADPH dependent mannose 6
  misc_feature: Homolog of GI Number: 20260680 NR Desc: putative NADPH
  misc_feature: Homolog of GI Number: 50904895 NR Desc: putative NADPH
  misc_feature: Homolog of GI Number: 1835701 NR Desc: NADPH
  misc_feature: Homolog of GI Number: 32400786 NR Desc: NADPH
  misc_feature: Homolog of GI Number: 217951 NR Desc: NADP
  misc_feature: Useful for making plants with increased biomass and foliage
MAATATKLSSGHEMPAVGLGVWRMDSAAVRGLIHSALRAGYRHFDCAADYKNEAEVGDALAEAFKTGLVKREDLFITTKLWNSDHGHVVEACKDSLKKLRLDYLDLYLIHFPVATKHTGVGTTGSALGDDGVLDIDTTITLETTWHAMEDLVSMGLVRSIGISNYDIFLTRDCLAYAKIKPAVNQIETHPYFQRDSLVKFCQKHGISVTAHTPLGGSTANTEWFGSVSCLDDPVIKSLAEKYGKTPAQLVLRWGLQRNTVVIPKTSKVERLEENFAVFDFDISAEDMEKIKALDRNYRTNQPAKFWGINLYA

SEQ ID NO: 4483 - DNA, 1446 bp, Triticum aestivum
  misc_feature: Ceres CLONE ID no. 908544
  misc_feature: Ceres CDNA ID no. 29191827
  CDS (188)..(1108): REFERENCED BY SEQ ID NO: 4484
accctctagtctataagaaagctgtgtcctgtgccttgtgctttgccccggaccaaagcattagcacgctcctccacagcccactgctgtgcctgtttgtggccttttgccgttccccgttccccactcgtcgtcggcgatacagtgtcttcgttcctcttggggttgtcttgtggagggggaagcgatggggcgtccgtgcgtcggcgctctcctggcgtgcgccgccattgcagcttcttgctgctgctgcttccagctccagttccagggtgctgatgcggcggcgaccccgtcgttcggggacaacttcgacatcaccggcgccgaggaccacgtcaagacctcccccgacggccagacgtggtacctctccctcgacaacaagacgggcgttgggttccagacgaagcagaagtacctgttcgggtggttcagcatgaagctcaagctcgtcgggaacgactccgccggcgtcgtcaccgcctactacatgtgctcggaccttgacgcagcgccggagcgcgacgagctggacttcgagttcctgggcaaccgcaccggcgagccgtacatcatccagacgaacgtgtaccgcagcggcgtgggcgggcgggagatgcggcactcgctgtggttcgaccccaccgccgagttccacagctactccatcctctggaaccccaagcagatcgtgtttttcgtggacaaggtgcccatcagggagtaccgcaactcggacaagcccaacaaattcttcccgatcatgaagcccatgtacgtcttccccagcatctggaacgccgacgactgggccacgcgcggggggctggagaagacggactggaccaaggggcccttcgtctcctcctacagcgacttcaccgccgacgcctgcgcctgggcgtccggcccggccccgccggcgtgcgcggccgccacggggaacagctggtgggcccagccgccggcgtgggcgctcgacgacggccagcgccgggactcgggctgggtgtccaggaacctcgtgatatacgactactgcgacgaccgcaagaggttcccgaccgtgccggaggagtgcgcgctcaggaccaagactagctagctcctgatggatgggccctcctggctctcgcttcacatgcatgattcttttttggggggtcgagtacgtggtgtagctatcaattggtggatggattttcttcttcttttcttttctcttctcttgttttgtgatgatgagatgcacatgcggatgtgcatgtgtatggtgatgcggcattgattggccgggtggctgcactctcatgtgagtggtagccctttcggaggaaaatgatggatttttgttccgatgccttccatgctccacgacacgagcatggatgggccaaaacttggtagtaatggtcccacgtatacgcaaaaaaaaaaaaaaaa

SEQ ID NO: 4484 - protein, 306 aa, Triticum aestivum
  misc_feature: Ceres CLONE ID no. 908544
  misc_feature: Ceres CDNA ID no. 29191827
  misc_feature (248)..(299): Pfam Name: XET_C PFAM Desc: Xyloglucan endo
  misc_feature (38)..(222): Pfam Name: Glyco_hydro_16 PFAM Desc: Glycosyl hydrolases family 16
  misc_feature: Homolog of GI Number: 50937973 NR Desc: putative endoxyloglucan transferase
  misc_feature: Homolog of GI Number: 18391291 NR Desc: xyloglucan:xyloglucosyl transferase
  misc_feature: Homolog of GI Number: 21595178 NR Desc: endo
  misc_feature: Homolog of GI Number: 6554196 NR Desc: T23J18.21
  misc_feature: Homolog of GI Number: 3043422 NR Desc: xyloglucan endotransglucosylase/hydrolase
  misc_feature: Homolog of GI Number: 38605537 NR Desc: Probable xyloglucan endotransglucosylase/ hydrolase protein precursor
  misc_feature: Homolog of GI Number: 68532871 NR Desc: xyloglucan endotransglucosylase/hydrolase
  misc_feature: Homolog of GI Number: 3452719 NR Desc: endo
  misc_feature: Homolog of GI Number: 50937975 NR Desc: xyloglucan endotransglycosylase
  misc_feature: Homolog of GI Number: 7447418 NR Desc: probable endo
  misc_feature: Useful for making plants with increased biomass and foliage
MGRPCVGALLACAAIAASCCCCFQLQFQGADAAATPSFGDNFDITGAEDHVKTSPDGQTWYLSLDNKTGVGFQTKQKYLFGWFSMKLKLVGNDSAGVVTAYYMCSDLDAAPERDELDFEFLGNRTGEPYIIQTNVYRSGVGGREMRHSLWFDPTAEFHSYSILWNPKQIVFFVDKVPIREYRNSDKPNKFFPIMKPMYVFPSIWNADDWATRGGLEKTDWTKGPFVSSYSDFTADACAWASGPAPPACAAATGNSWWAQPPAWALDDGQRRDSGWVSRNLVIYDYCDDRKRFPTVPEECALRTKTS

SEQ ID NO: 4485 - DNA, 1668 bp, Triticum aestivum
  misc_feature: Ceres CLONE ID no. 908653
  misc_feature: Ceres CDNA ID no. 24766537
  CDS (152)..(1402): REFERENCED BY SEQ ID NO: 4486
gcccgcccgcctccgcgaacgaaaggccaaacctctgcccccctccttggctcctcctcctcgtgactccctcctgcggcccctcccccctccctcgccggtcaaaccctaacgcgcgcacccacccacccacccgtcaatcccttctcccatggcggcgctctccgtgcctctccgcaccgcggcggccctgtcctcgtccggcgccggatcccgcgccgccgccgacccctccaaggtgtcatgcgtgaggagcacccgctccgctcattttgactgcagcttcccctccattgcggcttcctcttcatctgccaggaacattgagccacttagagctatagctacacaggcacccccggccgtcccacaatatttgagtggagagaagacgaaggttggcatcaatgggttcggacggattgggaggttggttctgagaattgcaaccagtagagatgatattgaagttgtggctgtcaatgatcctttcattgatgctaagtacatggcctatatgttcaagtatgactccactcatggcccctttaaaggatccatcaatgttgtggatgattcaaccctggagatcaatgggaagaaaatcactataacaagcaaaagagatcccgcagagattccttggggtaactttggagctgactatgttgttgaatcttctggtgtttttacaaccatcgataaagcatcggtacacttgaagggtggtgctaagaaagtggtgatatctgctccatccgcagatgctcccatgtttgtggttggagtaaatgagatgagctacgatcccaagatgaatgttgtttctaatgcaagttgtaccactaactgtcttgctcctcttgccaaggttgttcatgaagaatttggcattcttgaaggtctaatgacaactgttcacgccacaacagccacccaaaagactgttgatggtccttcaatgaaagattggagaggagggcgtggtgctggtcaaaacataattcctagctccactggtgcagcaaaggctgttgggaaagttctccctgagctaaatggaaagcttactggcatggctttccgagttccaacaccaaatgtctctgtggttgacttgacctgccggcttgagaaaagtgcctcttatgatgatgtgaaagcagccatcaaggcggcatcagagggtgcactgaaaggcattttaggctacacagatgaggatgtggtatccaacgattttgttggtgacacaaggtcaagtgtatttgatgctaatgctggcatggggctgagctcttccttcatgaagctcgtgtcgtggtacgacaacgagtggggctacagcaaccgggttcttgatctcatcgcccacatggctcttgtctccgccaagcactgatcacctccgagtgctactaataggctgcaattttgccggttctttttattttcagaatttattattgcctttgttgtgccttttgagcacaggcagaaatgggtactcggatctatgacttgcttgtagcagtggatgaaatttacaccgtagcgttatgagcacgtcgtgggatttgttgagcgaatctcatttgtatcggtggtttgatttgttgctaaagaaagaaatcacaaattgtcccctttggaaaaaaaaaaaaaaaa

SEQ ID NO: 4486 - protein, 416 aa, Triticum aestivum
  misc_feature: Ceres CLONE ID no. 908653
  misc_feature: Ceres CDNA ID no. 24766537
  misc_feature (235)..(392): Pfam Name: Gp_dh_C PFAM Desc: Glyceraldehyde 3
  misc_feature (81)..(230): Pfam Name: Gp_dh_N PFAM Desc: Glyceraldehyde 3
  misc_feature: Homolog of GI Number: 3059140 NR Desc: NAD
  misc_feature: Homolog of GI Number: 15219206 NR Desc: glyceraldehyde 3
  misc_feature: Homolog of GI Number: 26986729 NR Desc: glyceraldehyde
  misc_feature: Homolog of GI Number: 18076096 NR Desc: glyceraldehyde
  misc_feature: Homolog of GI Number: 1100223 NR Desc: glyceraldehyde
  misc_feature: Homolog of GI Number: 1100225 NR Desc: glyceraldehyde
  misc_feature: Homolog of GI Number: 21618027 NR Desc: putative glyceraldehyde
  misc_feature: Homolog of GI Number: 27754473 NR Desc: putative glyceraldehyde
  misc_feature: Homolog of GI Number: 52076528 NR Desc: putative glyceraldehyde
  misc_feature: Homolog of GI Number: 50905605 NR Desc: putative glyceraldehyde
  misc_feature: Useful for making ornamental plants with modified leaves
  misc_feature: Useful for sterility
  misc_feature: Utility: Cold Germination Useful for making plants with increased tolerance to cold stress
MAALSVPLRTAAALSSSGAGSRAAADPSKVSCVRSTRSAHFDCSFPSIAASSSSARNIEPLRAIATQAPPAVPQYLSGEKTKVGINGFGRIGRLVLRIATSRDDIEVVAVNDPFIDAKYMAYMFKYDSTHGPFKGSINVVDDSTLEINGKKITITSKRDPAEIPWGNFGADYVVESSGVFTTIDKASVHLKGGAKKVVISAPSADAPMFVVGVNEMSYDPKMNVVSNASCTTNCLAPLAKVVHEEFGILEGLMTTVHATTATQKTVDGPSMKDWRGGRGAGQNIIPSSTGAAKAVGKVLPELNGKLTGMAFRVPTPNVSVVDLTCRLEKSASYDDVKAAIKAASEGALKGILGYTDEDVVSNDFVGDTRSSVFDANAGMGLSSSFMKLVSWYDNEWGYSNRVLDLIAHMALVSAKH

SEQ ID NO: 4487 - DNA, 648 bp, Triticum aestivum
  misc_feature: Ceres CLONE ID no. 908759
  misc_feature: Ceres CDNA ID no. 40351487
  CDS (96)..(374): REFERENCED BY SEQ ID NO: 4488
ctgacgccgagccctaaacgcttctactctcctcggtcctcgcccgcccgcctctccctttcccatctccctccgccttccccaaaccctcagagatggcctcgacctgcttccgcgccgccgcccgcgccgccacggcggcctgccgctcggcggcctcccgctccatgccctccgtcggccgctccgccgcccgccgcgccccgttaatctccagggtgccgctggagctggggtgctgcgcgggaatgtcgctgctgccgctgcacagcgcggtggccgcggcgaggctgacttcgcggctgagcacggcgtcccggagctcctccgctctctctcagggtatcctctgtcgcacctatcccggactttaacaatcgtaccatcgatgaagctgttgtctgtcttttcggtttggagatgggtctatctgctccaaggtgataaaacgcgggaagacctgcttgtgtcgtgcaatcagtctgatagaattttgtagagtagtgaactaaatgaacttctgtggtaatttatttgtgacacgcacaatcgcggttctgttgggcctttccaagttttgagatcatatcttttatcttgatataaacatgcaaggacaaattgcagattgcaaaaaaaaaaaaaaaa

SEQ ID NO: 4488 - protein, 92 aa, Triticum aestivum
  misc_feature: Ceres CLONE ID no. 908759
  misc_feature: Ceres CDNA ID no. 40351487
MASTCFRAAARAATAACRSAASRSMPSVGRSAARRAPLISRVPLELGCCAGMSLLPLHSAVAAARLTSRLSTASRSSSALSQGILCRTYPGL

SEQ ID NO: 4489 - DNA, 679 bp, Triticum aestivum
  misc_feature: Ceres CLONE ID no. 908844
  misc_feature: Ceres CDNA ID no. 25892866
  CDS (91)..(441): REFERENCED BY SEQ ID NO: 4490
aaagctctgttccggtctcccgtctcgctgtgcctcctcctcccctccgctctcctagggttcgctcgctcgtcgccaggttcgctcgcgatggaccagggcgacgtcgccgtggccgtgccccccgccgccccctcctcctcctgcgccggcgccggctgcaagaagggcaagcgcttcgagatcaaaaagtggaacgccgtcgcgctctgggcctgggatattgtggtcgacaactgcgccatctgccgcaatcacatcatggacctctgcatcgagtgccaggcgaaccaggccagcgccaccagcgaggagtgcaccgtggcttggggagtttgcaaccatgcattccacttccactgcatcagccgttggctcaagacccgtcaagtgtgccctctagacaacagcgagtgggagttccagaagtatggtcactaagacagttatggccaggggcgaagttgcttcatggttgtcgtactttagtgctattagtgataactcctggttaagaatagtggatgggtggttgatgtttctggagcttggatttttgttaaaccacatgcatccttgtggagtactgttcagcaaatcgtccctgagagctaccgatggatctctctgtttttctggaattgaagtgtgaatttggtgggcaaaaaaaaaaaaaaaa

SEQ ID NO: 4490 - protein, 116 aa, Triticum aestivum
  misc_feature: Ceres CLONE ID no. 908844
  misc_feature: Ceres CDNA ID no. 25892866
  misc_feature (83)..(104): Pfam Name: zf PFAM Desc: Zinc finger
  misc_feature: Homolog of GI Number: 50911983 NR Desc: putative RING box protein 1
  misc_feature: Homolog of GI Number: 83701143 NR Desc: RING
  misc_feature: Homolog of GI Number: 55769719 NR Desc: putative ring
  misc_feature: Homolog of GI Number: 21592528 NR Desc: ring
  misc_feature: Homolog of GI Number: 31747517 NR Desc: ring box protein
  misc_feature: Homolog of GI Number: 50728692 NR Desc:  similar to RBX1 protein
  misc_feature: Homolog of GI Number: 55661268 NR Desc:  similar to RBX1 protein
  misc_feature: Homolog of GI Number: 62652791 NR Desc:  similar to RBX1 protein
  misc_feature: Homolog of GI Number: 32425477 NR Desc: RBX1 protein
  misc_feature: Homolog of GI Number: 56078688 NR Desc: Ring
MDQGDVAVAVPPAAPSSSCAGAGCKKGKRFEIKKWNAVALWAWDIVVDNCAICRNHIMDLCIECQANQASATSEECTVAWGVCNHAFHFHCISRWLKTRQVCPLDNSEWEFQKYGH

SEQ ID NO: 4491 - DNA, 2723 bp, Triticum aestivum
  misc_feature: Ceres CLONE ID no. 909507
  misc_feature: Ceres CDNA ID no. 36569842
  CDS (152)..(2497): REFERENCED BY SEQ ID NO: 4492
cgcccctaaacccaccctccaccattctatcccaagtataaaccctagcccagccccttatcctttcgtctccccctcccagacaccgcgccggaacccaaaccatccgaacgaccaaccaccagcgagcgccgcgacgtctgcctctcccatggcgcccgcgctgagcaggaccctgggcccgtcctcggtggcggcgctgcggccgagcccgtcgcgggggctgctgcgggccgcgctcgcgccgcaggggaggaggcccgccggcgccagaggagtcaggtgggaggccgggaggggccggctggtcggggccaggtgcgcctccgccgttgccgagaagaccgccggggaggaggaggaggccgccggcgagaagttcgagtaccaggccgaggttagccgcttgatggatttgattgttcacagcctctacagccataaggaagtgttccttcgggagcttgtaagtaatgcgagtgatgccttggataagctgagatttctcagtgtaactgacccgtccgtgctggctgatggtggtgacatggaaataaggattaaacctgaccctgatgctggcacaataactatcactgatagtggcattgggatgacaaaggatgagctcaaggactgccttggaactatcgcacaaagtggtacctccaaatttttgaaggctctgaaggagaacaaggagcttggtgcagataatggacttattggtcaatttggtgttggattttattcggcttttcttgttgcagagaaggttgtggtgtccactaagagtcccaagacagataagcagtatatatgggaagctgaggctaacagtagctcatacgttatcagggaagagactgatcctgagaaaatgctgacacgtggaacacagattactctctttttaagagaggatgataagtatgaatttgctgaccctacgaggattcaaggtctagttaagaactactcgcagtttgtttcgttccccatttttacatggcaggagaaatctagaacagttgaggttgaagaagaggagtcaaaagaagccgaagagacagcagagggtgagaaggagaagaagaagaaaactatcactgagaagtactgggattgggaattggcaaatgaaacaaagccaatatggatgagaaatccaaaggaagtcgaggaaaccgagtacaatgaattttacaagaaggcattcaatgagtttttggatcctctagctcatgcacactttacaacagagggtgaggtggaatttagaagtgttctctacatcccaggaatggcaccacttagcaatgaggagataatgaaccctaagaccaaaaatatcaggttgtatgtcaagagggttttcatttctgatgactttgatggcgagctgttccccaggtacttgagctttgtcaaaggtgttgttgactcgaatgatctccctctgaatgtttctcgtgagattcttcaagaaagtcgtattgtcaggatcatgcgcaagagacttgttaggaagacttttgatatgattcaggatattgctgacaaggataacaaggaggactacaagaaattttgggagagctttggcaaatttatgaaacttggttgcattgaggactcaggaaatcagaagcgccttgctcctttgctgcggttttattcctctaaaaatgaaacggatttgataagtctcgatcagtatgtggagaatatgcccgagacccaaaaggctatctattatattgccacagatagtcttcagagtgcaaagaccgctccattcttggaaaagctgcttcagaaagatattgaagttctataccttatcgaaccgattgatgaggtagctattcagaatctgcagacgtacaaagagaaaaagtttgttgatatcagcaaggaagacctagaattgggcgatgaggatgaggacaaggaagaaaccaagcaggaatacactcttctttgtgactggataaagcagcagctgggtgacaaagttgccaaggtccaaatttcaaagcgactcagctcttcaccatgtgttcttgtatctggcaagtttggttggtcggctaacatggaaaggcttatgaaagcacaaacgcttggtgacacatcaagcttggagttcatgagaggaagaagaatttttgaaatcaaccccgaccaccctattgtcaaggacttgagtgctgcttgcaagaacgagcctgagagcaccgaagccaagagggcagttgagttgctgtacgagactgccctgatctccagtggatacactcctgagagtccagcggagttggggggcaagatctacgagatgatgaccatcgcccttggcgggagatggggtagatccggcaccgaggaggctgagaccaatgccgacgtcgactcttctgaaggtgttgtaacggaggtcgttgagccatccgaagtcaggactgagaacgagaatgacccatggagagattagttagttctgtaggcatccattttttttaaataccctggaggtggatgagcaaaaaatagaagtatcactggagccagagtgatgatgacatcgagcgatggactgtctttgtaagaacactgagctccaaaatcttgtttgttatcgccaaaggctaaattttgtaggtgacttttttgacggccgtgaaataatttatctttattactgaaaaaaaaaaaaaaaa

SEQ ID NO: 4492 - protein, 781 aa, Triticum aestivum
  misc_feature: Ceres CLONE ID no. 909507
  misc_feature: Ceres CDNA ID no. 36569842
  misc_feature (262)..(777): Pfam Name: HSP90 PFAM Desc: Hsp90 protein
  misc_feature (97)..(258): Pfam Name: HATPase_c PFAM Desc: Histidine kinase
  misc_feature: Homolog of GI Number: 211945 NR Desc: 108K heat shock protein
  misc_feature: Homolog of GI Number: 77556324 NR Desc: AC009176 putative heat
  misc_feature: Homolog of GI Number: 20453106 NR Desc: At2g04030/F3C11.14
  misc_feature: Homolog of GI Number: 28416485 NR Desc: At4g24190/T22A6_20
  misc_feature: Homolog of GI Number: 462013 NR Desc: Endoplasmin homolog precursor
  misc_feature: Homolog of GI Number: 17865698 NR Desc: Endoplasmin precursor
  misc_feature: Homolog of GI Number: 22652 NR Desc: GRP94 homologue
  misc_feature: Homolog of GI Number: 1708316 NR Desc: Heat shock cognate 90 kDa protein
  misc_feature: Homolog of GI Number: 37805387 NR Desc: MGC68448 protein
  misc_feature: Homolog of GI Number: 66514292 NR Desc:  similar to CG5520
MAPALSRTLGPSSVAALRPSPSRGLLRAALAPQGRRPAGARGVRWEAGRGRLVGARCASAVAEKTAGEEEEAAGEKFEYQAEVSRLMDLIVHSLYSHKEVFLRELVSNASDALDKLRFLSVTDPSVLADGGDMEIRIKPDPDAGTITITDSGIGMTKDELKDCLGTIAQSGTSKFLKALKENKELGADNGLIGQFGVGFYSAFLVAEKVVVSTKSPKTDKQYIWEAEANSSSYVIREETDPEKMLTRGTQITLFLREDDKYEFADPTRIQGLVKNYSQFVSFPIFTWQEKSRTVEVEEEESKEAEETAEGEKEKKKKTITEKYWDWELANETKPIWMRNPKEVEETEYNEFYKKAFNEFLDPLAHAHFTTEGEVEFRSVLYIPGMAPLSNEEIMNPKTKNIRLYVKRVFISDDFDGELFPRYLSFVKGVVDSNDLPLNVSREILQESRIVRIMRKRLVRKTFDMIQDIADKDNKEDYKKFWESFGKFMKLGCIEDSGNQKRLAPLLRFYSSKNETDLISLDQYVENMPETQKAIYYIATDSLQSAKTAPFLEKLLQKDIEVLYLIEPIDEVAIQNLQTYKEKKFVDISKEDLELGDEDEDKEETKQEYTLLCDWIKQQLGDKVAKVQISKRLSSSPCVLVSGKFGWSANMERLMKAQTLGDTSSLEFMRGRRIFEINPDHPIVKDLSAACKNEPESTEAKRAVELLYETALISSGYTPESPAELGGKIYEMMTIALGGRWGRSGTEEAETNADVDSSEGVVTEVVEPSEVRTENENDPWRD

SEQ ID NO: 4493 - DNA, 1131 bp, Triticum aestivum
  misc_feature: Ceres CLONE ID no. 909598
  misc_feature: Ceres CDNA ID no. 24766538
  CDS (262)..(909): REFERENCED BY SEQ ID NO: 4494
acagagagattccgcgactccatatcccaccagccaaaaccagaccgccgaccgcccgcccgcccgcacgcctctcctgaccgccggaatcccgcgctgacggcccggatccgcccgcccgcccgcttgctgcccgctgcccgctgcctcccctgctggcgctgcggctccacacttctatgcagtgggtggcggcggcggtgatgcgtgattggtcgcggcggcgctaggttctcttctccggccgcggcgagctaggccatggggtgcatccagtccacgccgaagcggaggcagcaccctgccggctacgaggaccccgtccacctcgcctcccagaccgccttcagcgtcagcgaagttgaggctttgttcgagctgttcaagagcattagtggctcagtgatcgatgacgggctgatcaacaaggaagagttccagcttgcattgttcaaaaacacaaggaaggaaaatcttttcgctaatcggatattcgacctgttcgatgtcaagaaaaggggtgtcattgattttggcgactttgttcgagctttaaatgtattccatccaaattttccattggaagagaaaattgatttttccttcaagctatatgatatggatggtacaggctttattgaacggaaggaggtaaagcagatgttgattgctcttctaggcgaatcagagatgagattatctgacgagattgttgagacaatcctggacaagaccttttcagatgctgatacgaatcaggatggtaaaatagacagaacagaatgggagaattttgtgtccaggaatccttccttgttgaagataatgactctttcgtacctcaaggacataacgaccacgtttcccagctttgtgtttcactcggaggttgatgatatcgttacatgacgatgatcctcacaaagatgtacagttaacagaaagaaagaatgtatcatcagaatatctgcaacgctgcaacatgcttgatgctagctaatgttgctggagagtcgagagatagttttttttcctgggtggtgttcgttacaccgagagttagtcttgttaaatattaatgtatgtttgtgagcttgaatttgcaagtacttggcaaaaaaaaaaaaaaaa

SEQ ID NO: 4494 - protein, 215 aa, Triticum aestivum
  misc_feature: Ceres CLONE ID no. 909598
  misc_feature: Ceres CDNA ID no. 24766538
  misc_feature: null
  misc_feature: Useful for making plants with modulated drought sensitivity
  misc_feature (73)..(101): Pfam Name: efhand PFAM Desc: EF hand
  misc_feature: Homolog of GI Number: 76577787 NR Desc: calcineurin B
  misc_feature: Homolog of GI Number: 58532581 NR Desc: calcineurin B
  misc_feature: Homolog of GI Number: 37536918 NR Desc: putative calcineurin
  misc_feature: Homolog of GI Number: 76577789 NR Desc: calcineurin B
  misc_feature: Homolog of GI Number: 22137326 NR Desc: calcineurin B
  misc_feature: Homolog of GI Number: 57472399 NR Desc: calcineurin B
  misc_feature: Homolog of GI Number: 66765939 NR Desc: calcium sensor calcineurin B
  misc_feature: Homolog of GI Number: 22136404 NR Desc: calcineurin B
  misc_feature: Homolog of GI Number: 56748808 NR Desc: Calcineurin B
  misc_feature: Homolog of GI Number: 60460514 NR Desc: calcineurin B
  misc_feature: Useful for making plants with increased biomass and foliage
  misc_feature: Useful for making plants with increased biomass and foliage
MGCIQSTPKRRQHPAGYEDPVHLASQTAFSVSEVEALFELFKSISGSVIDDGLINKEEFQLALFKNTRKENLFANRIFDLFDVKKRGVIDFGDFVRALNVFHPNFPLEEKIDFSFKLYDMDGTGFIERKEVKQMLIALLGESEMRLSDEIVETILDKTFSDADTNQDGKIDRTEWENFVSRNPSLLKIMTLSYLKDITTTFPSFVFHSEVDDIVT

SEQ ID NO: 4495 - DNA, 1322 bp, Triticum aestivum
  misc_feature: Ceres CLONE ID no. 909663
  misc_feature: Ceres CDNA ID no. 35389240
  CDS (1)..(1095): REFERENCED BY SEQ ID NO: 4496
atcgccccgtccagaacctttctccttctgtccttcccgagagatcacaccatgttcggcttcggtcaccacggccaccatggccagaaccccccggcccacgctccggccgccgccggcggcaaccagcccaccttcaagatcttctgcaaggctgacgagggctactgcctctccgtccgcgacggcaacgtcgtcctcgccccctccaacccccgcgacgagcaccagcactggttcaaggacatgcgcttcagcagccagatcaaggacgaggagggcaaccccgcctttgccatcgtcaacaaggccactggcctcgccgtcaagcactcgctcggccagtcccacccggtgaagctcgtgccattcaacccggagtacctcgacgagtccgtgatgtggacggagagcagcgacgtcggcaagggcttccgctgcattcgcatggtgaacaacatccgcctcaacttcgacgccctcaacggcgacaaggaccacggcggcgtgcacgacggcaccaccgtcgtcctctgggagtgggccaagggcgacaaccagagctggaagatcctcccctggggcgaagaggcctacgccggaggcagcgccaacgccccccgcggcggctcctcagagcccaccgtgcgcatcttctgcaaggcagacgacggcttcagcgccaccgtccgcaacggcgctgtggtcctcgcgcccaccaacccccgcgacgagtaccagcactggttcaaggacatgaggcacagcaaccgcatcaaggacgaggaaggctacccggccttcgccctcgtcaacaaggtgacaggcgaggccatcaagcactcccaaggcgagggccaccctgtgaagctggtgccatacaacgccaactaccaggacgagtcagtgttgtggactgagagccgcgacgtgggcgccggcttccggtgcatccgcatggtgaataacatctacctcaactttgacgctctccacggcgacaaggagcacggcggcgtgcgcgacggcacctccctcgtgctgtggaagtggtgcgagggcgacaaccagcgctggaagatccttccctggtaaacgtgtcatgctgctgaagctgagttgatcgccaccgtgacccggagttggtagagatcggcctgtgatctgttgccgtgtcgttagaataaaagtcgtgtgcggttggtgatgtgtccgtgagtgtgtgtttagtttctgtcctgtcgttgtgtcctgctatggcgagctatccgatgtaataagcatttggcacttgtgcttgtttttcaaaaaaaaaaaaaaaa

SEQ ID NO: 4496 - protein, 347 aa, Triticum aestivum
  misc_feature: Ceres CLONE ID no. 909663
  misc_feature: Ceres CDNA ID no. 35389240
  misc_feature (321)..(342): Pfam Name: Ricin_B_lectin PFAM Desc: Ricin
  misc_feature: Homolog of GI Number: 34902150 NR Desc: Putative r40c1 protein
  misc_feature: Homolog of GI Number: 1296955 NR Desc: osr40c1
  misc_feature: Homolog of GI Number: 1658313 NR Desc: osr40g2
  misc_feature: Homolog of GI Number: 50940087 NR Desc: r40g2 protein
  misc_feature: Homolog of GI Number: 50940089 NR Desc: putative r40c2 protein
  misc_feature: Homolog of GI Number: 50940085 NR Desc: putative r40c1 protein
  misc_feature: Homolog of GI Number: 50940091 NR Desc: r40g3 protein
  misc_feature: Homolog of GI Number: 66277464 NR Desc: stress responsive protein
  misc_feature: Homolog of GI Number: 2078483 NR Desc: antifreeze glycopeptide AFGP polyprotein precursor
  misc_feature: Homolog of GI Number: 72547041 NR Desc: proteophosphoglycan ppg1
  misc_feature: Useful for making plants with increased biomass
  misc_feature: Useful for sterility
MFGFGHHGHHGQNPPAHAPAAAGGNQPTFKIFCKADEGYCLSVRDGNVVLAPSNPRDEHQHWFKDMRFSSQIKDEEGNPAFAIVNKATGLAVKHSLGQSHPVKLVPFNPEYLDESVMWTESSDVGKGFRCIRMVNNIRLNFDALNGDKDHGGVHDGTTVVLWEWAKGDNQSWKILPWGEEAYAGGSANAPRGGSSEPTVRIFCKADDGFSATVRNGAVVLAPTNPRDEYQHWFKDMRHSNRIKDEEGYPAFALVNKVTGEAIKHSQGEGHPVKLVPYNANYQDESVLWTESRDVGAGFRCIRMVNNIYLNFDALHGDKEHGGVRDGTSLVLWKWCEGDNQRWKILPW

SEQ ID NO: 4497 - DNA, 517 bp, Triticum aestivum
  misc_feature: Ceres CLONE ID no. 910058
  misc_feature: Ceres CDNA ID no. 40351488
  CDS (87)..(293): REFERENCED BY SEQ ID NO: 4498
atcacaaactcgagagcagagagcacctgcacagcaatcgccactgcactagttctactgttgcgtttctctgtgcgatttcgaccatgagctacccgccaccgggcaccgcttacccgcagccaggccaggaggcctacccgccgccggcgtacggcgctccgccgcctgtcgccgcctactaccagcagcagcaggccccgccgccggaaccggaggacagcggcgacggcttctggaaaggatgttgtgctgcgatttgctgctgctgtctgctcgacacgtgctgctgatcacaagagttcgtaccgccaacaccatgcaatcctacgatgatctacatctactaagagctgctcatatatagtttgtttctatcgtacgtagtaaattttttttttttttgcggtttatcgtacgtactatttgtgctgttcggatcgagatttgtatgacggtgtactactacctccgttcggaaataaatgacgttttagtttcaaaaaaaaaaaaaaaa

SEQ ID NO: 4498 - protein, 68 aa, Triticum aestivum
  misc_feature: Ceres CLONE ID no. 910058
  misc_feature: Ceres CDNA ID no. 40351488
MSYPPPGTAYPQPGQEAYPPPAYGAPPPVAAYYQQQQAPPPEPEDSGDGFWKGCCAAICCCCLLDTCC

SEQ ID NO: 4499 - DNA, 1360 bp, Triticum aestivum
  misc_feature: Ceres CLONE ID no. 910096
  misc_feature: Ceres CDNA ID no. 24766539
  CDS (145)..(1146): REFERENCED BY SEQ ID NO: 4500
aggtttgcagtagcgaggagtccatcccaccaagcttaaataacggccacccattcgcctcgtctcactatctctcccgttgtcgtcgcctcctcctaaaccactctccctatccccgtgtccagaagctaccccccggctccaatggcggcgaaggaaccgatgcgcgtgctcgtcaccggcgccgcaggacaaatcggatatgctcttgttcccatgattgccaggggagttatgcttggtgcagaccagcctgttattctgcatatgctggatattgaatttgctgctgaagctcttaaaggcgtcaagatggagttgatcgatgccgcatttccacttctcaagggagttgttgcaacaactgatgttgtcgaggcctgcactggtgtgaatgttgcggttatggttggtggattccccaggaaggaaggaatggaaaggaaggatgttatgacgaaaaatgtttcaatctacaaagctcaagcatctgctcttgaagctcatgcagcccccaactgcaaggttttggttgttgccaacccagcaaacaccaatgctctcatcctgaaggagtttgctccatctatccctgagaagaacatcagttgtttgacccgcctagaccacaacagggcactcggtcagatttctgagagacttggtgtccaagtttctgacgtgaagaatgctattatctggggtaatcactcgtccagtcagtaccctgatgttaaccacgccactgtgaagacttccagtggagagaagcctgttcgtgaacttgttcaagatgatgaatggctaaacggggagttcattgccactgtccagcagcgtggtgctgcaatcatcaaagcgaggaagctctccagtgctctctctgctgccagctcagcttgtgatcacatccgtgactgggttctgggaaccgccgagggaacatttgtttccatgggtgtgtactctgatggttcatacggtgtgcctgctggtcttatctactccttcccagtaacgtgcagtggtggtgaatggacaattgttcaagggctcccgatcgatgagttctcgaggaagaagatggatgccaccgcccaggagctgtcggaggagaaggcgctggcctactcatgcctcgcgtaaatccacattcgaagggcagctgctcctctgatgttttgaataaatgaaaccttccgctccttagaaactctcgtctccacccagaacagccgcacatcgcgatgcatgctccttttcgctggttttcccagtgtgtatgaatgaggcttgtagctccccttttgcctgatgatttacaggacagtacatttgctggataaaaaaaaaaaaaaaa

SEQ ID NO: 4500 - protein, 333 aa, Triticum aestivum
  misc_feature: Ceres CLONE ID no. 910096
  misc_feature: Ceres CDNA ID no. 24766539
  misc_feature (158)..(332): Pfam Name: Ldh_1_C PFAM Desc: lactate/malate dehydrogenase
  misc_feature (7)..(156): Pfam Name: Ldh_1_N PFAM Desc: lactate/malate dehydrogenase
  misc_feature: Homolog of GI Number: 15982948 NR Desc: NAD
  misc_feature: Homolog of GI Number: 21593565 NR Desc: cytosolic malate dehydrogenase
  misc_feature: Homolog of GI Number: 10334493 NR Desc: cytosolic malate dehydrogenase
  misc_feature: Homolog of GI Number: 42521311 NR Desc: cytosolic malate dehydrogenase
  misc_feature: Homolog of GI Number: 77999077 NR Desc: malate dehydrogenase
  misc_feature: Homolog of GI Number: 10798652 NR Desc: malate dehydrogenase
  misc_feature: Homolog of GI Number: 52851186 NR Desc: malate dehydrogenase
  misc_feature: Homolog of GI Number: 83283965 NR Desc: malate dehydrogenase
  misc_feature: Homolog of GI Number: 20259605 NR Desc: putative cytosolic malate dehydrogenase
  misc_feature: Homolog of GI Number: 24528075 NR Desc: cytosolic malate dehydrogenase
  misc_feature: Utility: ABA Useful for making plants with enhanced tolerance to drought
MAAKEPMRVLVTGAAGQIGYALVPMIARGVMLGADQPVILHMLDIEFAAEALKGVKMELIDAAFPLLKGVVATTDVVEACTGVNVAVMVGGFPRKEGMERKDVMTKNVSIYKAQASALEAHAAPNCKVLVVANPANTNALILKEFAPSIPEKNISCLTRLDHNRALGQISERLGVQVSDVKNAIIWGNHSSSQYPDVNHATVKTSSGEKPVRELVQDDEWLNGEFIATVQQRGAAIIKARKLSSALSAASSACDHIRDWVLGTAEGTFVSMGVYSDGSYGVPAGLIYSFPVTCSGGEWTIVQGLPIDEFSRKKMDATAQELSEEKALAYSCLA

SEQ ID NO: 4501 - DNA, 1643 bp, Triticum aestivum
  misc_feature: Ceres CLONE ID no. 911891
  misc_feature: Ceres CDNA ID no. 40041366
  CDS (17)..(1069): REFERENCED BY SEQ ID NO: 4502
aaccgaatccagcaccatgccattgccgctgcccgccgtgggcacggtccccgcgtcggcgatagctccggtcgccgccgccgcggcagcagcaccccttaggtaccgtcccatacgactccgcgcatctccctcgacggtttcctccccttcaacctctgcgatctccagcccgccgcccccgccgtctgcgaggcattcccgcaaacacctggcgggcagaggcgacgccccggcgaggccctcaaagggccgggtgttcttcctcgacgtcaacccgatatgcttccgcggatcccagcgtagcctcagcgccttcgcgcgctggctcgcgctcttcttcacgcacgtcagcctccgcgaccccgttgtcgctgtctttgatggggcaggcgggaacgagtaccggaggcggctgctgccgtcctacaaagcgcaccggactcgcggcgtaggcaccggtgccgattcacgcgtggttgacgtgctccgcgagtgcaatgttccggttgtgcaagtcgatggatacgaggcagatgatgtagtggctaccttgacagagcaagtattacagaaaggttatagagttgtcattgcctcaccagacaaggacttcaagcagttgatatctgaagatgttcagttagttatgcccattcctgagattggccgatggtccttttatacgctgaggcattatgttgcacaatacaagtgcgatccaactgtagatttgagcctcagatgctttatgggtgatgaagcggatggtgttcccggaatccagcacctggctcctggttttggtcgcaagactgcagtgaaactactgaacaaacatggttcattagaaaacctacttaatacagctgcagttagaacggtaggcaaggagtatgcccaggatgttctagtcaagcatgcagattacttgcggaaaaactatgaagttctcagcttgaagagggatgtaaatgttcagcttgatgacagatggttatcagcgagggacacttgtaatgacaccagtgtgttatctgacttcattcttaaattcagcaaaggatagaagctaaatggcaggtttcagagctggaacgagcagagaccgtgtctaaccaacccacgctgctttcatctcgtcgaacgagaaggtgatgctggctacaagatgcggagatgtggtccaggagcaggccagtactagtacgtgtgcagcgtcacagtgacccatcgtctcacccgaagacgggcaccggacatgctatctcagcttttttgtcatgctagtagcatatcttaaaggagccaacaaagattcaattcaagaagggagagcatctgcaggcagagatctgatctgatctgatctgatgtaatgtaatcctcggatgctactactcgctgctgctaattgaatactgcgtgtgttggtctcgcttcgtgggacgctggccaaatctagcgaggctttgttgtggcatcggatgaccaccaggctagactgcgtatgataaatctgctctgcttgtttgtagtagtagtacgtagctttttctttcgttgattgattgattcagtttgataatggagaatttcacgacgggcccgcgggaacgggaagctgaaaaaaaaaaaaaaaa

SEQ ID NO: 4502 - protein, 350 aa, Triticum aestivum
  misc_feature: Ceres CLONE ID no. 911891
  misc_feature: Ceres CDNA ID no. 40041366
  misc_feature (118)..(142): Pfam Name: 5_3_exonuc_N PFAM Desc: 5'
  misc_feature (246)..(324): Pfam Name: 5_3_exonuc PFAM Desc: 5'
  misc_feature: Homolog of GI Number: 56784844 NR Desc: putative DNA polymerase I 3'
  misc_feature: Homolog of GI Number: 56784845 NR Desc: putative DNA polymerase I 3'
  misc_feature: Homolog of GI Number: 50902152 NR Desc: putative DNA polymerase I
  misc_feature: Homolog of GI Number: 52421279 NR Desc: At1g34380
  misc_feature: Homolog of GI Number: 12323855 NR Desc: DNA polymerase type I
  misc_feature: Homolog of GI Number: 42562521 NR Desc: 5'
  misc_feature: Homolog of GI Number: 15606735 NR Desc: DNA polymerase I 3'
  misc_feature: Homolog of GI Number: 4731571 NR Desc: DNA polymerase I
  misc_feature: Homolog of GI Number: 4090935 NR Desc: DNA polymerase type I
  misc_feature: Homolog of GI Number: 67985159 NR Desc: DNA polymerase A
MPLPLPAVGTVPASAIAPVAAAAAAAPLRYRPIRLRASPSTVSSPSTSAISSPPPPPSARHSRKHLAGRGDAPARPSKGRVFFLDVNPICFRGSQRSLSAFARWLALFFTHVSLRDPVVAVFDGAGGNEYRRRLLPSYKAHRTRGVGTGADSRVVDVLRECNVPVVQVDGYEADDVVATLTEQVLQKGYRVVIASPDKDFKQLISEDVQLVMPIPEIGRWSFYTLRHYVAQYKCDPTVDLSLRCFMGDEADGVPGIQHLAPGFGRKTAVKLLNKHGSLENLLNTAAVRTVGKEYAQDVLVKHADYLRKNYEVLSLKRDVNVQLDDRWLSARDTCNDTSVLSDFILKFSKG

SEQ ID NO: 4503 - DNA, 1141 bp, Triticum aestivum
  misc_feature: Ceres CLONE ID no. 912847
  misc_feature: Ceres CDNA ID no. 24766540
  CDS (193)..(813): REFERENCED BY SEQ ID NO: 4504
atcttttgtcctcctcctccgttgcgcagttggctcgcttgcttgcttgctgtaggtgagtgctgctggagacgggagccgggccgaggcggatcggggagaaggtgggaggcgggcgggtggtagatccggcgggcgtggctcgcgagaaggttggtgcgaggttggtggaggaggggagagaaggaggggatggagcggaaggcggtggtggtgtgcgcgctcgtcggcttcctcggcgtcctctccgccgcgctaggcttcgccgccgagggcacccgcgtcaaggtttcagatgtgcaaaccgactcttctccaggtgaatgcatatacccaagaagccctgcgttaggccttgggttgatgtctgcagttgcccttatggtcgcacaggctattataaatacagttgctggttgcatctgttgtaagaggcatccggttccctcagacactaactggagtgtggctctgatctcattcatcgtatcttgggtcactttcataatcgcgttccttctcctgctgaccggagccgcgctgaacgaccaaaggggccaggagaacatgtacttcggcagcttctgctacgtcgtcaagccgggggtcttctccggaggggcggtgctctccctcgcgagcgtggccctggccatagtctactacgtggccctgacgtcgtcgaaagccccgccgagctggggcccacagcagaaccagggcatctccatgggccagcccgtgatcccgcagcagagcagcgagccggtgttcgtccatgaggacacctacaaccggcaacgtttcccatgagtgatcacagccatattcaagccagccatttcgagggtcgcccatgaggacacttgcaaccggcagcagttcccgtgatcgcagtcgtagtacctaagccgtttctacggcccgcatgaacgctatgttggcgagtttggtttgtatagccctgcaggttagaacaatagcagcagtttggttaccgttattattagctaggttcatcagtcttctctttttctttgtttgagacttgagaaaggcggcggcatgcctgtttcgtcggtatggatatttgaattttaaatgaactgggtaatgttgaggttgaaaaaaaaaaaaaaaa

SEQ ID NO: 4504 - protein, 206 aa, Triticum aestivum
  misc_feature: Ceres CLONE ID no. 912847
  misc_feature: Ceres CDNA ID no. 24766540
MERKAVVVCALVGFLGVLSAALGFAAEGTRVKVSDVQTDSSPGECIYPRSPALGLGLMSAVALMVAQAIINTVAGCICCKRHPVPSDTNWSVALISFIVSWVTFIIAFLLLLTGAALNDQRGQENMYFGSFCYVVKPGVFSGGAVLSLASVALAIVYYVALTSSKAPPSWGPQQNQGISMGQPVIPQQSSEPVFVHEDTYNRQRFP

SEQ ID NO: 4505 - DNA, 1533 bp, Triticum aestivum
  misc_feature: Ceres CLONE ID no. 913089
  misc_feature: Ceres CDNA ID no. 40041367
  CDS (75)..(1106): REFERENCED BY SEQ ID NO: 4506
accgccgcagcgcatgcctcctttcccagatccacaccatcgaggagtgtgacgaacttgcccacccatgtggcatgtgcgtcagtccccagatccaggctggtgaggaggatattggaacaactcgtcgcagacgtcaccgcaagccgccgctcctcggcatcttcgagaactgcagcaaggaaggtattgtgttcacccccattccgcccctagttgccgactacatctctccggagcgcttctcccttggacgtccccgacttacctatgtgctcgactgccgccacggtcgcgtacttatcgaagacctggagcagaaatacctcattgtgtgcgaccccatcacaagtgagaagtgtcgcgtggctcttccatgcaagttcaagtggagctttgtcggagcggtgctctgcacagccggctacaaggggccctccagccccttcaaggtggtattggtgtcctgggatggcgtggataatcaactcctcgcctacgtttactcctcgatgactgacacatggggcaatctcatatcagttgaggctccagataatacttattttcatggttgtcgtagcaccctcgttggtaatgtcctttactggccagttatgaatgggagaggtacaatacttgagtttgatttggacagccagaaccttaccatgatcaaggggcctcctggtatgaatgatactggcaactttcagatcatccaggcagaggatggcgccgttggtcttgccatgttgtcctatcataaccttcaaatgtggcagaggaaggtcaattgtcaaggtgtttgcatatggttgttgcagaaaacggtttcattgcacaagcttcttaagatccctcctcggggcaataaaaggatcaaatggcaggacaaatttctgggctatgaagaggataacgatgtaatctttttatatagatacgaaagtgtctatatggttcaactcaagtcaatgcaattcaggaaatttaatggaacccgttccagggagtatagggagtgttgttatcctttcacgggtttcttcccaccaggcacaaccattactagtggatgtaaagaagctgaaatgttaggatgactgcctggttcgatattttaatgtgctgaaatggttcaacaggtgaagaaagggctgctgcaggagttagttgtcactttgtcacatcacatcaatgtggtcagcggtgtttatatgttatctgaatttttttaccgtggcttttagtctagctaagctcctaagaatagccaacccagggagtttgagcttcccaagtcagatttcaagatgtttttactgctgggttgtgcttggctgctcttctctcgagccaaaagagttttgtgtagtgctgagagtttttgagatgtcgtttaaatgactgatgctgaaggaactagaaccctgaaactcagattgttgatgttggctgctgctacttgctaaaattgtggtggtgttcttagtttcctgtgaaaaaaaaaaaaaaaaaaaaaaaaaaaaa

SEQ ID NO: 4506 - protein, 343 aa, Triticum aestivum
  misc_feature: Ceres CLONE ID no. 913089
  misc_feature: Ceres CDNA ID no. 40041367
  misc_feature: Homolog of GI Number: 78707749 NR Desc: F
  misc_feature: Homolog of GI Number: 78707762 NR Desc: F
  misc_feature: Homolog of GI Number: 78707763 NR Desc: F
  misc_feature: Homolog of GI Number: 78707764 NR Desc: F
MCVSPQIQAGEEDIGTTRRRRHRKPPLLGIFENCSKEGIVFTPIPPLVADYISPERFSLGRPRLTYVLDCRHGRVLIEDLEQKYLIVCDPITSEKCRVALPCKFKWSFVGAVLCTAGYKGPSSPFKVVLVSWDGVDNQLLAYVYSSMTDTWGNLISVEAPDNTYFHGCRSTLVGNVLYWPVMNGRGTILEFDLDSQNLTMIKGPPGMNDTGNFQIIQAEDGAVGLAMLSYHNLQMWQRKVNCQGVCIWLLQKTVSLHKLLKIPPRGNKRIKWQDKFLGYEEDNDVIFLYRYESVYMVQLKSMQFRKFNGTRSREYRECCYPFTGFFPPGTTITSGCKEAEMLG

SEQ ID NO: 4507 - DNA, 943 bp, Triticum aestivum
  misc_feature: Ceres CLONE ID no. 913530
  misc_feature: Ceres CDNA ID no. 25446248
  CDS (63)..(674): REFERENCED BY SEQ ID NO: 4508
ctttctttcttcccctccgtccactcatagcttctgctcttcgggtcgaccctccaaaatccatggcgacgctcgccgtgccgcctaccgccgccgccctgcccgcccaggaagacccacgcaccggcgagaagccatctgccggcgactctgctgcggatccgagcgatatcgactccgggtgggttttcctcgggaagtctgatgtggttccggcggaccaggccgcggccgccgtcgacgccgcgggccgccgacgcctcggcttctcgccactgccgatgttgcctatctgggtgcagatggtgctcggaggcgtagtctacacggccgtgccgttctacaatagggccaggcagatcgaagacaaggcgatcgaaaacgtggaaactgctttggacgttttggagcgagcctccgaggtgacggagaagttcgccgctaatgtggccaattccctaccggaggatgggtccctgcacaagttggccgaggagcttgagtacattgcggaggaagtcgataaggatgcacacaaggctgaagtcatgattaagaagattgaagcgctcagcgacaagattgacgccgcagtggagcctgtcatcgaaaacctcgaggaggagttcaagccaaacccagcatcccacgcaggatcagacgcccagaaatgaccgttcacataaatcggaggaaaacacgtcccaaagtgtcccctgttgtacatatgttgctgtttcttctttccttctttctaagtgccaacttgtaaatatgttcgttgtgccctatgaactagaaggaccctatggttacagtaagaaatggtggtggtgtgcttggtgcccggatctgaagcaccttgtaatcatgataatactaagaacactgcatctgaagaatggatgtgtatgtgtgttgcactacaaaaaaaaaaaaaaaa

SEQ ID NO: 4508 - protein, 203 aa, Triticum aestivum
  misc_feature: Ceres CLONE ID no. 913530
  misc_feature: Ceres CDNA ID no. 25446248
  misc_feature: Homolog of GI Number: 50924616 NR Desc: OSJNBa0086B14.7
  misc_feature: Homolog of GI Number: 13487781 NR Desc: PTP
  misc_feature: Homolog of GI Number: 13446377 NR Desc: plastid
  misc_feature: Homolog of GI Number: 13446375 NR Desc: plastid
  misc_feature: Homolog of GI Number: 13446373 NR Desc: plastid
MATLAVPPTAAALPAQEDPRTGEKPSAGDSAADPSDIDSGWVFLGKSDVVPADQAAAAVDAAGRRRLGFSPLPMLPIWVQMVLGGVVYTAVPFYNRARQIEDKAIENVETALDVLERASEVTEKFAANVANSLPEDGSLHKLAEELEYIAEEVDKDAHKAEVMIKKIEALSDKIDAAVEPVIENLEEEFKPNPASHAGSDAQK

SEQ ID NO: 4509 - DNA, 1905 bp, Triticum aestivum
  misc_feature: Ceres CLONE ID no. 913587
  misc_feature: Ceres CDNA ID no. 40041368
  CDS (2)..(1543): REFERENCED BY SEQ ID NO: 4510
ctttcacacgcgcgcagacgaggacgacggcgacgaggaggaggggggctacgacgcggccggcttggaggaggcggccgccggcgactccttctcccactcgctgaaagagtgccagaagcagctgcagctcagggcggaggcgcggccggcggcggccgcgcatgagctcggcaacggcgacgcgttcggggggatcgagctgctcgttctctcgcccaggtgcttgctcggggctgccgtgggagggatgagcaagagctcgaccgcgtcgtccagaagcagatcaggcacgtttccgagccccgggacgcccaactaccaccggcattgccctggcaacatgcagtaccccaagggctggagctcggagcgggtgccgctgggggcaggtgccaacaggaggtatgggggcagcggggtcgtgctccctttcaacaatgggaggaagctgccgtcgaaatgggaggacgccgagaagtggatcctgagcccggtctcctgtgatgggatggggaggatgtcggcaccggcgccgcatcatagacggccaaagtccaagagtgggccgcttggtcaccctgccggtgttccaggagcttatgcatctgtttcgccgatgattccctgcttcgatggtgttctggccgccgctaattttgcggctcattcgcctttctctgctggggttctcatgccagggcatgcgcgcaacggcgacttcagcagtggaagagccagaagtggggatgatggaagcagtaggtcgtattcggctgagaaggagccctatatttggagatcagcaagtacgcatgcgtggacagaaacacttatggaggcatctgcctttgctcatatctcagaggaagctgcacaagatgatgtcttacaaggtccacagggagcaactcctgtgatttccagtccaatcataaagaaagatgttgccacacaaatgagtcctgatgacagtataatatcgtcctccccaaaagcaaggcattcctgctccagcttgccgtcaggacatgctattagagaatcaaatagtcatacacctaaggttgaagttagggatgtgcaggtagatgatcaagtaactgttacgcggtggtccaagcgacatgtaacacgaggctctgataagcgatcaacaaatattgttgaatggaggaagaagactacagaagcccgggcaccatcttttgatgaaaaagaaagagaaagatgcatatcaaagtgcaagagagaggaagcaaagatcactgcttgggaaaatctgcagaaagcaaaagcagaggcagcaattcggaagttggagatgaagcttgaaaagaaaaggtcactatcgatggatagaattttgggcaaactacgttctgctcaaaagaaagcagaaggcatgcgcactacagtttctgtgagcgaggatcagtgtgctgtcagtgaagatcagtgtgctgtgagggcaaccaagaaggcatccttgagaaggactagcaagcctttcagctgctgtttcacctaccatgcttgctagttgtgatatggttggtatctacaatgattgtagaaactttttgctcaagtcagccgaccgacaaaccgaagtttgactgcaaatgttcgccgttgcagctggagatagcaggagtagttagaagaagagagctttgcgtggtctgatgaatgaagcactcgaccggagtgtcagaaaatcgaagcattggagcagagcccactcttgtagctgatgatatggagtagctcactcggtactctgtatctgtaaaccaagcaagtgctgtagatcaggaagctcccttctcgagcttttctctagttgaactccggacggactgatcgggccggttctcgtgggctgcaaaaaaaaaaaaaaaa

SEQ ID NO: 4510 - protein, 430 aa, Triticum aestivum
  misc_feature: Ceres CLONE ID no. 913587
  misc_feature: Ceres CDNA ID no. 40041368
  misc_feature (308)..(424): Pfam Name: Remorin_C PFAM Desc: Remorin
  misc_feature: Homolog of GI Number: 50913115 NR Desc: remorin protein
  misc_feature: Homolog of GI Number: 51536297 NR Desc: remorin protein
  misc_feature: Homolog of GI Number: 42571771 NR Desc: remorin family protein
  misc_feature: Homolog of GI Number: 50928785 NR Desc: OSJNBa0058K23.18
  misc_feature: Homolog of GI Number: 53850525 NR Desc: At1g53860
  misc_feature: Homolog of GI Number: 77551946 NR Desc: Remorin
MSKSSTASSRSRSGTFPSPGTPNYHRHCPGNMQYPKGWSSERVPLGAGANRRYGGSGVVLPFNNGRKLPSKWEDAEKWILSPVSCDGMGRMSAPAPHHRRPKSKSGPLGHPAGVPGAYASVSPMIPCFDGVLAAANFAAHSPFSAGVLMPGHARNGDFSSGRARSGDDGSSRSYSAEKEPYIWRSASTHAWTETLMEASAFAHISEEAAQDDVLQGPQGATPVISSPIIKKDVATQMSPDDSIISSSPKARHSCSSLPSGHAIRESNSHTPKVEVRDVQVDDQVTVTRWSKRHVTRGSDKRSTNIVEWRKKTTEARAPSFDEKERERCISKCKREEAKITAWENLQKAKAEAAIRKLEMKLEKKRSLSMDRILGKLRSAQKKAEGMRTTVSVSEDQCAVSEDQCAVRATKKASLRRTSKPFSCCFTYHAC

SEQ ID NO: 4511 - DNA, 1562 bp, Triticum aestivum
  misc_feature: Ceres CLONE ID no. 913923
  misc_feature: Ceres CDNA ID no. 35383312
  CDS (161)..(1237): REFERENCED BY SEQ ID NO: 4512
agcaaaccaacttcctctccttcctccgctcccaccgaaccatcctcatcacagcctctccttctcttcgttcgctgctcccgtcgtagcccacgcatcttgttgcttttctccaggcgcttcttcagtcttcctccctgtgtcggtccgcgatctcgtcatgatgaaccacgccacctttgctgccgaggacgcggtcaccgccgtgacggcgccggcgcagccgggtcgccattttgtgtcgctcccgccgcggagggcgcgcgactgcaggaaggcctccctgggccgcatggacctcgccacctcggcggtgctgatggccgggtctctgctggactcgatgaaggcctcctcgccccgccacgccatgtcccccgccggcgccgaccacgaggagtggatcgagaagcacccctcagcattggagtggttcgagggcgtgctcgcggcggccgaggggaagcagatcgtcatgttcctcgactacgacggcaccctttcaccgatcgtcgaggaccccgaccgcgccgtcatgaccgaggagatgagggacgcggtgaggggcgtcgcccagcatttcccgaccgccatcgtgagtgggagatgcagagacaaggtgttcaactttgtgaaactggaggagctgtactatgccgggagccacggcatggacatcaagggccccaccaaagtgtctaaccacaaggcaaaggctgacgaggttctgtgccagccggcgaccgagttcttgcctgtcattcaggaggtgtatgagacgctgaccgcgaagatggagtccatcccgggggccatggtggagaacaacaagttctgcctctcggtgcacttccgctgcgtcgaggaggcggaatgggacgctctgggcagggaggtgaaggcggtgctggacgactacccgaaactctgcctcaccaaggggagaaaggtcctcgagatccggcccttcatcaagtggaacaaaggaaacgcccttaagttcttgctcaagtctctcggttatgcagggcgtggcgacgttttcccgatatatattggagatgaccgcacagacgaggatgcgttcaaggtgctgcgcaacatgggacaaggcatcgggatccttgtgaccaagtttcccaaggacactagcgcatcgtactctctgcgtgagcctgctgaggtaaaggagttcatgcgcaagctagtgaagagcaacggggtaaagaagggttaattcatcaatcaacaaccttctagctctaactcaacatgaagatcgagcaggctatatagcttgtacatcaagtctagcttgtttcctttttggacttggtgttgtctctcctttcatctagtagaacaatgcatgcatgcgtgttagggtcgatgtagaagatccagatcgatcaatgacccatgctaggccttggctctgaaggtttctattactgtatccttctctcaaggtcttgtaattagccttcccttagctatgacagaaatggtattgaaaaaaaaaaaaaaaaaaaaaaaaaaaaaaaagaaaaaaaaaaaaaaaa

SEQ ID NO: 4512 - protein, 358 aa, Triticum aestivum
  misc_feature: Ceres CLONE ID no. 913923
  misc_feature: Ceres CDNA ID no. 35383312
  misc_feature (107)..(340): Pfam Name: Trehalose_PPase PFAM Desc: Trehalose
  misc_feature: Homolog of GI Number: 50939353 NR Desc: putative trehalose
  misc_feature: Homolog of GI Number: 50945643 NR Desc: putative trehalose
  misc_feature: Homolog of GI Number: 50912861 NR Desc: putative trehalose
  misc_feature: Homolog of GI Number: 50582734 NR Desc: putative trehalose
  misc_feature: Homolog of GI Number: 51972037 NR Desc: putative trehalose
  misc_feature: Homolog of GI Number: 42568786 NR Desc: trehalose
  misc_feature: Homolog of GI Number: 30683008 NR Desc: trehalose
  misc_feature: Homolog of GI Number: 21554408 NR Desc: trehalose
  misc_feature: Homolog of GI Number: 51971977 NR Desc: putative trehalose
  misc_feature: Homolog of GI Number: 10178176 NR Desc: trehalose
  misc_feature: Useful for delaying flowering time
  misc_feature: Useful for making ornamental plants with modified leaves
  misc_feature: Useful for making shorter plants
MMNHATFAAEDAVTAVTAPAQPGRHFVSLPPRRARDCRKASLGRMDLATSAVLMAGSLLDSMKASSPRHAMSPAGADHEEWIEKHPSALEWFEGVLAAAEGKQIVMFLDYDGTLSPIVEDPDRAVMTEEMRDAVRGVAQHFPTAIVSGRCRDKVFNFVKLEELYYAGSHGMDIKGPTKVSNHKAKADEVLCQPATEFLPVIQEVYETLTAKMESIPGAMVENNKFCLSVHFRCVEEAEWDALGREVKAVLDDYPKLCLTKGRKVLEIRPFIKWNKGNALKFLLKSLGYAGRGDVFPIYIGDDRTDEDAFKVLRNMGQGIGILVTKFPKDTSASYSLREPAEVKEFMRKLVKSNGVKKG

SEQ ID NO: 4513 - DNA, 1332 bp, Triticum aestivum
  misc_feature: Ceres CLONE ID no. 914452
  misc_feature: Ceres CDNA ID no. 25891114
  CDS (92)..(1105): REFERENCED BY SEQ ID NO: 4514
acgattactttagccatttgctgcgcacatctcggtgagctcgctgtcacagtgcactggtggcggcggcggcgggcaggacgaagggaagatggcaccgccgcggcgcctgtgcgtgaccggcggcggcgggttcatcgcctcgtggctcgtcaagctgctcctctcccgcggctatgccgtccacgccaccctccgcgacccatgtgaccccaagaatgtccacctcaagcagatggacgaagcccgggagaatctgcacctgttcaaggccgatgtgctcgactacgacacgctaacacgtgcgtttgaggggtgtgagggggtcttccacctcgccacaccggtgcctgaagataagattgttgatcctgagtcagaagtattggctcctgctgtgaaaggtacttcaaatgtgctgaaggcctgctcagctatgaaggttcagaaggttattgtcttgtcatccaatgctgctgttgattttaacccgaattggcctcaagacagactcaaagatgagagtagctggtcagacaaagacttctgccaggagaatgaggactggtattctatcgccaagattgtggctgaacaggcatccttggaatattcagagaaacatggattaaacgttgttacgctttgccctcctttagtttttggcccattgttgcagccaactgtgaatacaagtagcaaattcttaatctatgttattaatggaggccctgacgtgatgagcaacaagctgtggcacattgtagacgtccgtgacgtggcggacgccttgctgcttgtgtacgagaagccagaatcatctgggagatacatttgttcgccgaatagcatctgcgcaaaggacttggtggacttgctgaggaagatgtacccacagtacagctatgtgaacaaattcgttgacgtggaccgtaaagcgccgctgtcatcgcagaagctgaatggtctgggctggaagccgaggaagctggaggagacgctctcggacagcgtgggctgctacgagaaggccggccttctgcagggttccgccgcgcgtccttgccggctcccgcatctgttccgtctggctggtgatcagtgaatgaaccgtggtggctggtgctttgtttgttttatggttgaacttctgtaagctgttgtgtcgctggacggagtctcgcaacagcaacaatggccgaacaccactagtggctggggcgtgccaaatgcgctatgctttgctgcgtaacagcgatgaaataaataaaatctgtccctcggcctgctcgtcctgacggccgcaatcctgctacaaaaaaaaaaaaaaaa

SEQ ID NO: 4514 - protein, 337 aa, Triticum aestivum
  misc_feature: Ceres CLONE ID no. 914452
  misc_feature: Ceres CDNA ID no. 25891114
  misc_feature (160)..(198): Pfam Name: Epimerase PFAM Desc: NAD dependent epimerase/dehydratase family
  misc_feature (5)..(142): Pfam Name: adh_short PFAM Desc: short chain dehydrogenase
  misc_feature: Homolog of GI Number: 51091030 NR Desc: putative cinnamoyl
  misc_feature: Homolog of GI Number: 12323980 NR Desc: putative cinnamoyl
  misc_feature: Homolog of GI Number: 51091033 NR Desc: putative cinnamoyl
  misc_feature: Homolog of GI Number: 6554472 NR Desc: putative cinnamoyl
  misc_feature: Homolog of GI Number: 23197694 NR Desc: putative cinnamoyl
  misc_feature: Homolog of GI Number: 30984536 NR Desc: At2g33600
  misc_feature: Homolog of GI Number: 9964087 NR Desc: cinnamoyl CoA reductase
  misc_feature: Homolog of GI Number: 2960364 NR Desc: cinnamoyl CoA reductase
  misc_feature: Homolog of GI Number: 9998901 NR Desc: cinnamoyl
  misc_feature: Homolog of GI Number: 50946201 NR Desc: putative cinnamoyl
  misc_feature: Useful for making shorter plants
  misc_feature: Useful for sterility
MAPPRRLCVTGGGGFIASWLVKLLLSRGYAVHATLRDPCDPKNVHLKQMDEARENLHLFKADVLDYDTLTRAFEGCEGVFHLATPVPEDKIVDPESEVLAPAVKGTSNVLKACSAMKVQKVIVLSSNAAVDFNPNWPQDRLKDESSWSDKDFCQENEDWYSIAKIVAEQASLEYSEKHGLNVVTLCPPLVFGPLLQPTVNTSSKFLIYVINGGPDVMSNKLWHIVDVRDVADALLLVYEKPESSGRYICSPNSICAKDLVDLLRKMYPQYSYVNKFVDVDRKAPLSSQKLNGLGWKPRKLEETLSDSVGCYEKAGLLQGSAARPCRLPHLFRLAGDQ

SEQ ID NO: 4515 - DNA, 2156 bp, Triticum aestivum
  misc_feature: Ceres CLONE ID no. 914461
  misc_feature: Ceres CDNA ID no. 40041369
  CDS (148)..(1806): REFERENCED BY SEQ ID NO: 4516
ttgaaacatctgttcaatgctgtaaggaaattcaagtcagatgtcattaaacgaaatccaacaatccacattgtcggctgccatctgttcctacaggtgtttgtgcttgacagcctcgagcttggccaactgaacaaaccacgcggaatgtacccaaggatagcgctttttgagcacgagtcgatgaagaagatgattgatatcacatcagtaaacatgggtggaggagaaatatcatttcacggggcatcggtcaaggctgaacaaaacatcagcaaaggtattgtctgcgcatcaaccgagcttgcaaatgaaaacattccgaggcattctaatacgacgaaacgagtccagatgccatctgcgcctattttaagagctacttacaataaaattggtccacaagatttttcaaaccacatacgtacaaactatccatcaatatccgatgagaagctcgggatacttctccgtgagcacaatgctcgaggtctggcaaacatttcagagatgaggcggtctttccagtcatcaatgttcacatttgcggacaagctcatcaactgcatcgctgagaattgttcttgttgcaaggccaacggacgtaaacaatgcatcctgaagagtgaaaatcaaaacagttgcaccaacttggccaacactcctatgcaagaaaaaatagacaattcgtttgttacccctgtttgcaacaaggtttctcccaggctggctggacaactcccaaacgacggtagctcgtcggccaatagctccattgcaaggaagaggggagttgtgttcagcccggccatccagacggaatcatcaaaaaaggtgtgtcttcggctggacgacccactccaagcagtttcccattcagcagtagatactgtcaacaactcatctctgtctgggaagcaagacactcgccgagaggttgccaatacgatttattcattctttgatgacctgactgctagcatagtcatgtactatgtcgagcaacgaccgagctctggatatgttacattcggaactacaaacgacaccgcgccagccaaaattcagataacaaagtgcaacatcgcccgcgacccatgggcaatcggttcagttccgatgccaccggcagtcccagtccttagagccataaaagattggttggctgtgtcatccacgttcgtccttgaaaggaaatggattatgcatccaaaaccaagactcatactgctcgacggcattgaaatccaacaacaactatcaggaaaagaacagcttagtcatgagatgtgtgctgttatttttaggaggctttcacaaatggacaagacctattcgaaggacactttgactatgttttggaggaagtttcttgagcctgatttctgcactgcagttttatccaatgccgatccattgaccattcagtcgatccgtgcaacatttacagaagaaaacgagttttttagcccagcctctagtcggatgtggcatatacctgcactcctaccggacggatgggccgtctacgcattcgacatggccaagcgaaggattttagtactagacccggccgtcggcccatttggttttagcaatagaaggatcaacatgcacacatatgtgtctgacctgcttcacgctgcactcttcagatgcatccaatctttatatgattcctggcactgcagttccggagaatggacccgtgcatttcctgtgatcatgttagagaacattgaaaaggaagactatggcgtgtgtgcttcgttttttgccaggaattatgatggtgacaaactctagatcccactaactaaagcgaacctggagattcacagggacctgatgctctatgaggttatgcgcctgcaaggcaatgaatctccagtcccttccgatgcacttgaagctattaaggcgtcattcgtagcgctgtagcgctttgattttggtatgttgatgctatttggcttagacgctagatgaatgaaccctcatatatgaatgtttccatccaagagtaaatgtttttaaggacactgttttcttatgcaaacattagtagttgatgttttgctaggtgcactgttgtaacacacttgttatcaatttcgtcctacccaattattttccgtggaaaaaaaaaaaaaaaa

SEQ ID NO: 4516 - protein, 552 aa, Triticum aestivum
  misc_feature: Ceres CLONE ID no. 914461
  misc_feature: Ceres CDNA ID no. 40041369
MYPRIALFEHESMKKMIDITSVNMGGGEISFHGASVKAEQNISKGIVCASTELANENIPRHSNTTKRVQMPSAPILRATYNKIGPQDFSNHIRTNYPSISDEKLGILLREHNARGLANISEMRRSFQSSMFTFADKLINCIAENCSCCKANGRKQCILKSENQNSCTNLANTPMQEKIDNSFVTPVCNKVSPRLAGQLPNDGSSSANSSIARKRGVVFSPAIQTESSKKVCLRLDDPLQAVSHSAVDTVNNSSLSGKQDTRREVANTIYSFFDDLTASIVMYYVEQRPSSGYVTFGTTNDTAPAKIQITKCNIARDPWAIGSVPMPPAVPVLRAIKDWLAVSSTFVLERKWIMHPKPRLILLDGIEIQQQLSGKEQLSHEMCAVIFRRLSQMDKTYSKDTLTMFWRKFLEPDFCTAVLSNADPLTIQSIRATFTEENEFFSPASSRMWHIPALLPDGWAVYAFDMAKRRILVLDPAVGPFGFSNRRINMHTYVSDLLHAALFRCIQSLYDSWHCSSGEWTRAFPVIMLENIEKEDYGVCASFFARNYDGDKL

SEQ ID NO: 4517 - DNA, 2618 bp, Triticum aestivum
  misc_feature: Ceres CLONE ID no. 914850
  misc_feature: Ceres CDNA ID no. 40041370
  CDS (81)..(2174): REFERENCED BY SEQ ID NO: 4518
gattcgaactcccctctgacctctccccacaccgcgactcaaatctagggttgcttcgctcgctctcctccgctccgcccatggccgacccgccgcccccggacgcgcacccggagcaatcccccgccaccgagaagccccccgcggcgcctctgacgcccgaacccgaggatgcggcggagcaggatgtcgagtcggaggtggatgaggagtacgtgagcgaccccgacgacgctctcccggagatgcgtcgccgggaggccagcgacgacgaggggtccgaggaaggtaggcggcctcccagggcgcggatcgaccccgaccacgacgacgacggccaaggtgccccggaggattacgagggcgaagtggaggaggaggaggacgaggacgaggaatactacgatgatttgttggatgatgaggaggtgggcgaggggctcgaggaggagtatgatggccacgctgtgccgcccaaggaggtcgccgccggccagggggaggcggacgagaagcctggggaggagggagctgaggctgaggctgaggctgaggctgacggcgaagagaagaaggagcaggagccattcgcggtgcccacctccggcgcgttttacatgcatgacgaccggtttcaggaggacggccggggccgacgcaggcgaatgcttggtgggaggaagttatgggatgctaaagacgatcaagcatgggtgcatgacagattcgaggagatgaacgtgcatgaggagcgctatgaagataagcgaatgtcaagaggccgttttagaggtcgtggtagtggaggtaggactagaggcactgcccatggattttcaagagggaggtaccacagttatcacgaagatagcgacaaccaaaatcatagtgaaaaccagaaccggccccaaaagattgtccgcgggagaggacccagacgttatgacacaattgcaaagaacaaccgagatgttgtcgggttccaacgtaaacaaccaacaagatctcgcgaactggtcgctcattctgcagcggccagagagcctggccaaatttcaaatgcacattcggaagcagttcctgctaaaaagaatgttgtcaattcaagcttaaattctgcgtcaccaccattttatccctctggtgcctcaaaccaactgggagctcaaagaagggacatacaaccaggaggttcaaataaggttcatccatcttccatgaagatggatgacaacatgaagctacaatctggtccagtagttagagggaaaggaaccacggactatggtggacgcgataggtttcatgccgagggtcctgttagaccatctcctgcaagaagtgtaggaggatcatcatactcatcagggtttgcatcatcatcaattaattctggtcaatcccctaataacagggctcaagggggaaatgcaagcattggtgttccttcacataatcggcccacaccatcatttcagcaaacttctagagtttctacgcaacagcaaaatcatacctcaattatgcaccagaagtcaggccaagcacctagtcaagctgcaatgagaatcccaactcagcaggtgagccatcggacgggcaatgcttcaccaagtgctcagcacctacctgctagatcaactgaaagtgacgagaatggttcatatcctagttcaaatcaatccaagacatctgaggtggaaaaaaccaacaaagaaactggacggggctccttcatgtatggtggagcccaggttattggggctgctggtcttgcccagggcgagcaaaattttcctggcaccccagctctcctgccagtgatgcaatttggcggccagcatccaggtgggcttggagttcctactgttggtatggccctccctggctatgtggctcagcagcagctgggaaggggaaataacgaaatggcgtggttaccactattggctggtgcagctggggcttttggaggatcatatccaccttacattacccttgatccaagcttttactctaggtcttcaggacagacgtcgtcgtcagttccatccagggaaggtaatgttaaccatggggctaaatctcctccccaaaacgatattgtgactgaagagcttgatcagcgccagaacaagcataggagatactcagagatgaacttcagtcagtgaagcaccctgtaaggtgaatttcatctgaataagctgcttacggccctgttgtaggccctttgtgatctctggttatgatttgagcattttgggtggcttggtgtcctaaattatattaggtcttatagatgcctgctcgtgctgtagttatctgatgggggtcgcttcacagcagagcagggggtgcatttgttgcttgagttgtggtgttgcttggtcgaaatggctaatttgttggtggcatctgaagacgtgagcggttgttgaagagaggtttgaataatgatctgtgttgattgataaagaaaggcaagaatggcttttagtacattttgttagtgactcgagtttatgtcggtctgagttctgatgtacctatgtatctatcctccaatagtggtattggcaagagcaagtggctttgttgcaaaaaaaaaaaaaaaa

SEQ ID NO: 4518 - protein, 697 aa, Triticum aestivum
  misc_feature: Ceres CLONE ID no. 914850
  misc_feature: Ceres CDNA ID no. 40041370
  misc_feature: Homolog of GI Number: 34912312 NR Desc: P0451D05.19
  misc_feature: Homolog of GI Number: 53793444 NR Desc: glycine
  misc_feature: Homolog of GI Number: 5103826 NR Desc: ESTs gbR90323
  misc_feature: Homolog of GI Number: 30684280 NR Desc: glycine
  misc_feature: Homolog of GI Number: 57899894 NR Desc: glycine
  misc_feature: Homolog of GI Number: 68246689 NR Desc: similar to AAA ATPase containing von Willebrand factor type A
  misc_feature: Homolog of GI Number: 61658807 NR Desc: RPGR
  misc_feature: Homolog of GI Number: 66780099 NR Desc: PE
  misc_feature: Homolog of GI Number: 9837385 NR Desc: retinitis pigmentosa GTPase regulator
  misc_feature: Homolog of GI Number: 61658795 NR Desc: RPGR
MADPPPPDAHPEQSPATEKPPAAPLTPEPEDAAEQDVESEVDEEYVSDPDDALPEMRRREASDDEGSEEGRRPPRARIDPDHDDDGQGAPEDYEGEVEEEEDEDEEYYDDLLDDEEVGEGLEEEYDGHAVPPKEVAAGQGEADEKPGEEGAEAEAEAEADGEEKKEQEPFAVPTSGAFYMHDDRFQEDGRGRRRRMLGGRKLWDAKDDQAWVHDRFEEMNVHEERYEDKRMSRGRFRGRGSGGRTRGTAHGFSRGRYHSYHEDSDNQNHSENQNRPQKIVRGRGPRRYDTIAKNNRDVVGFQRKQPTRSRELVAHSAAAREPGQISNAHSEAVPAKKNVVNSSLNSASPPFYPSGASNQLGAQRRDIQPGGSNKVHPSSMKMDDNMKLQSGPVVRGKGTTDYGGRDRFHAEGPVRPSPARSVGGSSYSSGFASSSINSGQSPNNRAQGGNASIGVPSHNRPTPSFQQTSRVSTQQQNHTSIMHQKSGQAPSQAAMRIPTQQVSHRTGNASPSAQHLPARSTESDENGSYPSSNQSKTSEVEKTNKETGRGSFMYGGAQVIGAAGLAQGEQNFPGTPALLPVMQFGGQHPGGLGVPTVGMALPGYVAQQQLGRGNNEMAWLPLLAGAAGAFGGSYPPYITLDPSFYSRSSGQTSSSVPSREGNVNHGAKSPPQNDIVTEELDQRQNKHRRYSEMNFSQ

SEQ ID NO: 4519 - DNA, 1536 bp, Triticum aestivum
  misc_feature: Ceres CLONE ID no. 915200
  misc_feature: Ceres CDNA ID no. 25446934
  CDS (111)..(989): REFERENCED BY SEQ ID NO: 4520
atatcttttccctttgattactgtgggcgcgcccccaaaaagacacggtccgccgtcgaccacgcgggcgagtcgttaggcagcagcagggagggtcgggctccgccgccatggcctcacgcttcagcttcggcatctcctctggggacctgaggtcggggagctcgctgacggtgggggagcggctctgcgcggtggtcctgccctgcgtcgccatcgccgagttcgtcttcttcgcgctcaccgactgcctgggcggcatctgtcccccttcctcgaactcctccacccacctgcgcagagatccctccgctccgtccttcttcctcaccgccaagaaggggagccaccaccgccgccgcggtcgcgtcgggccgggctgcacctccctggtcttccgcgacctcgcacgcctcgccgacgagtccagatgcttctcggtgaacgaggtggaggcgctgttcgagctctacaagaagatcagctgctccatcatcgacgacggactcatccacaaggaagaacttcagctagcattattcaagactcctagtggacagaatctttttcttgatagggtttttgatttgtttgatgagaagaaaaatggagtaatcgagtttgaggagtttattcatgctctcagcgtcttccatccattggcacctgtggaagacaagatcaactttgcatttaggctctatgatttgagacagactggctttattgagcgcgaggaggttatgcaaatggttatcgccattttgatggaatctgatgtggaattatcggatgaacttcttgaggctatcctagacaagacatttgaagatgctgacaccgatagggatgggaaaatttgccaagaagaatggaaggaatttgtattacgccatcctaatctactgaagaacatgaccctaccatatctaagagacgtcacaacagcgttcccaagttttgttttcaataccgcggttgaagactaagcatcacaagacttgtaattgatggtgacaagttggctgttgagtgctgacagtgtcagcagttgaaaattgggacgctgagaaacagagcagccatgttcgcttactgaagaatcgccattggtgacttttgctgctttaggatggctatctgataaccatttcggcaactgaagagtcccattcatgatggcaaatttggcaactaacagcttctggtatgcctgtcgctgtcccgcattgtgttgtaaatgtatatacacaattccttcagctctcagaagcacaggacagctctaggtacatatagatatgaggaatttaagttcctcaaatgccagccagtttcgggatcagtcaggtgcaatttctagaatgctaacttctgatgttgtagcgtccgttatagactatcttagtgctaacatgtcatggcttagccatgattgctgtatatataatcgaaaacctttccgagacgcatgcttttgctggtgatagctacaagattgatgccaagcatatccgccgaaaaaaaaaaaaaaaa

SEQ ID NO: 4520 - protein, 292 aa, Triticum aestivum
  misc_feature: Ceres CLONE ID no. 915200
  misc_feature: Ceres CDNA ID no. 25446934
  misc_feature (190)..(218): Pfam Name: efhand PFAM Desc: EF hand
  misc_feature: Homolog of GI Number: 76577803 NR Desc: calcineurin B
  misc_feature: Homolog of GI Number: 34913062 NR Desc: putative calcium sensor protein
  misc_feature: Homolog of GI Number: 56785307 NR Desc: calcineurin B
  misc_feature: Homolog of GI Number: 76577805 NR Desc: calcineurin B
  misc_feature: Homolog of GI Number: 29150248 NR Desc: calcineurin B
  misc_feature: Homolog of GI Number: 76577797 NR Desc: calcineurin B
  misc_feature: Homolog of GI Number: 56748808 NR Desc: Calcineurin B
  misc_feature: Homolog of GI Number: 66765939 NR Desc: calcium sensor calcineurin B
  misc_feature: Homolog of GI Number: 57472399 NR Desc: calcineurin B
  misc_feature: Homolog of GI Number: 37718792 NR Desc: calcineurin B protein
  misc_feature: Useful for making plants with increased biomass and foliage
  misc_feature: Useful for making plants with increased biomass and foliage
MASRFSFGISSGDLRSGSSLTVGERLCAVVLPCVAIAEFVFFALTDCLGGICPPSSNSSTHLRRDPSAPSFFLTAKKGSHHRRRGRVGPGCTSLVFRDLARLADESRCFSVNEVEALFELYKKISCSIIDDGLIHKEELQLALFKTPSGQNLFLDRVFDLFDEKKNGVIEFEEFIHALSVFHPLAPVEDKINFAFRLYDLRQTGFIEREEVMQMVIAILMESDVELSDELLEAILDKTFEDADTDRDGKICQEEWKEFVLRHPNLLKNMTLPYLRDVTTAFPSFVFNTAVED

SEQ ID NO: 4521 - DNA, 2335 bp, Triticum aestivum
  misc_feature: Ceres CLONE ID no. 915640
  misc_feature: Ceres CDNA ID no. 35383313
  CDS (239)..(1903): REFERENCED BY SEQ ID NO: 4522
gcgaaaagaggaggaggaggaggaagaattccatcgacagccctccctcggaactatcggatctcgggaagaagatatatccatcgctggcacccgtcgtcttcctcccccttcttccccatcccatcttcgtccactcgcgagctcgccattaatcccactccactcggctccagagggccggccggcggcctccgctcgaagtcgaaggaaggtccccctctcgccccccgttaagatgatgcggtgcgccgtgaggggcggcggtgctcacgtcgtcatcggcgagcggaggtcgccgtcgtcgtcgcccggcagcggaaggagcgtcgtgcggatgtcggagggccgcggcgggctctgctgcggcggcgtgaggtcgcgcgcggcggatctcgcggggctcgagatgggcaggcccagcgccggcgccgcggggctcttccggagcccgcgctacggccgcgtgcgcgccaccgcctcagctgaccccgaggatattccatctgacaagcttcaagctaaatcatctgggagtgttctgccgtacgttggcgttgcttgcttgggggcaattctgtttggctaccatcttggtgtggtcaatggcgcgcttgaatatctctcgaaagatcttgggattgctgaaaatgctgtgttacaaggatgggtggttagcacaaccctggctggcgcgacagtaggttcttttactggaggggctttggctgataaattagggagaacacggacatttatcctagatgccatccctcttgctgtaggcgcattcttgagtgcaacagctcaagatgtccgtacaatgattattggtcgattacttgctgggattggtattgggatctcttccgctcttgtgccgctttacatatctgagatctcaccaactgaaatacgtggagcacttggtacgattaatcaactttttatctgcattggaattcttgcagctttggtagctggattgccattagcacaaaatcctgcatggtggaggacaatgtttggaatttcagtagttccatctattttgctggctctaggaatggctgtttcacctgaaagccctcgctggctattccagcaaggaaagatttctcaagcggaagcagctataaaaaaattgtatgggaaagaggaggttactgaagttatgtatgacctaaaggctagtgggcaaggatctaatgagccagatgccagctggtttgatctattcagcaaacgctattggaaaattgtgagcgtgggagcggcactgtttttgttgcagcaacttgctggcataaatgctgttgtgtactactctacatcagtgttccgcagtgcaggcattgcatctgatgttgcagcgagtgctcttgttggtgctgccaatgtttttggcaccatgattgcatcttcactgatggacaagcaagggaggaagagccttctcataacaagcttttctggaatggcggcgtcgatgttactcttgtcattgtccttcacctggaaggctttggcaccttattctggcactcttgctgttgttggcactgtcctgtatgtgctgtcattcgctcttggagctggccctgttccagctttgctccttcctgaaatatttgcctccagaataagggccaaggctgtagcattatcaatgggcatgcactgggtatccaacttcttcatcggcctgtacttcctgagcgtcgtcaacaagtttggaatcagcaccgtgtacttgggattcgcgtccgtgtgtgctctcgcggtcctgtacattgccgggaatgtggtcgagaccaaggggcgatccctggaagagattgagcgggagctaagcccgcccaataaagccgatgctaatgctttcttagtgagtgatcaatgagcaccgagcagaaaccatccttggacctggggatgttgtctctgccttttatgagtagttcctgaaagagtaactcttcctgaaataagtgagccgcaagatcacctgacgccatgcaaaccgcctggtgctcagggtgttgtggcaccagtgaagctcagctatttcttgttacatctcaaaatcaaagagcttatgtgtcattgctccgggaggtgcaagatttaggctggctgttagcccttggatgtcatcgtttttgagtgtacagatgatctccttgtatgtgtcggaaataaaactccgatttgccgaatttcaaagcgtgatgtgtaattatgcttaccaattgaaaatgccctatctcgtactgtgtaaatgagatcttgatgcagcggtaaatcggtaagtactccaaaaaaaaaaaaaaaa

SEQ ID NO: 4522 - protein, 554 aa, Triticum aestivum
  misc_feature: Ceres CLONE ID no. 915640
  misc_feature: Ceres CDNA ID no. 35383313
  misc_feature (108)..(497): Pfam Name: MFS_1 PFAM Desc: Major Facilitator Superfamily
  misc_feature: Homolog of GI Number: 8347250 NR Desc: hexose transporter
  misc_feature: Homolog of GI Number: 8347244 NR Desc: hexose transporter
  misc_feature: Homolog of GI Number: 8347242 NR Desc: hexose transporter
  misc_feature: Homolog of GI Number: 8347248 NR Desc: hexose transporter
  misc_feature: Homolog of GI Number: 15625046 NR Desc: hexose transporter pGlT
  misc_feature: Homolog of GI Number: 51574116 NR Desc: plastid hexose transporter
  misc_feature: Homolog of GI Number: 9858106 NR Desc: putative glucose translocator
  misc_feature: Homolog of GI Number: 55770085 NR Desc: putative hexose transporter
  misc_feature: Homolog of GI Number: 21436467 NR Desc: putative sugar transporter
  misc_feature: Homolog of GI Number: 9755825 NR Desc: sugar transporter
MMRCAVRGGGAHVVIGERRSPSSSPGSGRSVVRMSEGRGGLCCGGVRSRAADLAGLEMGRPSAGAAGLFRSPRYGRVRATASADPEDIPSDKLQAKSSGSVLPYVGVACLGAILFGYHLGVVNGALEYLSKDLGIAENAVLQGWVVSTTLAGATVGSFTGGALADKLGRTRTFILDAIPLAVGAFLSATAQDVRTMIIGRLLAGIGIGISSALVPLYISEISPTEIRGALGTINQLFICIGILAALVAGLPLAQNPAWWRTMFGISVVPSILLALGMAVSPESPRWLFQQGKISQAEAAIKKLYGKEEVTEVMYDLKASGQGSNEPDASWFDLFSKRYWKIVSVGAALFLLQQLAGINAVVYYSTSVFRSAGIASDVAASALVGAANVFGTMIASSLMDKQGRKSLLITSFSGMAASMLLLSLSFTWKALAPYSGTLAVVGTVLYVLSFALGAGPVPALLLPEIFASRIRAKAVALSMGMHWVSNFFIGLYFLSVVNKFGISTVYLGFASVCALAVLYIAGNVVETKGRSLEEIERELSPPNKADANAFLVSDQ

SEQ ID NO: 4523 - DNA, 1133 bp, Triticum aestivum
  misc_feature: Ceres CLONE ID no. 916104
  misc_feature: Ceres CDNA ID no. 40041371
  CDS (277)..(885): REFERENCED BY SEQ ID NO: 4524
cttcaaggctattccagcacatgaagaaggtttcgtcttcgagcaacaagctctggccagctgcagcaagagcaactcaggtcagattaatggacctatgagcacagcaaccaccactactgctgctactgaggagcgatcaaattctcgagccagcttcttcacctcccgccgacgccactgctgctgctggtcgacctatcttcttcgcggctctgagtccgccaccggcgaaaaagggatcggccgcgcgccgccgtgattaaaggttgatccatggacctgtcgccaaaccccgagagcccgaatgccccgggcggcggtggcggcagcggcgccggtggatctagcggcggtggaggggcgtcctcgtctgctgggggtggaggcacaccgcagacgcccagccggtacgaggcgcagaagcggcgggactggaacacgttcgggcagtacctgcggaaccaccggccgccgctgagcctcgcgcagtgcagcggcgcgcacgtgctggagtttctgcggtacctggaccagttcggcaagaccaaggtgcacacggcgtcgtgccccttcttcggccacccaaacccgccggcgccctgcccctgcccgctgcgtcaggcgtgggggagcctcgacgcgctcgtgggacgccttcgcgccgcgttcgaggagcacggcggccgccccgagtccaaccccttcgccgcccgcgcggtccgcctgttcctccgcgaggtccgcgagcaccaggctcgcgcgcgcggcgtcagctacgagaagaagaagcgcaagaagccgacgcctggtgacgccagcagcagcagcagccaccaggctccacccccaccgccaccgccccccgccggtgcggcctgctgaggaggagagaggacctgtactgcgcacgtgcccatttggtatgccggaccgatgatgagcatattttatgtaggtctcgatcgattaactgcttgtgcatgcatgcattgttttactaccattctgccgggcttaagatctagactagatgattcagacttttattgatcgtgctacgtccatttgctagttattatttgcttctgcttaatttctactgccaagcttcctcaaaaaaaaaaaaaaaa

SEQ ID NO: 4524 - protein, 202 aa, Triticum aestivum
  misc_feature: Ceres CLONE ID no. 916104
  misc_feature: Ceres CDNA ID no. 40041371
  misc_feature: The plant flowers significantly late compared to wild-type.
  misc_feature: null
  misc_feature: Useful for making plants with modulated flowering time
  misc_feature: Useful for making plants with modulated low light sensitivity
  misc_feature: Homolog of GI Number: 50926456 NR Desc: OSJNBb0072M01.12
  misc_feature: Homolog of GI Number: 34909440 NR Desc: OSJNBa0014K08.14
MDLSPNPESPNAPGGGGGSGAGGSSGGGGASSSAGGGGTPQTPSRYEAQKRRDWNTFGQYLRNHRPPLSLAQCSGAHVLEFLRYLDQFGKTKVHTASCPFFGHPNPPAPCPCPLRQAWGSLDALVGRLRAAFEEHGGRPESNPFAARAVRLFLREVREHQARARGVSYEKKKRKKPTPGDASSSSSHQAPPPPPPPPAGAAC

SEQ ID NO: 4525 - DNA, 983 bp, Triticum aestivum
  misc_feature: Ceres CLONE ID no. 916978
  misc_feature: Ceres CDNA ID no. 25891840
  CDS (56)..(745): REFERENCED BY SEQ ID NO: 4526
tgaagaagcagatgcacctactcaagtcgaacccgttgccatagtgccagattccatggagcatgctagtacccaagttgatcaaagtatagaaacagctgtgcgtctcccagacgaaacttctgttatacctggtacggaaccagaagagaagaaagtagaggcatccccccaagaggataatgttggagcagttgccgcagagccagaacctgctggaacccaggaaaatgcagaagtttctactcagcctagtcctatggagatagagttggctcaggaaacagctatgctgggagaagctgaaaccaggcagcaactgccacttccgtctgccgagggcgtgatagccgaggctagtgaacctccaagcacagaggtgactgctatgaaggaaccagagttgctgagcactgaaccagcacccgatggtgaaaacgcgaagcttggagaagccgaagctgaacagctgtcgcagcaaccttcatcctgcgaggctatggcagtcacaggagagcttcctagcacagcgggagcgaaaacggatggaacttcagacgtggtggcgtctcctgctgtcgtgggagaggaggtgctcaacactgaaactgcacctgatgataaaaatccaaggccgagcgaggctgatacggcgcagtccccacctttgccggaggagggcaaggccgtggcagctactgagcctgccaaccttgaggaggcggaggctaatgatggaaagtagttagcgtgcaaggatggaagcagatgttgcgttgaagaacctttgccgttagatcagacagagcatgcttgggatcaagagagaggatctaggggctgttgaaactgagaagtaccgtagattttatgcaaatgttgtatgtaaaacataattaagaaacctgttgtattcgaaggagtggagttgttggtacataagttataactacctagtcgctttgctaaaaaaaaaaaaaaaa

SEQ ID NO: 4526 - protein, 229 aa, Triticum aestivum
  misc_feature: Ceres CLONE ID no. 916978
  misc_feature: Ceres CDNA ID no. 25891840
  misc_feature: Homolog of GI Number: 68246689 NR Desc: similar to AAA ATPase containing von Willebrand factor type A
MEHASTQVDQSIETAVRLPDETSVIPGTEPEEKKVEASPQEDNVGAVAAEPEPAGTQENAEVSTQPSPMEIELAQETAMLGEAETRQQLPLPSAEGVIAEASEPPSTEVTAMKEPELLSTEPAPDGENAKLGEAEAEQLSQQPSSCEAMAVTGELPSTAGAKTDGTSDVVASPAVVGEEVLNTETAPDDKNPRPSEADTAQSPPLPEEGKAVAATEPANLEEAEANDGK

SEQ ID NO: 4527 - DNA, 1191 bp, Triticum aestivum
  misc_feature: Ceres CLONE ID no. 917123
  misc_feature: Ceres CDNA ID no. 24766513
  CDS (212)..(1012): REFERENCED BY SEQ ID NO: 4528
acccggctcgcccgcgacctccacctcgccgccgcccagatccaactccgccgtccccatccgcgccgtcgtcgcgctgcgagcctcgcggacggccccgtcgtcctccgcctccagcgcgccccgccacccgtgctcgatcctccgccccccggtcacctcgcccggcaccacccgccaccagagtcgcccctccagccaaggtggtgcaatggcttcaggcatcatgttccgacgtctttccaaggcactcaccatgagcccagcagcagcagtggcatctggtatgaccagccagcaccaccagcttcagcagcgtgcaccggtgagcggcacgtccaagggcaaggccaagctcaaagctgggatgcctctgaggcgtagcgtcatagcgaagaaggggggcgcgcctgccactgctgggagcggcggcgctggccgtggtcgccgtgaagccatcgagcgtattactcagattgcagagtcttgtctgaagtcctccactcctctacggcacttgtcccccaaggagcgtctccgcgaggcaaagcgtgaggagcttgggctcatctccaaggaacggcaacgtgagcttgacgctgccaaggctaaagctaaagctaaatccaagggtgccagtggaggtgatggtgaccgtgttctgatgggtccgccgggccttgactatatcagtcttggtctggtggatgaggaggctatccctgagtatgagctgacagttgaagatggccggcgtcttgccaaggaatacagccgtgtgctaatgcgacgacaccgtgcacgtcaaaccgcagagtcaacgctcttgaggctcaagaaggaggccattgctgcgctcccagagaagctgcgggctgctgctatggttcctgacatgaccccgttccctgcaaacaggtacatggcaacactcacgccaccgattgaagggtatattgaaaaggtgcgagatgctgccaagaagtattcagtgaaggagaaacttcgttgagtttgattcaacatgggaggaaagagtcttctccatacaagatgccgagagtttagacactttcttatgctcctttaattaattcttggcccgtgtctaggtttgatgactactttgtgctattttgcgctgtgataatcagattctggtaataagccgtcacaaaaaaaaaaaaaaaa

SEQ ID NO: 4528 - protein, 261 aa, Triticum aestivum
  misc_feature: Ceres CLONE ID no. 917123
  misc_feature: Ceres CDNA ID no. 24766513
  misc_feature: Homolog of GI Number: 34914612 NR Desc: P0520B06.19
  misc_feature: Homolog of GI Number: 6523547 NR Desc: hydroxyproline
MFRRLSKALTMSPAAAVASGMTSQHHQLQQRAPVSGTSKGKAKLKAGMPLRRSVIAKKGGAPATAGSGGAGRGRREAIERITQIAESCLKSSTPLRHLSPKERLREAKREELGLISKERQRELDAAKAKAKAKSKGASGGDGDRVLMGPPGLDYISLGLVDEEAIPEYELTVEDGRRLAKEYSRVLMRRHRARQTAESTLLRLKKEAIAALPEKLRAAAMVPDMTPFPANRYMATLTPPIEGYIEKVRDAAKKYSVKEKLR

SEQ ID NO: 4529 - DNA, 1960 bp, Triticum aestivum
  misc_feature: Ceres CLONE ID no. 917662
  misc_feature: Ceres CDNA ID no. 25891577
  CDS (114)..(1466): REFERENCED BY SEQ ID NO: 4530
acaattttcagtcggaaacccgcatctccccgctgccgaccacgcgtacctccacctccagctacagccccagccgacgatcgcagtcgaaaccctagctccgggagcagaggatgaggcccacagcgacggggccgggcggcggcgtggtgaggcgaaaggcgggggcggccgccgcggcggcggcggcgagccgggagtggctggtggtgccggcgtcggggcgggcgcgggtggaggaggccgggaagcacgcggtgatggcgcggacggggctgccggcgcgggacctgagggtgctcgaccctctgctgtcctacccgtccacgatcctgggccgcgagcgcgccatcgtcgtcaacctggagcgcgtcaaggccgtcatcaccgccgccgaggtgctgctccccaactccaaggaccccgacttcgcgcgcttcgtccgcgacctccaggcccgcgtgctcacttccgcagaccaggctgcagagtttactgatatggatggcgaatcatctgcaattgcttcaccatttcctgctcctagttcatctaaaggacatgaactggagatggctaagaggactcctaatgcggtgggtgaaatgactcacagcagcagtgtgcccacattgactgctatgaaagatggaagcaccaaggttttaccctttgagttccgtgcgcttgaagtgtgtctcgagtcggcttgtagatctctagaagaggagactgtgactctggagaaagaggcatatccagcattggatgagctaacttcaaagatcagtaccctgaatcttgagcgagttaggcaaattaagagccggctggtggcaatctctggacgcgtgcagaaggtgagggatgagcttgagcatctattggacgatgaaatggatatggctgaaatgtacttgacagaaaaacttgctcgagaagatatcagtgagacttcatctagagttgaggttgatgatcatgatcatgatcatgacccgtctcagttggaggaggatatggatgaggattatagaagcgagccagctggaactgcaagcaatggtagctttattggttataagcccaacattgaagaactggagatgcttttagaggcctattttgtgcaaattgacggtacactaaataagctttcgcatctgagggagtatgttgatgacaccgaggattacatcaacataatgttggacgacaagcagaatcagcttctacaaatgggggtcatgctctcgaccgcgacggttgtcattactgccggagtggctgtcgttggtcttttcgggatgaacatcggcatatctctttacactcccgtaggcgaggagcagacgcgagcagcacatgtgaagttttgggaaaccacttttggcaccattgctgggtgcacgatcctgtacgtaatagccatgggttgggggaagagaagtgggctattgcaatgagggcgcacccaatcctgtcaacaactgctcccgcagaagccttcgctggacaacccctgaaagagggcggtgtgcgcttggaatatattggtacctcaaaatgcatgcctgtaaccttatcccttgaaagccttagaagggagggaagaaagttttcttgatgcaagacaatgggtagttcgaagcgaagaagatcgtttcataaagtgttggcacaatgctgtcaagccaactcagagtttgctattgcacctgcggggtgagcagttgcttaaaccctctctcgtaaaagtttgtcttgccattgtatatgtaaacctcctgctacaagtgaattaaatcactgtagaaatgctggtactgtggcctgtcttggccaggggagagttattatcatgtgtgatattgttgacagtgtgagcgtatattttgttggtttctactctgatcgctggtttggccatcgttgtatcgtacaaaaaaaaaaaaaaaaa

SEQ ID NO: 4530 - protein, 450 aa, Triticum aestivum
  misc_feature: Ceres CLONE ID no. 917662
  misc_feature: Ceres CDNA ID no. 25891577
  misc_feature (25)..(449): Pfam Name: CorA PFAM Desc: CorA
  misc_feature: Homolog of GI Number: 56785118 NR Desc: putative MRS2
  misc_feature: Homolog of GI Number: 34908640 NR Desc: P0677H08.20
  misc_feature: Homolog of GI Number: 50924366 NR Desc: OSJNBa0084A10.4
  misc_feature: Homolog of GI Number: 25360941 NR Desc: MRS2
  misc_feature: Homolog of GI Number: 30682808 NR Desc: magnesium transporter CorA
  misc_feature: Homolog of GI Number: 42570515 NR Desc: magnesium transporter CorA
  misc_feature: Homolog of GI Number: 51534988 NR Desc: magnesium transporter CorA
  misc_feature: Homolog of GI Number: 30688025 NR Desc: magnesium transporter CorA
  misc_feature: Homolog of GI Number: 37536576 NR Desc: putative CorA
MRPTATGPGGGVVRRKAGAAAAAAAASREWLVVPASGRARVEEAGKHAVMARTGLPARDLRVLDPLLSYPSTILGRERAIVVNLERVKAVITAAEVLLPNSKDPDFARFVRDLQARVLTSADQAAEFTDMDGESSAIASPFPAPSSSKGHELEMAKRTPNAVGEMTHSSSVPTLTAMKDGSTKVLPFEFRALEVCLESACRSLEEETVTLEKEAYPALDELTSKISTLNLERVRQIKSRLVAISGRVQKVRDELEHLLDDEMDMAEMYLTEKLAREDISETSSRVEVDDHDHDHDPSQLEEDMDEDYRSEPAGTASNGSFIGYKPNIEELEMLLEAYFVQIDGTLNKLSHLREYVDDTEDYINIMLDDKQNQLLQMGVMLSTATVVITAGVAVVGLFGMNIGISLYTPVGEEQTRAAHVKFWETTFGTIAGCTILYVIAMGWGKRSGLLQ

SEQ ID NO: 4531 - DNA, 1578 bp, Triticum aestivum
  misc_feature: Ceres CLONE ID no. 917973
  misc_feature: Ceres CDNA ID no. 25446863
  CDS (277)..(1269): REFERENCED BY SEQ ID NO: 4532
aagtgatgagagagagagagagagagagcaacgggacgacagggaaaaagcgagcgagcgagcaaacaaaagcgaccagctagctccggcagcacccccactacgccccctctggccaatctactccacttcactccactccactccactgtaaatctatctgtgtgagggaagcaaggaatttgaagtcgacatgaggagctagggtgagaagcgaagcaagcaggcgacgcaagatcgacagccctcaccactctcacggtgctaggagggacgatgccgctccacctgctgctcctcctcctgctcctgccgtccgccgccgtggccggcaaggcccgtcagtcctcctccttcgccctcgatttcttccctggcgacggcgccatcgcgcagctcgctctcaccggcgccaatgccacctccgccggcgacatctccatgcgctccccgcgcgcccgggtacagtaccacaaacccattcacttcgcccccgccgccgccggcttctccacctacttctccttctctctccaccctatccccaaatctcacgccgcctccatcgccttcttcctaacgcccgccgcgcccgcgccctcgccctcacccgccgttaacgccctcgccctcgccatcgtcttcgccgccgcggactccagccacatccgagtccaaatcgacctcgccggtgaaacggccgcccagaccgccccccgcggcatccccaaaaagctgcattcatggatagactacaacgccacatccgccacgcttcaggtccgtctctctgcctcgcgcctccccaagccgccgcacgcgctgctctcccacccgctccatctccactccgccctcctcctccatctcctccgcagcaagcccatgctcgccggattcgcttcctcccacgccaactgcagcctcttcagctgggccttcagggccaaccacgggcctccctacctcatgcactcccagccactcaatcccaccggcttatcgctcaccacgccgccgccagaccgcctcctccgcgctcccccgggcaaccgctacccctgggcttcgctgctgttggcggcagcgtgcggcgccgtcttcacattcgtcgtgctcttcgtctggtactccatggggaagcgccggccggtcgcgccggtggagtaccccatgcacccgtcctcctccgacatcgtctacgagaagattgtgctggtcggagtcaaggacctccctgccgatgtcaccgcagctgctcacaagtagccgctgtcctctagattctactgcaagtgtgctcctgtaactgtaagtaggaaattgttgctagtaagtgcggtggaaaatgcagattttgcgggcaaagcgaacaacgcaaattctgcacttcccaccgggattaggattcgattgctctttctaaattgtaacttgtcagttgtcatgccatccaccactgctaccacttcttctttgtatgcttattagtcatgcgtgccctagtactattcaagagcccatcctaaaaaaaaaaaaaaaaaaaaaaaaaaaaaaaaaagaaaaaaaaaaaaaaaa

SEQ ID NO: 4532 - protein, 330 aa, Triticum aestivum
  misc_feature: Ceres CLONE ID no. 917973
  misc_feature: Ceres CDNA ID no. 25446863
  misc_feature: Homolog of GI Number: 6523547 NR Desc: hydroxyproline
  misc_feature: Homolog of GI Number: 60678627 NR Desc: plus agglutinin
  misc_feature: Homolog of GI Number: 12018147 NR Desc: vegetative cell wall protein gp1
  misc_feature: Homolog of GI Number: 67987177 NR Desc: 4Fe
  misc_feature: Homolog of GI Number: 76262498 NR Desc: pherophorin
  misc_feature: Homolog of GI Number: 41400381 NR Desc: minus agglutinin
  misc_feature: Homolog of GI Number: 76262500 NR Desc: pherophorin
MPLHLLLLLLLLPSAAVAGKARQSSSFALDFFPGDGAIAQLALTGANATSAGDISMRSPRARVQYHKPIHFAPAAAGFSTYFSFSLHPIPKSHAASIAFFLTPAAPAPSPSPAVNALALAIVFAAADSSHIRVQIDLAGETAAQTAPRGIPKKLHSWIDYNATSATLQVRLSASRLPKPPHALLSHPLHLHSALLLHLLRSKPMLAGFASSHANCSLFSWAFRANHGPPYLMHSQPLNPTGLSLTTPPPDRLLRAPPGNRYPWASLLLAAACGAVFTFVVLFVWYSMGKRRPVAPVEYPMHPSSSDIVYEKIVLVGVKDLPADVTAAAHK

SEQ ID NO: 4533 - DNA, 1610 bp, Triticum aestivum
  misc_feature: Ceres CLONE ID no. 918362
  misc_feature: Ceres CDNA ID no. 35383314
  CDS (118)..(1581): REFERENCED BY SEQ ID NO: 4534
agtaaaagccccaaagccaccgtgacctcctccccctcccccactgaaaaccgaggaagagccggggataggtagccgatcgacggcgacggtggctgctccggcgaccgtgtcctcatgtacgcggccgcgcgccgcctcctctccacccgcgcctgcgccgccgccgccgcgcgcgcgtcccctgtggcctcgcgagcgccctcctgctactccgcggcgcagtccaagccgccgccgccgcggttccccacgcccaaggagatccgccggggcctggaccagtacgtcgtcggccaagacaaggccaaaaaggtgctctgcgtcgccgtgcacaaccactacaagaggatatacagcgagccctccaccaagagctcatcgcaaacctcggcggccgatgatgatactgagctcgaaaagagtaacatccttctgcttgggccaactggatcaggtaaaacacttctagcaaaaacgctggctcgctttgcgaatgtgcccttcgtgattgctgatgcaacagcaattacacaggctgggtactctggggaagatgtggaatcaatcgtctacaaacttctagtggctgctgacttcgatgtcgaagctgcagagcgtggcatcatctacattgatgaagttgataagctcgcaaagaagctcggttgccaggaggaccggagggatgtctctggagagggtgtccagcaagcactcttaaagatgtttgagggaacggtgttcagtgtgccaaggaagagaagtcaaaatggcatgtctcatggttgtgtggaggttgatacaacaaacatactcttcatttgtggaggtgccttctctgacttgggaaagattgtctcagaaagacttcaccgctgtccttttggttttggaacaccaatacgtcatgaattgggggattatgctttgacgaatgctcttgggcaatccggcttgcttgaagagatcgagaatgacgatctgattgcctatggcctgacaccagaatttattgggaggttgccaataatagttggcttgactcatctcactgaagatcaactggttcaggttctcagagagccaaagaacgcaataggcaagcaatacaagaaattgttcaagatgaatgatgtaaaattgcatattactgaaaacgctttgaggctaatagcaaagaaagcagctgtgagggaaaccggagcgagaggcctacgatcaataatggagggcattttgacagaagcaatgtttgagatccccgatgacgcaggagaggggaaagagaagataatcgttgttcttgttgatgaagaatccgtagggacaccaacccgtcgaggctgcggagccaagattttccgagacgatggagccctagaactatatgtttaccaaaacaatatcagggtgcctgggctgattcagaggccaaaatgcagtatcatttgccggctatgccttctggtagccttttcagcagctaagctgtgggtttatcatacgtttgattgtttctcctcaatatacgcgtggattatattgatactgtgtaaggcaaacattttcacagaatgaagtacagttcgacaaaaaaaaaaaaaaaa

SEQ ID NO: 4534 - protein, 487 aa, Triticum aestivum
  misc_feature: Ceres CLONE ID no. 918362
  misc_feature: Ceres CDNA ID no. 35383314
  misc_feature (102)..(125): Pfam Name: ABC_tran PFAM Desc: ABC transporter
  misc_feature: Homolog of GI Number: 50932459 NR Desc: putative ATP
  misc_feature: Homolog of GI Number: 50907135 NR Desc: putative ATP
  misc_feature: Homolog of GI Number: 23296603 NR Desc: putative ATP
  misc_feature: Homolog of GI Number: 2674203 NR Desc: CLP protease regulatory subunit CLPX
  misc_feature: Homolog of GI Number: 56785236 NR Desc: putative CLP protease regulatory subunit CLPX
  misc_feature: Homolog of GI Number: 53850505 NR Desc: At1g33360
  misc_feature: Homolog of GI Number: 50902262 NR Desc: putative ATP
  misc_feature: Homolog of GI Number: 12322572 NR Desc: CLP protease regulatory subunit CLPX
  misc_feature: Homolog of GI Number: 18423073 NR Desc: ATP
  misc_feature: Homolog of GI Number: 8978260 NR Desc: CLP protease regulatory subunit CLPX
MYAAARRLLSTRACAAAAARASPVASRAPSCYSAAQSKPPPPRFPTPKEIRRGLDQYVVGQDKAKKVLCVAVHNHYKRIYSEPSTKSSSQTSAADDDTELEKSNILLLGPTGSGKTLLAKTLARFANVPFVIADATAITQAGYSGEDVESIVYKLLVAADFDVEAAERGIIYIDEVDKLAKKLGCQEDRRDVSGEGVQQALLKMFEGTVFSVPRKRSQNGMSHGCVEVDTTNILFICGGAFSDLGKIVSERLHRCPFGFGTPIRHELGDYALTNALGQSGLLEEIENDDLIAYGLTPEFIGRLPIIVGLTHLTEDQLVQVLREPKNAIGKQYKKLFKMNDVKLHITENALRLIAKKAAVRETGARGLRSIMEGILTEAMFEIPDDAGEGKEKIIVVLVDEESVGTPTRRGCGAKIFRDDGALELYVYQNNIRVPGLIQRPKCSIICRLCLLVAFSAAKLWVYHTFDCFSSIYAWIILILCKANIFTE

SEQ ID NO: 4535 - DNA, 1653 bp, Triticum aestivum
  misc_feature: Ceres CLONE ID no. 918821
  misc_feature: Ceres CDNA ID no. 40041372
  CDS (292)..(1311): REFERENCED BY SEQ ID NO: 4536
ctcctgtccttttctccctcgccccgagacttcctaggtgcgccgccgtgcgaggctgctggctgccggccaccacggccagccaagaagtacaaaagcgtctctgacgagcacggcggtaccgccttgcctagatctcttatctctgaggttggcgccgcctcgttcgtcgtctccgccatcgccgttgtacagctgccgccgtgccaaaccatacctgacagttttccgtcgccctgactgggaaacactaagcagatcaggttgggatagattaaattcagaacgaagatgtgctccatgatccgaaggtttgtccatctaattgttcacgatgtcaagggtggggctggtggtggtggttacgccctgcggaacattgataccaagccgctctttgcgggtattggtggtggcagcacgagtatggcagtcactactcgattaccacgcccagctgccttctttgagtctgctaacacggacaataacaatcacacagagtttttcctcctcggcagcaaaattgttagtgtcaacatgaaccggcgcacagtcttgtatgacagtttgacttcgggtatatctggtggacctgacctgcggcattgtaagttcgtccaccctgcctgggcagcaatacgaggcaagctctacatcaccaacatgttgccacacaactacggcaagccctgtttagaggcactgcgtttcgacgacgagcttgaggattggctgtgggatctgctcccctcgccgcccttctttgacgagccgttcaggagtgataacaccatacagtgttacgcagccggggatgaagagaagatgtggatatcaacattgggcagaggcacctacaccttcgatgccgctactgccacatggtgcaaagaaggtggctggacgctgccttttgaaggccgagtgcaatatatacctgagtatggcatctactttggattctccaagagattgaacaagctgtgctcggctgagatgatcgctggagctaaggcctcggagcccccggtgcacaagcaagtatgggacaatgttgatgtttacgttggtgagggttggcatttggcccattcttacctcacctatcttggtgagggcaagttctgcgttacaaggttctatgacactaggcgtgaatgggatgactggtgcattcctctgagcaatgttgctgtcatgtcggctctcgaaatgagacttgatgccaacacaggcgagctcaaaatgatcagaggggcttccacccgttacaagttccccgacgcagtgcacggctgggctctgtgagcaccgacacccaccttccggcccaatgtacttctgctataacatgtgaacatgcatgtaatgccccaacaagaatatatgatcaatctgtggcacacagttggttatatttttcaagtgaaatttgacaggcttatcacttgttattgcaccaacaatcgagtgtccatgtcgctatggtgtttgtgttcacatgtcaccctttttttttgtataattcaactcgtgtaatgtttcagattcatgatgtggacctctattcgtataacactgtcactttttcaaaaaaaaaaaaaaaaaaaaaaaaaaaaaaaaaaaaaaaaaaaaaaaaaaaaaaaaaaa

SEQ ID NO: 4536 - protein, 336 aa, Triticum aestivum
  misc_feature: Ceres CLONE ID no. 918821
  misc_feature: Ceres CDNA ID no. 40041372
  misc_feature: Homolog of GI Number: 34907070 NR Desc: OSJNBa0093F16.24
MIRRFVHLIVHDVKGGAGGGGYALRNIDTKPLFAGIGGGSTSMAVTTRLPRPAAFFESANTDNNNHTEFFLLGSKIVSVNMNRRTVLYDSLTSGISGGPDLRHCKFVHPAWAAIRGKLYITNMLPHNYGKPCLEALRFDDELEDWLWDLLPSPPFFDEPFRSDNTIQCYAAGDEEKMWISTLGRGTYTFDAATATWCKEGGWTLPFEGRVQYIPEYGIYFGFSKRLNKLCSAEMIAGAKASEPPVHKQVWDNVDVYVGEGWHLAHSYLTYLGEGKFCVTRFYDTRREWDDWCIPLSNVAVMSALEMRLDANTGELKMIRGASTRYKFPDAVHGWAL

SEQ ID NO: 4537 - DNA, 906 bp, Triticum aestivum
  misc_feature: Ceres CLONE ID no. 919209
  misc_feature: Ceres CDNA ID no. 29191563
  CDS (115)..(645): REFERENCED BY SEQ ID NO: 4538
accaaagctcccagcttttcccccttcctccgccgccgccgacgccgacgcttcctagggtttcgtcccccgatccggatccggcggcggcagcagcagcagcagcagcgagcgatggcggccgcgggagacgccggcgagaagaagatgatcacgctcaagagctcggacggcgaggagttcgaggtggaggaggcggtggccatggagtcgcagacgatccgccacatgatcgaggacgactgcgccgacaacggcatcccgctccccaacgtcaactccaagatcctctccaaggtcatcgagtactgcaacaagcacgtccaggccaagcccgccgacggggccgcggccggagccggagcctcggacgcctccgccgccgcccccgccgcccccgccgaggacctcaagaactgggacgccgagttcgtcaaggtcgaccaggccaccctcttcgacctcatcctggctgccaactacctcaacatcaaggggctgctggacctgacctgccagactgttgccgacatgatcaagggcaagaccccagaggagatccgcaagaccttcaacatcaagaatgactttacccccgaggaggaggaggagatccgcagggagaaccagtgggcctttgagtaggggagcatctaggcgatgccgccgccgccgccgcgttgaatgaacgaacaatgcttagtattggtcatgtctgcatttcagcgctcttctttatgtctgtcctaatggcttgtaattatcctggagtctatgagtgaacatgttcggtcagtggttatgtttgcgacaacaagaaaaacctatcgtggtcagtggtcatcacttgtcaaactgaatcttaatcgtcaagtggaatgctttgcttgaaaaaaaaaaaaaaaa

SEQ ID NO: 4538 - protein, 176 aa, Triticum aestivum
  misc_feature: Ceres CLONE ID no. 919209
  misc_feature: Ceres CDNA ID no. 29191563
  misc_feature (11)..(71): Pfam Name: Skp1_POZ PFAM Desc: Skp1 family
  misc_feature (99)..(176): Pfam Name: Skp1 PFAM Desc: Skp1 family
  misc_feature: Homolog of GI Number: 40644754 NR Desc: putative SKP1 protein
  misc_feature: Homolog of GI Number: 32330695 NR Desc: SKP1/ASK1
  misc_feature: Homolog of GI Number: 7378764 NR Desc: putative kinetochore protein
  misc_feature: Homolog of GI Number: 47054182 NR Desc: skp1 protein
  misc_feature: Homolog of GI Number: 77550711 NR Desc: Skp1 family
  misc_feature: Homolog of GI Number: 28466911 NR Desc: At5g42190
  misc_feature: Homolog of GI Number: 3719211 NR Desc: UIP2
  misc_feature: Homolog of GI Number: 52076056 NR Desc: putative UIP2
  misc_feature: Homolog of GI Number: 18958257 NR Desc: kinetochore protein
  misc_feature: Homolog of GI Number: 21281127 NR Desc: putative SKP1/ASK1 protein At1
MAAAGDAGEKKMITLKSSDGEEFEVEEAVAMESQTIRHMIEDDCADNGIPLPNVNSKILSKVIEYCNKHVQAKPADGAAAGAGASDASAAAPAAPAEDLKNWDAEFVKVDQATLFDLILAANYLNIKGLLDLTCQTVADMIKGKTPEEIRKTFNIKNDFTPEEEEEIRRENQWAFE

SEQ ID NO: 4539 - DNA, 423 bp, Triticum aestivum
  misc_feature: Ceres CLONE ID no. 919222
  misc_feature: Ceres CDNA ID no. 40351489
  CDS (88)..(309): REFERENCED BY SEQ ID NO: 4540
gacagagcaacgcggcccaaatccaaaccccccggaccagcagagcaagagaagggagagagagagagagagagatctccatccccgatggcgtcccggagctgcaccttcgtcgagatcctgctcgccgtcatcctgccgccgctcggcgtcttcctccgctacggctgctgcagcatggagttcttgatctgtctgctgctcaccatcctgggctacatccccggcatcatctacgccatctacgtgctcgtcgcgcatggctcggcctcggaggagagcggcaaggactacgacgcccttgcttgatgtcctgtagcaactcatgccgtgctatcgtgtaagaatcgcatcgctatgtttctggatctcgagaaatagtaacggtgcctgcctcaatgttcaggaaaaaaaaaaaaaaaa

SEQ ID NO: 4540 - protein, 73 aa, Triticum aestivum
  misc_feature: Ceres CLONE ID no. 919222
  misc_feature: Ceres CDNA ID no. 40351489
  misc_feature (6)..(57): Pfam Name: UPF0057 PFAM Desc: Uncharacterized protein family UPF0057
MASRSCTFVEILLAVILPPLGVFLRYGCCSMEFLICLLLTILGYIPGIIYAIYVLVAHGSASEESGKDYDALA

SEQ ID NO: 4541 - DNA, 1138 bp, Triticum aestivum
  misc_feature: Ceres CLONE ID no. 919547
  misc_feature: Ceres CDNA ID no. 25446249
  CDS (123)..(890): REFERENCED BY SEQ ID NO: 4542
cattcaccgttcgaaaagttgagagagcttcccccaaaaggaccaggccagacgaccccgccgcgattattccccgcacccacccaattccccgagcaccgccgccgcgcgatcgccccaccatgtccggctacccctacggtggcgccggaggaggaggaggcggcggctacggggccccgcccgccggccagccccagtcctacggcggcggcggaggctacggtgctccgcccgcgggccagtcctacggcgccccgcctccctcgtcggcgccctacggggccccgccccccgcggcagcgccgtatggggccgctggcgggtacgggagcccgttcgcggcgctcgtgccgtcggcgttcccgccggggacggaccccaacgtcgtggcgtgcttccaggccgccgaccgcgacggcagcgggaccatcgacgacaaggagctgcagtccgcgctctccggctacaaccagagcttcagcctccgcaccgtccaccttctcatgtacctcttcaccaacaccaacgtccgcaggatcgggcccaaggagtttacttctgttttttacagtcttcagaactggaggtctatatttgagaggtttgaccgtgaccgaagtggtaaaattgatgcatcggagctgcgcgatgctcttctcagtctgggttattcagtttctccaactgtgctagacttgctcgtgtctaaattcgacaagactggaggcatgagcaaagcagttgaatatgacaactttattgagtgttgccttacggtcaagggtctgactgagaagttcaaggagaaggacacgtcttactccgggtctgcaactttcagttacgaggcattcatgttgactgtgctccctttcatcatcgcttgatggctccacagttcaatacaaagactgagctttgagtgtgttgttccaacttatgttgaaatgtttttccaacggaggtgtagtttgtttggattcgagtgatgttgctgcgttcctgataaggtgataccctggagattggaaactggtgtatgatggtagagcctgtggacggtcagtgagattgggttttgatcatattttatttccctttgatgaggcggcttaaaacaaaaaaaaaaaaaaaa

SEQ ID NO: 4542 - protein, 255 aa, Triticum aestivum
  misc_feature: Ceres CLONE ID no. 919547
  misc_feature: Ceres CDNA ID no. 25446249
  misc_feature (88)..(116): Pfam Name: efhand PFAM Desc: EF hand
  misc_feature: Homolog of GI Number: 31711842 NR Desc: At5g04170
  misc_feature: Homolog of GI Number: 6624721 NR Desc: putative cysteine protease
  misc_feature: Homolog of GI Number: 30681239 NR Desc: calcium
  misc_feature: Homolog of GI Number: 79313177 NR Desc: calcium ion binding
  misc_feature: Homolog of GI Number: 50948457 NR Desc: putative fiber protein Fb1
  misc_feature: Homolog of GI Number: 72047001 NR Desc:  similar to programmed cell death 6
  misc_feature: Homolog of GI Number: 30681234 NR Desc: calcium
  misc_feature: Homolog of GI Number: 17512472 NR Desc: RIKEN cDNA 2600002E23
  misc_feature: Homolog of GI Number: 51980425 NR Desc: PEF protein with a long N
  misc_feature: Homolog of GI Number: 55586687 NR Desc:  similar to PEF protein with a long N
MSGYPYGGAGGGGGGGYGAPPAGQPQSYGGGGGYGAPPAGQSYGAPPPSSAPYGAPPPAAAPYGAAGGYGSPFAALVPSAFPPGTDPNVVACFQAADRDGSGTIDDKELQSALSGYNQSFSLRTVHLLMYLFTNTNVRRIGPKEFTSVFYSLQNWRSIFERFDRDRSGKIDASELRDALLSLGYSVSPTVLDLLVSKFDKTGGMSKAVEYDNFIECCLTVKGLTEKFKEKDTSYSGSATFSYEAFMLTVLPFIIA

SEQ ID NO: 4543 - DNA, 1477 bp, Triticum aestivum
  misc_feature: Ceres CLONE ID no. 919764
  misc_feature: Ceres CDNA ID no. 25446085
  CDS (189)..(1121): REFERENCED BY SEQ ID NO: 4544
agatgccaaaataggccggtcttgtcacggccgagggaaccggaaacccaggcaggacacttggagctgcccgccgcgacgcccgccggccgctggcagcccactcctgcccaccgctgctgcgccctccccctacctaccttcttccccaatcccttgatagtgccgtgcgggagagagagacggcgatggcgaggcacttcctgctcaacaccggggccaagatcccctcggtggggctcggcacctggcaggccgaccccggcgtcgtcggcgccgccgtctacgccgccgtcaaggcgggctaccggcacatcgattgcgccagagtctacggcaatgaaaaggagatcggtttggcgctgaagaagctatttcaagagggcgtagtgaagcgtgaagatctatttatcacctctaagctatggaatgatcatcatgctcctgaagatgtgccagaggcactaaatgaaagcctgaatgatttacagcttgattacttggatctttatcttatccattggccgtttagagtcaagaagggaacgaacaacaaccctgaaaacatcgttacacctgacatccctgctacttgggcggcaatggagaagttacatgatgctggcaaagctcgcgcaattggtgtgagtaacttttcatcaaagaagttgggtgacttgcttgctgtagctcgtgtacctccagctgttgatcaggtggaatgccatccctgctggcagcaaactaagctccacaacttttgtcagtcagctggtgttcatcttagtgcttactcgccactaggttcacctggtactagttggatgaatggtaacatccttaaagaaccaataatcatctcaatatccgagaaacttgggaagacacctgcacaagtggctctgcgctggaacattcagatgggtcacagcgtgctaccaaagagcacgaatcaagaaaggataaagcaaaaccttgatgttcatgattggtcaattccagatgatgtgcttgctaaattctcggagattaaggaggctaggctgctcagaggcaacttcgccgttaatccacagagtgtttacaagacccacgaggagctgtgggatggtgagatttaggaaggctggtgtcgctgatcctgagcagggagcagcaagcatacatatcagtgcctgtcaattcgtttatctcaggattcactccccggagatcaaggttcagtgctctgagctttgcgattctatcctgtatctcgaattctcgattcacaaactatgttgtcagcagcttcattatttatgtgtttttagacaaagcttcattattaatttgcccttggggatagtatcgtgggcgttgcgttttggccttttgggtcttcagttctgttttgagcccgaagagaatcatgaatccagtgtgcgatttcttcgcgcgacaaaaggtctgtctggcagcaaaaaaaaaaaaaaaa

SEQ ID NO: 4544 - protein, 310 aa, Triticum aestivum
  misc_feature: Ceres CLONE ID no. 919764
  misc_feature: Ceres CDNA ID no. 25446085
  misc_feature (7)..(283): Pfam Name: Aldo_ket_red PFAM Desc: Aldo/keto reductase family
  misc_feature: Homolog of GI Number: 34908276 NR Desc: putative aldose reductase
  misc_feature: Homolog of GI Number: 34908280 NR Desc: putative aldose reductase
  misc_feature: Homolog of GI Number: 53749361 NR Desc: putative aldose reductase
  misc_feature: Homolog of GI Number: 29028836 NR Desc: At2g37790
  misc_feature: Homolog of GI Number: 79324628 NR Desc: oxidoreductase
  misc_feature: Homolog of GI Number: 4895205 NR Desc: putative alcohol dehydrogenase
  misc_feature: Homolog of GI Number: 28393400 NR Desc: putative aldo/keto reductase
  misc_feature: Homolog of GI Number: 13160397 NR Desc: aldose reductase
  misc_feature: Homolog of GI Number: 3236259 NR Desc: putative alcohol dehydrogenase
  misc_feature: Homolog of GI Number: 3378650 NR Desc: orf
  misc_feature: Useful for making lethal plants for genetic confinement systems
  misc_feature: Useful for making plants with increased biomass and foliage
  misc_feature: Useful for sterility
MARHFLLNTGAKIPSVGLGTWQADPGVVGAAVYAAVKAGYRHIDCARVYGNEKEIGLALKKLFQEGVVKREDLFITSKLWNDHHAPEDVPEALNESLNDLQLDYLDLYLIHWPFRVKKGTNNNPENIVTPDIPATWAAMEKLHDAGKARAIGVSNFSSKKLGDLLAVARVPPAVDQVECHPCWQQTKLHNFCQSAGVHLSAYSPLGSPGTSWMNGNILKEPIIISISEKLGKTPAQVALRWNIQMGHSVLPKSTNQERIKQNLDVHDWSIPDDVLAKFSEIKEARLLRGNFAVNPQSVYKTHEELWDGEI

SEQ ID NO: 4545 - DNA, 1633 bp, Triticum aestivum
  misc_feature: Ceres CLONE ID no. 919781
  misc_feature: Ceres CDNA ID no. 24766543
  CDS (174)..(1451): REFERENCED BY SEQ ID NO: 4546
agcaaacacttccccgtcctcgacgcaaactagcaacctcaagagaacagaccagcttcttctccaagtccagttccttctacccattggccggccgccattgagagtttgcttcctccgctccgtgtcatctctgcaggaaatccgccatcgctcgcccgggtgtactgaccatgtctgccatgcaatcatcgtatcttcctgctaccactgagtcaattgcaatggctcaggaagctaaggatgcttcagagtccattttaatcctctaccgtgtgcttgaagacccgtcttcttcttcagatgcagttagaacaaaagaagttgccattacaaatctgacaaactatctcacaaaagagaacagagccgaggagcttaggaatctgttgacccagctcaggccatttttcgcactgattcccaaggcaaagaccgcaaagattgtacgtggcatcattgatgccgtttccaagatacctggaacatctgatcttcagatctcactctgcaaggagatggtggaatggacacgggcagagaaacgtaccttcctcaggcagcgtgtggaagcaagactagcagcccttcttttggaaagtcaggagtacactgaagctcttacccttcttcctggtcttatcaaggaagtgaggaggctggatgacaggttgcttcttgttgacattgaccttctggagagcaaactccatttctctctaaggaaccttccaaaggccaaggcttctctgactgccgcaagaactgcagcgaatgccatttatgttccgccagcgcagcagggcactattgacctgcagagtggaatccttcatgccgaagagaaggattacaagaccgcctacagttacttctttgaagcgtttgaagggtttaatgcactggacgaccctaaggccatcttctgcttgaagtacatgcttctgtgcaagataatggtcaaccaagctgatgatgttgcaggagtaatctcgtctaaggcaggcctgaagtatgttggtcctgatgtggatgctatgaaagctgttgcggatgcctactcgaaacgatctctcaagtactttgaaaccgctcttggtgactacaaggcccagctggaggaggatcctattgtccacaggcacctctcgtctctgtatgataccctcctggagcagaacctgtgcaggctgattgaagcctactcaagggtggagattgcgcacgtagcagagatgatcgagctgccaatcgagcatgttgagaagaagctgtcacagatgatcctggacaagaaattcgcagggactctggatcagggtgcgggctgcctcatcatcttcgaagacgccaagacggaggcgatcttccctgctacgctcgaaacaatttcgaatgtggggaaggttgtcgagagcctttacatgaggtcagcaaagatcatggcttgaggagatgttttgttccccagttaaatcttacacttgagctctgctagagtctccaggacatgaaatgcctgtgtgttgccattatttattgcttgcaaattgtcttctgttagctctataaaatgtctatgtctgcgtgatggaaatacagttagcacttgctgacaaaaaaaaaaaaaaaa

SEQ ID NO: 4546 - protein, 425 aa, Triticum aestivum
  misc_feature: Ceres CLONE ID no. 919781
  misc_feature: Ceres CDNA ID no. 24766543
  misc_feature (85)..(107): Pfam Name: PCI PFAM Desc: PCI domain
  misc_feature: Homolog of GI Number: 3450889 NR Desc: 19S proteosome subunit 9
  misc_feature: Homolog of GI Number: 32700022 NR Desc: 26S proteasome subunit RPN6a
  misc_feature: Homolog of GI Number: 32700028 NR Desc: 26S proteasome subunit RPN6a
  misc_feature: Homolog of GI Number: 15810545 NR Desc: putative 19S proteosome subunit 9
  misc_feature: Homolog of GI Number: 38093742 NR Desc: putative proteosome subunit
  misc_feature: Homolog of GI Number: 72057611 NR Desc:  similar to 26S proteasome non
  misc_feature: Homolog of GI Number: 48097764 NR Desc: similar to CG10149
  misc_feature: Homolog of GI Number: 31242521 NR Desc: ENSANGP00000015227
  misc_feature: Homolog of GI Number: 34872897 NR Desc: similar to 26S proteasome non
  misc_feature: Homolog of GI Number: 25332508 NR Desc: protein F57B9.10
  misc_feature: Useful for increasing chlorophyll and photosynthetic capacity
  misc_feature: Useful for making plants with altered leaf shape eg curled leaves
MSAMQSSYLPATTESIAMAQEAKDASESILILYRVLEDPSSSSDAVRTKEVAITNLTNYLTKENRAEELRNLLTQLRPFFALIPKAKTAKIVRGIIDAVSKIPGTSDLQISLCKEMVEWTRAEKRTFLRQRVEARLAALLLESQEYTEALTLLPGLIKEVRRLDDRLLLVDIDLLESKLHFSLRNLPKAKASLTAARTAANAIYVPPAQQGTIDLQSGILHAEEKDYKTAYSYFFEAFEGFNALDDPKAIFCLKYMLLCKIMVNQADDVAGVISSKAGLKYVGPDVDAMKAVADAYSKRSLKYFETALGDYKAQLEEDPIVHRHLSSLYDTLLEQNLCRLIEAYSRVEIAHVAEMIELPIEHVEKKLSQMILDKKFAGTLDQGAGCLIIFEDAKTEAIFPATLETISNVGKVVESLYMRSAKIMA

SEQ ID NO: 4547 - DNA, 668 bp, Triticum aestivum
  misc_feature: Ceres CLONE ID no. 920244
  misc_feature: Ceres CDNA ID no. 40351490
  CDS (84)..(512): REFERENCED BY SEQ ID NO: 4548
atcagaagaggatttggaacatccaacatacccggcggctagaacaacgaaactgggagatcttctcgtcgagtagataatcgatggcgtcggcgcttcgtttcgcggcgagaaagatgtgcagccgcgtccttcagcgagcaccgcatctttatttgtcggcgagcgcctcagcggccgtcaaggagggacagcggcggatcggccatgccgggagctcccttcgccgattttgctcctcaggatcacctaatcttgttaataacaccaagcatggagtgcaatcagccgcggaatcagcttcgttcatcagtaatgcggaatacacaccatggtggtcagataatcaccctaagtttctacgcaacatatttctgtatacagtcgcggtgtctacaggaagcgttgcaacgctctatgcggtggcccgtatacatggggggccattattcagggaagcattaggattggagcctaatccaagcaacaaggatgatcgacagtcagattaacatgctctgtttcaactagatctataaacgttgtgtcgttatgtgcttgcttatattagtatttgtattgactatgatgacgctttgggctgcttcagtgtattgactgttgaataatgtatatgggcgtgtgttgagagaaaaaaaaaaaaaaaa

SEQ ID NO: 4548 - protein, 142 aa, Triticum aestivum
  misc_feature: Ceres CLONE ID no. 920244
  misc_feature: Ceres CDNA ID no. 40351490
MASALRFAARKMCSRVLQRAPHLYLSASASAAVKEGQRRIGHAGSSLRRFCSSGSPNLVNNTKHGVQSAAESASFISNAEYTPWWSDNHPKFLRNIFLYTVAVSTGSVATLYAVARIHGGPLFREALGLEPNPSNKDDRQSD

SEQ ID NO: 4549 - DNA, 1916 bp, Triticum aestivum
  misc_feature: Ceres CLONE ID no. 920261
  misc_feature: Ceres CDNA ID no. 25446864
  CDS (195)..(1613): REFERENCED BY SEQ ID NO: 4550
gcccctccccttctccgcaatcccattcaccacagtctagtcccctcccctccccactcctccacccccttcttcctccgccggccgctccgccgaatccaacccagatcctgttgattttccctgaattgatccgctcgaatcctaccaagccggtgttgagaagcagttctcgtgccctttggtgagcggcaatggcggcggcagggagactgcggggcaggcggcgggcacaaaaggaggtggagcgcgagcccgagccgttcaccatcgaggaggaggtgtcccacctcacccgggtccggtcggagccgtgccccggcacccgcgccgccatccatggcgccaagcggaagagggacgtctcggccttcgagatgctgtcgtcgagggagtccggccgctcgggaggcggcgggttctgttcggccgaccgcacctacgccgccgggaagcacctcccgtcggaaggaccctggtgcgtggaagacatggatagcgaggcctatgtctcgcagttctccagcgacggctcgatgctcgttgccgggtttcggggaagccgcatcagaatttacgatgtcgataaagggtggaaggttcataagaacataagctgcagaagtatgaggtggacggtttcagatattgcgctctcccctgaccagcgatatcttgcctattccagtttgtcgcctattgttcacattgttaatgtgcagaatgctggaagggaatcggatgctaatgttactgaaattcacgatggtttggaattctgtgatgacgatgaatactctttcgggatattctctgtgaaattttcgaaagatggtagagaagtagttgttgggaacaatgattgttcaatatatgtctatgatcttggagcaaataaagtgtcagaccgtatccgtgctcatacgtctgatgtcaacacggtcacctttgctgatgaaagtgggaatttgttgtactctggaagtgatgataatctctgtaaggtctgggataggcgttgccttgtaagagagaaaccagctggtgttttgacagggcacttagatgggattacatgtattgatagccgtggtgatgggcgttatctaatctccaactgcaaggatcagactatcaaactttgggatgtcagaaggatgtccgccaccgtaaaagggcgacaaccaagattatatgactgggactacagatggatgtcgttcccatcacacgctagatattataagcatccaaatgatctgtctctggcaacatacaggggtcattcagttctgcggacacttatccgctgctacttctctccaatgcacagcacgggccagaggtacatatacactggatcaagtgacgattccgtgcatatttacgatgtggtaaccggggcgaccgtcaagaagctctcatggcacggttcgatcatcagagactgcacctggcatccttaccgcccaacgcttgtaagctcttcctgggacggctatctggcccggtgggaggcatcaggcgacaacgaggacccctcggtgctcacgtgcgacgagcagaggactagcccttacgaccagacatacgggctctcttttgccctgtagtaagttgcagaggacctggcgtgacaagcagtgctgaggcgagctcgtgatgaatcttgatgttgggttgtggcggtttatcattgatgtgcttatatggcagtataagcacaagcagttatgcattgtatgtctgaggcaacttgtgctcctcttgctgtcactgatagaaaatagtgatgtaaacaagatgtagccgttgcttttgtaaatttgtttgcagttgatcaggtggtgtcagtgacaaattcatatgtaactatgcaagtttttttgttcttgttgtcaaaaaacaaaaaaaaa

SEQ ID NO: 4550 - protein, 472 aa, Triticum aestivum
  misc_feature: Ceres CLONE ID no. 920261
  misc_feature: Ceres CDNA ID no. 25446864
  misc_feature (404)..(441): Pfam Name: WD40 PFAM Desc: WD domain
  misc_feature: Homolog of GI Number: 2351587 NR Desc: LEC14B homolog
  misc_feature: Homolog of GI Number: 34914962 NR Desc: LEC14B like
  misc_feature: Homolog of GI Number: 3122326 NR Desc: LEC14B protein
  misc_feature: Homolog of GI Number: 55733926 NR Desc: putative WD
  misc_feature: Homolog of GI Number: 23198298 NR Desc: putative WD
  misc_feature: Homolog of GI Number: 7269787 NR Desc: putative WD
  misc_feature: Homolog of GI Number: 59858229 NR Desc: WD repeat domain 23 isoform 1
  misc_feature: Homolog of GI Number: 61866594 NR Desc:  similar to WD repeat domain 23 isoform 1
  misc_feature: Homolog of GI Number: 73962520 NR Desc:  similar to WD repeat domain 23 isoform 1 isoform 1
  misc_feature: Homolog of GI Number: 73962526 NR Desc:  similar to WD repeat domain 23 isoform 1 isoform 7
MAAAGRLRGRRRAQKEVEREPEPFTIEEEVSHLTRVRSEPCPGTRAAIHGAKRKRDVSAFEMLSSRESGRSGGGGFCSADRTYAAGKHLPSEGPWCVEDMDSEAYVSQFSSDGSMLVAGFRGSRIRIYDVDKGWKVHKNISCRSMRWTVSDIALSPDQRYLAYSSLSPIVHIVNVQNAGRESDANVTEIHDGLEFCDDDEYSFGIFSVKFSKDGREVVVGNNDCSIYVYDLGANKVSDRIRAHTSDVNTVTFADESGNLLYSGSDDNLCKVWDRRCLVREKPAGVLTGHLDGITCIDSRGDGRYLISNCKDQTIKLWDVRRMSATVKGRQPRLYDWDYRWMSFPSHARYYKHPNDLSLATYRGHSVLRTLIRCYFSPMHSTGQRYIYTGSSDDSVHIYDVVTGATVKKLSWHGSIIRDCTWHPYRPTLVSSSWDGYLARWEASGDNEDPSVLTCDEQRTSPYDQTYGLSFAL

SEQ ID NO: 4551 - DNA, 659 bp, Triticum aestivum
  misc_feature: Ceres CLONE ID no. 920625
  misc_feature: Ceres CDNA ID no. 40351491
  CDS (90)..(500): REFERENCED BY SEQ ID NO: 4552
acaccgcaaagcaatctcccccgctccacttcaaaacacccgagcagcctctccgatctcccatcccagcgcccccagcaccccccgcgatggcccgcacgaagcagacggcgcgcaagtccaccggcggcaaggccccgcggaagcagctggcgaccaaggcggcgcgcaagtcggccccggcgaccggcggcgtgaagaagccgcaccgcttccgcccgggcaccgtggcgctgcgcgagatccgcaagtaccagaagagcacggagctgctcatccgcaagctgcccttccagcgcctggtccgcgagatcgcgcaggacttcaagaccgacctccgcttccagagctccgccgtctccgccctgcaggaggccgccgaggcctacctcgtcggcctcttcgaggacaccaacctctgcgccatccacgccaagcgcgtcaccatcatgcccaaggacatccagctcgcccgccgcatccgcggggagcgcgcctaggcgcctcgctcgccgcactgctaggtgttttaggctccctgttcccgtcgtgttccatgtgtgcgtcgctcctatgtaactggcttgttgctgtgcttcgatgtactacttatatcgatgaaatatggctaccaggatgagacaaaaaaaaaaaaaaaa

SEQ ID NO: 4552 - protein, 136 aa, Triticum aestivum; identical to SEQ ID NO: 588
  misc_feature: Ceres CLONE ID no. 920625
  misc_feature: Ceres CDNA ID no. 40351491
  misc_feature (58)..(134): Pfam Name: Histone PFAM Desc: Core histone H2A/H2B/H3/H4

SEQ ID NO: 4553 - DNA, 1570 bp, Triticum aestivum
  misc_feature: Ceres CLONE ID no. 920648
  misc_feature: Ceres CDNA ID no. 25401459
  CDS (374)..(1393): REFERENCED BY SEQ ID NO: 4554
gtacgctgcattcccctccccttcccttcccttctcctctccaccataccatcggcgttgggttcggcggcgtcgatccagccggagacgttagatctgtcggcgctggcatcaccgcgaaggccaccgggtttggatccggccgagatgaagctcttgtttcgcaggcgacttgcgacggctggccgtccccgagtgggccggaggccaaccgtcggtgtgccggtacgcccaccaaggcatggtcgggttcctcaccacttcgagcgccgacgctcctttctccaactccgaccgccgccgctcgatctccacagccggttgatacatccttgacaggaacctcttcgcgcactacccagccgctgagagaatgcagctttggagccgtcctgccaagacactgcctattgagctcaatggacaagccatagtcgacagccttactgaaattaataagagaagggtgtcggctaacagagtggtaagggatgacgaactctacatagtgcaggttgaaggcattcctggcgtcagtctcccaactacgctggtcgtcaagaagtgccagaacgtgaacctagcaccacaagtggatgacaatgtcaagtaccgctacaattcggagatgttcctgttagccagcaattctcacgacaacatcatcaaagtcatagacctcatccagcaggaagacgcgatcatgctcgtttacgagtatccggtgaacggcggccttgactactggctgcaccaagccatggatgctggtcgggcgctgagctggccagagaggagggtcattgccatcggcacggccaaagggctctgccacatgcaccacggatgcaaaaagccaattatccaccacaacatcaactccaacaacatcttgcttgatcggaatttcaagcccgtgatagccagctttgacgctgcacaaatgaacatggccgggctcgaccaaccgttgccaattgcaggctttcctctaggaaactttggttactcagctccagaatatggggtcgcagcaagcgagctgacggagaaggttgacacatacagctttggggtgctgatgctggagctcgtcacggggcggctggccaatgaatttggagcggatggtcatttggcgacttgggcgcggaagaacttcactaagctgatggcaaaccaacaggaaatgttccagagtgccgtggaccgggacatcccagatcaagcacggtacatggaggagattgcaactgtgttcatgctgggcgtggattgcaccgtggggaatccgcagcaaaggcagtccatgcggatggctctcaaacgactccgccgcggctatggccgtgttggcccattccatggcctcctcacctgctatctgctgtgatgcttgttgtcttttctagacgtcacaaatgaatggtccatatgatcaatttgtagatacatctcaagtacaagcagtgatgtggactgtcctgcctttttctgagaacatttttgttgtccagttgtgttcacctctgcaaaattctgctgcttgttttcaaaaaaaaaaaaaaaa

SEQ ID NO: 4554 - protein, 339 aa, Triticum aestivum
  misc_feature: Ceres CLONE ID no. 920648
  misc_feature: Ceres CDNA ID no. 25401459
  misc_feature (84)..(245): Pfam Name: Pkinase PFAM Desc: Protein kinase domain
  misc_feature: Homolog of GI Number: 21886730 NR Desc: receptor
  misc_feature: Homolog of GI Number: 21886732 NR Desc: receptor
  misc_feature: Homolog of GI Number: 21886734 NR Desc: receptor
  misc_feature: Homolog of GI Number: 40641569 NR Desc: putative receptor
  misc_feature: Homolog of GI Number: 53792965 NR Desc: putative serine
  misc_feature: Homolog of GI Number: 50906551 NR Desc: putative CLAVATA1 receptor kinase
  misc_feature: Homolog of GI Number: 50906439 NR Desc: putative CLAVATA1 receptor kinase
  misc_feature: Homolog of GI Number: 50906435 NR Desc: putative CLAVATA1 receptor kinase
  misc_feature: Homolog of GI Number: 28393326 NR Desc: putative receptor protein kinase
  misc_feature: Homolog of GI Number: 50906539 NR Desc: putative LRR receptor
MQLWSRPAKTLPIELNGQAIVDSLTEINKRRVSANRVVRDDELYIVQVEGIPGVSLPTTLVVKKCQNVNLAPQVDDNVKYRYNSEMFLLASNSHDNIIKVIDLIQQEDAIMLVYEYPVNGGLDYWLHQAMDAGRALSWPERRVIAIGTAKGLCHMHHGCKKPIIHHNINSNNILLDRNFKPVIASFDAAQMNMAGLDQPLPIAGFPLGNFGYSAPEYGVAASELTEKVDTYSFGVLMLELVTGRLANEFGADGHLATWARKNFTKLMANQQEMFQSAVDRDIPDQARYMEEIATVFMLGVDCTVGNPQQRQSMRMALKRLRRGYGRVGPFHGLLTCYLL

SEQ ID NO: 4555 - DNA, 825 bp, Triticum aestivum
  misc_feature: Ceres CLONE ID no. 920771
  misc_feature: Ceres CDNA ID no. 25445644
  CDS (62)..(676): REFERENCED BY SEQ ID NO: 4556
ctaagtcaccacacactcccgtttcccgccgcctccgccctctgccgccgcagccgcagccatgggcgcgtacaagttcgtgtcggagctatggaggaggaagcagtccgacgtgatgaggttcgtgcagcgcgtgcgttgctgggagtacaggcagcagcccgccatcgtccgcatcaccaggcccacccgccccgacagggcacgccgtctcggcttcaaggccaaacagggttatgtgatctaccgtatccgtgtgagacgtggtggcaggaagcgcccagtgcccaagggtattgtttatggcaagcccaagcaccagggtattacccaactcaagttccagaggaacaagaggtctgttgctgaggaaagagctgggcgcaggcttggtggtcttcgtgtcctcaactcctactgggtgaatgaggactccacctacaagtactttgaggtcatccttgttgatgttgctcacagcgctgtccgcaacgatccaaggatcaactggctctgcaagcctgtgcacaagcaccgtgagctgcgtggtctcacctctgcaggaaagaaattccgtggtctgcgtggcaagggtcaccgccaccacaagaacaggccctcaaggagagccacctggaagaggaaccagaccgtctccctccgccgctaccgttaagcttacgtggtgttatgtcctgtggaacctgtcctatgctggagtcttttccaccgtcaaattttgctacctttctgtggctgaacgtccaggcatgcctgttgaactatttgctatgtgcctgtgttatgcgaaaaaaaaaaaaaaaa

SEQ ID NO: 4556 - protein, 204 aa, Triticum aestivum
  misc_feature: Ceres CLONE ID no. 920771
  misc_feature: Ceres CDNA ID no. 25445644
  misc_feature (2)..(193): Pfam Name: Ribosomal_L15e PFAM Desc: Ribosomal L15
  misc_feature: Homolog of GI Number: 14585879 NR Desc: ribosomal protein L15
  misc_feature: Homolog of GI Number: 48596903 NR Desc: ribosomal protein
  misc_feature: Homolog of GI Number: 34896990 NR Desc: ribosomal protein L15
  misc_feature: Homolog of GI Number: 21689875 NR Desc: putative 60S ribosomal protein L15
  misc_feature: Homolog of GI Number: 23505795 NR Desc: At4g16720/dl4385c
  misc_feature: Homolog of GI Number: 50878349 NR Desc: putative 60s ribosomal protein L15
  misc_feature: Homolog of GI Number: 3608479 NR Desc: ribosomal protein L15
  misc_feature: Homolog of GI Number: 7268491 NR Desc: ribosomal protein
  misc_feature: Homolog of GI Number: 2982318 NR Desc: probable 60S ribosomal protein L15
  misc_feature: Homolog of GI Number: 2982249 NR Desc: probable 60S ribosomal protein L15
  misc_feature: Useful for decreasing plant size
  misc_feature: Useful for making plants with increased biomass
  misc_feature: Useful for making shorter plants
  misc_feature: Useful for sterility
  misc_feature: Useful for sterility
MGAYKFVSELWRRKQSDVMRFVQRVRCWEYRQQPAIVRITRPTRPDRARRLGFKAKQGYVIYRIRVRRGGRKRPVPKGIVYGKPKHQGITQLKFQRNKRSVAEERAGRRLGGLRVLNSYWVNEDSTYKYFEVILVDVAHSAVRNDPRINWLCKPVHKHRELRGLTSAGKKFRGLRGKGHRHHKNRPSRRATWKRNQTVSLRRYR

SEQ ID NO: 4557 - DNA, 1853 bp, Triticum aestivum
  misc_feature: Ceres CLONE ID no. 920982
  misc_feature: Ceres CDNA ID no. 24766544
  CDS (80)..(1471): REFERENCED BY SEQ ID NO: 4558
gagagagagagagagagcgaacgagcgagcgagagagagggcctcattccgccgcgcttggaaccaaacacccacagccatggaaatcgtgcgatcccaacggcagctcgcggcggcggccgcagccgccagcggcggaggcagcggcgcgggggccctgccaacgtaccgtgtggcgccgcagctggaggtgcggctggaggagttcgagctcttcgccatcgaccgcctgcgagtgctgaaggggatctcggatgggctatcgcgggggaagaggccggaggagatggagaaactggtaagcgaattgtggaaggcacatatgaggcaccaggatccagcagagactttgaacaaggacataatatctcactttgtgctccgtcttgtatactgcagaacggaggaattgcgtaagtggtttctctccatggaaaatacactgtttcggtatcgctttcgtctcgagagtcctgaatcacagagtcttcttatgagtgagtttcagcttccatacaaagcattgccacactcggaattcgaggctgtgaaagataagttaagccaagttgcacgttccattggtcaatcggcaagcgttgaatctgtgttcttcaaggtaccttttgaagaagttccagatcttgttgccagccgccgagtattcctttcaaagggctatgcttatgttgcgatgagtcaggtggtttcacttgtggtaacccagttccgctgcaatatctcaaaggcacttgttttaacaaataggaaatggactgcgaccattaaggaacaagaaaaggataggttgactcctattgttgaagcgttaagcaatgcatattttggacctgattactctcagccaaatgatgctactgagatttcgccgaaggatattgatcaactggctagaacttctttccctctttgtatgcgccatatgctagagaagttgagagaaaaccatcatctcaaacacgggggtagaatgcagtttggtcttttcctcaagggtgctgggctaaagctggaggatgctctcacattttggagatcggaattctctcagaaggttggctctgagcgatttgacaaggaatatgcatatagtatcagacacaattatggaaaagaaggaaaacgaacggattacacttcatattcatgtcaaaagatcatctccgctacacctggcgttggtgatcatcatggttgcccttatcgacattttggtgaagagaacctgagagcagctctcaacaatatgggtgtcggtggaaatgctttggaagggatactcgataaagtgaagaacaggcattaccagctagcttgcacaatgactttcgaggcaactcatggtgtgtcatgtgataccggaatcaatcatcctaatcagtatttcagcgaaagccagaaagtcttgcaagctaagaaccaaacagtacagagtcagttatcgacctaagttgggatgctcctgcagaaagcagtccatccaccaagtagaaacccagcagctcggtgtcgaatcaagagtggtgcttgactgcaacgttgccagtacatggagatcaagtttgctcatgtttagcctgatgtgtggagcgacataagctgctcgctggggttgggggagttccaactgccggtccatggggtcgcatcctgtgctactattagcaacataagagaaacttaatctattgtcgtacaacagtactcgtcaaaatgagagcgaatagagattgatatggattttggtagtactgaatcttctagtaccaccgacttgtgaacaccctgatcagttgtgctgcttcttggagaggaaaaaaaaaaaaaaaaaa

SEQ ID NO: 4558 - protein, 463 aa, Triticum aestivum
  misc_feature: Ceres CLONE ID no. 920982
  misc_feature: Ceres CDNA ID no. 24766544
  misc_feature (27)..(391): Pfam Name: DNA_primase_lrg PFAM Desc: Eukaryotic
  misc_feature: Homolog of GI Number: 27808614 NR Desc: At1g67320
  misc_feature: Homolog of GI Number: 42563014 NR Desc: DNA primase
  misc_feature: Homolog of GI Number: 25404955 NR Desc: protein F1N21.14
  misc_feature: Homolog of GI Number: 50936265 NR Desc: putative DNA primase large subunit
  misc_feature: Homolog of GI Number: 50936267 NR Desc: putative DNA primase large subunit
  misc_feature: Homolog of GI Number: 37681907 NR Desc: primase
  misc_feature: Homolog of GI Number: 50744830 NR Desc:  similar to DNA primase large subunit
  misc_feature: Homolog of GI Number: 62654813 NR Desc:  similar to DNA primase large subunit
  misc_feature: Homolog of GI Number: 34874606 NR Desc: similar to DNA polymerase alpha subunit III
MEIVRSQRQLAAAAAAASGGGSGAGALPTYRVAPQLEVRLEEFELFAIDRLRVLKGISDGLSRGKRPEEMEKLVSELWKAHMRHQDPAETLNKDIISHFVLRLVYCRTEELRKWFLSMENTLFRYRFRLESPESQSLLMSEFQLPYKALPHSEFEAVKDKLSQVARSIGQSASVESVFFKVPFEEVPDLVASRRVFLSKGYAYVAMSQVVSLVVTQFRCNISKALVLTNRKWTATIKEQEKDRLTPIVEALSNAYFGPDYSQPNDATEISPKDIDQLARTSFPLCMRHMLEKLRENHHLKHGGRMQFGLFLKGAGLKLEDALTFWRSEFSQKVGSERFDKEYAYSIRHNYGKEGKRTDYTSYSCQKIISATPGVGDHHGCPYRHFGEENLRAALNNMGVGGNALEGILDKVKNRHYQLACTMTFEATHGVSCDTGINHPNQYFSESQKVLQAKNQTVQSQLST

SEQ ID NO: 4559 - DNA, 990 bp, Triticum aestivum
  misc_feature: Ceres CLONE ID no. 921403
  misc_feature: Ceres CDNA ID no. 36707425
  CDS (312)..(866): REFERENCED BY SEQ ID NO: 4560
cttatctcttcgtctcgcaaaaggggagacagaagagagttcgatttccgactaaaacctctcgccgccgacgaccaagctcggagacctattgacctagttcccaatgtcggacgcagatgattaccgttgcttcgttggcagtctgtcatggaacacaactgatgtggatctgaaggatgcttttgggaaatttggtcgagttactgagacaaaggtggttcttgacaagttctctggccgatcacgtggctttggatttgtgacttttgatgacaagaaggccatggaagaagctgttgaggctatgaatggaattgatttggatggaaggaatattactgttgaaagagcacaacctcaaggttcaggcagggaccgtgatggagatcgagactatcgtggtggtggtgaccgctatggtggtggccgtgattttggtggcggtcgtggtggtggtcgtggtggtggcggtgattgctacaaatgtggcaagcctggtcattttgcaagggagtgcccatctggtgatggtggggacaggtatggtagcagggatgacaggtacagtagcagggatgacaggtacagtagcagggatgacaggtacagtagtagggatgacaggtatggtggcagggatggtgcaagggatgacaagtatggtggtagcaacggcagcagtcgctatgggcctgaccgtggtggtgatcgctattctggaagtcgtgatggaggaagccgcggcagtggtggcggtgatcgatacagccgtgacaggtctggaccgtatgatcgtcgcagccgagatgaatactgatcttgatggtggagattctgtctcaggtatgaaaggtattggataatacaagtggtatgtttgctttatcacataaggcagcaaatggtttgctgttgtactctttatgagaagtttaatgcttttgttatccatgctgactagtgcttggttcaaaaaaaaaaaaaaaa

SEQ ID NO: 4560 - protein, 237 aa, Triticum aestivum
  misc_feature: Ceres CLONE ID no. 921403
  misc_feature: Ceres CDNA ID no. 36707425
  misc_feature (123)..(140): Pfam Name: zf PFAM Desc: Zinc knuckle
  misc_feature (9)..(80): Pfam Name: RRM_1 PFAM Desc: RNA recognition motif.
  misc_feature: Homolog of GI Number: 12659074 NR Desc: RNA
  misc_feature: Homolog of GI Number: 50919955 NR Desc: putative RNA binding protein
  misc_feature: Homolog of GI Number: 2129944 NR Desc: RNA
  misc_feature: Homolog of GI Number: 19699180 NR Desc: AT3g26420/F20C19_14
  misc_feature: Homolog of GI Number: 50934801 NR Desc: glycine
  misc_feature: Homolog of GI Number: 21387121 NR Desc: RNA
  misc_feature: Homolog of GI Number: 31712074 NR Desc: putative RNA
  misc_feature: Homolog of GI Number: 82623423 NR Desc: putative glycine
  misc_feature: Homolog of GI Number: 799015 NR Desc: putative glycine rich RNA binding protein
  misc_feature: Homolog of GI Number: 7024451 NR Desc: glycine
MSDADDYRCFVGSLSWNTTDVDLKDAFGKFGRVTETKVVLDKFSGRSRGFGFVTFDDKKAMEEAVEAMNGIDLDGRNITVERAQPQGSGRDRDGDRDYRGGGDRYGGGRDFGGGRGGGRGGGGDCYKCGKPGHFARECPSGDGGDRYGSRDDRYSSRDDRYSSRDDRYSSRDDRYGGRDGARDDKYGGSNGSSRYGPDRGGDRYSGSRDGGSRGSGGGDRYSRDRSGPYDRRSRDEY

SEQ ID NO: 4561 - DNA, 1120 bp, Triticum aestivum
  misc_feature: Ceres CLONE ID no. 921806
  misc_feature: Ceres CDNA ID no. 40351492
  CDS (70)..(930): REFERENCED BY SEQ ID NO: 4562
aacccatcacatcctcccttcttgctgagctgagcacgccccttctctctcaactttgggctcgaggcaatggcggcgctcgctccgacgaagatgctcggcacccggctcaacttcgccggctcctccaggtacgccacagcggcaccaactgctggcgcacagaagatcgtctccctctttgatcgcttcaagaagaagcctgccccgaagccgaagcccgcccccgtggccacctcgagcgtaggcatcgacgacgagctcgccaagtggtacggccctgacaggaggatctacttgcccaacggactccttgaccggtcggaggtgccggagtacctcaacggagaggttcccggagactacggctatgatccttttggtctgggcaagaagccagaggacttcgccaagtaccaggcctttgagctcatccatgccaggtgggccatgctcggcgccgccggattcatcatccccgaggcgctcaacaagttcggcgcaaactgcggtcccgaggccgtttggttcaagactggcgcccttctccttgacggcaacaccctcaactacttcggcaacagcatccccatcaacctgatcctcgccgtcgtcgccgaggtcgtcctcgtcggaggcgccgagtactacaggatcaccaacggactggaatttgatgacaagctccaccccggtggcccattcgacccgctcggcctcgccaccgaccccgaccaggcggcgctgctcaaggtgaaggagatcaagaacggacggctggccatgttctccatgctgggcttcttcatccaggcctacgtcaccggcgagggcccctttgagaacctgtgcgcgcacctcagcgaccccttcggcaacaacctgctcaccgtcatctccggcgccgccgagagggtgcccagcctgtgagctggccgttgattgcccgtccgccgccgtcggctgttgatggatcagctgcgtgcgatgcgcgcgatgcagcatcatgtgctgtgtgaattttaccggggaaaagtatgagagtacgaatgtgccgtacgtgtaaattatcaagggcagaagaaacatgatcgttctgatttcaaaaaaaaaaaaaaaa

SEQ ID NO: 4562 - protein, 286 aa, Triticum aestivum
  misc_feature: Ceres CLONE ID no. 921806
  misc_feature: Ceres CDNA ID no. 40351492
  misc_feature (86)..(250): Pfam Name: Chloroa_b PFAM Desc: Chlorophyll A
MAALAPTKMLGTRLNFAGSSRYATAAPTAGAQKIVSLFDRFKKKPAPKPKPAPVATSSVGIDDELAKWYGPDRRIYLPNGLLDRSEVPEYLNGEVPGDYGYDPFGLGKKPEDFAKYQAFELIHARWAMLGAAGFIIPEALNKFGANCGPEAVWFKTGALLLDGNTLNYFGNSIPINLILAVVAEVVLVGGAEYYRITNGLEFDDKLHPGGPFDPLGLATDPDQAALLKVKEIKNGRLAMFSMLGFFIQAYVTGEGPFENLCAHLSDPFGNNLLTVISGAAERVPSL

SEQ ID NO: 4563 - DNA, 1451 bp, Triticum aestivum
  misc_feature: Ceres CLONE ID no. 922545
  misc_feature: Ceres CDNA ID no. 29191828
  CDS (195)..(1262): REFERENCED BY SEQ ID NO: 4564
aaaaactgtagaggagaagaacctttgccccgccgccgccgccgcgcgctcagcctctctctctctccctctctctctctctctctccttacccagccgcctcgtgccctcgtcctctcccgtctccgaccgcgccgccgccactaggccacggccgccgccccctccccaagcctcgcttcgctcccgcggggatggaaagccccgatggttcctcattgccagactttcttgagctccagcgcacccgtgttctctgcaaggccgatgcccccactcatacagaagggtttcaatactcgggtgcttttgctgctatgggagttgatactagtgtctcagttgagaagttctgcaagaactttaaaatcgagataaatcgacttacagatgaggatatggagtttgatatgattggcgttgatgcatcgatagctaatgctttccggagaatcctcattgcagaggttcctacaatggccattgagaaagtcttcatggttgacaatacctcagttatagcagacgaggtcctttcacatcgactaggccttattccacttgatgctgacccaaggctttttgattatatctctgatgatgtcccaaatgaaaggaacactattgtgtacaaactgcatgtttcatgtgaaaagggttcccaaaggcttacagttaagtctggtcaattggagtggttgccagaaggcagccaattaactatggcatctcctgcgcaatctggggacaatcagaggacctacacatcctttggtcaaagccaacagaatacctctgaaaggcctctcggtgtgaagtataatgacataacaatcgccaggcttgggccaggacaggctattgagcttgaggcacatgctgttaagggagtggggaaagttcatgcgaagtggtctccagttgctacagcctggtacaggatgctccctgaggttgttcttctcaaagaaattaaaaatggtgatgcagaggagctagtgaaaaaatgcccagttaatgtttttgacattgaagacctgggaaagggggagaagagagcagttgttgcaaagccaagagcatgcaccctttgtagggaatgtgtcagactggctgatgatcaagtagagctacggcgcgttagagaccacttcatttttacaatcgagtccaccggatctctaccgccagaggtgctcttcacagaggccgtgaatatccttgaggagaagtgcgagcgagtgatatccgaactttcctgagcccgatataaagttttcagtaatgttctgatgcagtttttctgttactactatgttgtgttgaggacgaaggcttagtgtactagtataggttactgtaaaacttctgtgtccaatactctggagtcacattcagctaatttatcaccgagctggtatatgcagctccttccaaaaaaaaaaaaaaaa

SEQ ID NO: 4564 - protein, 355 aa, Triticum aestivum
  misc_feature: Ceres CLONE ID no. 922545
  misc_feature: Ceres CDNA ID no. 29191828
  misc_feature (100)..(241): Pfam Name: RNA_pol_A_bac PFAM Desc: RNA polymerase Rpb3/RpoA insert domain
  misc_feature: Homolog of GI Number: 14423464 NR Desc: RNA polymerase subunit
  misc_feature: Homolog of GI Number: 21592304 NR Desc: RNA polymerase subunit
  misc_feature: Homolog of GI Number: 12323800 NR Desc: RNA polymerase subunit
  misc_feature: Homolog of GI Number: 514322 NR Desc: RNA polymerase subunit
  misc_feature: Homolog of GI Number: 50912273 NR Desc: putative RNA polymerase subunit
  misc_feature: Homolog of GI Number: 42571933 NR Desc: DNA
  misc_feature: Homolog of GI Number: 41056007 NR Desc: RNA polymerase 1
  misc_feature: Homolog of GI Number: 49618929 NR Desc: RNA polymerase I 140 kDa subunit
  misc_feature: Homolog of GI Number: 68401640 NR Desc:  similar to RNA polymerase 1
  misc_feature: Homolog of GI Number: 68401643 NR Desc:  similar to RNA polymerase 1
MESPDGSSLPDFLELQRTRVLCKADAPTHTEGFQYSGAFAAMGVDTSVSVEKFCKNFKIEINRLTDEDMEFDMIGVDASIANAFRRILIAEVPTMAIEKVFMVDNTSVIADEVLSHRLGLIPLDADPRLFDYISDDVPNERNTIVYKLHVSCEKGSQRLTVKSGQLEWLPEGSQLTMASPAQSGDNQRTYTSFGQSQQNTSERPLGVKYNDITIARLGPGQAIELEAHAVKGVGKVHAKWSPVATAWYRMLPEVVLLKEIKNGDAEELVKKCPVNVFDIEDLGKGEKRAVVAKPRACTLCRECVRLADDQVELRRVRDHFIFTIESTGSLPPEVLFTEAVNILEEKCERVISELS

SEQ ID NO: 4565 - DNA, 1377 bp, Triticum aestivum
  misc_feature: Ceres CLONE ID no. 922551
  misc_feature: Ceres CDNA ID no. 25447106
  CDS (68)..(1177): REFERENCED BY SEQ ID NO: 4566
acgccacacacacacacacaccggacacaagcccacccagcgccccaccagccagcacccgcccgccatgtcgtccgccgcgccggtgccggaggagcagccgccgcgcccggtgcgcttcggcatcatgggctgcgcctccatcgcgcgcaagctcgcgcgggccatgctgctggccgcgcccgccgccgccgtggccgccgtcggcagccgctccgaggccaaggcgcgcctcttcgccgccgacaacggcctccccgcggccgcgcgcctgcacggctcctacgaggcgctcctcgacgacccggccgtcgacgccgtctacctgccgctccccaccagcctccacgtgcggtgggccaccgccgccgcggcccggggcaagcacgtgctcctcgagaagcccaccgcgctctgcgccgccgacctcgacgccatcctcgccgcctgcgaggccggcggcgtccagttcatggactccaccatgtggatgcaccacccccgcaccgccaagatgcgggagctcctccccgccgacgtcggcgacgtcagagttataaacagtctgttcagcttccgagcaaacgaagacttcctccagaatgacatcagggtcaagccagacctcgacgccctgggcgtgctcggcgatgccgggtggtactgcatccgcgcgatcctgtgggccgtcgactacgagctcccgaagaacgtgatcgcgctccctgagcctgtcaagaaccaagccggcgtgctcatcgcctgtggcgcgacgctctactgggccgacggaaagatggccaccttccactgctcgttcctcgccaacctcaccatggacctgaccgtcatcggcacggacggtacgctccatgtcaccgacttcatcatcccgtacgaggagaaatccggcccgttcagcgtggcgtccaggtcgaacttcgccgagctccacaccggatgggttccgcagccgagcaagcacgtcgtcacgacagacctgccgcaggaggccctgatggtcaaggagttctgcaggctggtgcagggcatcagagacgccggcgccaagcctgaggggaagtggccggccatcaccaggaagacacaggttgtgatggatgcagtgaagacttcgattgacaagggatttgagtctgtcgatgttgtgagctaaaatacaacacgtagctggtcattcggatgatatgtcttccagaccatggcgtataggttgtatgtttactcaaatcatactacttctacgcggtgcagaactacctattggaataactcgaattatttgtcatactaaggacaacattgcagttatcaagttgaatggtatatttttacggattaaaaaaaaaaaaaaaa

SEQ ID NO: 4566 - protein, 369 aa, Triticum aestivum
  misc_feature: Ceres CLONE ID no. 922551
  misc_feature: Ceres CDNA ID no. 25447106
  misc_feature (151)..(262): Pfam Name: GFO_IDH_MocA_C PFAM Desc: Oxidoreductase family
  misc_feature (16)..(139): Pfam Name: GFO_IDH_MocA PFAM Desc: Oxidoreductase family
  misc_feature: Homolog of GI Number: 31431967 NR Desc: putative oxidoreductase
  misc_feature: Homolog of GI Number: 4538897 NR Desc: AX110P
  misc_feature: Homolog of GI Number: 60594286 NR Desc: Chain B
  misc_feature: Homolog of GI Number: 21954073 NR Desc: putative AX110P protein
  misc_feature: Homolog of GI Number: 7488933 NR Desc: protein AX110P
  misc_feature: Homolog of GI Number: 22137080 NR Desc: At1g34200/F23M19.12
  misc_feature: Homolog of GI Number: 5091625 NR Desc: Similar to gbD14605 AX110P embryogenesis
  misc_feature: Homolog of GI Number: 12322603 NR Desc: oxidoreductase
  misc_feature: Homolog of GI Number: 62319092 NR Desc: AX110P like protein
  misc_feature: Homolog of GI Number: 32474689 NR Desc: putative oxidoreductase
MSSAAPVPEEQPPRPVRFGIMGCASIARKLARAMLLAAPAAAVAAVGSRSEAKARLFAADNGLPAAARLHGSYEALLDDPAVDAVYLPLPTSLHVRWATAAAARGKHVLLEKPTALCAADLDAILAACEAGGVQFMDSTMWMHHPRTAKMRELLPADVGDVRVINSLFSFRANEDFLQNDIRVKPDLDALGVLGDAGWYCIRAILWAVDYELPKNVIALPEPVKNQAGVLIACGATLYWADGKMATFHCSFLANLTMDLTVIGTDGTLHVTDFIIPYEEKSGPFSVASRSNFAELHTGWVPQPSKHVVTTDLPQEALMVKEFCRLVQGIRDAGAKPEGKWPAITRKTQVVMDAVKTSIDKGFESVDVVS

SEQ ID NO: 4567 - DNA, 2076 bp, Triticum aestivum
  misc_feature: Ceres CLONE ID no. 922886
  misc_feature: Ceres CDNA ID no. 36700026
  CDS (74)..(1453): REFERENCED BY SEQ ID NO: 4568
gagtttctaagtccagctccaccgttagctcccaaatctcggtgtggccgcggcggccgaggcgaggcgagaaatgtcgtcctccgtctccgccgccgttctccgccgtctcggcgaccggctcggcctccgccgactcgcgacgctccccgactacgcggccggcgccgaggagctgccgcagcaccccacctccaaggacgcctacttcgcggcggtcaaccacctctccaccatcgtacggcgcgacttctacctggagcgcaccctgaaccgcctccgcctgccgtcccccttcccgccggacctcgcgctccgcgtcatccgcgccgctgccccctccgagcccctccacgccgcccgcttcctagcgtggctccgggcgaagcccaatttctccccctccgccgatcacttcgacgcgctgctcctcccgctcgcccgcgcgcgcctcttcacccacctctggacccaggcctccgacatgcgcgcgctcggcctccccctctctccggcaaccttctcggcggttatctcgtcctacggccactcccgcctcgccgagcaggccgtcgaggtcttcaatcgccttccccatttcgggtgcccgcagaccaccgaggtctacaacgcccttctcgatgcgctctgcgccaacggcaacttcgccggcgcctacaagctgctccgccgcatggcgcgaaagggcgtggccccagaccgcgccacgttcagcacgctcgtcgacgcctggtgcgcgtcggggaagctccgggaggcgcaggcgttcctcgacgacatgtcgtcccgcgggttccggccgccggtgcgcggccgggacctcctcgtcgacgggctcgtccgagctgggcgcctggaagaagccaaggcattcgccctccgcatcaccaaggagggcgtcctccccgacgtggccacattcaactcgctcgcccaggcgctttgcgatgctggtgatgtggaattcgccgtgggtcttcttgccgatgcttccagtcgtggcatgtgcccagatatctcaacttacaaagtgatgctaccggccgtggccaaggctggccgaattgaggaggcattccgattgttctatgcggctattgaggatggccaccggcccttcccaagtctatatgcggcgatcgtcaaggcgctctgcaaggcaggtcgtttcgctgatgctttcgccttttttggtgatatgaagtccaaggggcacccacctaaccggcctgtgtatgtgatgcttgtcaaaatgtgtgtgaggggtggtcggttcttggatgctgcaaactaccttcttgagatgagtgaggctgggttcgcgccacgggcgccaacctttaacgttgtagttgatgggctgcggcatcttgggaaacatgatctagcccggaggatggagcagcttgagatgtcactaaaaggaaactgaatggatccggaagtagatgcagtctagtggggcgctgcgaattgcttggtgaagtttctgaatttccaggtagagctcctatcttctaattgtatttcatgacataggccgccagtgctatgctgttggactgtgactgatatatgcttgacaggtgatttatttgttttcggtagaaagaatcaatgaataaggccatcagatagtctcaactaatgtgctcaaaattgtgcagtgtaggttcacaagaaaagtagtggcggagtaggcactaagttcagaggaatgtaagttttgtggttgcatagacaagattattgaaatatccatggtccattggtgtttgatcaggtgttttcactgttcaatttagtaccaactgtgtgctccatgataattcagtataaagattggagccatgctactttgtactatgatttaaaagtgtattgttgagatgtcactagaaggaaactgaatgaatcaggaagtagatgctgtctagtggggtgctgtgaattgcatggtaaaggttctgaattttcaggtagcattcctgtcttctgattgtattctgtgacataaaccaatgttatgctgttggactaaaaaaaaaaaaaaaa

SEQ ID NO: 4568 - protein, 459 aa, Triticum aestivum
  misc_feature: Ceres CLONE ID no. 922886
  misc_feature: Ceres CDNA ID no. 36700026
  misc_feature (148)..(182): Pfam Name: PPR PFAM Desc: PPR repeat
  misc_feature: Homolog of GI Number: 15238810 NR Desc: pentatricopeptide
  misc_feature: Homolog of GI Number: 50947789 NR Desc: pentatricopeptide
  misc_feature: Homolog of GI Number: 34896698 NR Desc: putative pentatricopeptide repeat protein
  misc_feature: Homolog of GI Number: 50898410 NR Desc: PPR protein
  misc_feature: Homolog of GI Number: 50943785 NR Desc: chloroplast RNA processing protein
  misc_feature: Homolog of GI Number: 50253128 NR Desc: pentatricopeptide
  misc_feature: Homolog of GI Number: 50924848 NR Desc: B1358B12.18
  misc_feature: Homolog of GI Number: 50909603 NR Desc: putative pentatricopeptide
  misc_feature: Homolog of GI Number: 15242446 NR Desc: pentatricopeptide
  misc_feature: Homolog of GI Number: 34896658 NR Desc: putative membrane
MSSSVSAAVLRRLGDRLGLRRLATLPDYAAGAEELPQHPTSKDAYFAAVNHLSTIVRRDFYLERTLNRLRLPSPFPPDLALRVIRAAAPSEPLHAARFLAWLRAKPNFSPSADHFDALLLPLARARLFTHLWTQASDMRALGLPLSPATFSAVISSYGHSRLAEQAVEVFNRLPHFGCPQTTEVYNALLDALCANGNFAGAYKLLRRMARKGVAPDRATFSTLVDAWCASGKLREAQAFLDDMSSRGFRPPVRGRDLLVDGLVRAGRLEEAKAFALRITKEGVLPDVATFNSLAQALCDAGDVEFAVGLLADASSRGMCPDISTYKVMLPAVAKAGRIEEAFRLFYAAIEDGHRPFPSLYAAIVKALCKAGRFADAFAFFGDMKSKGHPPNRPVYVMLVKMCVRGGRFLDAANYLLEMSEAGFAPRAPTFNVVVDGLRHLGKHDLARRMEQLEMSLKGN

SEQ ID NO: 4569 - DNA, 1504 bp, Triticum aestivum
  misc_feature: Ceres CLONE ID no. 923092
  misc_feature: Ceres CDNA ID no. 29191829
  CDS (83)..(1114): REFERENCED BY SEQ ID NO: 4570
ttttttctctcctttttctcccatccagaaccaaagacccagctcactagccccctccggcaggtctagaaacctgctagtgatggcacgcgtcgctgccgctaacctgcgtggtctggtcggcattggagcggcgggtcggcgccgggtgaccgcctccgtcgtgacgcaccgcgcgacacccggcgggcgcgggttccgcgccgcggcctcaggctctgtgggcaggacgacgcctgaatcctcctcttcgtcctcgtcggctctaccacagttgcagccgcggcgcggcttggcgacgagacgagcggtgctgcgtgacttgcttagcggcggcttcgagagtgaggatggtaatctgagctgtggatattcaagttttaaggggaggagacctactatggaggatcgctacgacgtaaagttcgctaaaattaagggacagacagttagcctgtttggtgtatttgatggtcatgcaggagcacttgctgctgaatatctaaaggaacatctgcttgacaaccttatcgagcatcctcagttcctgagaaacccaaagcttgctctaaagacggccttcctgaaaagtgatgctgatttcttagaatcggtaaccactccttatagggaggatggttcgacagctttggctgctgttttggttggtgaacaactttatgtagcaaatgttggcgattcacgtgctatcgctttaaaaggtggcaaagctatcccactctcagatgaccatagacctaacttaaaggatgagcgaacgagaattgagaatgctggaggtggcgttagttatgatggttttacttggagggttgatggaattctggcaatgtcccgtgcatttggcaaccgtggattgaagaattatgtgatagcagagcctgacattcaggaaacgcaggtcaacagtgacctggaatacctggttctcgctacagatggtctttgggatgttgtgcaaaatgaggatgttatttcacttatgagagcaactgacgggcctgaggcagcggcggtgaagctgacggaaatggcccactcccggcacagctcagacaacatcacatgcattgtggtgcgatttcaccactgaacaatgtaggatacctgacggagattgatggcagtgaagttttgtcacttgaaatatccgaaagaatatcttcctctgatctatggcaccaacaagacttcaacagctgtgaaagagactggccgattggttggttctttttgtagggaattttttgcatctattatcattagtggaattgcatcagatctgttagtagttgggtccacaaaatctggagaaaacctcaaacgtggaacatgatgttacgtccgttccatcgtcattttgcattctggtgcaacaaatggagaaggcctagggcatgctactattacaccactgcttcattatcttataataataattgaaggagtgtggagtgttttcttcgtaaaaaaaaaaaaaaaa

SEQ ID NO: 4570 - protein, 343 aa, Triticum aestivum
  misc_feature: Ceres CLONE ID no. 923092
  misc_feature: Ceres CDNA ID no. 29191829
  misc_feature (93)..(334): Pfam Name: PP2C PFAM Desc: Protein phosphatase 2C
  misc_feature: Homolog of GI Number: 50932911 NR Desc: protein phosphatase 2C
  misc_feature: Homolog of GI Number: 22137282 NR Desc: AT5g53140/MFH8_8
  misc_feature: Homolog of GI Number: 9757995 NR Desc: protein phosphatase 2C
  misc_feature: Homolog of GI Number: 20146110 NR Desc: protein phosphatase 2C
  misc_feature: Homolog of GI Number: 50929353 NR Desc: OSJNBa0011F23.20
  misc_feature: Homolog of GI Number: 8979708 NR Desc: protein phosphatase 2C
  misc_feature: Homolog of GI Number: 8778653 NR Desc: F9C16.6
  misc_feature: Homolog of GI Number: 63003905 NR Desc: protein phosphatase 1
  misc_feature: Homolog of GI Number: 61859604 NR Desc:  similar to protein phosphatase 2C epsilon
  misc_feature: Homolog of GI Number: 34857062 NR Desc: similar to protein phosphatase 2C epsilon
MARVAAANLRGLVGIGAAGRRRVTASVVTHRATPGGRGFRAAASGSVGRTTPESSSSSSSALPQLQPRRGLATRRAVLRDLLSGGFESEDGNLSCGYSSFKGRRPTMEDRYDVKFAKIKGQTVSLFGVFDGHAGALAAEYLKEHLLDNLIEHPQFLRNPKLALKTAFLKSDADFLESVTTPYREDGSTALAAVLVGEQLYVANVGDSRAIALKGGKAIPLSDDHRPNLKDERTRIENAGGGVSYDGFTWRVDGILAMSRAFGNRGLKNYVIAEPDIQETQVNSDLEYLVLATDGLWDVVQNEDVISLMRATDGPEAAAVKLTEMAHSRHSSDNITCIVVRFHH

SEQ ID NO: 4571 - DNA, 1817 bp, Triticum aestivum
  misc_feature: Ceres CLONE ID no. 923283
  misc_feature: Ceres CDNA ID no. 24766546
  CDS (319)..(1497): REFERENCED BY SEQ ID NO: 4572
atcaaacggccgttgcagcgcgcccgcactccccaccccaccccctttccccgcctcatccccttctcgtgccgccgccgccgccgccgttcgccaccatcctccgccgacctaccgtcgtccccggcgccggtggagacgacggggagtagtcccctcgtccggcttgcgctgtcgcgagccacgacccgatccgcttgcgccgtactggataaaggcaagagttctgttggtgcattgagaagcgacactgtgattttcttagataacagatgaggcgagctcggaggcgtacgtgggtgggatgactgatgagggatgatagtgacattgatgaactttctacgggcgtgttggagaccttcatccaaccggcatgcccggacaggctcagatgctgccggtaggcaggatggacttctatggtacaaggacgccggggagcatgtaaatggcgacttctccatggctgttgtccaggccaataacctacttgaggaccagtgtcagattgagtcgggtccgttgagctttctcgactctggcccatatggcactttcgtcggggtttatgatgggcacggtggaccagagacagcttgctacatcaacgataacctcttcaaccatcttaaacggttcacttcggaacaaaattcaatgtcagctgatgtactgaagaaagcatatgaagctacagaagatgggttcttctctatcgtctccaagcaatggcctgtcaagcctcaaatagcggctgttggctcatgctgtctggttggtgttatctgtggtggcatgctttatgttgccaatgttggggattctcgtgctgttttaggaaaacatgttaaagccactggagaagtattggcagtccaactgtccgcagagcataatgtcagcattgagccagtgagaaaagaattgcagtcaatgcaccctgaagataggcatgttgttgttctcaagcacaatgtttggcgtgtaaaaggcctaattcaggtctgcagatcgattggtgatgcctatctgaaaaaacaagagttcaaccgggaacctctgtatgcaaaattccgtcttcgtgaaccttttaacaggcccatactaagttcagaaccatccatttgcgtgcaaccaatacagccacatgatgagtttatcatatttgcatctgatggactttgggagcacttaaccaaccaggaggctgttgacattgttcaaagtagccctcgtagtgggagcgctaggaggctcataaaatcagccctgctagaagcagccaagaaaagagagatgaggtattccgatctcaaaaagatcgaccgaggtgtccgtcgccacttccatgacgacataaccgtcatcatactctacctcgactcgagcctcgtaagcagggcgagcacccacaggggccctgctgtttcgctgagaggtgccggcgtgagcctgcgcagcagcacactcgcaccttatcggtcgcagatgtaacaggtgccagtggtatcgtccaagatcatcatcatccccttgattaatggtgaagaaagaatggagaggcacagacagagggcctcttcttctccagggcttctattaatccccatcatgaagactttgatcatagtaatgtatgtacttcgtttcgagattgaccgaggaagaataggtaggtgtcgtttgtcgtgccgctgctgaaaaggcagatgtctcttgttgttgttcgtcccctgcaggaattttaattttaacaacagtagtgcatatatgatatatatggtataataatggccccaaaaaaaaaaaaaaaa

SEQ ID NO: 4572 - protein, 392 aa, Triticum aestivum
  misc_feature: Ceres CLONE ID no. 923283
  misc_feature: Ceres CDNA ID no. 24766546
  misc_feature (45)..(327): Pfam Name: PP2C PFAM Desc: Protein phosphatase 2C
  misc_feature: Homolog of GI Number: 7768153 NR Desc: protein phosphatase 2C
  misc_feature: Homolog of GI Number: 4206122 NR Desc: protein phosphatase 2C homolog
  misc_feature: Homolog of GI Number: 12321955 NR Desc: protein phosphatase 2C
  misc_feature: Homolog of GI Number: 6572058 NR Desc: protein phosphatase 2C
  misc_feature: Homolog of GI Number: 10177123 NR Desc: protein phosphatase 2C
  misc_feature: Homolog of GI Number: 20340237 NR Desc: protein phosphatase 2c
  misc_feature: Homolog of GI Number: 42569633 NR Desc: protein phosphatase 2C family protein / PP2C family protein
  misc_feature: Homolog of GI Number: 30690552 NR Desc: protein phosphatase 2C family protein / PP2C family protein
MIVTLMNFLRACWRPSSNRHARTGSDAAGRQDGLLWYKDAGEHVNGDFSMAVVQANNLLEDQCQIESGPLSFLDSGPYGTFVGVYDGHGGPETACYINDNLFNHLKRFTSEQNSMSADVLKKAYEATEDGFFSIVSKQWPVKPQIAAVGSCCLVGVICGGMLYVANVGDSRAVLGKHVKATGEVLAVQLSAEHNVSIEPVRKELQSMHPEDRHVVVLKHNVWRVKGLIQVCRSIGDAYLKKQEFNREPLYAKFRLREPFNRPILSSEPSICVQPIQPHDEFIIFASDGLWEHLTNQEAVDIVQSSPRSGSARRLIKSALLEAAKKREMRYSDLKKIDRGVRRHFHDDITVIILYLDSSLVSRASTHRGPAVSLRGAGVSLRSSTLAPYRSQM

SEQ ID NO: 4573 - DNA, 1700 bp, Triticum aestivum
  misc_feature: Ceres CLONE ID no. 923665
  misc_feature: Ceres CDNA ID no. 40041373
  CDS (175)..(1293): REFERENCED BY SEQ ID NO: 4574
atagccgaaacctcccggtcccggcggcgtctcatcctcaacgcacatcccctctctccgctgcactcctcgtcctcccttgtacccgccggcctcctcttcctcgaacacggccgccggccccgtttcctcgaccacggcgcctccaccgacgccgtgcgaatccctattgccatgtcacctggagcgtcatgttccggcgttccggtaccaccccgcccggccggaacccacacattcctcctgccggcggctcccccgttcgtctcaaagttcaccatcaatcgaagagatcctcggacggcctcttcttgttttggtaaagcaataacgccaaagcgctgctttgtcgtggccggcggacttacttgggttgatggggttgaagaagagctcatggagctacaaaagacacaagagcaaagttcaggcaagttaaagaagaggccgcctttgaggcgtggaaaggtctatccccaacttcctgtaccagaacacattccaagaccttcttatgtgggtgcaaacataccacaagaactacccgcagttcgccaaatacacaatgccgaaggtatcgctgggatgagagctgcttgcaaacttgctgcccgtgtactggacttcgcgggaacattggttaagccatcagttactacaaatgaaatcgacagggcggtgcatcatatgatagttgaggcgggtgcttatccttctccacttggctatggtggatttcctaaaagtatctgcacatcagtaaatgagtgtgtctgccatggactacctgattcaacacagctgcagaatggagacatcataaatattgatgtaaatgtgttcctaaatgggtaccatggcggaacttccagaacatttgtatgcggagaagcggatgaatctatcaagcatttcctaaaggcagctgaagaatgctcggagaagggtatttctgtctgcagggacggtgtaaactacagaaaaattggcaagaagataagtaagcttgcttatttctacggctatcatgtggtggagcgctttgttggacatggaattggaactatgttgcattctgagccacttatcctccatcatgcaaatgaaaactctggtcgaatggttgaaggtcaaacattcacaattgaacctatacttacaatggacaaagcagagtgtgttacatgggaaaatggatggactactgtcacagccgatggcagttgggcagcacagtttgagcacactgtattggtcactaggacgggcgtagagatattgacaaaactttgagtacatcccttgctattgtagtaagaagttgttgagccatctactttcagaacgaggtggttcataaagcagccccagcagccagatccacatgtgagaagcctcccctttatgtagcaaccggccaggggataaatgtggggacatgctattgcattgcaaatttgcattgcttgtgatcccgttgtggggagaggtcgtggctcgacaatttaccatggatgtagtttctagaagaatccccagatgtgtatatgtggtagtttggtttgctggaagtagtaggtgtggcatggatttagaaacgacgcggaaaatttcttcaagttgcctgccaatgtttgttcccggtttaatcaaaagaaccatttgtagattttttgtgacccctaaaaaaaaaaaaaaaa

SEQ ID NO: 4574 - protein, 372 aa, Triticum aestivum
  misc_feature: Ceres CLONE ID no. 923665
  misc_feature: Ceres CDNA ID no. 40041373
  misc_feature (136)..(371): Pfam Name: Peptidase_M24 PFAM Desc: metallopeptidase family M24
  misc_feature: Homolog of GI Number: 50937627 NR Desc: putative methionine aminopeptidase I
  misc_feature: Homolog of GI Number: 11320956 NR Desc: methionine aminopeptidase
  misc_feature: Homolog of GI Number: 23306398 NR Desc: methionine aminopeptidase I
  misc_feature: Homolog of GI Number: 50928643 NR Desc: OSJNBa0085I10.11
  misc_feature: Homolog of GI Number: 7939560 NR Desc: methionine aminopeptidase
  misc_feature: Homolog of GI Number: 15230872 NR Desc: metallopeptidase M24 family protein
  misc_feature: Homolog of GI Number: 11320958 NR Desc: methionine aminopeptidase
  misc_feature: Homolog of GI Number: 21553973 NR Desc: methionyl aminopeptidase
  misc_feature: Homolog of GI Number: 4006872 NR Desc: methionyl aminopeptidase
  misc_feature: Homolog of GI Number: 50913031 NR Desc: putative aminopeptidase MAP1 precursor
MSPGASCSGVPVPPRPAGTHTFLLPAAPPFVSKFTINRRDPRTASSCFGKAITPKRCFVVAGGLTWVDGVEEELMELQKTQEQSSGKLKKRPPLRRGKVYPQLPVPEHIPRPSYVGANIPQELPAVRQIHNAEGIAGMRAACKLAARVLDFAGTLVKPSVTTNEIDRAVHHMIVEAGAYPSPLGYGGFPKSICTSVNECVCHGLPDSTQLQNGDIINIDVNVFLNGYHGGTSRTFVCGEADESIKHFLKAAEECSEKGISVCRDGVNYRKIGKKISKLAYFYGYHVVERFVGHGIGTMLHSEPLILHHANENSGRMVEGQTFTIEPILTMDKAECVTWENGWTTVTADGSWAAQFEHTVLVTRTGVEILTKL

SEQ ID NO: 4575 - DNA, 1802 bp, Triticum aestivum
  misc_feature: Ceres CLONE ID no. 923758
  misc_feature: Ceres CDNA ID no. 40351493
  CDS (134)..(1504): REFERENCED BY SEQ ID NO: 4576
atacggcccaactttttactcctgtcgggcttcacctgatctctccctttgtcttaaagaaaaggaaaaaaaaaagaggacagatctctccctgttccgcttcctcctccgccgtgtcaagcaaaccacggcgatggacgaaaccctcgccaccgtcctctcctacctcccgcctccctcggtctccaccaccgcatccccgtcctcctcgtccaccgcctccgatgacgatgaccgcatcaactgcctcccggacgtgctcctccgcaacatcatctctcgcctccccaccaaggacgcggcccgcaccaccatcctctcctcccgctggcgcagcctctgggcttccaccccactccggctcgacgacgctggactcgttcctaccgccgtcaccgccgcgctgaactcccacccgggctcggtcacttccgcccgcctctcctccgagcacctcgcttaccaggaacccgacgtcctcgactcctggttcgcctccctctcagccaagaacgtcgaggaactctccgtcgtcaacggatcctggcctgctgaatgtgagtggcgtcctccccccagcctccttggatgcgcgtccctccgccgcgtctggctcgggctctgccagttcccggacatttccggcctcgctccggccttccccagcctgcaagagctcgggattgtccattgctccatgcaggaccgcgagctccacgctgtgctcccgcgctgccccgagcttgagaggctcgctttcgtgctgacacaggactacccaaggtacatccacatctggtcagggagcctccagtccctggttgtgtggaggtccatggtcagagaggtgcaccttgacgatgcccccaacttggagcggttgctgttggagccgattggtggtgcctctactcacgtcaagattattaatgcaccgaggctgaaaattttcgggtactttgacgttggactgcatcagctcaagatcggccccactgtgatcaaggatgggatagggatgaaggtgaagccaaatgcgatggttcggaccctcaagacattggcattgaaggtgcagtttggagatgagaagcaagtcaagctggtgcccctcttgcttagatgcttcccatgcctagaaaccttgtatatcaagtcatctccttctgaatcaccaaccaatgttgatgtggacttctgggatcaagtaggccacactgaatgtgttacctcacatattaagaagtttgtgttcgaagctgcccgaggagaggataccgagctggcatttgtcaagtttgtcatggaaagagcccaaatgttggaggagatgcgtgttttcgtggatgatggttgctctagagatgttgtgctaagtcgtttatcttcagaaggatgtgtttctgcagatgctagtgtggtggtggagaggcaagacatgtcccatgcgtggagcttcggaagagctagcaacatgtcacagtgtgacccatttggttgctaaagttggaggataacaaagaagtgacaagatcacgtctcttcaagccttacccagatggaatgaaaaaaagagatgggtcctgaagcaagtcaagccatatagatcctgatgcaagttgtagtctttgtcttccataccttgttcggtacaagctttgaaactttggttttgcttgtgttagacgtgcattttgtgctttgtggacctgaacatggctgttgtaattgaatatgattatgtggatttgtgctttatggagctgcaagtggtttgaacttcttaaaaaaaaaaaaaaaaa

SEQ ID NO: 4576 - protein, 456 aa, Triticum aestivum
  misc_feature: Ceres CLONE ID no. 923758
  misc_feature: Ceres CDNA ID no. 40351493
  misc_feature (36)..(81): Pfam Name: F PFAM Desc: F
MDETLATVLSYLPPPSVSTTASPSSSSTASDDDDRINCLPDVLLRNIISRLPTKDAARTTILSSRWRSLWASTPLRLDDAGLVPTAVTAALNSHPGSVTSARLSSEHLAYQEPDVLDSWFASLSAKNVEELSVVNGSWPAECEWRPPPSLLGCASLRRVWLGLCQFPDISGLAPAFPSLQELGIVHCSMQDRELHAVLPRCPELERLAFVLTQDYPRYIHIWSGSLQSLVVWRSMVREVHLDDAPNLERLLLEPIGGASTHVKIINAPRLKIFGYFDVGLHQLKIGPTVIKDGIGMKVKPNAMVRTLKTLALKVQFGDEKQVKLVPLLLRCFPCLETLYIKSSPSESPTNVDVDFWDQVGHTECVTSHIKKFVFEAARGEDTELAFVKFVMERAQMLEEMRVFVDDGCSRDVVLSRLSSEGCVSADASVVVERQDMSHAWSFGRASNMSQCDPFGC

SEQ ID NO: 4577 - DNA, 1262 bp, Triticum aestivum
  misc_feature: Ceres CLONE ID no. 924438
  misc_feature: Ceres CDNA ID no. 25446985
  CDS (319)..(1002): REFERENCED BY SEQ ID NO: 4578
tctttcacggccatttcctaatcccaccactccaagacgccaagaggggcatcacgatccatccaaactcgacctccccggaaaaatcccctcccgtcaaaatcctccgatagccgagatgctctccccccgcattagcgccgcctctcccgcgctcccactctgtcggtccgcagagccatgctcctgtcgccaccagccccatggccgcgcgtcgagcccgtgcgcttgaatcgccccccgcagcgcaaaggccggccgctctcgtttccccgtagccctccgcggccgacgacgccgcggcggctcggcgtgtgcatggctgagatgaccatggtcggaagcgggtcattccgggagcctggggtttctgccggggagggagacgcgatgctgggaggcgggaagttgcccggtccgagggcggaggcggcggtgacccggtggacgcccgtcgaggcggcgctgaatcgtatgagtaaatggctggtggctgtttcttttgctcttgcagctctttggaagcgtgatgctgaaattatgtgggctttgatgggtgcggttgcgaacactgtgctttcgtccattcttaaaaagcttctcaaccacgaaaggccggcaccggctttgcggtctgatcctgggatgccatcatcccatgcccaatccattttctatgctgcaacatttctagttctttcagtgttctcctggcttgggacaaattatctggcaatgattcttggggctacaactgtagcattggcctcctatctatcatggctacgggtgtcgcagcgtctccacacactgaaccagattctcgtgggcgctgctgtaggatcagccttcagcgctctgtggttcgcgctctggcatttgctcgtgcgggaagcttttgcttcctcgttgtgggtccaaattccagtcatccttggttcagtagtgttctgtgtttccttcgtcgtctacatcattcagcactggctcaaggatgagtaatgatacagatagcacgcaacaggttaatggacgctgaaaccaatcggccacagaaggttttatccgcactctgggaattacacgcggaaaggagctcgcacgatgattcactaaacagaacagacggcagttttgatttactactgtatatcattgacccgtgtaacatatacagtatcgaacaattggtgcttggctcgttcattcatgctttatttttcacggatgcagttgatgctgatgcaaaaaaaaaaaaaaaa

SEQ ID NO: 4578 - protein, 273 aa, Triticum aestivum
  misc_feature: Ceres CLONE ID no. 924438
  misc_feature: Ceres CDNA ID no. 25446985
  misc_feature (119)..(237): Pfam Name: PAP2 PFAM Desc: PAP2 superfamily
  misc_feature: Homolog of GI Number: 51964288 NR Desc: PREDICTED P0724B10.35 gene product
  misc_feature: Homolog of GI Number: 50911907 NR Desc: phosphatidic acid phosphatase
  misc_feature: Homolog of GI Number: 42565815 NR Desc: phosphatidic acid phosphatase
  misc_feature: Homolog of GI Number: 58382908 NR Desc: ENSANGP00000002778
  misc_feature: Homolog of GI Number: 66845281 NR Desc: PAP2 domain protein
MLLSPPAPWPRVEPVRLNRPPQRKGRPLSFPRSPPRPTTPRRLGVCMAEMTMVGSGSFREPGVSAGEGDAMLGGGKLPGPRAEAAVTRWTPVEAALNRMSKWLVAVSFALAALWKRDAEIMWALMGAVANTVLSSILKKLLNHERPAPALRSDPGMPSSHAQSIFYAATFLVLSVFSWLGTNYLAMILGATTVALASYLSWLRVSQRLHTLNQILVGAAVGSAFSALWFALWHLLVREAFASSLWVQIPVILGSVVFCVSFVVYIIQHWLKDE

SEQ ID NO: 4579 - DNA, 731 bp, Triticum aestivum
  misc_feature: Ceres CLONE ID no. 925981
  misc_feature: Ceres CDNA ID no. 40351494
  CDS (41)..(616): REFERENCED BY SEQ ID NO: 4580
actccagccctcgccggtcgccaccacgaccaatctcgccatggcgatggcgccgccgcggctcctcctcctcctcgccctgtttgcctgcctgagcctcgtctctgccaccctgtcgccccggccgctcccacgcaccgacgacgacggcctcgcgcggaccaccggcagctcctcgtcgtcttcggagcgaggcgtgggcgcgcggacttgctggtacacggtgcagatcaagacgagctgctcctctccggcgcgcacgtcggacgcgatcagcctggcgttcggggacgtgtaccgcgacgaggtgtacgcggcgcggctgggcggcgccgccggcgcgttcgaccggtgcgccaccgacacgttcaagatcggtgggccctgcgggtacggcgtctgctacctctacctccgccgcgccggccgcaccgggtggacgccggagtgggtcagggtgtacgagcccaccgcccccagcgcgccctccaccttccgctacggcgacccgctccccaacaacgtctggtacggcttcaaccgctgcccgcgcctcgcctcctcctcctcctcgtcgtctccttcctctgctgctggtgctgcacaggcgatgtagccatggtcggagcaggtcgtggcactcgtgtatgtatgatggtttgtggatcgagcacggcgtttgccatagttgttaaaaattactacatgtggattcaaaaaaaaaaaaaaaa

SEQ ID NO: 4580 - protein, 191 aa, Triticum aestivum
  misc_feature: Ceres CLONE ID no. 925981
  misc_feature: Ceres CDNA ID no. 40351494
  misc_feature (40)..(169): Pfam Name: ATS3 PFAM Desc: Embryo
MAMAPPRLLLLLALFACLSLVSATLSPRPLPRTDDDGLARTTGSSSSSSERGVGARTCWYTVQIKTSCSSPARTSDAISLAFGDVYRDEVYAARLGGAAGAFDRCATDTFKIGGPCGYGVCYLYLRRAGRTGWTPEWVRVYEPTAPSAPSTFRYGDPLPNNVWYGFNRCPRLASSSSSSSPSSAAGAAQAM

SEQ ID NO: 4581 - DNA, 885 bp, Triticum aestivum
  misc_feature: Ceres CLONE ID no. 926492
  misc_feature: Ceres CDNA ID no. 25446250
  CDS (120)..(572): REFERENCED BY SEQ ID NO: 4582
gaaggcgacgaacaatccgaggagctccgcctcttcttctcccccaccccccactggcgacggcgacggaggagaggcgagggtgaaaatttcccaccaaccggagcgcgtgcctgccgatggaggtctcagccaggctccgcccgccgccctcgacgacggcgcctccccgccacggcggagggtccctggggcggctgctcccttcggcccggcccgccgcccgcgcggtctccgccaagccaatgcagatcagggcaagtgcaattaatgacctgcagagaagcaagagtagcctcgaagcactgttctgctacgacaaagctgttccagaggagaatattgggaaaccagccggcctagatttggaaaagaaggaggttgggaagaatcctccatgcgtgcgctgcgaaactaaaggcgccgtgctgtgcgcaacctgtgctggctcaggcttgtacgtcgactcgataatggagagccaaggaatcatcgtaaaggtcagatgcctaggttgtggaggaactggaagcatcatgtgctccacgtgcggaggccgtgggcacacctgaattgtttgttgatgtctctcacaaacaaggcaatgaaattcaagtggcatcctcttggtgcacgtccatcatcggccaggactcgagcagtaatctgtatgcattttactgacgattcatagttggacgatggtcggggtttctgactagcaaggatattcagagcatactgcggacaatttcactgtactaaaggatacggtgccgagtccggtgttgtaccttgagtctgtctacttgtggtagagcgtgttgacattgttttgcttttgtatcaaaaattgtttcagttgtgacaaaaaaaaaaaaaaaa

SEQ ID NO: 4582 - protein, 150 aa, Triticum aestivum
  misc_feature: Ceres CLONE ID no. 926492
  misc_feature: Ceres CDNA ID no. 25446250
MEVSARLRPPPSTTAPPRHGGGSLGRLLPSARPAARAVSAKPMQIRASAINDLQRSKSSLEALFCYDKAVPEENIGKPAGLDLEKKEVGKNPPCVRCETKGAVLCATCAGSGLYVDSIMESQGIIVKVRCLGCGGTGSIMCSTCGGRGHT

SEQ ID NO: 4583 - DNA, 570 bp, Triticum aestivum
  misc_feature: Ceres CLONE ID no. 927137
  misc_feature: Ceres CDNA ID no. 25446251
  CDS (2)..(247): REFERENCED BY SEQ ID NO: 4584
attattgtttcgcctccttgtccctcaaacaagatccccactagcccacctccctgtagcccgccgccacggtctcctcctccactcgtgcatctacccaggaatccaggaggcatcacctggccttctctgtgccggattccgacaggtttgcgaccaagctgaagaaccctggcacagacttgttcgcgaagacgcaacccgatggccgcgcgcgccaggtgttcttcctcgaccgggacggtagatttgacaactggatgcccaggcttagataggaacagaggacatagcagcagaagaacagatgcattggatagcttctgctatcgattttccagatcatttcactagcactttgacttattgagagcggcgaagtgaaggaagctctgtgtgcgaaaataaccacacctttgtgtgtaaaaagagtgctgatatattttcagtgtaactggtgtttctgttcacgcttaagaagtgcttcatataatggcctaattacaattcaagttgagcgtgttaatcattatatataataaattgggtttccgaaaaaaaaaaaaaaaa

SEQ ID NO: 4584 - protein, 49 aa, Triticum aestivum
  misc_feature: Ceres CLONE ID no. 927137
  misc_feature: Ceres CDNA ID no. 25446251
  misc_feature: Homolog of GI Number: 42571011 NR Desc: lactoylglutathione lyase family protein / glyoxalase I family protein
MAARARCSSSTGTVDLTTGCPGLDRNRGHSSRRTDALDSFCYRFSRSFH

SEQ ID NO: 4585 - DNA, 1908 bp, Triticum aestivum
  misc_feature: Ceres CLONE ID no. 927224
  misc_feature: Ceres CDNA ID no. 24766547
  CDS (181)..(1683): REFERENCED BY SEQ ID NO: 4586
ggcagcgtagcagaagcatttccggcaccgaaatttccatcgatctgaacgcccccaccggccggtcgaccctccaccaccacctaccggccccgtcgccgtcgccgtcgtctccagccccccctccgcccccaaaaccctagccccggccccggccccgccgcccccagagcccccaccatgtccaccaacggcagctccccgagggtcagggacacggagagcagcctggagaaggtgaagcggcagctgtcgacgggatccgggaggtacctgctgcagggccccctgctgaagcgatctgagacgctacggaaatggaacgaaagatggataatattggacccaacgtctggcaagatggaatacaaacttcggaggaatgaaactgctgttaagggaaccattctatttgatgcttcaagcaccattactttgtctcctgtaaattttcaaggcatgccaaagtatgacggatgctgtttctacattggaactcctcagaaaaaggattactttctttgcgctgaaactcctggtgctgccaaagcttgggtatctacattgcatgcaactcagttagtactacaagcgcataaagaggcagtaaattctttagctgggaatggctctccttctacattaggcacggttgctactgcagttgctaatgctaatgcaactgctttggaggcaatgaaggagatagatgcagcactgaaggtttcaatgagggcagctcttgggttgggtacaaataattcgaatgtgggtcaacttgatgatttgactatcatgaaggagactctccgagtgaaagatgaggagttgcagcatttggctaaggacattcgtgctcgtgacgccacaattcaggaaattgcagagaagttaacagagaccgcagaggctgcagaagcagcagcttctgcagctcatacaatcgatgaacagagacggcttctatgttcagagattgagcgtctgaaaaaagcaatggaaacacaaatggaacaatccatgcttaagctacggcaatctgaagagaaggtaattagcctgagcaaagagaacgaccagttgctgaaggaaagagacgccgcatttcaggaagcatatatgtggcgcactgaactaggaaaagctagagagcaagcagtgatacaggaagcagcaattgcccgagcagaggaaaaggtaagggtgtctgaagcggatgccgcggttcggatcaaggaagctgctgaaaatttgcatgctgctgagaaagaaaaagaagaacttctagcccttattggtgttctccaatcacaagtgcagagagaacaaagcagcacgaagcaagtatgcgaggagagatccgagtcatgctccggcgccgacaactcccctccgctgacgaagcacgtcgacgcatcggacgacgacgtggacaaggcgtgcgtgagcgattcgagatcggtcttggtctcgagcgagagcacggaggtccagctggccgtggatggggtggacatccgccccatcggcgacccagagtggggcagcttccagcagccggaagcgctgattgccgacgtgcgggaggtctccccggaggcggaaggcagcagcctggatatcccggtggtcaacccggcaccggccaatgatcatatgcagggaggggcaacacatccctgaaggcctggaggtcttggagctgaccattgctttcttgggtggtttgtgattattgaggagactggcagggatttgaatcctctcgagaattacttttgtgtttttctttttgcgctgtttccgggttgtgtctccgttgtatttaagtatgcaactcaataaaaagatgatagcggtttgtcgtgtgattgtaaattattattcacgtcaaaaaaaaaaaaaaaa

SEQ ID NO: 4586 - protein, 500 aa, Triticum aestivum
  misc_feature: Ceres CLONE ID no. 927224
  misc_feature: Ceres CDNA ID no. 24766547
  misc_feature (31)..(134): Pfam Name: PH PFAM Desc: PH domain
  misc_feature: Homolog of GI Number: 23506089 NR Desc: At2g30880/F7F1.9
  misc_feature: Homolog of GI Number: 42570991 NR Desc: pleckstrin homology
  misc_feature: Homolog of GI Number: 50917565 NR Desc: putative PH domain containing protein
  misc_feature: Homolog of GI Number: 77555882 NR Desc: transposon protein
  misc_feature: Homolog of GI Number: 8996050 NR Desc: protective antigen
  misc_feature: Homolog of GI Number: 19746885 NR Desc: streptococcal protective antigen
MSTNGSSPRVRDTESSLEKVKRQLSTGSGRYLLQGPLLKRSETLRKWNERWIILDPTSGKMEYKLRRNETAVKGTILFDASSTITLSPVNFQGMPKYDGCCFYIGTPQKKDYFLCAETPGAAKAWVSTLHATQLVLQAHKEAVNSLAGNGSPSTLGTVATAVANANATALEAMKEIDAALKVSMRAALGLGTNNSNVGQLDDLTIMKETLRVKDEELQHLAKDIRARDATIQEIAEKLTETAEAAEAAASAAHTIDEQRRLLCSEIERLKKAMETQMEQSMLKLRQSEEKVISLSKENDQLLKERDAAFQEAYMWRTELGKAREQAVIQEAAIARAEEKVRVSEADAAVRIKEAAENLHAAEKEKEELLALIGVLQSQVQREQSSTKQVCEERSESCSGADNSPPLTKHVDASDDDVDKACVSDSRSVLVSSESTEVQLAVDGVDIRPIGDPEWGSFQQPEALIADVREVSPEAEGSSLDIPVVNPAPANDHMQGGATHP

SEQ ID NO: 4587 - DNA, 2654 bp, Triticum aestivum
  misc_feature: Ceres CLONE ID no. 927786
  misc_feature: Ceres CDNA ID no. 25446865
  CDS (101)..(2350): REFERENCED BY SEQ ID NO: 4588
aacaccacaaccgcgcgccgcgccaccacacccgcagatccccgccgtcgtaaatctacctacgtgctttgattggagggttgcggtgccggggaggaagatgacggtgggagccgggatcgcggtccaggaagacggcagcctggcggcgctgggggccacggtcctgacggaggtgcgcgacaatgtgctcgtcacgccggccgccgggggcggcatgctgaacggcgcgttcctcggcgtccggtcggcccccgccggcagccgcagcgtcttccccgtcgggaagctcagggacctgcgattcatgtgcacgttcaggttcaagatgtggtggatgacacagaggatgggctcgtcgggccgcgacatccccgtcgagacgcagttcttgatcgtcgaggccgttgactgcgccggggacgagcaatctgcggtgtacaccgtcttcctcccgatcctggagggctcattccgagctgtactacaggggaacgaaaatgatgagctggaaatttgcttggagagtggtgatccagctgtagaatcatttgaaggcacccatctagttttcgttggtgcgggatcggatccgtttgaggtcatcactaatgctgtcaaagcagttgagaggcacctgcagacattctctcacagggaaaaaaagaagatgccagacatgctaaactggtttggctggtgcacatgggatgcattttacactgatgttactgctgaaggagtgaaggaaggactacagagttttgaaaaaggtggaacagctccaaagtttgtcataatcgatgatgggtggcaatcggtcagtatggaccctgctggaagtgcattcgtatctgataatgcagccaacttcgcaaacagattatatgatatcaaggagaaccacaaatttcagaaaaatgggaggaagggtcacagggaagaagatccagcaaatggcctcgcgcatattgtcagtgaaattaaggggaaacatgagctaaagtacgtctatgtatggcatgcgattaccgggtattggggtggcgtaaggcccggtgctgacgggatggagcattaccaatccaagatgcagtaccctgtgtcgtcaccaggagtccagaagaacgaaccctgtgaggccttcaacagcatagcagataacggccttggccttgtggaccctgacaaagtattcagcttctacaatgagctccattcatatcttgcatctgccggggtcgacggcgtgaaagtagacgtgcagaacattctcgaggcgctaggcggtggtcatggtgggagagtgcttctgtctaggaagtaccagcaggctctagaagcttccatcgctcggaatttccgcgacaacggcataatatgttgcatgagccacaacactgacaacttatacagttcaaaaagaaatgcggttgtaagagcctctgatgatttctggcctagagacccagcttcgcataccatacacatcgcatccgtcgcttacaataccgttttccttggagagttcatgcagccggactgggacatgttccatagcgtccacccgatggccgaataccacgccgcggcgcgggcagtcggcggttgcgctatatacgtgagtgacaaaccaggaaaccatgacttcgatctgctgaggaagcttgtgcttcctgacggatcgatcctgcgggccaaactgcccgggagaccgaccggggactgcctcttctctgatcctgcaagggacggcaaaagcattctcaagatctggaacctgaacgcgcactccggcgtcatcggcgccttcaactgccagggcgcgggctggtgccgagaagggaagaagaacctcatccacgatgtgcagcccgggaccatcaccggggccgtccggggacgggacgtgagccgccttcaggaggtcgccggcgatggctggaacggcgacgtggtcgtgtactcgcacgtcgcaggagatgtgaccgtcctgcccaaggacgcggcgctgccggtgacgctgaagccgcgagagtacgaggtgttcaccgtggtgccgctgaagcggctgccgaacggcgcctccttcgcgccgatcggcctgatcgggatgttcaactccggcggggcggtgacggaggtgaggtgcgccggcggcgccggcgtggaggtgaaggtgcggggcgcgggcacggttggagcctactcctcggcgaggccgaagcgcgtggccgtggattcggaggcggttggtttctcctacgacgacggctccggcctggccatgttccaggtcggcgtgccggagcgggagctctactcgtggacggtctcgatagagtgctgagacgagatcgtctggtcgggtgacagtaagacgagggcaccgaagccgcgcctggggaagctgtgatatctttgttcttgcagacgttgccgctagttcgtgttgcctgtgatttattatttgcgctgcgagtacatggtgcttgacttgtattccctgatggaaactaaaaattgtattgtgatttctgaacaccaaccattttagtgcagacagtttttcctttttttctcttactactatgtatgtgcctgtgtgttgtcaggcggaaaaaatatttattaacataaaaaaaaaaaaaaaa

SEQ ID NO: 4588 - protein, 749 aa, Triticum aestivum
  misc_feature: Ceres CLONE ID no. 927786
  misc_feature: Ceres CDNA ID no. 25446865
  misc_feature (7)..(733): Pfam Name: Raffinose_syn PFAM Desc: Raffinose synthase or seed imbibition protein Sip1
  misc_feature: Homolog of GI Number: 28416711 NR Desc: At1g55740
  misc_feature: Homolog of GI Number: 23308457 NR Desc: At5g20250/F5O24_140
  misc_feature: Homolog of GI Number: 8778496 NR Desc: F20N2.14
  misc_feature: Homolog of GI Number: 33323027 NR Desc: alkaline alpha galactosidase 3
  misc_feature: Homolog of GI Number: 29838629 NR Desc: alkaline alpha galactosidase I
  misc_feature: Homolog of GI Number: 29838631 NR Desc: alkaline alpha galactosidase II
  misc_feature: Homolog of GI Number: 23452226 NR Desc: alkaline alpha
  misc_feature: Homolog of GI Number: 6706423 NR Desc: imbibition protein homolog
  misc_feature: Homolog of GI Number: 50540754 NR Desc: putative  raffinose synthase or seed imbibition protein
  misc_feature: Homolog of GI Number: 50947233 NR Desc: putative alkaline alpha
MTVGAGIAVQEDGSLAALGATVLTEVRDNVLVTPAAGGGMLNGAFLGVRSAPAGSRSVFPVGKLRDLRFMCTFRFKMWWMTQRMGSSGRDIPVETQFLIVEAVDCAGDEQSAVYTVFLPILEGSFRAVLQGNENDELEICLESGDPAVESFEGTHLVFVGAGSDPFEVITNAVKAVERHLQTFSHREKKKMPDMLNWFGWCTWDAFYTDVTAEGVKEGLQSFEKGGTAPKFVIIDDGWQSVSMDPAGSAFVSDNAANFANRLYDIKENHKFQKNGRKGHREEDPANGLAHIVSEIKGKHELKYVYVWHAITGYWGGVRPGADGMEHYQSKMQYPVSSPGVQKNEPCEAFNSIADNGLGLVDPDKVFSFYNELHSYLASAGVDGVKVDVQNILEALGGGHGGRVLLSRKYQQALEASIARNFRDNGIICCMSHNTDNLYSSKRNAVVRASDDFWPRDPASHTIHIASVAYNTVFLGEFMQPDWDMFHSVHPMAEYHAAARAVGGCAIYVSDKPGNHDFDLLRKLVLPDGSILRAKLPGRPTGDCLFSDPARDGKSILKIWNLNAHSGVIGAFNCQGAGWCREGKKNLIHDVQPGTITGAVRGRDVSRLQEVAGDGWNGDVVVYSHVAGDVTVLPKDAALPVTLKPREYEVFTVVPLKRLPNGASFAPIGLIGMFNSGGAVTEVRCAGGAGVEVKVRGAGTVGAYSSARPKRVAVDSEAVGFSYDDGSGLAMFQVGVPERELYSWTVSIEC

SEQ ID NO: 4589 - DNA, 1553 bp, Triticum aestivum
  misc_feature: Ceres CLONE ID no. 928075
  misc_feature: Ceres CDNA ID no. 25446252
  CDS (95)..(1324): REFERENCED BY SEQ ID NO: 4590
agtttccagcccagtccaccgccaacttccctctttccccttctcccctccccaaaacctgacctcctcgccgccggccaatcgggcatccgccatggcctacctcccgccccaccggcgccactccagcagctccgagcccgccccaacccctttcccgcccatctcctccctccagtccctctccatctcctcccctcgcggtcgcgggcgtcaccacctccgcccgtccaacaacaagatcatccacgccgcgggctgcgtctcccgctggtccccgctcccgcccttcccccccggcccagacgacgccgaatctttccgcctcgttcccttcccctgcgatcccatcgagcgcgagaccggcgccaagcccctcgtcctcgccctctcctccccccaaaactcctccgactccacggaggtcgcggtcgcggccatcgtcgagaggttcttgccggacctcctaaccgcggcggagagggcgagggcgacggcgacggcgcacgatgcgcccacggaagacgaggagctgaagctgagcctcgtggcaagggtgggcaaggtcctgttccaacccggacctagcggcggacccgtctccgtggactctgtccgcgacgcagcaaaagcaggggcagaaggatcgaggagccaggtccgtaaatctttctatacgaatttgcccggcaagtgtgtggatgagattgggatgtatatcgggaagctgacggatctgaagttcgattcatcaaaaaagcactaccatgttaaggtgtttgacaagcagcgaagtgacacgacgatgtcttgcaaatgcactgtgcaagaggatgggaagcttgtgatccacaaggttgaattgaaccagatacggcagctggtggaagacatatcctgcctgtccaaagattttgatttaaggctgatgttgcgtacaaaaaggatcctgaagaacatagaccctgaagtggaaaatgccataaagagcttagtgtcttcagctattgttgatcctgatgccaaagggggacttaaatggccacttgggtttgagtcgattggtgagtggttcagcatagttggggtgtggcatacaagctatagtgctttcaggaataaaaccttaaggttgaagctcaggtgtgctgaccggtttgaccaccggagctccactggagagatttccaatgaagttaccttcaaactaactggcatatctgagagactgcaggatgggaatgaagaggtggacactctgaaggggatgctggagtctgcggtgcagatgatctgggacactgttttgagctacaagatctagccttgagcttgggtatgctgacatacagagggagtacattgcattgtcattgtgtgccatacagttgtttgacgatgctttggtcttccttgctagttgctactgcaatgggtgtgggtctgcagccccgctgtctatagagttgtagtagtatttagtagtgaattactgcattgccatgctggttaattgcacgggaatgcggtttgtgctaaaaaaaaaaaaaaaa

SEQ ID NO: 4590 - protein, 409 aa, Triticum aestivum
  misc_feature: Ceres CLONE ID no. 928075
  misc_feature: Ceres CDNA ID no. 25446252
  misc_feature: Homolog of GI Number: 12018147 NR Desc: vegetative cell wall protein gp1
  misc_feature: Homolog of GI Number: 2429362 NR Desc: proline rich protein
  misc_feature: Homolog of GI Number: 6523547 NR Desc: hydroxyproline
  misc_feature: Homolog of GI Number: 227614 NR Desc: Thr rich extensin
  misc_feature: Homolog of GI Number: 55740439 NR Desc: hydroxyproline
  misc_feature: Homolog of GI Number: 14253159 NR Desc: VMP3 protein
  misc_feature: Homolog of GI Number: 60678627 NR Desc: plus agglutinin
  misc_feature: Homolog of GI Number: 50926032 NR Desc: OSJNBa0067K08.24
  misc_feature: Homolog of GI Number: 12321185 NR Desc: Pto kinase interactor
MAYLPPHRRHSSSSEPAPTPFPPISSLQSLSISSPRGRGRHHLRPSNNKIIHAAGCVSRWSPLPPFPPGPDDAESFRLVPFPCDPIERETGAKPLVLALSSPQNSSDSTEVAVAAIVERFLPDLLTAAERARATATAHDAPTEDEELKLSLVARVGKVLFQPGPSGGPVSVDSVRDAAKAGAEGSRSQVRKSFYTNLPGKCVDEIGMYIGKLTDLKFDSSKKHYHVKVFDKQRSDTTMSCKCTVQEDGKLVIHKVELNQIRQLVEDISCLSKDFDLRLMLRTKRILKNIDPEVENAIKSLVSSAIVDPDAKGGLKWPLGFESIGEWFSIVGVWHTSYSAFRNKTLRLKLRCADRFDHRSSTGEISNEVTFKLTGISERLQDGNEEVDTLKGMLESAVQMIWDTVLSYKI

SEQ ID NO: 4591 - DNA, 530 bp, Triticum aestivum
  misc_feature: Ceres CLONE ID no. 928890
  misc_feature: Ceres CDNA ID no. 25891115
  CDS (88)..(336): REFERENCED BY SEQ ID NO: 4592
aaaaatccgttcagcgccaaaacgaacaccacctaaccagctcgtgattcttcccgccgtagatctgttccttttcgccgttcctccatggccgacgacttcgaattctccgacaaagtccctccttccttcgatcgcgtgggttcaaaagggttcaacccagcattaattgttctccttcttgttggtgggttgctgttgatattcctcgttggaaattatgtactatacacatatgcacagaagaccctccctcctagaaaaaaaaagccaatctcaaagaagaagatgaaaaaggagagactgaagcagggcgtctctgcacctggagagtagaactttttcctcactctatattctgtgatgttaaattgtactcttttagaaaaaatttctcgttctgtggtctctggagtttgttaatctttatcttagtcatgtgttttactgactgaaatctcgaccacataaattaagtactttgttaaaatatttggaacaaattatttcgtgcaaaaaaaaaaaaaaaa

SEQ ID NO: 4592 - protein, 82 aa, Triticum aestivum
  misc_feature: Ceres CLONE ID no. 928890
  misc_feature: Ceres CDNA ID no. 25891115
  misc_feature: The plant is abnormally small.
  misc_feature: Useful for making plants with modulated growth and phenotype characteristics
  misc_feature: The sequence is a functional homolog of  SEQ ID NO 1761 in the  11/479,226 US patent application
  misc_feature: The sequence is a functional homolog of  SEQ ID NO 1765 in the  11/479,226 US patent application
  misc_feature: The sequence is a functional homolog of  SEQ ID NO 1769 in the  11/479,226 US patent application
  misc_feature: The sequence is a functional homolog of  SEQ ID NO 2604 in the  10/374,780 US patent application
  misc_feature: The sequence is a functional homolog of  SEQ ID NO 874 in the  10/412,699 US patent application
  misc_feature: The sequence is a functional homolog of  SEQ ID NO 960 in the  10/225,066 US patent application
  misc_feature: Useful for making plants with modulated biomass
  misc_feature (13)..(82): Pfam Name: S1FA PFAM Desc: DNA binding protein S1FA
  misc_feature (14)..(82): Pfam Name: S1FA PFAM Desc: DNA binding protein S1FA
  misc_feature: Homolog of GI Number: 498705 NR Desc: s1Fa
  misc_feature: Homolog of GI Number: 38347601 NR Desc: OSJNBa0042I15.14
  misc_feature: Homolog of GI Number: 1173349 NR Desc: DNA
  misc_feature: Homolog of GI Number: 38347600 NR Desc: OSJNBa0042I15.13
MADDFEFSDKVPPSFDRVGSKGFNPALIVLLLVGGLLLIFLVGNYVLYTYAQKTLPPRKKKPISKKKMKKERLKQGVSAPGE

SEQ ID NO: 4593 - DNA, 1433 bp, Triticum aestivum
  misc_feature: Ceres CLONE ID no. 929199
  misc_feature: Ceres CDNA ID no. 25446745
  CDS (70)..(1188): REFERENCED BY SEQ ID NO: 4594
gtttgtttctccccctttcccctcagcgccgccggtcgccgccgccaccctcaccgcccgcgacgagacatgcccgccggccggaagcgcccagctccatccccgttcgccggcttctcaacgttcgcccgctccctcctcttctcccccgcctccggcttctcaaggctgccgctcaccaatgccggccccgccgccaaaccccatcaagagaccgccgccatgccgccgcccccgcccaagcgcgcgaagcaggccgagccctccagcgacgacgagcgccccagcagcgacgccgaccaggagctctcgggaagcgacggcgacggggacagcgacagctctctggagtgctcgagcagcgacgacggagaagacgcgtcccaggagatggagacggtgcaggccgacttcgccttcttcgaccccaagcccaccgacttccacggcgtcaggctgctgctcaagacctacctcgactccaagccctgggacctcaccggcttcgtcgacctcgtcctcgagcagaccaccgtcggcaccgtcgtcaagatggccgaggacgaggatgacgacgagggtgaagaagcaaatgggggtgacaagagcgacgacgatgaggacctgttcggtctcattaccgtgctcaatttgggaagatacggggagaaccgttgcatcaaggatcttaaggagtatctgcttgctgtttgcggcgacaaggacaccaagaagaagctcaagtcgctgctggaagacaaggcatccactgtcggcctgctcgtgtgccggcgctttgtgaatttcccgtatgaaatggtgcctaagatgtatgattcgctctttgatgaggttgcctgggcgacagaggatgagccaacaccagaactccaggactccttccgattcaagcagtacctgctgcttgtaagaatcttggagagaaaaactcctccaaagcagaaagcaaagaataataaagatgagggtgaacctgttatctacccgaagttggaggacgaaattttccgtgagcttagttcgtggtcttttaccttcccaattcgcgcagaacagtcagctcagcaggagctgaagaactacaaggagatgggcttggtgatgtgccttaaagccgaagcgattccaaagttccgcaagaagctggaggccttggtatgtgaatagcaggtctctttgctcataggcgcaaatgtgcaatcgccactcccgacgcgcgacgaggttgatctgtactagtaaaaggaatgatttatggactagtccatcttttttcatgtagtgctagaggatgttctttcatggaggggtccattggttggctcaagacatgatttgccttttgagcattgcataatctgcccctaaaaaaaaaaaaaaaaaaaaaaaaaaaaaaaaaaaaaaaaaaaaaa

SEQ ID NO: 4594 - protein, 372 aa, Triticum aestivum
  misc_feature: Ceres CLONE ID no. 929199
  misc_feature: Ceres CDNA ID no. 25446745
  misc_feature: Homolog of GI Number: 50920169 NR Desc: putative p21 C
  misc_feature: Homolog of GI Number: 50920171 NR Desc: putative p21 C
  misc_feature: Homolog of GI Number: 72090325 NR Desc:  similar to BRCA2 and CDKN1A
  misc_feature: Homolog of GI Number: 48140447 NR Desc: similar to ENSANGP00000014264
  misc_feature: Homolog of GI Number: 50796740 NR Desc:  similar to BRCA2 and CDKN1A
  misc_feature: Homolog of GI Number: 73998994 NR Desc:  similar to BRCA2 and CDKN1A
  misc_feature: Homolog of GI Number: 7706581 NR Desc: BRCA2 and CDKN1A
  misc_feature: Homolog of GI Number: 62641941 NR Desc:  similar to BRCA2 and CDKN1A interacting protein
  misc_feature: Homolog of GI Number: 188864 NR Desc: mucin
MPAGRKRPAPSPFAGFSTFARSLLFSPASGFSRLPLTNAGPAAKPHQETAAMPPPPPKRAKQAEPSSDDERPSSDADQELSGSDGDGDSDSSLECSSSDDGEDASQEMETVQADFAFFDPKPTDFHGVRLLLKTYLDSKPWDLTGFVDLVLEQTTVGTVVKMAEDEDDDEGEEANGGDKSDDDEDLFGLITVLNLGRYGENRCIKDLKEYLLAVCGDKDTKKKLKSLLEDKASTVGLLVCRRFVNFPYEMVPKMYDSLFDEVAWATEDEPTPELQDSFRFKQYLLLVRILERKTPPKQKAKNNKDEGEPVIYPKLEDEIFRELSSWSFTFPIRAEQSAQQELKNYKEMGLVMCLKAEAIPKFRKKLEALVCE

SEQ ID NO: 4595 - DNA, 1749 bp, Triticum aestivum
  misc_feature: Ceres CLONE ID no. 929370
  misc_feature: Ceres CDNA ID no. 25446866
  CDS (249)..(1352): REFERENCED BY SEQ ID NO: 4596
agtgaaacaaagacaaagagaaggagaaagcgagaggagaggcggacgcgagacgggactagcgccactccattccacttccctccctcgcttgccttccttccttccttcctatcatagcattcccagatagacagatagaaacccccgattctgatcgccgggatgaggttctgacccccgattcggtccgtcgattgtgatttcccctcgatttggtgcgggattagcggccggaattaatcgccatgactgcgtcgtcgccgatggtgctgtccctcctgctcttcgcctcgctcacggcgctgctcgtcctggcccctcgcgcgtcgtcgccgccgctgccgctgccgctgcccgtggtggttggggacgaggaggcgccgcccgccgccgggggtggtgctgcggggagcagcggcggtggggcgggagttgaggagggaccggaggacctcgcgctgtcccggcgcgtgacgctcgacgccagcgagggcgcggcggtagcgtccaaggtggcgttcatgttcctgaccaactccgacctcaccttcgcgccgctttgggagcgcttcttcgcggggcacgctgaccggttcaacgtctacgtgcacgcagacccggcggtgcggctgcggctcccccctacgccttccttccggggccgcttcgtcgcggctaagccgacgcggcgcggggacccgagcctcatcgctgcggcgcggcgcctgcttgtcgccgcgctactcgacgacccggccaacgcctacttcgcgctgctctcgcagcactgcgtcccgctccactccttcccgcgtctctacgaggcgctcttcccgcccaaggccgcgcaccaccaccgcctcccgagctatatcgaggtgctcgccggcgagccccagatgcccgcgcgctacgtggcgcgcggtgacgacgccatgctcccggaggtgcccttcgaccggttccgcatcggctcccagttcttcacgctggcccggcgccacgccgtgctagtcgtccgcgagcgccgtctctggcgaaagtttagggagccgtgcctgccggagtcgcaggactcgtgctacccggaggagcactatttcccgacgcttctcgacatggccgaccccgccggctgcacccggtacacgctcacgcgcgtcaactggaccgacagcttcgagggccacccgcacacgtatgccgcgccagaggtgtcgccgcggcttatcgccgagctgcgccagtccaacagctccacctatgagcacatgttcgcgcgcaagttcgcgcccgactgccttggcccgctcatggccatcgccgacaccgtcatcttcaaagattgatcgatgcggtgctctgcatcatagctacacgtaggaggtctatccgttagagttgcgcgtgcgagaagacgaaagcagtgtcgttcttctccgtcgaatcttcacacggttcagactggtgctttccctccgtgccctcccccgttcttctcctcctggtacttttaagtagacttaagtggcaacaacctaatgcaaagcggcaggtgttgcatctgatggccagtccatccatccactgtatttttcctacctcgtgcggctgcctaaggctgctgttctgttgaaatgcgtaaagggttggattgtggcggtgttctgttcagctgaaaccgaaaaggaactttacataagcaaggaatgataatcattctgcaaaagaaaaaaaaaaaaaaaa

SEQ ID NO: 4596 - protein, 367 aa, Triticum aestivum
  misc_feature: Ceres CLONE ID no. 929370
  misc_feature: Ceres CDNA ID no. 25446866
  misc_feature: Homolog of GI Number: 50922289 NR Desc: OSJNBb0056F09.13
  misc_feature: Homolog of GI Number: 50928577 NR Desc: OSJNBa0035M09.18
  misc_feature: Homolog of GI Number: 34895606 NR Desc: OSJNBa0083M16.15
  misc_feature: Homolog of GI Number: 34911442 NR Desc: P0431H09.21
  misc_feature: Homolog of GI Number: 5821151 NR Desc: RNA binding protein
  misc_feature: Homolog of GI Number: 72547036 NR Desc: proteophosphoglycan 5
  misc_feature: Homolog of GI Number: 66776103 NR Desc: LigA
  misc_feature: Useful for making plants with altered leaf shape eg curled leaves
MTASSPMVLSLLLFASLTALLVLAPRASSPPLPLPLPVVVGDEEAPPAAGGGAAGSSGGGAGVEEGPEDLALSRRVTLDASEGAAVASKVAFMFLTNSDLTFAPLWERFFAGHADRFNVYVHADPAVRLRLPPTPSFRGRFVAAKPTRRGDPSLIAAARRLLVAALLDDPANAYFALLSQHCVPLHSFPRLYEALFPPKAAHHHRLPSYIEVLAGEPQMPARYVARGDDAMLPEVPFDRFRIGSQFFTLARRHAVLVVRERRLWRKFREPCLPESQDSCYPEEHYFPTLLDMADPAGCTRYTLTRVNWTDSFEGHPHTYAAPEVSPRLIAELRQSNSSTYEHMFARKFAPDCLGPLMAIADTVIFKD

SEQ ID NO: 4597 - DNA, 1514 bp, Triticum aestivum
  misc_feature: Ceres CLONE ID no. 929664
  misc_feature: Ceres CDNA ID no. 24766548
  CDS (80)..(1150): REFERENCED BY SEQ ID NO: 4598
aacaaaagcaccacccccacccgccttccttcctgccttcctgccctcagtcagccggagccggattgctcctcccgccatggcgctcctcaccgatctcctcaacctcgacctcaccgactccacggagaagatcatcgccgagtacatatggatcggcggatctggcatggatctcaggagcaaggccaggaccctccccggcccggtcacggatcccagcaagctgcccaagtggaactacgacggctccagcaccggccaggcccccggcgaggacagcgaggtcatcctgtacccacaggccatcttcaaggacccgttcaggaagggcaacaacatccttgtcatgtgcgattgctacaccccagctggagtgccaatccccaccaacaagagatacaacgctgccaagatctttagcaaccctgatgttgccaaggaggagccatggtatggtattgagcaggagtacaccctcctacagaaggacatcaactggcctctcggctggcctgttggtggattccctggtcctcagggtccttactactgtagtattggtgctgacaagtcgtttgggcgtgacatagttgacgctcactacaaggcctgcctctttgccggtgtcaacatcagtggcatcaatggcgaggtcatgcccggacagtgggagttccaagtcggcccgactgttggcatttctgctggcgaccaagtgtgggtcgctcgctaccttcttgagaggatcactgagatcgccggagttgtcgtcacatttgaccccaagcccatcccaggcgactggaacggtgctggtgctcacacaaactacagtaccgagtcgatgaggaaggacggcgggttcaaggtcatcgtggatgccgtggagaagctcaagctcaagcacaaggagcacatcgccgcctacggcgagggcaacgagcgccgcctcaccggcaagcacgagaccgccgacatcaacaccttcagctggggcgtcgcaaaccgtggcgcgtcggtgcgcgtgggccgggagacggagcagaacggcaagggctacttcgaggaccgccggccggcgtccaacatggacccatacgtggtcacctcgatgatcgccgagaccaccatcctgtggaagccctgaagccgatcggcgccgatcgccgtgcgatgatcagtgatgggttgggttggatttggtgggtggccactggaggatttggacgaaattcttccaacatatttgattttccgtttggttgcatactacgcgtagtccgcttaggtaggtcgcatcatcgtcgtcgtcgtcatgcatcagggtgtctggtcgctcttctctcgtctctgggtggtgggtggcaagaggcgtgtcaaacacacaaggctactattgattgttttcccttgccgtttgggtgctctggtcctcgtgtaatcatcaattgatatggtaataaaatggtccgtaccgctgccgtggtaccacaccaaaaaaaaaaaaaaaa

SEQ ID NO: 4598 - protein, 356 aa, Triticum aestivum
  misc_feature: Ceres CLONE ID no. 929664
  misc_feature: Ceres CDNA ID no. 24766548
  misc_feature (103)..(355): Pfam Name: Gln PFAM Desc: Glutamine synthetase
  misc_feature (17)..(98): Pfam Name: Gln PFAM Desc: Glutamine synthetase
  misc_feature: Homolog of GI Number: 226547 NR Desc: Gln synthetase
  misc_feature: Homolog of GI Number: 121344 NR Desc: Glutamine synthetase leaf isozyme
  misc_feature: Homolog of GI Number: 417060 NR Desc: Glutamine synthetase nodule isozyme
  misc_feature: Homolog of GI Number: 455420 NR Desc: cytoplasmic glutamine synthetase
  misc_feature: Homolog of GI Number: 5701896 NR Desc: glutamate
  misc_feature: Homolog of GI Number: 296223 NR Desc: glutamate
  misc_feature: Homolog of GI Number: 1084412 NR Desc: glutamate
  misc_feature: Homolog of GI Number: 68599 NR Desc: glutamate
  misc_feature: Homolog of GI Number: 322833 NR Desc: glutamate
  misc_feature: Homolog of GI Number: 436422 NR Desc: glutamine
MALLTDLLNLDLTDSTEKIIAEYIWIGGSGMDLRSKARTLPGPVTDPSKLPKWNYDGSSTGQAPGEDSEVILYPQAIFKDPFRKGNNILVMCDCYTPAGVPIPTNKRYNAAKIFSNPDVAKEEPWYGIEQEYTLLQKDINWPLGWPVGGFPGPQGPYYCSIGADKSFGRDIVDAHYKACLFAGVNISGINGEVMPGQWEFQVGPTVGISAGDQVWVARYLLERITEIAGVVVTFDPKPIPGDWNGAGAHTNYSTESMRKDGGFKVIVDAVEKLKLKHKEHIAAYGEGNERRLTGKHETADINTFSWGVANRGASVRVGRETEQNGKGYFEDRRPASNMDPYVVTSMIAETTILWKP

SEQ ID NO: 4599 - DNA, 1614 bp, Triticum aestivum
  misc_feature: Ceres CLONE ID no. 930653
  misc_feature: Ceres CDNA ID no. 25446942
  CDS (201)..(1337): REFERENCED BY SEQ ID NO: 4600
accaactaggccgaactttccagcttctagggctaccttcttcccttcatctccactcccgcacacacgccggccaccactagggttttgccgatccgccttaccccacgccggccaccactagggttttgccgatccgcctcaccccacgccggccaccaccagatcgcctccgccctacgctctcaccgctgccgacgatggtgggatacgggattcagtcgatgctcaaggatgtgctgtgtccacttgtcgctgatgcctgtatccaagtttgcccccaaaatccgggaaactttaatgttgacaatgttagagtggcaaagctggttggaggcggccttcacaattcttctgtagtccgtgggatggttctgaaaaatgacgctgttgggagcataaagaaagtggagaaagtgaaggttgcggtatttgctggcggtgttgacacttctgcaactgaaacgaagggaactgttcttatacattctgctgagcagcttgaaaactatgctaaaactgaggaagcaaaggtggaggagcttattaaatctgtggctgattcaggtgccaaggttattgtcagtggagcagcagttggcgatatggcattgcatttttgtgaacgttacaagctaatggttctgaaagtcagctcaaagtttgagcttcgaagattttgccgtactaccggggctatagcacttttgaagcttagccgaccaaatgtggacgaattaggatatgcagactatgtttcggtggaagaaattggcggtgctcgagtgactgttgtcaaaaatgaagaaggtggaaattcagtggctactgttgtcttgagaggcagtacagatagtatattagatgatcttgaaagagctgtcgatgatggtgtaaacacgtacaagtcaatgtgcagggacagtcggattatccctggagctgctgcaacagaaatagaactggcaaagagattgaaggagttttctctgaaggaaacagggttggatcaatatgctattgcaaaatttggtgaaagttttgaaatggttccaataacactgtctgaaaatgccggacttggtgcaatggagataatatcttccctctatgctgagcatgctgctggcaatgtgaaagttggcattgacttggagaaaggtgcttgcgaggatgcctcaatcatgaaaatatgggacctctatgttacaaagtccttcgctctaaaatactcagcagatgctgtatgtactgttttacgggttgaccagatcattatggcaaagccagcaggagggccgcgacccccccaacaaggtggcatggatgaagactagttttctgtgcactcttgtttcctgtgtatcatgccgtgggattttcgtgcagaagacggtctctgtttcatcttatctaggttcgattcaagtaatagattttggctgcttgggtttcacggttggtggggcagcatgctttagctgatgtcttgcggtgtatttgttagttcctctgtggtactgtcttaccggtgtatcacatgataactagagagacttgttcgtccagtttatcatatgaaccaaagcttgtcttggaaaaaaaaaaaaaaaa

SEQ ID NO: 4600 - protein, 378 aa, Triticum aestivum
  misc_feature: Ceres CLONE ID no. 930653
  misc_feature: Ceres CDNA ID no. 25446942
  misc_feature (1)..(363): Pfam Name: Cpn60_TCP1 PFAM Desc: TCP
  misc_feature: Homolog of GI Number: 34098897 NR Desc: At3g03960
  misc_feature: Homolog of GI Number: 50919217 NR Desc: putative  TCP
  misc_feature: Homolog of GI Number: 6223641 NR Desc: putative T
  misc_feature: Homolog of GI Number: 17066726 NR Desc: CCT chaperonin theta subunit
  misc_feature: Homolog of GI Number: 61870830 NR Desc:  similar to chaperonin containing TCP1
  misc_feature: Homolog of GI Number: 76682796 NR Desc:  similar to chaperonin containing TCP1
  misc_feature: Homolog of GI Number: 61842559 NR Desc:  similar to chaperonin containing TCP1
  misc_feature: Homolog of GI Number: 60393042 NR Desc: TCP1
  misc_feature: Homolog of GI Number: 74001080 NR Desc:  similar to chaperonin containing TCP1
  misc_feature: Homolog of GI Number: 76682794 NR Desc:  similar to chaperonin containing TCP1
  misc_feature: Useful for making bigger plants
MVGYGIQSMLKDVLCPLVADACIQVCPQNPGNFNVDNVRVAKLVGGGLHNSSVVRGMVLKNDAVGSIKKVEKVKVAVFAGGVDTSATETKGTVLIHSAEQLENYAKTEEAKVEELIKSVADSGAKVIVSGAAVGDMALHFCERYKLMVLKVSSKFELRRFCRTTGAIALLKLSRPNVDELGYADYVSVEEIGGARVTVVKNEEGGNSVATVVLRGSTDSILDDLERAVDDGVNTYKSMCRDSRIIPGAAATEIELAKRLKEFSLKETGLDQYAIAKFGESFEMVPITLSENAGLGAMEIISSLYAEHAAGNVKVGIDLEKGACEDASIMKIWDLYVTKSFALKYSADAVCTVLRVDQIIMAKPAGGPRPPQQGGMDED

SEQ ID NO: 4601 - DNA, 2146 bp, Triticum aestivum
  misc_feature: Ceres CLONE ID no. 930831
  misc_feature: Ceres CDNA ID no. 25892875
  CDS (248)..(1777): REFERENCED BY SEQ ID NO: 4602
ctcccaatccctcccacattgatgcgccggagccacgccgacgcgccgcagctgagctagtcgccggagctgggacagctccagccggcggcacagcgcgcggcagtgagtgaggcgacggggatagcgacagcgggggtggttggttggtgctgctgctccaagaaccctagaggagcacgcgggaggcggccgccaggggtttctcgccgccagccgtcgctccacaggccgctccaaaacagagatggtgacagccgaaagcctacgtgccgagctgtcatccaagacgccaccgtttggcctcaggctgtggatagtgattggcatcagcatctgggtggtaatcttctgtatactaggtttcatgtgcttctggtccatttaccggaggaagccgaagaagtctgttgataagatcccagtatctcaaatccccgatgtatcaaaggagattgctgtggatgaagtgcgccaacatgctgttgttgagaactaccaaatgcaagaaagccacacgttgacggtgcaggagaaacctcatgaaaaagattctgggaaaatgctgggacacttggtcaggacaaagtcgagtgatgctgataatttgagccagtgcagctcggcctaccaatgcgatagggccggtagtgcttactctggcgatgaaggcagctcgggcaacgctaggaggcaatattctcagtatgcgaccatctccgcatctcctcttgttggtctcccggaattttcgcacttgggttggggccattggttcactctgagggatttggagcattcgacgaatcgcttctctaaggagaacatcattggagagggtggatatggggtggtttaccgtggtcgactcataaatgggactgatgtagcaataaaaaagctactgaataacatgggccaggcagaaaaggagttcagggttgaagttgaggctattggccatgtcaggcataaaaatctggtccgtctgctaggatattgtgttgaaggaatccacaggatgcttgtgtatgagtacgtgaataacggaaacttagagcagtggattcacggcgccatgcggcagcacggtgttcttacctgggaagctcgaatgaaaatcattcttggaattgctaaagcgcttgcttatctacatgaagccatagagccaaaagttgtgcaccgtgatatcaaatcaagcaatatcctaattgacgaggatttcaatgggaagctttctgattttggattggccaagatgttgggtgctgggaagagccatatcacgactcgcgttatgggaaccttcgggtatgtggcccctgaatatgccaacacaggtctgttaaacgagaagagcgatgtctacagtttcggtgtgctgctactggaagcagttactgggagggatcctgtcgactatggtcggccagccaatgaggtgcatctggtggagtggctcaaaatgatggttggcacgaagagagccgacgaggtggtggaccgtgacatggaggtgaagccaaccatccgtgctctcaagcgcgccctcctagtggcgctgcggtgcgtcgacccggactccgagaagagacccacgatgggtcacgtcgtccggatgctcgaggcagaggacgtcccgtcgcgggaggaccggaggagccggaggggcggccacgccggcggtggcaacgcggacgccgagtccaaggcgagctcgagcgagttcgaggtgagcggcgactcggggccctcggcgaggttccagccctgaagaacggcgtcgtcgacgagcgagggcgtccccgagaactcggccccggccgagggcagtagagatagcatgatgggcatttcctgtaggacattgcattgcattgcgcttcattttgcattgtaggcggtagagagagagagcagtgctgattgatcatgcgtgatcatcatcatcatcccctgagactgagaagtgagaacctttgctgtagcttcgtttgggcaaccctgtacagatcgtttcctcctttcttttctgttttctttgtctagggtatctctttgaatgaacaatcaataaacctattaagattttctagggtattaagattgtattattaaacgtcctttaaaaaaaaaaaaaaaa

SEQ ID NO: 4602 - protein, 509 aa, Triticum aestivum
  misc_feature: Ceres CLONE ID no. 930831
  misc_feature: Ceres CDNA ID no. 25892875
  misc_feature (189)..(388): Pfam Name: Pkinase PFAM Desc: Protein kinase domain
  misc_feature (440)..(460): Pfam Name: Pkinase_Tyr PFAM Desc: Protein tyrosine kinase
  misc_feature: Homolog of GI Number: 30725318 NR Desc: At1g56720
  misc_feature: Homolog of GI Number: 34910880 NR Desc: P0003E08.6
  misc_feature: Homolog of GI Number: 77553390 NR Desc: Protein kinase domain
  misc_feature: Homolog of GI Number: 21553648 NR Desc: Ser Thr specific protein kinase
  misc_feature: Homolog of GI Number: 78708852 NR Desc: kinase
  misc_feature: Homolog of GI Number: 42561860 NR Desc: protein kinase family protein
  misc_feature: Homolog of GI Number: 37535714 NR Desc: putative kinase
  misc_feature: Homolog of GI Number: 51847836 NR Desc: putative receptor
  misc_feature: Homolog of GI Number: 34912364 NR Desc: putative receptor
  misc_feature: Homolog of GI Number: 7529754 NR Desc: receptor
MVTAESLRAELSSKTPPFGLRLWIVIGISIWVVIFCILGFMCFWSIYRRKPKKSVDKIPVSQIPDVSKEIAVDEVRQHAVVENYQMQESHTLTVQEKPHEKDSGKMLGHLVRTKSSDADNLSQCSSAYQCDRAGSAYSGDEGSSGNARRQYSQYATISASPLVGLPEFSHLGWGHWFTLRDLEHSTNRFSKENIIGEGGYGVVYRGRLINGTDVAIKKLLNNMGQAEKEFRVEVEAIGHVRHKNLVRLLGYCVEGIHRMLVYEYVNNGNLEQWIHGAMRQHGVLTWEARMKIILGIAKALAYLHEAIEPKVVHRDIKSSNILIDEDFNGKLSDFGLAKMLGAGKSHITTRVMGTFGYVAPEYANTGLLNEKSDVYSFGVLLLEAVTGRDPVDYGRPANEVHLVEWLKMMVGTKRADEVVDRDMEVKPTIRALKRALLVALRCVDPDSEKRPTMGHVVRMLEAEDVPSREDRRSRRGGHAGGGNADAESKASSSEFEVSGDSGPSARFQP

SEQ ID NO: 4603 - DNA, 1884 bp, Triticum aestivum
  misc_feature: Ceres CLONE ID no. 931381
  misc_feature: Ceres CDNA ID no. 25892876
  CDS (337)..(1617): REFERENCED BY SEQ ID NO: 4604
cactcactcccactccccctccctcactcgtcagtcaccattacctactggccggccggcccgccgaccgtctcccccctccgccgccccgaaaccagcagttcgtgcagggagagaatcgcggaaccgtgcgtggaaccgctgaggggctgcggcttgatctgctccagaattttcggccttcgatctttggtttcagctgttgttgaaggaggtggtggaggaagctgcattggcagtaggctgacccttctgctagcaatgagatgagccccctgctgtttgcagacgctgaccttggtgatctccgttaagtccttaccaatcagctgggagatggcgtattctggacagaggcatgtcggtgccgccgggagctcgtcgcggcaggggaatggcttcaagggacaggccagctcagttgagttcctgggaaggggaatggtggggatgcagctcagagatgcaaagccagatgatgctcatgatgaaagggacaatgagccagatgtggttgccgattctggttctgaagctggtcaaataattgcaaccacaatccgtggtcgaaatggtctgccaaaacagtccgtcagttacattgctgaacatgtggttggaactggttcttttggagttgtatttcaggccaaatgtcgagaaacgggagaagtcgttgccatcaaaaaggttcttcaagataagcgttacaaaaacagggaattgcaaattatgcatatgcttgaccatccgaacattgttggtcttaagcattacttcttctcaaccactgaaaggaatgagctttatcttaatcttgtccttgagttcgttccagagacagttaaccggatggcaagacaatacaacagaatgaatcaaagagtgcccctcatttatgtcaaactatacacttatcagatatgccgagcacttgcttatatacataactgtgttggcatctgccaccgtgatatcaaaccacagaacgttctcgttaacccacatacacaccagcttaaaatatgtgattttggcagtgcaaaggtcttggtcaagggagagccaaatatctcctacatatgctcaagatactaccgagcaccagaactcatatttggtgcaactgaatatactacagccattgatttgtggtccacaggctgtgtgatggcagagctgcttcttggacagccactctttcctggggaaagtggagttgatcagctggttgagattatcaaggtcttgggtactccaacaagggaagagatcaagtgcatgaatccaaactacacggagttcaagttcccacaaattaaggctcacccatggcacaaggtttttcagaaaaagcttccacctgaagcaatggaccttgtcagcaggtttctccaatactcaccagatcttcggtgcactgctatggaagcctgcatgcacccgttctttgatgagttgagagatccaaacacccgcctacctaacggccggcctcttccacccctcttcaacttcagatctcaagagctaaacggtatacctccggaagtcgtcgagcgcctggttccggagcatgcgagaaggcagaacctgttcatggcgctccgcacctagttttcgcgtgtcctctccatgtttttcgcgttgtttggtgtctggactctggagggaagcttgtaaattgagctgtagctttctgtgggtgacaagcactggtagtagagttgtcccgggatgcatgtttggtttggaggcttgatggttggtgtgtatagatggtttgcggtttctgaaagtttcttgtttggatgagttgatgatgcaatcaaaatcgttcagaaatatttaccctctttatttttcacaaaaaaaaaaaaaaaa

SEQ ID NO: 4604 - protein, 426 aa, Triticum aestivum
  misc_feature: Ceres CLONE ID no. 931381
  misc_feature: Ceres CDNA ID no. 25892876
  misc_feature: The plants are small.
  misc_feature: null
  misc_feature: Useful for making plants with modulated biomass
  misc_feature (192)..(234): Pfam Name: Pkinase_Tyr PFAM Desc: Protein tyrosine kinase
  misc_feature: Homolog of GI Number: 21700933 NR Desc: AT4g00720/F6N23_11
  misc_feature: Homolog of GI Number: 24637171 NR Desc: GSK
  misc_feature: Homolog of GI Number: 717180 NR Desc: K
  misc_feature: Homolog of GI Number: 1617200 NR Desc: NSK6
  misc_feature: Homolog of GI Number: 52352563 NR Desc: putative salt
  misc_feature: Homolog of GI Number: 3236117 NR Desc: shaggy kinase 6
  misc_feature: Homolog of GI Number: 3702608 NR Desc: shaggy kinase 7
  misc_feature: Homolog of GI Number: 2598601 NR Desc: shaggy
  misc_feature: Homolog of GI Number: 2598603 NR Desc: shaggy
  misc_feature: Homolog of GI Number: 3236115 NR Desc: shaggy
MAYSGQRHVGAAGSSSRQGNGFKGQASSVEFLGRGMVGMQLRDAKPDDAHDERDNEPDVVADSGSEAGQIIATTIRGRNGLPKQSVSYIAEHVVGTGSFGVVFQAKCRETGEVVAIKKVLQDKRYKNRELQIMHMLDHPNIVGLKHYFFSTTERNELYLNLVLEFVPETVNRMARQYNRMNQRVPLIYVKLYTYQICRALAYIHNCVGICHRDIKPQNVLVNPHTHQLKICDFGSAKVLVKGEPNISYICSRYYRAPELIFGATEYTTAIDLWSTGCVMAELLLGQPLFPGESGVDQLVEIIKVLGTPTREEIKCMNPNYTEFKFPQIKAHPWHKVFQKKLPPEAMDLVSRFLQYSPDLRCTAMEACMHPFFDELRDPNTRLPNGRPLPPLFNFRSQELNGIPPEVVERLVPEHARRQNLFMALRT

SEQ ID NO: 4605 - DNA, 2036 bp, Triticum aestivum
  misc_feature: Ceres CLONE ID no. 932174
  misc_feature: Ceres CDNA ID no. 25447197
  CDS (196)..(1740): REFERENCED BY SEQ ID NO: 4606
actcaacagaaccagttcatcggaggtcccacgcttcccccctcattcaggatccttcgcgcctgctgcgatctggattcggatgatcaatcgagcggctttttgtccagttcttcctgggtgatcctctatccggttggggattttccttcgatcggcttctcctcctaagagatttcagtcacacatacagaaatgggtaacactgttgccgaggaagacatagaagacataccaaattcagatgcaaatccaccaattttgactgaatatcacatcacagtccctacccttcacgacggactaatgcaaggggaacaccaacacgagagaaggcttctggatttcctgaaagcaacgccttcagtgcaatggctgaaggacatcaacgtctgcgcgccactgggaaaatttcagctgccatcgatcggcgtccaccgctacctccatgtccacttcatcagaactgtcgactggagctcactgctcgccatctgcaagaaccacctcaagcatcccctcaacatcgccctactcatctggctgctctgcgtcgccgccgccggcgccatgcttgggctgctcctgttggggctgctgaagaaggcattcccttccagggcactgaggcaccactggatagagatcgacaaccagatcctcaacgcgctcttcacgctcatgagcatctaccagcaccccatcctcgtccaccacctcgttctcctctgccggtggcagccggaggacgccgccgaggtaagaaaggtgtactgcaagaatggcgcccgccgtcccaacgagcgagcgcacatgtccttcgtggtggccctcctccacattacatgcatttcgcagtacatggagtgcagcctctactggggctacccaagcaggtcacgctccgagttcgccgagaacttcttcttcatcctcggcgtcgccgcgccggtcgtcgccggcgctcatatggtgtacagccctctaggcagagacgacgacgtcgctgccgcctcctgcgaagaggccaagcagctccactcagccggagccgaagaatcgccggaagaaacgacggctgtcggcaacccgatgtgggcgggggagctgctggactgcggcgaggacccggcggcgtgctacctgtcgttcctgtgcacgttctgcgtgttcggctggaacatggagcggctcgggctgggcaacatgtacatgcacaccgccatgttcctgctgctgtgcgtcgcgcccttgtgggtgttcaacgtcacggcgctcagcatccacgactacgccctcagcgacgccttcggcgccgccggggtggtgctctgcttcctcggcctcctgtacggcggtttctggaggatccagatgaggaagcggctcgggctgccccggagcaggtggtgctgcggctcgtcgtcgctgacggactacgcgcagtggctgctctgctggccgtgcgcgctcgcgcaggaggtgcgcacggcgaacctgtacggcctgagggacgacggcggtctctacgggaagctggtggacggcggtgacccggagcgagggccggacgtgccggtctgcgttgggatgcacgaggggatcgatgctgccgtccatctcgcggtggacggcgagatgatcccgcccgtccagccggtggtagagtctggacggcaaaggcaagccggcgccgaagaaattgttgcaaatggcagtagcgtccagctccaaagttgaccgcagctattggatggtgactgatgctgtatacttatgcgaaagctgacggatagattcttgcttttcgtgatcgatgtcaccattttgacattgttatgctcctggtttgtcatgttctgcacaggactttaggtcgtcagtcattacttagtccagttttattcagatcatctaccttgacactccaacagatgtcatctttcattgattctttttgtattgcacgttactagaagaagaagaagaaagtctctcttgattattttgagaggcacccaaaaaaaaaaaaaaaa

SEQ ID NO: 4606 - protein, 514 aa, Triticum aestivum
  misc_feature: Ceres CLONE ID no. 932174
  misc_feature: Ceres CDNA ID no. 25447197
  misc_feature (301)..(433): Pfam Name: PLAC8 PFAM Desc: PLAC8 family
  misc_feature: Homolog of GI Number: 77553407 NR Desc: retrotransposon protein
  misc_feature: Homolog of GI Number: 77548350 NR Desc: uncharacterized Cys
  misc_feature: Homolog of GI Number: 77553406 NR Desc: uncharacterized Cys
  misc_feature: Homolog of GI Number: 77548348 NR Desc: uncharacterized Cys
  misc_feature: Homolog of GI Number: 58979177 NR Desc: Cys
  misc_feature: Homolog of GI Number: 72547023 NR Desc: proteophosphoglycan ppg4
  misc_feature: Homolog of GI Number: 72547041 NR Desc: proteophosphoglycan ppg1
  misc_feature: Homolog of GI Number: 72547036 NR Desc: proteophosphoglycan 5
  misc_feature: Homolog of GI Number: 72547018 NR Desc: proteophosphoglycan ppg3
  misc_feature: Homolog of GI Number: 13592175 NR Desc: ppg3
MGNTVAEEDIEDIPNSDANPPILTEYHITVPTLHDGLMQGEHQHERRLLDFLKATPSVQWLKDINVCAPLGKFQLPSIGVHRYLHVHFIRTVDWSSLLAICKNHLKHPLNIALLIWLLCVAAAGAMLGLLLLGLLKKAFPSRALRHHWIEIDNQILNALFTLMSIYQHPILVHHLVLLCRWQPEDAAEVRKVYCKNGARRPNERAHMSFVVALLHITCISQYMECSLYWGYPSRSRSEFAENFFFILGVAAPVVAGAHMVYSPLGRDDDVAAASCEEAKQLHSAGAEESPEETTAVGNPMWAGELLDCGEDPAACYLSFLCTFCVFGWNMERLGLGNMYMHTAMFLLLCVAPLWVFNVTALSIHDYALSDAFGAAGVVLCFLGLLYGGFWRIQMRKRLGLPRSRWCCGSSSLTDYAQWLLCWPCALAQEVRTANLYGLRDDGGLYGKLVDGGDPERGPDVPVCVGMHEGIDAAVHLAVDGEMIPPVQPVVESGRQRQAGAEEIVANGSSVQLQS

SEQ ID NO: 4607 - DNA, 615 bp, Triticum aestivum
  misc_feature: Ceres CLONE ID no. 932229
  misc_feature: Ceres CDNA ID no. 40351495
  CDS (68)..(358): REFERENCED BY SEQ ID NO: 4608
ctccacacaactaccagtacactccactcccatcacacacacggacacacctgcgagagcgtgagccatggcgtccatggggaagaagcaggtggtggcggcgctgatgctggtgctggtggtgctggcggcggcgccgggcggggcgcacgcggcgtgccaggcgtcacagctggcggtgtgcgcttcggcgatcctgtccggggccaagccgagcggcgagtgctgcggcaacctgcgggcgcagcagccgtgcttctgccagtacgccaaggaccccacctacgggcagtacatccgcagcccccacgcgcgcgacaccctccagtcctgcggcctcgccgtcccgcactgctaggcgccggcaggcccctggcgcacatggcaagctagctgcctcagtgaccatgagagcgtcagactatagctagcctatctgagtgcctacgtgttgcgtccatgaaagcatcttcctgtcaaccatgtggttcgactttgatgatgctggaataaaaatataaaatgttgggtgatgatctacggcagccatgttgcttcttggctgctgctgctggtaataaaatttgtgttgcaactcgaaaaaaaaaaaaaaaa

SEQ ID NO: 4608 - protein, 96 aa, Triticum aestivum
  misc_feature: Ceres CLONE ID no. 932229
  misc_feature: Ceres CDNA ID no. 40351495
  misc_feature (31)..(96): Pfam Name: Tryp_alpha_amyl PFAM Desc: Protease inhibitor/seed storage/LTP family
MASMGKKQVVAALMLVLVVLAAAPGGAHAACQASQLAVCASAILSGAKPSGECCGNLRAQQPCFCQYAKDPTYGQYIRSPHARDTLQSCGLAVPHC

SEQ ID NO: 4609 - DNA, 732 bp, Triticum aestivum
  misc_feature: Ceres CLONE ID no. 932292
  misc_feature: Ceres CDNA ID no. 40351496
  CDS (67)..(552): REFERENCED BY SEQ ID NO: 4610
gtttaggttttcttagtcagacttaccccttgctaccaacactgagcttaaccgagcttcgcaaagatgaatcgggaaaagttaatgaagatggccggttcggttagaactggaggaaagggtactgtgagaagaaagaagaaggctgtccacaagacaacaaccacagatgacaaaaggcttcagagcaccctgaagagaataggggtgaatgccatccctgctattgaagaggtcaatatctttaaggatgacgtagttatccagtttctaaatcccaaagttcaagcatccattgctgctaatacttgggttgtcagtggttcaccgcaaacaaagaagttgcaggatatactccctagcattatccaccaattaggaccagataacttggaaaacctgaagaagctagccgagcaattccagaagcaggctcctgaaggggccgctggttcaaccacagctcaagaggagaatgatgacgacgtcccagagcttgttccaggccaggattttgagacagctgctgaggagaccaaggctgcttcttagattgtgccatcgctaaatatctcctgtgttttaattttttcttcttcttgattttccattttaagtatttcaggtgtttggttctcctgtcatatactttaaacagttcaaatactctattaaatctgctttccttcatctaactaggtattcagtttttgataaaaaaaaaaaaaaaaa

SEQ ID NO: 4610 - protein, 161 aa, Triticum aestivum; identical to SEQ ID NO: 3316
  misc_feature: Ceres CLONE ID no. 932292
  misc_feature: Ceres CDNA ID no. 40351496
  misc_feature: The plant is abnormally large.
  misc_feature: Useful for making plants with modulated growth and phenotype characteristics
  misc_feature: The sequence is a functional homolog of  SEQ ID NO 1614 in the  11/479,226 US patent application
  misc_feature: The sequence is a functional homolog of  SEQ ID NO 1617 in the  11/479,226 US patent application
  misc_feature: The sequence is a functional homolog of  SEQ ID NO 784 in the  10/412,699 US patent application
  misc_feature: The sequence is a functional homolog of  SEQ ID NO 786 in the  10/412,699 US patent application
  misc_feature: Useful for making plants with modulated biomass
  misc_feature (35)..(92): Pfam Name: NAC PFAM Desc: NAC domain

SEQ ID NO: 4611 - DNA, 465 bp, Triticum aestivum
  misc_feature: Ceres CLONE ID no. 932424
  misc_feature: Ceres CDNA ID no. 40351497
  CDS (64)..(273): REFERENCED BY SEQ ID NO: 4612
ccctactctttccctcgccgccgccgccgcctccttctcctcgggtttgcacagtcgtccaccatgccgaagcagatccacgagatcaaggacttcctgctgacggcgcgccggaaggacgcgcggtcggtgcggatcaagaggaccaaggacgccgtcaagttcaaggtgcgctgctccaggtacctctacacgctctgcgtcttcgacgccgacaaggccaacaagctcaagcagtccctcccaccaggtttgagcgtccaggaggtttaagcatcaagccagacaatgccttttctagtagcgggaatgttctatccatcttgctttagtaactgttagcaggctctccttgtttacccccattaagagagttttgatgtcccaagaatggaatgtaatgttgggagctatgtggttgaacctgtgaggatttttgtgttattttcaaaaaaaaaaaaaaaa

SEQ ID NO: 4612 - protein, 69 aa, Triticum aestivum
  misc_feature: Ceres CLONE ID no. 932424
  misc_feature: Ceres CDNA ID no. 40351497
  misc_feature (2)..(69): Pfam Name: Ribosomal_L38e PFAM Desc: Ribosomal L38e protein family
MPKQIHEIKDFLLTARRKDARSVRIKRTKDAVKFKVRCSRYLYTLCVFDADKANKLKQSLPPGLSVQEV

SEQ ID NO: 4613 - DNA, 706 bp, Triticum aestivum
  misc_feature: Ceres CLONE ID no. 932474
  misc_feature: Ceres CDNA ID no. 25445722
  CDS (70)..(480): REFERENCED BY SEQ ID NO: 4614
accccgcccccaaatctccaagcgcgagcgacagccagctccgcctcaacctcccggcgcatctccgacatggcccgcaccaagcagacggcgaggaagtccaccggcggcaaggcgccgcggaagcagctggcgaccaaggccgcccgcaagtccgccccggccaccggcggcgtcaagaagccccaccgcttccgccccggcaccgtcgcgctccgtgagatccgcaagtaccagaagagcacggagctgctcatccgcaagctccccttccagcgcctcgtccgcgagatcgcccaggacttcaagaccgacctccgcttccagtcctccgccgtctccgccctgcaggaggccgccgaggcctacctcgtcggcctcttcgaggacaccaacctctgcgccatccacgccaagcgcgtcaccatcatgcccaaggacatccagctcgcccgccggatccgtggcgagagggcctaggctgcaacccatgcgtcgtctgttagatccctgttaggctgagttcgtcggcggaaatgtgtgtgctactgtagtagtgttccagaatgtacctgtgttcttgtcatggttgatgcgttgtgccccatctgatggtaccctcttgttgccatcagcgatggaaatgaaaaatgttggcttcctcttctcattcatctgtgtttgaattccaaaaaaaaaaaaaaaa

SEQ ID NO: 4614 - protein, 136 aa, Triticum aestivum; identical to SEQ ID NO: 588
  misc_feature: Ceres CLONE ID no. 932474
  misc_feature: Ceres CDNA ID no. 25445722
  misc_feature (58)..(134): Pfam Name: Histone PFAM Desc: Core histone H2A/H2B/H3/H4
  misc_feature: Homolog of GI Number: 34898300 NR Desc: histone H3
  misc_feature: Homolog of GI Number: 166384 NR Desc: histone H3
  misc_feature: Homolog of GI Number: 70753 NR Desc: histone H3
  misc_feature: Homolog of GI Number: 74004201 NR Desc:  similar to histone 1
  misc_feature: Homolog of GI Number: 50729226 NR Desc:  similar to histone protein Hist2h3c1
  misc_feature: Homolog of GI Number: 1362108 NR Desc: histone H3 homolog
  misc_feature: Homolog of GI Number: 55775689 NR Desc: histone 3
  misc_feature: Homolog of GI Number: 34858254 NR Desc: similar to histone protein Hist2h3c1
  misc_feature: Homolog of GI Number: 34858260 NR Desc: similar to histone protein Hist2h3c1
  misc_feature: Homolog of GI Number: 68441481 NR Desc:  similar to CG31613

SEQ ID NO: 4615 - DNA, 2010 bp, Triticum aestivum
  misc_feature: Ceres CLONE ID no. 932657
  misc_feature: Ceres CDNA ID no. 25445912
  CDS (512)..(1717): REFERENCED BY SEQ ID NO: 4616
atttcctccgttaactaatctgttccgcttctgtcgcttcgacgccacggaagagaatccccgccgccaatccggtagctgaggaatcttcggtcctccccaccgaatctggtggcggacctgatctcagctcgaagatctgcagtagcgctctccgtatctcccggcgccgcgcgttgaaattcatggttgttcttcgagctccggctcttgaagcattctgatttggaaatcgcttcttcctggagtcataagaatcagctattccgcaaagattgcgctttttctcttctgttggattcttccattagagcggcggcctctccggagatgacgaccggggccgtcacggagagctttcccggagagcagcgagccgctgctcccgacgaagcggcgatgggagggggaggacggcggcggcgacgaggccgccttccacgagttcaacggcgcctccttcgccggcgcggtgttcaacctgtccaccaccatcgtcggggccggcatcatggcgctgccggcgaccatgaaggtgctcggcctcgtccccgggctggtcatgatcgtgctcgccgccttcctcaccgacgcctccgtcgagctgctcatgcggttcagccgcgtcgtcggcgcgccgtcctacggcgccgtcatgggggacgccttcgggtggtggggaaggaggctgctccaggtctgcgtcgtggtcaacaacgtcggggtcatgatcgtgtacgtgattattataggtgatgtgctttctggaacgtcctctggtggtgagcaccactatggtgtattagaaggatggtttggtacacactggtggaatgggcgtttctttgttctcctggttactactctcggtgtatttactccactagcgtgtttcaagcgtgttgattcactgagctatacatccgccatatctgttgctttggcagttgtattcgttgttattacagcaggaatcgctattgtgaaactgatacgcggacaaattccaatgcctaaattgttccctgcagttcctgatttggcatctgtatgggaacttttcacagcagtaccagttcttgtcactgcttatgtttgccattataatgttcacccaattcataatgagctcaaggagtcctcccagatcaagccaatagtgcacacatcactggctctatgctcaactgtctatatcacaacaagtttctttggataccttctgtttggtgaatctacactcgctgatgtgctcgctaattttgattcaaatctcggcattccatatagttcagttcttagtgatgctgtcagagtcagctatgctatccaccttatgctcgtgttccccatgatattccatgcactgcggcttaatttggatggacttctcttttcctctgcaaggcccttatcttctgataacagaaggtttggtgtaatgacagcagtgctcctccttgtgattttcatatccgcaaacttcattcctagcatctgggatgccttccagtttaccggggctactgctgctgtttgtatagccttcattttcccagctgcaatcactttaagggatccgcacagcatagcgaaaaagtgggacaagattctggccatcttcatgattgttcttgcagtcacttcgaacgtagtagcagtgtacagtgatgcatattcgatattccataagaaaagtgcctcctccaatgcctgagctgcataacctattaggggagtcaaggacgaagagtgaattcatatgaatggtggtttgtacattacttagtcaataagaacaccattgaagagagtattcatggatcggctttgcgatttattttgtagactaccctcgactcaattgtgttgagtcggatgcttgtatctatgcgatggatgtacaaaattcggccaaggctcttttgtgcaatgtacattacaaaattcggccaaggctctatgcgatggatgttaaaatgtgagattacagcaaaaaaaaaaaaaaaa

SEQ ID NO: 4616 - protein, 401 aa, Triticum aestivum
  misc_feature: Ceres CLONE ID no. 932657
  misc_feature: Ceres CDNA ID no. 25445912
  misc_feature (2)..(392): Pfam Name: Aa_trans PFAM Desc: Transmembrane amino acid transporter protein
  misc_feature: Homolog of GI Number: 15241555 NR Desc: amino acid transporter family protein
  misc_feature: Homolog of GI Number: 9758059 NR Desc: amino acid transporter
  misc_feature: Homolog of GI Number: 50905855 NR Desc: putative amino acid transporter A1
  misc_feature: Homolog of GI Number: 50912345 NR Desc: putative amino acid transporter
  misc_feature: Homolog of GI Number: 51535770 NR Desc: putative system A transporter isoform 2
  misc_feature: Homolog of GI Number: 56201560 NR Desc: putative N system amino acids transporter NAT
  misc_feature: Homolog of GI Number: 34907894 NR Desc: P0439E11.11
  misc_feature: Homolog of GI Number: 51535520 NR Desc: amino acid transporter
  misc_feature: Homolog of GI Number: 24461850 NR Desc: CTV.3
  misc_feature: Homolog of GI Number: 50726342 NR Desc: amino acid transporter
MALPATMKVLGLVPGLVMIVLAAFLTDASVELLMRFSRVVGAPSYGAVMGDAFGWWGRRLLQVCVVVNNVGVMIVYVIIIGDVLSGTSSGGEHHYGVLEGWFGTHWWNGRFFVLLVTTLGVFTPLACFKRVDSLSYTSAISVALAVVFVVITAGIAIVKLIRGQIPMPKLFPAVPDLASVWELFTAVPVLVTAYVCHYNVHPIHNELKESSQIKPIVHTSLALCSTVYITTSFFGYLLFGESTLADVLANFDSNLGIPYSSVLSDAVRVSYAIHLMLVFPMIFHALRLNLDGLLFSSARPLSSDNRRFGVMTAVLLLVIFISANFIPSIWDAFQFTGATAAVCIAFIFPAAITLRDPHSIAKKWDKILAIFMIVLAVTSNVVAVYSDAYSIFHKKSASSNA

SEQ ID NO: 4617 - DNA, 715 bp, Triticum aestivum
  misc_feature: Ceres CLONE ID no. 933100
  misc_feature: Ceres CDNA ID no. 40351498
  CDS (271)..(483): REFERENCED BY SEQ ID NO: 4618
gtttcccagtgttatcgactctcctctcacacttcgtcttcccccactccactattcgtctatcctcgtcatgaaaggagtgaatagtggtggcggtggctggccaagccgaacggcggcggcatgtgagatagtagtaggggtctggtgatgtgcgcgtgtcatgtgagatgatatcgccggctggtggatagcgccgctgtttttccactgctgaagcagccgtgacgaaagggcatacacgccggcggccgggagtggcggccggcgatggggctgagccgccgtcatttggcgtttcctggtcaccgacctgaacacctcttgcttgcctggcatcaaggatctaatgatgagcccgctgccgcaaggattgacgctggcaccacaagattggacctgcgccaccgccatctcgtgccagaagccatcgaatccaaatcatccagtaccctcatgttctcccaatttttctgcagctaatttgtagaaaaaaatttgccatggatcccgtgaatttttgccatgtctccaatttttttcgcacatccataattttatttctgtttgctatgttttaatttgttaatttcctatgggattgtttagtaatctttgcaaaatgttcatgatttgccatggtcactcatactcctgactgtcatggtctattttgttaatttccatgggattttaagtaaaaaaaaaaaaaaaa

SEQ ID NO: 4618 - protein, 70 aa, Triticum aestivum
  misc_feature: Ceres CLONE ID no. 933100
  misc_feature: Ceres CDNA ID no. 40351498
MGLSRRHLAFPGHRPEHLLLAWHQGSNDEPAAARIDAGTTRLDLRHRHLVPEAIESKSSSTLMFSQFFCS

SEQ ID NO: 4619 - DNA, 1263 bp, Triticum aestivum
  misc_feature: Ceres CLONE ID no. 934464
  misc_feature: Ceres CDNA ID no. 29191629
  CDS (30)..(1043): REFERENCED BY SEQ ID NO: 4620
gaatcttatcccgcttattatctgcagccatggccgcggccagcttcctcctaagccccagggtgacgctgcccctgcgccgaggatcccgcctcctcgtgtcctgctccgccacttcgtcatcctcctcgtcagatgctgctggaggggtgggattccagggaagggtggggttcttgggcctcgggatcatgggcgcccccatggcatcaaacctcatgaaggctggttgtgatattacagtttggaacagaaccaagagcaagtgcgatcctcttctcagcctcggtgccaagtttgaatcttcacccgccagagttgcatcatcttgtgatgtcacctttgcaatgcttgctgacccagaaagcgcgtttgaggttgcatgcggcgctaatggagccgcagaagggatggccgcagggaaagggtatgtcgatgtgtcgacagtcgatgatgcaacatctaagctaatcggcaaacgtattacaagtactggggcatcttttctcgaggctccagtttcaggctcaaaaaagccagcagaagatggactgctgatctttcttactgcaggtgatgaatccttgtacaagagagtggcgcccctacttgatgtcatgggcaagtcaagattttatcttggggatgtcgggaatggcgcagcaatgaagctcgtggttaatatggtgatggggagcatgatggtctcctttgcagaagggctactcctgagtgaaaaagtggggttagacccgaatactgtcgtcgaggttatttcacaaggtgctatcaatgctcccatgttctccctcaagggcccttccatggttaaagctgcataccctactgcctttcccctgaaacatcagcagaaggatctaaggctggcgctggccctggcagaatcggtgtcccagcccattcctacagctgcagctgcaaacgagctgtacaaggtagccaaatcgctgggcctcgccgaccaggacttctccgcggtcattgaggcgctcaaggctgaaatgcagagctcgcagcactagatattgtttcttcagccggccaagtttgagtgtggcattcaaatgtattcgcccatcttgtctcttttgcggacatataaatgtgcttgttttacaggcagagtgtatacagaaatgtaaaatgaatatatacagaatatcaacccttgcaaagggggaaacggtatcgatatttttggtatgtttgtaattaaaaaaaaaaaaaaaaaaaaaaaaaaaa

SEQ ID NO: 4620 - protein, 337 aa, Triticum aestivum
  misc_feature: Ceres CLONE ID no. 934464
  misc_feature: Ceres CDNA ID no. 29191629
  misc_feature (44)..(206): Pfam Name: NAD_binding_2 PFAM Desc: NAD binding domain of 6
  misc_feature: Homolog of GI Number: 52076371 NR Desc: oxidoreductase
  misc_feature: Homolog of GI Number: 34914300 NR Desc: putative gamma hydroxybutyrate dehydrogenase
  misc_feature: Homolog of GI Number: 79346256 NR Desc: phosphogluconate dehydrogenase
  misc_feature: Homolog of GI Number: 8778467 NR Desc: F1L3.35
  misc_feature: Homolog of GI Number: 15375068 NR Desc: gamma hydroxybutyrate dehydrogenase
  misc_feature: Homolog of GI Number: 9279732 NR Desc: dehydrogenase
  misc_feature: Homolog of GI Number: 39996474 NR Desc: 3
  misc_feature: Homolog of GI Number: 50909553 NR Desc: putative gamma hydroxybutyrate dehydrogenase
  misc_feature: Homolog of GI Number: 68003292 NR Desc: 2
  misc_feature: Homolog of GI Number: 78224204 NR Desc: 6
MAAASFLLSPRVTLPLRRGSRLLVSCSATSSSSSSDAAGGVGFQGRVGFLGLGIMGAPMASNLMKAGCDITVWNRTKSKCDPLLSLGAKFESSPARVASSCDVTFAMLADPESAFEVACGANGAAEGMAAGKGYVDVSTVDDATSKLIGKRITSTGASFLEAPVSGSKKPAEDGLLIFLTAGDESLYKRVAPLLDVMGKSRFYLGDVGNGAAMKLVVNMVMGSMMVSFAEGLLLSEKVGLDPNTVVEVISQGAINAPMFSLKGPSMVKAAYPTAFPLKHQQKDLRLALALAESVSQPIPTAAAANELYKVAKSLGLADQDFSAVIEALKAEMQSSQH

SEQ ID NO: 4621 - DNA, 2023 bp, Triticum aestivum
  misc_feature: Ceres CLONE ID no. 935554
  misc_feature: Ceres CDNA ID no. 36530664
  CDS (115)..(1671): REFERENCED BY SEQ ID NO: 4622
gaaatagttttcgcagagccgttaagctcacctccttcgaggccggctgctccacctccacctccacctaatccccattcgcctcgcctccccgcccaccgccaccacccgtcgatggcggccatcaagccgccgccgcctgaccggccgccgcaggccgcgcggctgccgtccccttcctcttcctcctcggcggtggcggcggccaagcgaggcgccacaggctcccgcgggctgctcatggggcgctacgagctgggccgcgtcctgggcaaaggcaccttcgccaaggtgtaccacgcgcggcacgtgcagaccggcgagagcgtggccatcaaggtgctcgaccgggagaaggccgtgcggagcggcctcgtctcgcacatcaagcgcgagatcgccgtgctccgctgcgtgcgccaccccaacatcgtgcacctcttcgaggtcatggccaccaagaccaagatctacttcgtcatggagctcgtccgcggcggcgagctcttctcccgcgtctccaagggccgcctcaaggaggacattgcgcgccgctacttccagcacctcatctccgccgtcggcttctgccacacccgcggggtcttccaccgggacctcaagccggagaacctcctcgtcgacgaggcgggcaacctcaaggtgtccgacttcggcctctccgccgtcgccgagccgttccagccagagggtctcctccacaccttctgcggcacgccggcctacgtcgcgcccgaagtcctcgcccgccgtggatacgaaggcgccaaggccgacatatggtcctgcggtgtcatcctctttgttctcatggccggatacctccctttccatgaccagaacctcatggccatgtaccgtaaggtttacaagggagagttccgatgtccaaggtggttctccaaggaccttactagcttgatcatgcgttttcttgacacaaacccaagcaccaggatcaccttgccggaggtcatggagagccggtggttcaagaaaggtttccggccagtcaagttctatattgaagatgaccagctgtacaacgtcattgatgccgagaatgatatgctcgacttgggtctccctgaccctcttcctcaaccattgcttcctccaccttcatctccatctccgcaagaagttgatggagatgactcagggtcagaatccgacgcatcagtcgtgtcctgccctgccacatcgtcatttgaagagcgccacaggctccgcgggccactcccacgccccgcaagccttaacgcgtttgatatcatatcattctcaaggggattcaacttgtcggggctgtttgaggaaaaaggggacgaggtgagattcatctcgagtgaacctatgtcgggcattataacgaaattagaggagatcgcaaatgtgaagagcttcgcggtgcggaagaaggattggcgggtgagcctagagggcacaagggaaggggttaaggggccactaacaatctgcgcggagatatttgaactcacaccctcccttgtagtagtggaggtaaaaaagaaggcgggggataaggaagagtatgatgatttctgcaacaaggaattgaagccaggaatgcagcatcttgtgcaccagatggccccagttccaattacacctaccatttctgagtaggccgaaaggccttcaaggtaacaggcgccaccgcccctagagctaacggggatagggggagcgactctccaagctagaaagaaactggagtcgggtgcaactgacaggagcaagagttcttgtagtctcgggcactgacgatgatgagcgcggttacttggttaactctggagagcatacgtaatgttatccgagacgggagctagattgtggctgtatatggtgtcaccctagctgctgtttaaatgtttgtacttttctctacttaatttgctgatgatgattgtgtatgtactcccgctgttggtttatcagcagaaccgaataattttgggcaaaaaaaaaaaaaaaa

SEQ ID NO: 4622 - protein, 518 aa, Triticum aestivum
  misc_feature: Ceres CLONE ID no. 935554
  misc_feature: Ceres CDNA ID no. 36530664
  misc_feature (173)..(190): Pfam Name: Pkinase_Tyr PFAM Desc: Protein tyrosine kinase
  misc_feature (385)..(442): Pfam Name: NAF PFAM Desc: NAF domain
  misc_feature: Homolog of GI Number: 51451348 NR Desc: 'protein kinase
  misc_feature: Homolog of GI Number: 14334388 NR Desc: CBL
  misc_feature: Homolog of GI Number: 57900388 NR Desc: OsPK7
  misc_feature: Homolog of GI Number: 34909718 NR Desc: OsPK7
  misc_feature: Homolog of GI Number: 6651177 NR Desc: protein kinase PK4
  misc_feature: Homolog of GI Number: 626040 NR Desc: protein kinase SNF1 homolog wpk4
  misc_feature: Homolog of GI Number: 49333397 NR Desc: putative serine
  misc_feature: Homolog of GI Number: 9758928 NR Desc: serine/threonine protein kinase
  misc_feature: Homolog of GI Number: 3928519 NR Desc: wpk4 protein kinase
  misc_feature: Homolog of GI Number: 57900267 NR Desc: putative serine/threonine Kinase
MAAIKPPPPDRPPQAARLPSPSSSSSAVAAAKRGATGSRGLLMGRYELGRVLGKGTFAKVYHARHVQTGESVAIKVLDREKAVRSGLVSHIKREIAVLRCVRHPNIVHLFEVMATKTKIYFVMELVRGGELFSRVSKGRLKEDIARRYFQHLISAVGFCHTRGVFHRDLKPENLLVDEAGNLKVSDFGLSAVAEPFQPEGLLHTFCGTPAYVAPEVLARRGYEGAKADIWSCGVILFVLMAGYLPFHDQNLMAMYRKVYKGEFRCPRWFSKDLTSLIMRFLDTNPSTRITLPEVMESRWFKKGFRPVKFYIEDDQLYNVIDAENDMLDLGLPDPLPQPLLPPPSSPSPQEVDGDDSGSESDASVVSCPATSSFEERHRLRGPLPRPASLNAFDIISFSRGFNLSGLFEEKGDEVRFISSEPMSGIITKLEEIANVKSFAVRKKDWRVSLEGTREGVKGPLTICAEIFELTPSLVVVEVKKKAGDKEEYDDFCNKELKPGMQHLVHQMAPVPITPTISE

SEQ ID NO: 4623 - DNA, 761 bp, Triticum aestivum
  misc_feature: Ceres CLONE ID no. 935734
  misc_feature: Ceres CDNA ID no. 40351499
  CDS (64)..(396): REFERENCED BY SEQ ID NO: 4624
tagttgctcttttctccctctccgcatacactctgctcgtagggtttctccacctagagggaaatggctcccaaaccgcctagtacgggtctgtttgttggactgaacaagggtcacgtcgtcaccaagaaggaattgcctccacgcccctcagatcgtaaggggaaaacaagcaagagggtgcactttgtgaggaacctcataagagaggtagccggttttgcaccctatgaaaagcgtataactgagttgctgaaggttgggaaggataagagggcactgaaggttgcaaagagaaagctcggaacacacaaacgcgcaaagaagaagcgtgaggaaatgtccagtgttctcaggaagatgagggctggtggtgctggagacaagaagaaataagtcttatttactgttttccagattcactagatggacctgtgtattgatggacgagctttcatatttttgctttggttcaattagtttacttcaagattttgtttgagaaatatgttttgcttaactgagacatgatttatggaagaagctagattggattattttctgttttactagaaatgagagttataatcctttttcaagggaactttgcatcttattagtatcctgagggtaatatttcattgaatcccaagggttagttatattgcaagctgtgatgcttttgcatgccttattggtcaaaaccaaatgagttatatgggatgtgtttatttttggtgtcgccaaaaaaaaaaaaaaaa

SEQ ID NO: 4624 - protein, 110 aa, Triticum aestivum
  misc_feature: Ceres CLONE ID no. 935734
  misc_feature: Ceres CDNA ID no. 40351499
  misc_feature (5)..(103): Pfam Name: Ribosomal_L36e PFAM Desc: Ribosomal protein L36e
MAPKPPSTGLFVGLNKGHVVTKKELPPRPSDRKGKTSKRVHFVRNLIREVAGFAPYEKRITELLKVGKDKRALKVAKRKLGTHKRAKKKREEMSSVLRKMRAGGAGDKKK

SEQ ID NO: 4625 - DNA, 1546 bp, Triticum aestivum
  misc_feature: Ceres CLONE ID no. 935882
  misc_feature: Ceres CDNA ID no. 24766550
  CDS (122)..(1324): REFERENCED BY SEQ ID NO: 4626
accgaatcttcggtttctacctacctaacgcccaggccccttgctgctccacgccggactcgccaccggaggaggagggccaagataaacaaaaccgaatccgaataaagccggcaagtcaatgcagttcgcgatcaccaccgccgtctccgcgaacccgcatctgaagcctctggtctccttcccgcggccgtcgcccccgcaccgggtccgagtccaccctccttgccaccgcctgaacacgagggcgagcgtcatggcctcctcggcgccgctggagctcaccatcacgcgccccgacgactggcacctccacctccgtgacggcgacgtgatggccgcggtgctcccccacagcgcgaggcactttgagagagccatcgtgatgcccaacctgaagccaccggttactacaacggcacgtgcgatcgcgtacagagatgagatcctcaaggcgctgcctcccgggagcagcttcgtgccgctcatgacgctctacctcacggacaggactagcccggaggaaattaagatcgcaagaaagagtggtgtggtttttgctgtcaagttgtatcctgctggagcaactactaactcccaagatggcgtaactgatattttggggaaatgcttgcctgtccttgaagagatggtcaagcaggaaatgcctttacttgttcatggagaagtcacagatcctcatgtcgacacctttgaccgtgagaaggtcttcattgagaaaatattagcaccacttgtacaaaaacttccacagctgaaaattgttatggaacatatcactacgatggatgcagtgaacttcgtagaatcatgcaaagaaggtcatgttgctgcaacagtgactccgcagcatctccttctaaacaggaatgcgttgtttcagggtggtttacagcctcacaattattgcttgccagtgctgaagagagaaacccacaggcaagctattgtttctgctgtaacaagtgggagcagacaatactttcttggcactgacagtgctccccatgataaacggctgaaggagtgttcctgtggatgtgcaggaatatatagtgctcctgttgctctttctctttatgcgaaggtatttgaagaggccggtgctcttgataagctagaggcgtttacaagcttcaatgggccagatttttatggtctcccaaggaacacatcaaagactgttctgagaaggagtccctggaaagtgcctgcaacttatgcgtacggttcaggagtgattgtgcctatgtccaccggcaacactctggaatggcttccgcccgatcagcccgaagaataagcaaattacagacggtccatttgggggagaaacaataagtggagccgttccatctcccccctttctgtagaatgcgcctgacaaacaaggttttggttgtagacttaccccgtgtgggattcttaaaatcaactttgtaagaacaacttattccaagcaagagcgaaaaagtcttcgtctgaataaaagaaaagaggttcttgtcgaaaaaaaaaaaaaaaa

SEQ ID NO: 4626 - protein, 355 aa, Triticum aestivum
  misc_feature: Ceres CLONE ID no. 935882
  misc_feature: Ceres CDNA ID no. 24766550
  misc_feature (6)..(351): Pfam Name: Amidohydro_1 PFAM Desc: Amidohydrolase family
  misc_feature: Homolog of GI Number: 7269140 NR Desc: dihydroorotase
  misc_feature: Homolog of GI Number: 17977977 NR Desc: dihydroorotase
  misc_feature: Homolog of GI Number: 34909480 NR Desc: putative dihydroorotase
  misc_feature: Homolog of GI Number: 76808528 NR Desc: dihydroorotase
  misc_feature: Homolog of GI Number: 67737566 NR Desc: COG0418: Dihydroorotase
  misc_feature: Homolog of GI Number: 83718396 NR Desc: dihydroorotase
  misc_feature: Homolog of GI Number: 67660564 NR Desc: Dihydroorotase homodimeric type
  misc_feature: Homolog of GI Number: 48767967 NR Desc: COG0418: Dihydroorotase
  misc_feature: Homolog of GI Number: 68555105 NR Desc: Dihydroorotase homodimeric type
  misc_feature: Homolog of GI Number: 77165979 NR Desc: Dihydroorotase homodimeric type
MASSAPLELTITRPDDWHLHLRDGDVMAAVLPHSARHFERAIVMPNLKPPVTTTARAIAYRDEILKALPPGSSFVPLMTLYLTDRTSPEEIKIARKSGVVFAVKLYPAGATTNSQDGVTDILGKCLPVLEEMVKQEMPLLVHGEVTDPHVDTFDREKVFIEKILAPLVQKLPQLKIVMEHITTMDAVNFVESCKEGHVAATVTPQHLLLNRNALFQGGLQPHNYCLPVLKRETHRQAIVSAVTSGSRQYFLGTDSAPHDKRLKECSCGCAGIYSAPVALSLYAKVFEEAGALDKLEAFTSFNGPDFYGLPRNTSKTVLRRSPWKVPATYAYGSGVIVPMSTGNTLEWLPPDQPEE

SEQ ID NO: 4627 - DNA, 1346 bp, Triticum aestivum
  misc_feature: Ceres CLONE ID no. 936006
  misc_feature: Ceres CDNA ID no. 25446086
  CDS (100)..(933): REFERENCED BY SEQ ID NO: 4628
agcgaggaataggaggtctctctcgcagtcgcaggctcacacacaagccaccggacacccgccgataccaccaccaccaccgctccctctccggccgccatgctgccgccggccgcccgcctcgcggcccgccgcctcctcggcctcgcgtccgcgtccgcttcacagtccgccgcccgacgcctctccccgtctccgatctcctcccccgccgccgcggccgccacgggttacttctccagggccttctcttccgcgcttaactaccacatcgattcgccggacaacaaccccaacatgccgtgggagttcaccaaggacaacatggagaaggtcaacgaaatcctatctcattacccaagcaactacaagcaatctggtattattccaatgctggatcttgcacagcagcagcatggtggatgggtcccggttgcagcaatggacgctattgctaaaatagttggggttgcaccgatcagggtctatgaagttgcaacattttactcaatgttcaatcggaccaaggtgggaaaatatcaccttttggtgtgtggaactacaccttgtatgattcgtggttcatgtgatattgaagatgcccttttaaaacaccttggagttaaacggaatgaggtgacaagcgatggtttattttctgttggggaaatggaatgcatgggttgctgtgtgaatgctcccatgattgctgtggctgactataccaaaggttcagatggttacacatacaattattatgaagacctcactcccaagcgagtcgttgagctcgttgaaatgcttagaagaggagaaacgccccctcgtggcacccagaacccagagcggaaaaactgtggtcctgctggagggatgaccaccttgctaggcgagccaaagcctcccccatgcagggacctggatgcctgctaggtttgctttgagttgcaagcacacaaataagtaggcccggtcgcactgtatgttgcggaaaccgcgaaagcgatttgatctcctgttgttctcaaagctttcttgtggccaacaatggacattcgatttgattgatcttgttgttgtcgaagctttcttttgtctgacaattggatgcgtctacctgtcacacaccatctcttcttttttccttatcatcagctagactgcccactgataagatagtgctattctgaagctgcagctttgtatccggcataagaatctggggcactagatcgattgctgttatgctactcctgcagtgttatattcctgttgttcatgcattaatgtttgaatgaacacggacctggtacattgccgattttcggggaaaaaaaaaaaaaaaa

SEQ ID NO: 4628 - protein, 211 aa, Triticum aestivum
  misc_feature: Ceres CLONE ID no. 936006
  misc_feature: Ceres CDNA ID no. 25446086
  misc_feature (3)..(170): Pfam Name: Complex1_24kDa PFAM Desc: Respiratory
  misc_feature: Homolog of GI Number: 50932293 NR Desc: putative NADH
  misc_feature: Homolog of GI Number: 15450451 NR Desc: AT4g02580/T10P11_14
  misc_feature: Homolog of GI Number: 7269018 NR Desc: predicted NADH dehydrogenase 24 kD subunit
  misc_feature: Homolog of GI Number: 34328782 NR Desc: NADH:ubiquinone oxidoreductase 24 kD subunit
  misc_feature: Homolog of GI Number: 50800491 NR Desc:  similar to NADH2 dehydrogenase
  misc_feature: Homolog of GI Number: 68125734 NR Desc: NADH
  misc_feature: Homolog of GI Number: 57089789 NR Desc:  similar to NADH2 dehydrogenase
  misc_feature: Homolog of GI Number: 73962198 NR Desc:  similar to NADH dehydrogenase
  misc_feature: Homolog of GI Number: 62857879 NR Desc: LOC549920
  misc_feature: Homolog of GI Number: 27807025 NR Desc: NADH dehydrogenase flavoprotein 2
MPWEFTKDNMEKVNEILSHYPSNYKQSGIIPMLDLAQQQHGGWVPVAAMDAIAKIVGVAPIRVYEVATFYSMFNRTKVGKYHLLVCGTTPCMIRGSCDIEDALLKHLGVKRNEVTSDGLFSVGEMECMGCCVNAPMIAVADYTKGSDGYTYNYYEDLTPKRVVELVEMLRRGETPPRGTQNPERKNCGPAGGMTTLLGEPKPPPCRDLDAC

SEQ ID NO: 4629 - DNA, 438 bp, Triticum aestivum
  misc_feature: Ceres CLONE ID no. 936693
  misc_feature: Ceres CDNA ID no. 40351500
  CDS (69)..(320): REFERENCED BY SEQ ID NO: 4630
acaaacgagcaacgcatcctccactcttcactgcaccatctagctagctcttgttagatcgaccggtaatggcgtccaccaaggctctcttcgtgctcgccgttctcctcgcgtcggccgtcctcctcgccgccgcggcctccgagcaaactcatgacaaggaggggaaggtggacaccaacggtgccggcgtccaggacggctggggtggcggcggccgaggcggagggtacccgggccgcgggggcggcggctacgggccgtgtggtcggtggggctgctgccgccgtgggtaccacggcgactgcatccgctgttgaaatcgtgactcgggaaaaacggatagatacttggctatattttccatatcgctggtgaatgttcagacatacatattcttaatttgatgtgattagttgtgcaaaaaaaaaaaaaaaa

SEQ ID NO: 4630 - protein, 83 aa, Triticum aestivum
  misc_feature: Ceres CLONE ID no. 936693
  misc_feature: Ceres CDNA ID no. 40351500
  misc_feature (1)..(80): Pfam Name: GRP PFAM Desc: Glycine rich protein family
MASTKALFVLAVLLASAVLLAAAASEQTHDKEGKVDTNGAGVQDGWGGGGRGGGYPGRGGGGYGPCGRWGCCRRGYHGDCIRC

SEQ ID NO: 4631 - DNA, 606 bp, Triticum aestivum
  misc_feature: Ceres CLONE ID no. 936893
  misc_feature: Ceres CDNA ID no. 40351501
  CDS (76)..(402): REFERENCED BY SEQ ID NO: 4632
aggtttgtgatagtgattgcctccctctgctgccgtccctaatctgaaggctcccgccatctgcgatcggatttcatggctccaaagaaggacaaggctcccccaccttcatccaagcctgccaagtctggcggtggcaagcagaagaagaagaagtggagcaagggtaagcaaaaggaaaaggtgaataacatggtgctcttcgatcagggtacctatgacaagctcctctctgaggcacccaaatacaagctcattactccttccattctctctgaccgtttgaggattaatggatcacttgcaaggaaggctattagggaattgatggctagaggttcaatcaggatggtgtctgcccatgcaagtcagcagatttacactagagctacaaacacctagatgtactggttataatttatgtagtattgatgcacctctgaagtgaaattttgttttttctgtttgagacgtacctcatgctagattgcatcagttcgacagttgctaaattcatggtttatttccttttacatccttcttggtaatatatttggcacaaggctttcatattttaaaaaaaaaaaaacaaaaaaaaaaaaaaaa

SEQ ID NO: 4632 - protein, 108 aa, Triticum aestivum
  misc_feature: Ceres CLONE ID no. 936893
  misc_feature: Ceres CDNA ID no. 40351501
  misc_feature (1)..(106): Pfam Name: Ribosomal_S25 PFAM Desc: S25 ribosomal protein
MAPKKDKAPPPSSKPAKSGGGKQKKKKWSKGKQKEKVNNMVLFDQGTYDKLLSEAPKYKLITPSILSDRLRINGSLARKAIRELMARGSIRMVSAHASQQIYTRATNT

SEQ ID NO: 4633 - DNA, 638 bp, Triticum aestivum
  misc_feature: Ceres CLONE ID no. 937018
  misc_feature: Ceres CDNA ID no. 40351502
  CDS (131)..(421): REFERENCED BY SEQ ID NO: 4634
tcggtatagcagctcccgtccactaccttgctcctcgccgcaatccccacattcatagcgagaatccccaaatcccaaccctgactgacgaccggcggatctgttccggcgcctcctcccgccgtcgaccatggcgtcttccaactccggcggcatccccatcaatgtggaacaggattcggacggctcggcccagagcacagctgatatgactgcttttgtgcaaaatcttctagttcagatgcaaaccaggttccaaactatgtcagagaacatcattacaaagatagatgaaatgggtgcaagaatcgatgaattggagttgagcataaatgacctcaaggctgaaatgggcagcgatggtatgacccctactaaagtgaaggacgaagaatcaaagccagcagacagctctgcctgagtcaagcagaagtagcagaagcaagtcgtattagtcttgggttcatgtcaatatcatcagccattcatcactaacttcatgcatgttatgagatgttattcgcactgttatatgcatttgagatatgcagtacctttcgatgagagatttctctgtacgcattgatgcttgctgagtggtctgctataaattttagtactcaaaaaaaaaaaaaaaa

SEQ ID NO: 4634 - protein, 96 aa, Triticum aestivum
  misc_feature: Ceres CLONE ID no. 937018
  misc_feature: Ceres CDNA ID no. 40351502
  misc_feature (24)..(77): Pfam Name: HSBP1 PFAM Desc: Heat shock factor binding protein 1
MASSNSGGIPINVEQDSDGSAQSTADMTAFVQNLLVQMQTRFQTMSENIITKIDEMGARIDELELSINDLKAEMGSDGMTPTKVKDEESKPADSSA

SEQ ID NO: 4635 - DNA, 907 bp, Triticum aestivum
  misc_feature: Ceres CLONE ID no. 937207
  misc_feature: Ceres CDNA ID no. 25892878
  CDS (274)..(705): REFERENCED BY SEQ ID NO: 4636
gcggctgttcgctcaaagagtaagaaaaaacttcctcgctcgtctccgtctctccgacgcctttggatctcgccgccgcccgcgtcgccatcgtgcctcctcgccgctgcgaagaggaggggccgcgctcccgcacgaacgaaggagccagggttctccgccgcagccgtccctccggcgaacctccagtccgcgccgccgccccctggagcagcgctcgtctgccggcccaggaatttagctgttaattctgctcagccttctcctgtggccatggggacagttgcaatctacagccttttcatcatcaacaagtctggtggccttatatactacaaggactatggctcagctgggagaatggacaccaatgacagtttgcgcctcgcgagtctctggcactcgatgcacgcaatctcgcagcagctgtcccctaccacaggctgtactggcattgacctcttacaagcccacaacttcgacctccattgcttccagtccctcacagggacgaaatttttcgttgtatgcgagacaggcactcaaaatatggaaatcctgctgaaaacgatatatgagctgtacacagagtttgttttgaagaacccgttctacgagatggagatgccaatccggtgtgagctctttgacctcaacctagcccatgtcatccagaaggaccgtgtcgcacttctgggccggtgaaacatgaaaggaacatacggagcaccgactcttgcaatttcgtgtttgtttttctaccatatttgtatttggtcacctagaacatgtttcctcttgaaagtgattctggctgataacatgaatgcggtacagacttccatatctgtaaatctgatatacaatgctgggttacagcattttgaggacaaaaaaaaaaaaaaaa

SEQ ID NO: 4636 - protein, 143 aa, Triticum aestivum
  misc_feature: Ceres CLONE ID no. 937207
  misc_feature: Ceres CDNA ID no. 25892878
  misc_feature (6)..(136): Pfam Name: Sybindin PFAM Desc: Sybindin
  misc_feature: Homolog of GI Number: 34901426 NR Desc: synbindin
  misc_feature: Homolog of GI Number: 55775438 NR Desc: synbindin
  misc_feature: Homolog of GI Number: 66558617 NR Desc:  similar to ENSANGP00000011080
  misc_feature: Homolog of GI Number: 24582905 NR Desc: CG9298
  misc_feature: Homolog of GI Number: 54644131 NR Desc: GA21680
  misc_feature: Homolog of GI Number: 57530486 NR Desc: similar to Trafficking protein particle complex subunit 4
  misc_feature: Homolog of GI Number: 41152142 NR Desc: trafficking protein particle complex 4
  misc_feature: Homolog of GI Number: 62653423 NR Desc:  trafficking protein particle complex 4
  misc_feature: Homolog of GI Number: 11140825 NR Desc: trafficking protein particle complex 4
  misc_feature: Homolog of GI Number: 51172606 NR Desc: trafficking protein particle complex 4
MGTVAIYSLFIINKSGGLIYYKDYGSAGRMDTNDSLRLASLWHSMHAISQQLSPTTGCTGIDLLQAHNFDLHCFQSLTGTKFFVVCETGTQNMEILLKTIYELYTEFVLKNPFYEMEMPIRCELFDLNLAHVIQKDRVALLGR

SEQ ID NO: 4637 - DNA, 495 bp, Triticum aestivum
  misc_feature: Ceres CLONE ID no. 937846
  misc_feature: Ceres CDNA ID no. 36582734
  CDS (2)..(361): REFERENCED BY SEQ ID NO: 4638
ctccaccgccgccactcccattcgctcgcctcctccaaccctaagcgatgacgaagggtaccggcagtttcggcaagcgccggaacaagacccacactctctgcatccgctgcggccgccgcagcttccacctccagaagagcacctgctcctcgtgcggctaccccgccgcccgcatccgcaagtacaactggagtgtgaaagccatcaggcgcaagaccaccggcactggaaggatgaggtacatgcgccacgtgcctcgcaggttcaagagcaacttcagagaaggtaccgaggctgcccccaggaacagggccgcggccaactaggtctggattttgccccatcaagaatctcgtgaagctagaatttaaagacttttgcttggattgtaccccgcctaaactattgttgctatagaattgagtatggatctgatatgttttgttgcatgggtttggaaattgacctctgaatctaaaaaaaaaaaaaaaa

SEQ ID NO: 4638 - protein, 93 aa, Triticum aestivum
  misc_feature: Ceres CLONE ID no. 937846
  misc_feature: Ceres CDNA ID no. 36582734
  misc_feature (2)..(55): Pfam Name: Ribosomal_L37e PFAM Desc: Ribosomal protein L37e
  misc_feature: Homolog of GI Number: 50904689 NR Desc: putative 60S ribosomal protein L37
  misc_feature: Homolog of GI Number: 50915832 NR Desc: putative ribosomal protein L37
  misc_feature: Homolog of GI Number: 44662866 NR Desc: ribosomal protein L37
  misc_feature: Homolog of GI Number: 21280805 NR Desc: putative 60S ribosomal protein L37
  misc_feature: Homolog of GI Number: 21537060 NR Desc: putative 60s ribosomal protein L37
  misc_feature: Homolog of GI Number: 21553481 NR Desc: putative ribosomal protein
  misc_feature: Homolog of GI Number: 45934571 NR Desc: 60S ribosomal protein L37
  misc_feature: Homolog of GI Number: 24642107 NR Desc: CG9091
  misc_feature: Homolog of GI Number: 38048279 NR Desc: similar to Drosophila melanogaster CG9091
  misc_feature: Homolog of GI Number: 72538603 NR Desc: GA21535
MTKGTGSFGKRRNKTHTLCIRCGRRSFHLQKSTCSSCGYPAARIRKYNWSVKAIRRKTTGTGRMRYMRHVPRRFKSNFREGTEAAPRNRAAAN

SEQ ID NO: 4639 - DNA, 932 bp, Triticum aestivum
  misc_feature: Ceres CLONE ID no. 938077
  misc_feature: Ceres CDNA ID no. 25445505
  CDS (49)..(693): REFERENCED BY SEQ ID NO: 4640
ccatccattccggttccacctcctccgctcgtctcctactctcccgccatggccaccgcagcgcgcgccgtcgccgccgccgcgcgcccggcgcggccggtgctccagccgcggcgcctcccgtgcccatccgctcgccccgcgcggcctcgcgtcggccgcgccgtccgctgcatggcgcggcggcccgacgcctcgtactcgccgctgcggccggggcagggcggggaccgcgcgcccacggagatggcgccgctgttccccggctgcgactacgagcactggctcatcgtcatggacaagcccggcggcgagggcgccaccaagcaccagatgatcgactgctacatccagaccctcgccaaggtcgtgggcagcgaggaggagtcgaagaagaggatctacaacgtgtcctgtgagcgctactttgggtttgggtgcgagattgacgaggaaacgtccaacaagctggaaggcctcccgggtgttctttttgtgcttccggattcctatgttgatgctgagaacaaggactatggtgccgagttatttgtgaacggagagatcgtccaacgatcaccggaaaggcagagaagggtggagccggtgcctcagagagctcaagatagaccgcgttacagcgaccggactcgctatgtgaagaggagggagaaccaggcctaccaacggtgacatgtccccgtcggtgtaccgcacaagtggcccactgctatcgctccttgccctagatatagcaactgctccacgcccgaaatgcccctcgtcgtctttgctgcattgtagcctcgccatatctgggcgtttattttcttcacgaactgtaggttaaggactgcatgtactactgtgagtgacttgttccgttgttttggtaacggtatcttggtttgcggcgaaaaaaaaaaaaaaaa

SEQ ID NO: 4640 - protein, 214 aa, Triticum aestivum
  misc_feature: Ceres CLONE ID no. 938077
  misc_feature: Ceres CDNA ID no. 25445505
  misc_feature: Homolog of GI Number: 50928485 NR Desc: OSJNBa0041A02.8
  misc_feature: Homolog of GI Number: 34897972 NR Desc: putative plastid protein
  misc_feature: Homolog of GI Number: 2440029 NR Desc: DAL1 protein
  misc_feature: Homolog of GI Number: 20453405 NR Desc: At2g33430/F4P9.20
  misc_feature: Homolog of GI Number: 2246378 NR Desc: plastid protein
  misc_feature: Homolog of GI Number: 21617909 NR Desc: plastid protein
  misc_feature: Homolog of GI Number: 55775182 NR Desc: putative DAL1 protein
  misc_feature: Homolog of GI Number: 20465721 NR Desc: putative plastid protein
  misc_feature: Homolog of GI Number: 50726526 NR Desc: putative plastid protein
  misc_feature: Homolog of GI Number: 51979643 NR Desc: PREDICTED OJ1119_D01.18 gene product
MATAARAVAAAARPARPVLQPRRLPCPSARPARPRVGRAVRCMARRPDASYSPLRPGQGGDRAPTEMAPLFPGCDYEHWLIVMDKPGGEGATKHQMIDCYIQTLAKVVGSEEESKKRIYNVSCERYFGFGCEIDEETSNKLEGLPGVLFVLPDSYVDAENKDYGAELFVNGEIVQRSPERQRRVEPVPQRAQDRPRYSDRTRYVKRRENQAYQR

SEQ ID NO: 4641 - DNA, 996 bp, Triticum aestivum
  misc_feature: Ceres CLONE ID no. 938150
  misc_feature: Ceres CDNA ID no. 29191564
  CDS (108)..(782): REFERENCED BY SEQ ID NO: 4642
atcccgtcatccaccacagcttagcagcagcaacaaccagtgtctaagacactctccatcaacaaactctagctgatcactcctagctaagctttgcatagcaagcaatggggtactccaaaaccctagcggctggcctgtttgccacgctgctcctagctccagtcgtcctggctaccgaccctgaccctctccaggacttctgtgtcgccgacctcgacggcaaggcggtctcggtgaacgggcatccgtgcaagcccatgtcgaaggccggcgatgacttcctcttctcgtccaagctggccaaggctggcaacacgtcgaccccgaacggctcggccgtgacggagcttgacgtggctgagtggcctggaacgaacacgttgggcgtgtcgatgaaccgcgtggacttcgctccaggaggcaccaacccgccgcacatccacccccgtgccaccgagatcggcatcgtgatgaaaggtgagctcctcgtgggaatcctcggcagcctcgactccgggaacaagctttactcgagggtggtgcgcgctggagagacgttcctcatcccacggggcctcatgcacttgcagttcaacgtcggtaagaccgaggcatccatggtagtctccttcaacagccagaaccccggtatcgtcttcgtgccattgacactcttcagctccaacccacccatcccgacgccggtcctcaccaaggcgcttcgggtggaggccggggtcgtggaacttctcaagtccaagttcgccgatgggttttaattcctgggagccttccctgaaatgaacaatatgtaattcaatatatgcatgctagaaaattttaataattctcagcagaagacttgtattcaagtttcaggttaatctcgcatgcagttgtaataagattggagaagttagcctcctggtttagccttcacaaccaatatgaggaattgaatgtactacttttattacaaaaaaaaaaaaaaaa

SEQ ID NO: 4642 - protein, 224 aa, Triticum aestivum
  misc_feature: Ceres CLONE ID no. 938150
  misc_feature: Ceres CDNA ID no. 29191564
  misc_feature (63)..(214): Pfam Name: Cupin_1 PFAM Desc: Cupin
  misc_feature: Homolog of GI Number: 46408929 NR Desc: oxalate oxidase precursor
  misc_feature: Homolog of GI Number: 1171937 NR Desc: Oxalate oxidase 2 precursor
  misc_feature: Homolog of GI Number: 100782 NR Desc: germin precursor
  misc_feature: Homolog of GI Number: 2266668 NR Desc: oxalate oxidase
  misc_feature: Homolog of GI Number: 11967814 NR Desc: oxalate oxidase
  misc_feature: Homolog of GI Number: 1772601 NR Desc: pSBGer3
  misc_feature: Homolog of GI Number: 22138786 NR Desc: oxalate oxidase
  misc_feature: Homolog of GI Number: 21912428 NR Desc: oxalate oxidase 2
  misc_feature: Homolog of GI Number: 100836 NR Desc: germin precursor
  misc_feature: Homolog of GI Number: 21912430 NR Desc: oxalate oxidase 4
  misc_feature: Useful for increasing chlorophyll and photosynthetic capacity
  misc_feature: Useful for making larger plants
  misc_feature: Useful for making stronger plants
MGYSKTLAAGLFATLLLAPVVLATDPDPLQDFCVADLDGKAVSVNGHPCKPMSKAGDDFLFSSKLAKAGNTSTPNGSAVTELDVAEWPGTNTLGVSMNRVDFAPGGTNPPHIHPRATEIGIVMKGELLVGILGSLDSGNKLYSRVVRAGETFLIPRGLMHLQFNVGKTEASMVVSFNSQNPGIVFVPLTLFSSNPPIPTPVLTKALRVEAGVVELLKSKFADGF

SEQ ID NO: 4643 - DNA, 1402 bp, Triticum aestivum
  misc_feature: Ceres CLONE ID no. 938264
  misc_feature: Ceres CDNA ID no. 29191830
  CDS (276)..(1073): REFERENCED BY SEQ ID NO: 4644
agttcaccagcgcagcagcagcggagcgcccccaaccagaaagagaaagagaaagaggcaggcagcagagccgaaccaaccaactaaccaacggacggaagagaccgccgccaagcctcgcgccccttccctccttttcctcttctgcctccctcgggatccgccgccgagattggagctccggccggcgcatggacccccgccgtcgcgcggatagcgacgagtagcgggaggtagaggtggcagagacgccggcgccaaggggcgaggcggacatggacaccaacgccggctccttcgtcgccgtccggcggctcgctggctccgaccgagcggccggcgccgtcgcgttccatcactcgtcctcagcggaggtcgtgaccgggtcgacggcgtggatagggagggggctctcctgcgtctgtgtgcagagtagagacagcgacgcccgcctttctttcgatttgactcccgttcaggaagagtgcctactgaggttacagaaccggatagaaattcagtatgatagttcaaacatagagcatcaggaagaactgaaggccctttggtgcgcctcctttcctggaactgagcttaggggcctaatatcggaacaatggaaagagatgggctggcaagggaaagatccatccacggattttagaggtggaggctttatctccttggagaatttattattctttgccaggaactacccggaacttctttgtaagcagaatggtgaccgtgcaatttgggagtatccatttgcggtagctggtgtaaatataacattcatgctcattcagatgcttgatctacaagcagtcaaaccaaggtcattgttgggagctgttttcctaaagctactttcagaaaatgatcgagcctttgatatcctgtactgcataaccttcaagctgatggatcagcaatggcttgacatgcatgctacttacatggacttcaatacagtcatgaaatccacacgacgccagctagaaagggagctgttgattgaagatattcagcgggttgaggatatgccatcgtacaagcttctagcccgctagctagtaactgaaaccttaacatggcctacatgtcgccgcgaggcttgaattgctgaacgatgcaaccagtgtccttatacagtgagagaattccaagatgtagatgcccctgtatcttgtcgcgttttaggtactccgataacccgggctctcatgtatttacatagtagggttttcttggccagcatgccacgtagggtaactccagtatccgaccaactaccaggagggcagagtatttgtagggtgtgtgtgtgtgtgcgcgtgcgctgttaaagtttggttattgcccataataccacggaaggaatgtaaaaaaaaaaaaaaaa

SEQ ID NO: 4644 - protein, 265 aa, Triticum aestivum
  misc_feature: Ceres CLONE ID no. 938264
  misc_feature: Ceres CDNA ID no. 29191830
  misc_feature (88)..(245): Pfam Name: ELMO_CED12 PFAM Desc: ELMO/CED
  misc_feature: Homolog of GI Number: 50927384 NR Desc: OSJNBb0038F03.14
  misc_feature: Homolog of GI Number: 17981659 NR Desc: At2g44770/F16B22.26
  misc_feature: Homolog of GI Number: 70663961 NR Desc: OSJNBa0079A21.3
  misc_feature: Homolog of GI Number: 18408759 NR Desc: phagocytosis and cell motility protein ELMO1
  misc_feature: Homolog of GI Number: 15218859 NR Desc: phagocytosis and cell motility protein ELMO1
  misc_feature: Homolog of GI Number: 21358221 NR Desc: CG10068
  misc_feature: Homolog of GI Number: 54639490 NR Desc: GA10046
  misc_feature: Homolog of GI Number: 24308456 NR Desc: ELMO domain containing 2
  misc_feature: Homolog of GI Number: 37590724 NR Desc: MGC69076 protein
MDTNAGSFVAVRRLAGSDRAAGAVAFHHSSSAEVVTGSTAWIGRGLSCVCVQSRDSDARLSFDLTPVQEECLLRLQNRIEIQYDSSNIEHQEELKALWCASFPGTELRGLISEQWKEMGWQGKDPSTDFRGGGFISLENLLFFARNYPELLCKQNGDRAIWEYPFAVAGVNITFMLIQMLDLQAVKPRSLLGAVFLKLLSENDRAFDILYCITFKLMDQQWLDMHATYMDFNTVMKSTRRQLERELLIEDIQRVEDMPSYKLLAR

SEQ ID NO: 4645 - DNA, 1492 bp, Triticum aestivum
  misc_feature: Ceres CLONE ID no. 938326
  misc_feature: Ceres CDNA ID no. 40351503
  CDS (120)..(1244): REFERENCED BY SEQ ID NO: 4646
aacccaggtcgcgcacaaatccgccgcgcacgcacacaacctccatctcttcccccccccccccccccctcctctccctcccgcagaaccctagctctccacaagcctcttcgtcggcgatggcggcggctgagaacgccggggacgtggcggcgggggagagccgcaagctgttcgtgggtggcatcccgtcctcagcgcaggagacggagctgcggggccactttgcccgcttcggtgcggtgcgctcaatcgtcgtgatgcgggacaaggagtcgggccacggccgcgggttcgggttcgtcgagttcgaggacgaagaagcggccgccaaggcgctcggtgacggggagaggcccaagcacttcatctgcggccgactggtcgacgttaagagggcgcgtgctagacctccgcggaacttgggcgagcaacctgtgcatcagcatcagcatcagcatcagctggaacagggtccggttcagggtcaccaagacgctggggacagtaccggggccagtagtgacagtatgagctatgcttcaaagaaggtattcattggtggtttgcgtgacaacatcacagaggaggagttcagagcttactttgaggcgtttggcactgtaacagatgttgttgtgatatacgacagcctgacaagcaggtcaaggggttttggttttgtcacctttgattctgaggaagctgtgagaaaggtgatgaggcaaagctttcatgacttgaaagggacaagggtggaagcaaagatcgctatccccaaggatgctcagtattaccgtaatggccgaggtcgtggctcaagaacctttggtggaaggggtcctgttggctttgatggttcaacataccaaccgtacaataaccgacatggtttctacaatggctatatgccacaacctgttcccacacatccctactatcatggcctctattttggtatgggaggcaatccctatgcaaatgcatatccaaaccatgcagtcatggcaaatgttccaaacatggtggcaaggcgtccagtatatagcccatatcccccaatgtatcctggctatggttttgcatacagaagtggttatgcgggtgctgcgccttctgttccgtatggcgttaatggtggcagggattacatgaatgaccaagactctatggatgtacaagaacttgacagcgctgctaccattgctacaaagtttgaatacatgaagctaggttcacaatgacgttctgcagggcaaatatttctacactgatgacagcgggaagtcgcaactgtgaagacatgagctgagattctttggttgacaagtacatcattggaaattatcaacttacccccattccttgtttcaactgcatgtagactgaaaacattcaagtttcaactggctgttgagctcacatgccttgtaccaatgcttaaatccttttaatgtatcagaatcagaacatttgaaaaaaaaaaaaaaaa

SEQ ID NO: 4646 - protein, 374 aa, Triticum aestivum
  misc_feature: Ceres CLONE ID no. 938326
  misc_feature: Ceres CDNA ID no. 40351503
  misc_feature (145)..(215): Pfam Name: RRM_1 PFAM Desc: RNA recognition motif.
MAAAENAGDVAAGESRKLFVGGIPSSAQETELRGHFARFGAVRSIVVMRDKESGHGRGFGFVEFEDEEAAAKALGDGERPKHFICGRLVDVKRARARPPRNLGEQPVHQHQHQHQLEQGPVQGHQDAGDSTGASSDSMSYASKKVFIGGLRDNITEEEFRAYFEAFGTVTDVVVIYDSLTSRSRGFGFVTFDSEEAVRKVMRQSFHDLKGTRVEAKIAIPKDAQYYRNGRGRGSRTFGGRGPVGFDGSTYQPYNNRHGFYNGYMPQPVPTHPYYHGLYFGMGGNPYANAYPNHAVMANVPNMVARRPVYSPYPPMYPGYGFAYRSGYAGAAPSVPYGVNGGRDYMNDQDSMDVQELDSAATIATKFEYMKLGSQ

SEQ ID NO: 4647 - DNA, 2144 bp, Triticum aestivum
  misc_feature: Ceres CLONE ID no. 939111
  misc_feature: Ceres CDNA ID no. 24766551
  CDS (251)..(1780): REFERENCED BY SEQ ID NO: 4648
tcacgctctcggtttcctttcgtctcgtcccgttccgccgtcccgtgccggaccgccccacccaccacctccacctcccactccggagcagttcacagtctccactccacctcccacctataagtttcctcatcgccaccattcctcgtcccgttctcagttcctcactcccccccttccacaatcccctcgcttcgcacggcgaagcagccagagccagagcccgccttccagaaccagcccgcccgccatggcgagcttcgcgaggcaggagcaccagttcctcgccgagctcggcctcgcgccgcgcaacccgggctccttcgcctgcggcgcctggggcggctcgggccccgtcgtcaccaccaccaaccctagcaacaacgaggtcattgctgaggtcgtcgaggcgtccatggacgactacgagaaggggatgagcgcctgcttcgacgccgccaagacctggatggctgttccggcaccaaaacgaggagaaattgttaggcagattggtgatgcactgagagcaaagcttcatcaccttggcagacttctctcactcgagatggggaaaattctccctgaaggaattggggaggttcaggaaattattgacatgtgtgattatgctgtggggctaagtcgtcagctaaatggatccatcataccatctgaactcccaaaccatatgatgatggaggtctggaatcctcttggagttgttggtgtcatcactgcattcaatttcccttgcgccgtgctgggttggaatgcttgcattgctttggtgtgcggcaactgtgttgtctggaagggcgctccaactactccattgatcactatcgcaatgactaaaatagtggctagtgtatttgaaaagaacaacttgccaagtgcaatcttcacagctttttgtgggggtgctgaaattggccaagcaattgctcttgacacaaggatacctttggtttcattcacaggaagtacaaaggtaggtcaaatggttcagcaacaggttagcgcgagatttggtaaatgccttcttgaacttagtgggaacaacgccattattgtcatggatgatgcagacattccactagctgtgcgttctgttctgtttgctgctgttggcacagcaggacagcgatgcactacatgtcgtaggctgcttcttcacgaaagcatatatcaaacatttcttgatcaacttgttgaggtttataaacaagtccgtattggggatcctatggaaaagggcaccttgctgggaccactgcacactactacatcaaaggaaagctttttgaaaggcatccaaactatcaaatcccagggaggaaaaatccttttaggaggatctgctattgaatcagaagggaactttgttcagccaacaattgtggaaatttcacctgatgcgccagttgtgagggaagaattgtttggtcctgtcctttatgccatgaaatttctgacactgaaggaagcaattgaaatcaacaattctgttcctcaaggattgagcagttctatatttacaaggaaaccggatgctattttcaagtggattgggcctcatggcagtgattgtggtatagtgaatgtaaacatacccactaatggtgctgaaattggtggagcttttggtggagaaaaagcaaccggtggtgggcgagaagctggaagtgattcttggaagcagtacatgaggagggccacttgtacaatcaactatggaagcgagctgcctctagcacagggaattaactttggctagtttggtgctgaaggactgccagtgaaacgtcgtgctgcagcatggggattggggataatgtgttgagatatctggagcgtgcagccatcatcttcaggaaattctctgtgtcgatcattgcacccaaattgcgacgctgctgctgagtacatataataagagatgtgttgatctcatgtatgcattgttcatgccttttggcatgtttagccatctgtgccctggacctagtctattaataaactggaaaaatagcatatcttccggtgagagtaacattttacgcatgctaccttgagatcggactgctcgaaataaaaggagatcgtagccttcaggccgttgtgtaaaaaaaaaaaaaaaa

SEQ ID NO: 4648 - protein, 509 aa, Triticum aestivum
  misc_feature: Ceres CLONE ID no. 939111
  misc_feature: Ceres CDNA ID no. 24766551
  misc_feature (30)..(488): Pfam Name: Aldedh PFAM Desc: Aldehyde dehydrogenase family
  misc_feature: Homolog of GI Number: 25090053 NR Desc: Aldehyde dehydrogenase family 7 member A1
  misc_feature: Homolog of GI Number: 34783121 NR Desc: Antiquitin
  misc_feature: Homolog of GI Number: 51703516 NR Desc: MGC83352 protein
  misc_feature: Homolog of GI Number: 50806384 NR Desc:  similar to Antiquitin
  misc_feature: Homolog of GI Number: 25090047 NR Desc: Putative aldehyde dehydrogenase family 7 member A1 homolog
  misc_feature: Homolog of GI Number: 47086597 NR Desc: aldehyde dehydrogenase 7 family
  misc_feature: Homolog of GI Number: 19525534 NR Desc: aldehyde dehydrogenase Aldh7B6
  misc_feature: Homolog of GI Number: 51091407 NR Desc: aldehyde dehydrogenase
  misc_feature: Homolog of GI Number: 29893325 NR Desc: aldehyde dehydrogenase family 7 member A1
  misc_feature: Homolog of GI Number: 4519507 NR Desc: protein abundantly expressed during apple fruit development
MASFARQEHQFLAELGLAPRNPGSFACGAWGGSGPVVTTTNPSNNEVIAEVVEASMDDYEKGMSACFDAAKTWMAVPAPKRGEIVRQIGDALRAKLHHLGRLLSLEMGKILPEGIGEVQEIIDMCDYAVGLSRQLNGSIIPSELPNHMMMEVWNPLGVVGVITAFNFPCAVLGWNACIALVCGNCVVWKGAPTTPLITIAMTKIVASVFEKNNLPSAIFTAFCGGAEIGQAIALDTRIPLVSFTGSTKVGQMVQQQVSARFGKCLLELSGNNAIIVMDDADIPLAVRSVLFAAVGTAGQRCTTCRRLLLHESIYQTFLDQLVEVYKQVRIGDPMEKGTLLGPLHTTTSKESFLKGIQTIKSQGGKILLGGSAIESEGNFVQPTIVEISPDAPVVREELFGPVLYAMKFLTLKEAIEINNSVPQGLSSSIFTRKPDAIFKWIGPHGSDCGIVNVNIPTNGAEIGGAFGGEKATGGGREAGSDSWKQYMRRATCTINYGSELPLAQGINFG

SEQ ID NO: 4649 - DNA, 632 bp, Triticum aestivum
  misc_feature: Ceres CLONE ID no. 939141
  misc_feature: Ceres CDNA ID no. 40041374
  CDS (57)..(425): REFERENCED BY SEQ ID NO: 4650
gttctacaagagcttcctcctctccattattgtcagctgccacaggcaccaccaccatggaaaagctgctcaccgtagtgtgtgtttcaagccttcttctagccactctcgcggacaatgcctcctccagatcttctcttcagcacccctccccggacagtctacaaggtcgtgttctaggtcgcagaggcagagaggaaccggcacaccaccaccattaccggcgtgaaggcgaccacgaggagcagcatgaggttgtgcctatgggagtggagagtgttgaagagaggaggaaggcgggctggaggaacgaggacgaggaggcggttgcgacggaagggctgatctccagcgcggactacagcggcgtggccatgcacggccacagctccccgccggcgcacaaaaagcaccccaggccataggccttccgcctccggatattattcagttcgtgtgtaatcttgtccggttcagtttccagttctttgtgcctttagcaaagtaagtaggccggtttcaccgaattggggtatcgggagctcctcgccgtctctgtaaaagatgccaagtccacgattttatatggatcttccttaaaaagaaaaatcgagacaaaaaaaaaaaaaaaa

SEQ ID NO: 4650 - protein, 122 aa, Triticum aestivum
  misc_feature: Ceres CLONE ID no. 939141
  misc_feature: Ceres CDNA ID no. 40041374
MEKLLTVVCVSSLLLATLADNASSRSSLQHPSPDSLQGRVLGRRGREEPAHHHHYRREGDHEEQHEVVPMGVESVEERRKAGWRNEDEEAVATEGLISSADYSGVAMHGHSSPPAHKKHPRP

SEQ ID NO: 4651 - DNA, 1026 bp, Triticum aestivum
  misc_feature: Ceres CLONE ID no. 939185
  misc_feature: Ceres CDNA ID no. 25446719
  CDS (50)..(712): REFERENCED BY SEQ ID NO: 4652
gaaactctactcggccgctgcgctatctcgcccaccggagcgcgacgacatggcctccgcctcctccctcttcctggcctcccccatctccaccgcgccagggatccgcacaccctcctccccgtgccccgctcggccgtccctgcgcccccggcggccgtccctggcggtggcggccgcgctccaggcggagcaccagccggccgtggccgcggcgccgaagccgccggccctcccgttccgcgtgggccacggcttcgacctccaccgccttgagccgggcctcccgctcatcatcggcggcgtcagcatcccccacgaccgcggctgcgacgcccactccgacggggacgtgcttctgcactgcgtggtggacgccattctcggcgccctggggctgccggacatcgggcagatcttcccggacaccgacccccggtggaagggtgcagagtcctgcgtgttcatgagggaagctgtaaagctaatgcatcaagcaggctatgagctggggaaccttgatgctacactgatcttgcaaaaaccaaaaattagcccgttcaaggagactatccgatctaacttgtgtgaactactcggggcggatccatctgttgtcaatctcaaggccaagacacatgagaaagtcgacagtctaggagaaaacaggagtatagctgctcataccgtagttctcctgatgcggaagtagagtgttagaagtatactacataatacaggaattgtattgtattgtagtgttgctgtacaagaggttactacactatccctgtggtatagtcaatacggaagcttcaggggaaagtagtaaagctgagtacacaagagaaatgtgtatccagcctgtgtctcctgttattgttccaaaattgtattcttgtcttgcagggtactagatatcaatcattttggaagttcttgttattttcttaccgaccttaagaaccattcacaaattatacagcaatatactagtatgaggattttacaaaaaaaaaaaaaaaa

SEQ ID NO: 4652 - protein, 220 aa, Triticum aestivum
  misc_feature: Ceres CLONE ID no. 939185
  misc_feature: Ceres CDNA ID no. 25446719
  misc_feature (64)..(220): Pfam Name: YgbB PFAM Desc: YgbB family
  misc_feature: Homolog of GI Number: 50253138 NR Desc: putative 2C
  misc_feature: Homolog of GI Number: 40849973 NR Desc: putative 2C
  misc_feature: Homolog of GI Number: 7621712 NR Desc: 2C
  misc_feature: Homolog of GI Number: 21553693 NR Desc: 2C
  misc_feature: Homolog of GI Number: 22330411 NR Desc: 2C
  misc_feature: Homolog of GI Number: 11386015 NR Desc: 2C
  misc_feature: Homolog of GI Number: 6692105 NR Desc: F22C12.26
  misc_feature: Homolog of GI Number: 54030370 NR Desc: COG0245: 2C
  misc_feature: Homolog of GI Number: 67908998 NR Desc: MECDP
  misc_feature: Homolog of GI Number: 48772741 NR Desc: COG0245: 2C
  misc_feature: Useful for making bigger plants
MASASSLFLASPISTAPGIRTPSSPCPARPSLRPRRPSLAVAAALQAEHQPAVAAAPKPPALPFRVGHGFDLHRLEPGLPLIIGGVSIPHDRGCDAHSDGDVLLHCVVDAILGALGLPDIGQIFPDTDPRWKGAESCVFMREAVKLMHQAGYELGNLDATLILQKPKISPFKETIRSNLCELLGADPSVVNLKAKTHEKVDSLGENRSIAAHTVVLLMRK

SEQ ID NO: 4653 - DNA, 794 bp, Triticum aestivum
  misc_feature: Ceres CLONE ID no. 939618
  misc_feature: Ceres CDNA ID no. 24766552
  CDS (94)..(459): REFERENCED BY SEQ ID NO: 4654
acacacactcactcaagccagcgccactcgcaccacagtcatccactcacaagctaagctagcggcgcagtagctcacttcagtccagtcggcatggcggctccgaggggcgcggcagtggtgctggcgatggtgctcgcggccatggtggtggcgccgccggcgacggtgcacgcggccatatcctgctccacggtgtacagcacgctgatgccgtgcctgcagtacgtgcagcagggcggttcgccggcccggggctgctgcaccggcatccagaacctgctggcggaggccaacaacagccccgaccgccgcaccatctgcggctgcctcaagaacgtcgccaacggcgcctccggcgggccctacatcacccgcgccgccgcgctcccctccaagtgcaacgtcgccctcccctacaagatcagccccagcgtcgactgcaactcgatccactgaacgaactgaagcgccttggcccgtgtgtcgacgtacgtctgccgtgcgaggagtcccatgtccggagaataaattgctgctactagtactgaagcttagctaggccttggcggccagatccgtgtcgttctacctagtcgtcgtgtgtggttttagggtcgatggatctgtgtgcatgcagtccatggtgttctggcctgggtgtcggtaggctccgcaagcagagcagagtggtgaactgatattgtgtgcgtcgtactatgcgcgtgcctatgtaatgtgcgtgctttatctataaactatccctcgttaagtatctaaaaaaaaaaaaaaaa

SEQ ID NO: 4654 - protein, 121 aa, Triticum aestivum
  misc_feature: Ceres CLONE ID no. 939618
  misc_feature: Ceres CDNA ID no. 24766552
  misc_feature (32)..(117): Pfam Name: Tryp_alpha_amyl PFAM Desc: Protease inhibitor/seed storage/LTP family
  misc_feature: Homolog of GI Number: 56713109 NR Desc: type 1 non
  misc_feature: Homolog of GI Number: 6492243 NR Desc: lipid transfer protein
  misc_feature: Homolog of GI Number: 34907830 NR Desc: putative lipid transfer protein
  misc_feature: Homolog of GI Number: 2407273 NR Desc: lipid transfer protein LPT II
  misc_feature: Homolog of GI Number: 7438281 NR Desc: probable lipid transfer protein precursor
  misc_feature: Homolog of GI Number: 77548420 NR Desc: nonspecific lipid
  misc_feature: Homolog of GI Number: 77553487 NR Desc: nonspecific lipid
  misc_feature: Homolog of GI Number: 510337 NR Desc: lipid transfer protein
  misc_feature: Homolog of GI Number: 32966061 NR Desc: lipid transfer protein LPT1
  misc_feature: Homolog of GI Number: 49659945 NR Desc: lipid transfer protein
MAAPRGAAVVLAMVLAAMVVAPPATVHAAISCSTVYSTLMPCLQYVQQGGSPARGCCTGIQNLLAEANNSPDRRTICGCLKNVANGASGGPYITRAAALPSKCNVALPYKISPSVDCNSIH

SEQ ID NO: 4655 - DNA, 1155 bp, Triticum aestivum
  misc_feature: Ceres CLONE ID no. 939839
  misc_feature: Ceres CDNA ID no. 40351504
  CDS (97)..(867): REFERENCED BY SEQ ID NO: 4656
atcgtcctcagcccgctcctcctccccgtccgtccccacacacacacgcacgcgtttgacattttccgcccaccaccgccggagggagctccagccatggccgccaagtgctacccgacggtcagcgacgagtacctggccgccgtcgccaaggccaagcgcaagctccgcggcttcatcgctgagaagaactgcgcgccccttatgctccgcctcgcgtggcactcggccgggaccttcgacgtggccaccaagaccggcgggcccttcggcaccatgaagtgccccgcggagctcgcgcacggcgccaacgccggcctcgacatcgccgtcaggctgctcgagcccatcaaggagcagttccccatcctctcctacgccgacttctaccagctcgctggagtcgtcgccgtcgaggtcaccggcgggcccgaggttcccttccacccggggagacaggacaagcccgagcctcctccagaaggccgtcttcctgatgctacccaaggctctgaccacctcaggcaggtgttttccactcagatgggtttgagtgaccaggacattgttgctctttctggtggtcacaccctgggaagatgccacaaggagagatccggctttgagggagcctggaccgccaaccctttgatcttcgacaactcttacttcactgagctccttagtggggagaaggaaggccttcttcagttgccgaccgacaagaccctcctgactgacccggccttccgcccacttgtggacaaatatgctgcggatgaggatgctttctttgctgactacgctgaggcacacctcaagctctccgaattgggatttggcgaggctgttgagggctgctgctgattcaagctcggcgcctgaaggttaatgaagaagaagaagatcatgaagaagaagagcaataaggatgtgttggcctgcggccatgtcatgtgtttgtctggacttggattagatgggttggtcgatggggtgttgcattgttttgctttcgacgcctcgtgtcatcttgtgatgggcgttcttgtagtctgaactgctaagtgttatgtagttcctttccggttgaattgttattccctgtcgaggacgaaatgaaaatttggttgcccaagaaaaaaaaaaaaaaaa

SEQ ID NO: 4656 - protein, 256 aa, Triticum aestivum
  misc_feature: Ceres CLONE ID no. 939839
  misc_feature: Ceres CDNA ID no. 40351504
  misc_feature (20)..(228): Pfam Name: peroxidase PFAM Desc: Peroxidase
MAAKCYPTVSDEYLAAVAKAKRKLRGFIAEKNCAPLMLRLAWHSAGTFDVATKTGGPFGTMKCPAELAHGANAGLDIAVRLLEPIKEQFPILSYADFYQLAGVVAVEVTGGPEVPFHPGRQDKPEPPPEGRLPDATQGSDHLRQVFSTQMGLSDQDIVALSGGHTLGRCHKERSGFEGAWTANPLIFDNSYFTELLSGEKEGLLQLPTDKTLLTDPAFRPLVDKYAADEDAFFADYAEAHLKLSELGFGEAVEGCC

SEQ ID NO: 4657 - DNA, 1872 bp, Triticum aestivum
  misc_feature: Ceres CLONE ID no. 940271
  misc_feature: Ceres CDNA ID no. 40041375
  CDS (168)..(1643): REFERENCED BY SEQ ID NO: 4658
gccgacattgttccctgttcgactgaatctcgattcgattcgattcccgcctccgttcggatcggcaaatcttgaggcttcccctgttcctggattcccaaaccgtcgcatcgagagatcttctcccttctttcgtccgttcgccggagagcagagaggcctgttcaatggcggcggtgaatcttggagcgtggctctgcgcgctgctggcggcggtggcgggcgtcctcccggcggcggacgcgctggggatgaactggggcacgcaggccacgcacccgctctcgcccaggatcgtcgtgcagatgctcaaggacaacggcatcaagaaggtcaagctcttcgacgccgaccagggcaccctcaacgcgctcgccggctccgacatcgaggtcatggtcgccatccccaacaacctgctcgacctcatgaacgacaaggacaacgccagggactgggtgcgccacaacgtctcccgctaccacttcgacggcggcgtcaacatcaagtacgtggccgtcggcaatgagccctttttggcctcctacaacggcaccttcgacaaggtcaccttcccggcgctgcagaacatccagaacgcgctcaacgacgccggattcagcgagatcaaggccaccgtgccgctcaacgccgacgtctacaactcgcccgccaacaaccaggtgccgtcggcgggccgcttccggacggacgtcgccccgctcatgacgcagatggtgcagttcctggccaacaacagcgcccccttcaccgtcaacatctacccctacctcagcctctacctcagcgaggacttccccgtcgacttcgccttcttcgacggcctcgccaagccgctggtcgacggcgtcaacacttacaccaacgtgttcgacgccaacttcgacacgctggtgtcggcgctcgccgccgtcggccacggcgacttgcccatcgtcatcggcgaggtcggctggccgaccgacggcgacaagcacgccaccaacgccctcgccaagcgcttctacgacggcctgctgccgcggctggcggccaacaccggcacgccgctccggcccaaacagtacatggaggtctacctcttcgggctcctggacgaggacgtcaagagcgtggcgccgggcgcgttcgagcggcactggggcgtgctccgcttcgacggccagcccaagttccccatggacctcaccgggaacgggcagaacaccatgctggtgccggccaagggcgtgcagtacctgcccaagacgtggtgcgtgtacaaccccaacgccgaggacaagagcaagctggtggagaacgtgaactacgcctgcaccttcgccgactgcacggcgctcggcatgggctccagctgctacggcatggacgtgaacggcaacgcctcctacgccttcaacatgtacttccaggtgcagaaccaaaaggacgaggcgtgcgacttccaggcgctcgccgtccccacgcagaccgacccctccaccgccgcctgcagcttccccatacagatcgccgccgcctcctcgacgtcgggtggccaccggcgagcgcgcgccgggccgctcggcgccgccgctctgctcgtgctgctggctctggtccagctcttgatgtcgcattagagaatcaaacagacttgtttttcatcagttgatcatttgttgcctcatagcatatattttttggatcagcagtagttactagcagtaatccggtacgagtctttgtactggaggcatatataccggaggatatatgttcagatggcatttcacatgatgttcaaacacttgatgtgcttgatgactatggtgtacagttcattcagaatccctaaaaaaaaaaaaaaaa

SEQ ID NO: 4658 - protein, 491 aa, Triticum aestivum
  misc_feature: Ceres CLONE ID no. 940271
  misc_feature: Ceres CDNA ID no. 40041375
  misc_feature (27)..(347): Pfam Name: Glyco_hydro_17 PFAM Desc: Glycosyl hydrolases family 17
  misc_feature (368)..(451): Pfam Name: X8 PFAM Desc: X8 domain
  misc_feature: Homolog of GI Number: 18483232 NR Desc: 3
  misc_feature: Homolog of GI Number: 77551687 NR Desc: Glycosyl hydrolases family 17
  misc_feature: Homolog of GI Number: 37223500 NR Desc: beta
  misc_feature: Homolog of GI Number: 62318630 NR Desc: beta
  misc_feature: Homolog of GI Number: 50934423 NR Desc: putative 3
  misc_feature: Homolog of GI Number: 48374979 NR Desc: putative 3
  misc_feature: Homolog of GI Number: 50919115 NR Desc: putative beta
  misc_feature: Homolog of GI Number: 4191774 NR Desc: putative beta
  misc_feature: Homolog of GI Number: 50917363 NR Desc: putative beta
  misc_feature: Homolog of GI Number: 17104805 NR Desc: putative glucan endo
MAAVNLGAWLCALLAAVAGVLPAADALGMNWGTQATHPLSPRIVVQMLKDNGIKKVKLFDADQGTLNALAGSDIEVMVAIPNNLLDLMNDKDNARDWVRHNVSRYHFDGGVNIKYVAVGNEPFLASYNGTFDKVTFPALQNIQNALNDAGFSEIKATVPLNADVYNSPANNQVPSAGRFRTDVAPLMTQMVQFLANNSAPFTVNIYPYLSLYLSEDFPVDFAFFDGLAKPLVDGVNTYTNVFDANFDTLVSALAAVGHGDLPIVIGEVGWPTDGDKHATNALAKRFYDGLLPRLAANTGTPLRPKQYMEVYLFGLLDEDVKSVAPGAFERHWGVLRFDGQPKFPMDLTGNGQNTMLVPAKGVQYLPKTWCVYNPNAEDKSKLVENVNYACTFADCTALGMGSSCYGMDVNGNASYAFNMYFQVQNQKDEACDFQALAVPTQTDPSTAACSFPIQIAAASSTSGGHRRARAGPLGAAALLVLLALVQLLMSH

SEQ ID NO: 4659 - DNA, 504 bp, Triticum aestivum
  misc_feature: Ceres CLONE ID no. 940488
  misc_feature: Ceres CDNA ID no. 35383315
  CDS (104)..(355): REFERENCED BY SEQ ID NO: 4660
atacccagagtcgtcgtcttcttccatccagctgggcgagacgcacgagatccgatccgatccgatccaccccggagccggaaccctagccaggcccaccgccatggcgacgacgcgcccgctcctcctctgcgccgccctcctcctcgccgccctctcctgcaccttcgccgccgacgcgcccttcctcgtcgcgcacaagaaggtgcgggggcagacgcccaaggtggcgaagcaggacaagaagaagcagccgcgcggccgcgcccacaagcgcatccagtacaacaggcgcttcgtcaccgccgtcgtcggcttcggcaagaagcgcggccccaactcctccgagaagtagtagatcttggtggtctcgcgccagccctccttttttttttgttttcgttccagtatgcatgctaagaagacctaatcaagtatctgtaatttactgtgatgttggtaatggaaatctcactgcattgtccagcaaaaaaaaaaaaaaaa

SEQ ID NO: 4660 - protein, 83 aa, Triticum aestivum
  misc_feature: Ceres CLONE ID no. 940488
  misc_feature: Ceres CDNA ID no. 35383315
  misc_feature (29)..(82): Pfam Name: Ribosomal_S30 PFAM Desc: Ribosomal protein S30
  misc_feature: Homolog of GI Number: 55773694 NR Desc: 40S ribosomal protein S30
  misc_feature: Homolog of GI Number: 25295582 NR Desc: 40S ribosomal protein S30
  misc_feature: Homolog of GI Number: 30102786 NR Desc: At5g56670
  misc_feature: Homolog of GI Number: 27527721 NR Desc: putative 40S ribosomal protein S30
  misc_feature: Homolog of GI Number: 15822918 NR Desc: Finkel
  misc_feature: Homolog of GI Number: 6679753 NR Desc: Finkel
  misc_feature: Homolog of GI Number: 15822932 NR Desc: Finkel
  misc_feature: Homolog of GI Number: 27807419 NR Desc: Finkel
  misc_feature: Homolog of GI Number: 36968262 NR Desc: Finkel
  misc_feature: Homolog of GI Number: 60678256 NR Desc: Finkel
MATTRPLLLCAALLLAALSCTFAADAPFLVAHKKVRGQTPKVAKQDKKKQPRGRAHKRIQYNRRFVTAVVGFGKKRGPNSSEK

SEQ ID NO: 4661 - DNA, 909 bp, Triticum aestivum
  misc_feature: Ceres CLONE ID no. 940715
  misc_feature: Ceres CDNA ID no. 40351505
  CDS (121)..(636): REFERENCED BY SEQ ID NO: 4662
gccgcgcatcgccttcccaaacagccgaccagtcaactgaacggcagcccatcaagcttcccagcctgtcactgaggggcgccgccgccgggcctgggcgtcccgggaactgcaggaacgatgcagtcgctgcaggacaaggcgtcggagtggagcggcgtggcggccgccgacgccttcgccatcgacgaggtcaacgtcttcgaggcgctcggcggcaccccgcagcccttcgtcgacctctccaccaacttctacaccagggtttatgaggacgaggagcagtggttccgggagatattctcggggtccaggaaggaggacgcgatccagaaccagtacgagttcttggtgcagcggatgggcggcccgccgctattctcccagaggagaggacatcctgccttgataggacgacatcggccatttccagttacccaccaagctgcggagcgatggctacaccacatgcagcaagctttggagactacagaaagcataaacccagatacaaaaaccaaaatgatgatttttttcaggcacactgcatatttccttgtcgccggtaatgagatgacaaggcaaacccaaagtgtacctccctgcaaacatgcaacgagcaaaccagctgagtagccgctcaagtctatccagttgaataatgatttcagcttccgtgattcctatacgattcccatgtgcaacgggatcaaggttgtttatgcattataggaaacaacacgcatgatgttgtagagggggagtgacccaatcagagagcatctcaaaattggtaaatttgcgttcttgatcgtactcctcttctctcttgatttgagcttgagggtacaagttctctgctcctgctaaggggagcactgctatggtgtattggtgctcaaaaaaaaa

SEQ ID NO: 4662 - protein, 171 aa, Triticum aestivum
  misc_feature: Ceres CLONE ID no. 940715
  misc_feature: Ceres CDNA ID no. 40351505
  misc_feature (26)..(146): Pfam Name: Bac_globin PFAM Desc: Bacterial
MQSLQDKASEWSGVAAADAFAIDEVNVFEALGGTPQPFVDLSTNFYTRVYEDEEQWFREIFSGSRKEDAIQNQYEFLVQRMGGPPLFSQRRGHPALIGRHRPFPVTHQAAERWLHHMQQALETTESINPDTKTKMMIFFRHTAYFLVAGNEMTRQTQSVPPCKHATSKPAE

SEQ ID NO: 4663 - DNA, 1351 bp, Triticum aestivum
  misc_feature: Ceres CLONE ID no. 940824
  misc_feature: Ceres CDNA ID no. 25401265
  CDS (421)..(1131): REFERENCED BY SEQ ID NO: 4664
gactcacgcgcatactgtaaccctatctatctatctcttgggtgggttggatccatatctctctcttcctcctgcgccgtcgccggccgcatcgatctctcccttggatctcagccgcgccagccatggctgctccgtcaagtcttcctctcctcaccgcgcgcacacctgccgtcgccgctcgcacccacgcagggtgccctacgtttgcgtctcgcggccggtcggtcgatgtgatccgtccggccggacgcgatctgatccagccggccggacacggtctctgctgaatcctaggcaaaagcaagagccaggttggatctgcggtcatgtttcactggaaacccggccggcggcgaggccacgcgcaaccgcggggactcctcacgttgaggagcggctgcatctccctgtgtattcatggctggccagcactcacttaactactcaagctggagtgccggaagcagctttgccaacactgctgttcagcaggcgcttgtgtacccaagcccagccaccagtgcggcaagcagcctcgttagcgctgctcgtgttcagcaggcacggtactactcagttggtgctgtggtgatcgacgaggagactgtccaagtgctaatcaccggggtggccaagtgtaattcagtggcaagcaaatgccttgcggagatccatacggtgcaggatctgcaaatcatcaccctcattgtcattttgtctggtattgcgggggcctggtatgttggacagcaagtaattgatcgagggtctgagatcctgggccaggtgcaaaagcatgccccggaaatcttgggcgccgtctgcgacgagatggtgtaccagctgaagatacccttccttggcagcgggaggcgcctcgtcttgcaagaccattggttcaatgacccggagaagtcgctgacgaggtatgagcagaggatgaggcgtgaggctgcgaggcaagagatggaccggcttcgactcgaggaattcaatcgcgcccaggaggagaagaagcgcgaggctgcgcaaatgtacgagcagtccttggcaaggaaacgagtcaacgaccagctgctcaaggacaagcttcgtgaggagaggatacggcagttgacgggacagtaggaggcagagacagcagctgagcggttgtgatggacctggttttgacatatttttgccctggactattaattttgcttgctcctccctttgtctggttccaaactgtctgtggaattgacttgattagtcagctttgaaatggtatacgtggcacgtgcacagcacaatgcaattttccaaactaaatataatacttatgtcctgaaaaaaaaaaaaaaaa

SEQ ID NO: 4664 - protein, 236 aa, Triticum aestivum
  misc_feature: Ceres CLONE ID no. 940824
  misc_feature: Ceres CDNA ID no. 25401265
MAGQHSLNYSSWSAGSSFANTAVQQALVYPSPATSAASSLVSAARVQQARYYSVGAVVIDEETVQVLITGVAKCNSVASKCLAEIHTVQDLQIITLIVILSGIAGAWYVGQQVIDRGSEILGQVQKHAPEILGAVCDEMVYQLKIPFLGSGRRLVLQDHWFNDPEKSLTRYEQRMRREAARQEMDRLRLEEFNRAQEEKKREAAQMYEQSLARKRVNDQLLKDKLREERIRQLTGQ

SEQ ID NO: 4665 - DNA, 2100 bp, Triticum aestivum
  misc_feature: Ceres CLONE ID no. 941079
  misc_feature: Ceres CDNA ID no. 25891432
  CDS (90)..(1688): REFERENCED BY SEQ ID NO: 4666
cacacgcaaacccaacgaacgcgccgcgccgcgccgcgctgagaaacccccgaggaacgacgaccccaggagcaggcccccattgcggcatggctgcggccgccgacgtcgggcagctcgctggcgccgccgcggccacgctcctcgcggcggtgctcttcgccgccgcgctggggcgccagcgccagcgccgccgccgcggggctccggtcgaagggatccccgcgccggacgacggctgcgcggtcgccgacggcgcagggagcgcggccgtggacggcccgacggacgtcatcatcgtcggagccggggtcgccggatctgccctcgcgtacacgctcggaaaggatggtagacgggtgcatgttatagagagagacctgacagagccagatagaattgtgggcgaattgttacaacctggaggctacctgaaattgatggaattgggtctgcaggactgcgttgatgaaattgatgcacagcgtgtccttggttacgcgttgttcaaagatgggaagaacacaaaactttcttaccccttggagaagttccattcagatgtggctggcaggagctttcacaatggacggtttattcagaggatgcgtgaaaaagctgcgtcgttacccaatgtccaactggagcaaggaacagttacatctttgcttgaagaaaatggtacagttaagggtgtgcaatacaagatcaagtcaggtgaagaactaaaggcttatgcaccattgacaattgtatgtgatggctgcttttcgaacttaagacgtgccctttgctctccaaaggttgaggtgccgtcttgctttgttggcctggtcctggagaattgtgaacttcctcatgcgaaccatggccatgttatcttggccaatccttctcccatcctattttacccgataagcagcaccgaggttcgctgtttggtagatgtccctggtcagaaggtgccttccatagcaagtggtgaaatggcaaattatctcaagaccgtggttgcacctcagattcctccacaaatctatgattcttttatagcagcaattgataagggaagcataagaacaatgccaaataggagcatgccagctgcaccacatccaacacctggtgcacttttgatgggagatgctttcaatatgcgacaccctttaacaggtggaggaatgactgttgcattatcagatatagtcgtcctgcgtaatcttctcaagcctcttcgcaatctgcatgatgcctctgccctctgcaaatacctagagtcattctatactctgcggaagccggttgcttctacaataaacacattggctggtgctctatacaaagtcttcagttcctcgcctgacaaggctagggacgagatgcgccaagcttgctttgattacttaagccttggaggtgtctgttcaaatgggcccattgctctactctctggtcttaatcctcggccattgagtttggttgcacacttctttgctgttgctatctttggtgttggacggctgatgctcccccttccttcacctaaacgaatgtggaccggagcgagattgatttcgggtgcatgtggtatcatcttcccaatcatcaaagctgaaggtgtgaggcaaatgttcttccctgctaccgtccccgcgtattaccgtgcacctcctgaagcagagttctgatctacaaaggtgcagctaatctctcgcacgatgacatttttcctgtgttggtagtcgcccgccagtgttagccggttgttgaaaatgtgctgtgttggtagtccgaatggatcatggaacgtgtatagtatctccgttgggtgctgatcctgtttttgaaatgttttgaattgctgcgtcagtgcccatgttgattcatcctagctaaattgtacatctttgttgtactactgatgaactacgcctgctgttctaactagtggactaaggcggtgttccttgtctactgatcgtgagctgtgctgtgtgcgtttcaaatcagaccactgtataccatgttaggctgaacgctgttatggaccattatatgccttcagttataaaaaaaaaaaaaagaaaaaaaaaaaaaaaa

SEQ ID NO: 4666 - protein, 532 aa, Triticum aestivum
  misc_feature: Ceres CLONE ID no. 941079
  misc_feature: Ceres CDNA ID no. 25891432
  misc_feature: null
  misc_feature: Useful for making plants with altered cell wall content and/or composition
  misc_feature (67)..(324): Pfam Name: DAO PFAM Desc: FAD dependent oxidoreductase
  misc_feature: Homolog of GI Number: 24111375 NR Desc: At4g37760/T28I19_40
  misc_feature: Homolog of GI Number: 50920505 NR Desc: Putative Squalene monooxygenase
  misc_feature: Homolog of GI Number: 50920507 NR Desc: Putative Squalene monooxygenase
  misc_feature: Homolog of GI Number: 6685403 NR Desc: Squalene monooxygenase
  misc_feature: Homolog of GI Number: 3445200 NR Desc: putative squalene epoxidase
  misc_feature: Homolog of GI Number: 33337947 NR Desc: putative squalene epoxidase
  misc_feature: Homolog of GI Number: 46359651 NR Desc: squalene epoxidase
  misc_feature: Homolog of GI Number: 27475612 NR Desc: squalene monooxygenase 1
  misc_feature: Homolog of GI Number: 27475610 NR Desc: squalene monooxygenase 2
  misc_feature: Homolog of GI Number: 62945915 NR Desc: squalene monooxygenase
  misc_feature: Useful for making larger plants
  misc_feature: Useful for making stronger plants
MAAAADVGQLAGAAAATLLAAVLFAAALGRQRQRRRRGAPVEGIPAPDDGCAVADGAGSAAVDGPTDVIIVGAGVAGSALAYTLGKDGRRVHVIERDLTEPDRIVGELLQPGGYLKLMELGLQDCVDEIDAQRVLGYALFKDGKNTKLSYPLEKFHSDVAGRSFHNGRFIQRMREKAASLPNVQLEQGTVTSLLEENGTVKGVQYKIKSGEELKAYAPLTIVCDGCFSNLRRALCSPKVEVPSCFVGLVLENCELPHANHGHVILANPSPILFYPISSTEVRCLVDVPGQKVPSIASGEMANYLKTVVAPQIPPQIYDSFIAAIDKGSIRTMPNRSMPAAPHPTPGALLMGDAFNMRHPLTGGGMTVALSDIVVLRNLLKPLRNLHDASALCKYLESFYTLRKPVASTINTLAGALYKVFSSSPDKARDEMRQACFDYLSLGGVCSNGPIALLSGLNPRPLSLVAHFFAVAIFGVGRLMLPLPSPKRMWTGARLISGACGIIFPIIKAEGVRQMFFPATVPAYYRAPPEAEF

SEQ ID NO: 4667 - DNA, 633 bp, Triticum aestivum
  misc_feature: Ceres CLONE ID no. 941130
  misc_feature: Ceres CDNA ID no. 25891880
  CDS (3)..(383): REFERENCED BY SEQ ID NO: 4668
actccatcccgttctgtccagtcactagcaagttcgtcctcctcctcatctcctgttcttcattggtctccgttaattgcgtcagaactaagaggaacagagcattgttctgcagggcttttgctacctcttcctgcgactcgatcatgagctaccagcagggctacccgccaccgggcactgcagcagcgtaccctccgccgggccaccaccagcaggcctacgtcgcgccgccgccggctatgtaccagcaggaccaacagtaccctcctgccggcgccgacaccaccagccgcggcggacacggccacggcggcgatggcttcttgaaaggatgctgcgcggcgctgtgctgctgctgcctcctcgacgcctgcttctgatcgacttcgtcccatgttgttccaccggcacgatcaggcgtggcagatagattatatagagtatcttcatactttttttgcttctttttaaaacgtggttgatgtgttgagtactagtcccagaacaagatctttttttttgttttttttggagaggcagaacaagatttcttgtgtgtgatattttttttaacaagttcctgtgtatgatagatagatatgtgagattgatccaaaaaaaaaaaaaaaa

SEQ ID NO: 4668 - protein, 78 aa, Triticum aestivum
  misc_feature: Ceres CLONE ID no. 941130
  misc_feature: Ceres CDNA ID no. 25891880
  misc_feature: Homolog of GI Number: 50928713 NR Desc: OSJNBa0008M17.8
  misc_feature: Homolog of GI Number: 50938779 NR Desc: adhesive/proline
  misc_feature: Homolog of GI Number: 50948019 NR Desc: proline
  misc_feature: Homolog of GI Number: 8698728 NR Desc: Contains weak similarity to GATA
MSYQQGYPPPGTAAAYPPPGHHQQAYVAPPPAMYQQDQQYPPAGADTTSRGGHGHGGDGFLKGCCAALCCCCLLDACF

SEQ ID NO: 4669 - DNA, 672 bp, Triticum aestivum
  misc_feature: Ceres CLONE ID no. 941457
  misc_feature: Ceres CDNA ID no. 25446255
  CDS (3)..(545): REFERENCED BY SEQ ID NO: 4670
ccagagcagtaaactccgctacagcacacacaaaccagagagaccacaccagaaggagatcggccgcccagttcaaaaaaaaaaggagatcggccgccggagatgggcgcgagcctcctgcaggcggtggcggcgctggtgagcacgtgcacgcggcggctgcagcgggcggcgaggaggatgggcagcggcaggccggccgtggcgccgtggaggaaggccttctcgctgccgacgggcaaggggaaggccgcggcggggccggaggaggagggcgggctgtggaggaaggagatactcatgggggagcgctgccagccgctggagttctccggggtcatctactacgacgccgacggacaccgcctcgcgcagccgccccgctcgcccatgcgcagcccgctcccggcgtccttcaagctcgccgccaacgccggcgtccgttagctagcgtccgtgcggaggcgctcctcctcgtcgtcctccttccttgggccgagcagagcggaaagatggcgaagcttgctctgttttttgtccggtgagagaggcagagtgttcgtgtatatgttgcttcttcttagtgctttgtttgtttttcgtttttactggtattgtaatgataataggaattataaactacagtatttttctgcaaaaaaaaaaaaaaaa

SEQ ID NO: 4670 - protein, 114 aa, Triticum aestivum
  misc_feature: Ceres CLONE ID no. 941457
  misc_feature: Ceres CDNA ID no. 25446255
  misc_feature: Homolog of GI Number: 34912466 NR Desc: P0704D04.7
  misc_feature: Homolog of GI Number: 34914912 NR Desc: B1096D03.21
MGASLLQAVAALVSTCTRRLQRAARRMGSGRPAVAPWRKAFSLPTGKGKAAAGPEEEGGLWRKEILMGERCQPLEFSGVIYYDADGHRLAQPPRSPMRSPLPASFKLAANAGVR

SEQ ID NO: 4671 - DNA, 1462 bp, Triticum aestivum
  misc_feature: Ceres CLONE ID no. 941685
  misc_feature: Ceres CDNA ID no. 29191565
  CDS (89)..(1012): REFERENCED BY SEQ ID NO: 4672
aaaaccaaaccaccttctcgtcgtgtccatccccaccgccgcggcggactgacggacccgagctccacccccaaaccctcgccggccgatggagcagccgccgtcctcgccgccgccccccgcggcggccacggccacggctgcgcctactcccgctcccgcttccgctcccattatcctatcggactcgcctcctgcggccgcggcgggggagcccgcgctgaccgccgcgcagaaggcgctccgctccaagccggcgcgcgtccccgaggacaccgacaagaagaataagaagctcaaggatgtggaaatcagttttccaattgtctatgggacgatttcattttggcttggcaaaaaagcaagcgagtacaactctcacaaatggaccgtgtacatccgttctgcaacaaatgaggatttgagtgtcatagttaagcgtgtagtgtttcagcttcacccaagtttcactaatccaacaagagttgtagagcaaccaccttttgagttgtccgaatctggatggggagagtttgagattgcaataacactttattttcacagtgatgtctgtgagaagcgtttggacttgtttcatcaacttaagctgtatccggaagaggatgccggacctcaatcaacaaaaaaacctgttgtagtggaaacatatgatgaagttgtcttccctgagcctactgaggccttcttcctgagagtccaaaatcatcctgctgctactgtgcccaggctacctcctggtatgacattgtcttctccaggccctatggaacttatgccacatgataagaagcgttttgacacgaaggatcattctttgagccagtggttctcgaacttctctgaagctgatgaactattaaaactggcggctgctcgtcagcaggtgcaggctcacatcgctaagctgagaaggcagctaagtatgatagagggaatgccccagcagtccagagtcatccctggtcctggtcaacagtttgggcatggctaatggaacggtagctgctgtaaggaggatgctgaaacctgacaacaactcgctaacagaatgtgatgaatgtgtcttcattgacgtcttaagctcgcaattgatgtttagtgctgggcagtgtgcataaagcgcaatctatggattgtaccgcctttgtgcattttgaaatcaacgggagcatgctatattgtgtacctgccttaagttatcaccctctctgttcctattcttttatgttccagtagaagcatagcacagggggtgcaaaatccattttgctaacatagtggaatgcgccttgctttgtgtcagtaccagcaagtgttcatttccaaaatcatttaacagttaaatgaagagacgctggtctgaccgttagttgaagtggatacatattagaacatctggcgctgaacaaaaaaaaaaaaaaaaaaaaaaaaaaaaaaaaaa

SEQ ID NO: 4672 - protein, 307 aa, Triticum aestivum
  misc_feature: Ceres CLONE ID no. 941685
  misc_feature: Ceres CDNA ID no. 29191565
  misc_feature (97)..(180): Pfam Name: YEATS PFAM Desc: YEATS family
  misc_feature: Homolog of GI Number: 55296994 NR Desc: putative TAF14b
  misc_feature: Homolog of GI Number: 45198294 NR Desc: AFL227Cp
  misc_feature: Homolog of GI Number: 38014526 NR Desc: MGC68689 protein
  misc_feature: Homolog of GI Number: 49523062 NR Desc: MGC89432 protein
  misc_feature: Homolog of GI Number: 57092491 NR Desc:  similar to YEATS domain containing 4
  misc_feature: Homolog of GI Number: 48106789 NR Desc: similar to MGC68689 protein
  misc_feature: Homolog of GI Number: 46226375 NR Desc: transcription factor TFIIF
  misc_feature: Homolog of GI Number: 9755857 NR Desc: NuBI
  misc_feature: Homolog of GI Number: 34864887 NR Desc: similar to glioma
  misc_feature: Homolog of GI Number: 67602817 NR Desc: Gas41
MEQPPSSPPPPAAATATAAPTPAPASAPIILSDSPPAAAAGEPALTAAQKALRSKPARVPEDTDKKNKKLKDVEISFPIVYGTISFWLGKKASEYNSHKWTVYIRSATNEDLSVIVKRVVFQLHPSFTNPTRVVEQPPFELSESGWGEFEIAITLYFHSDVCEKRLDLFHQLKLYPEEDAGPQSTKKPVVVETYDEVVFPEPTEAFFLRVQNHPAATVPRLPPGMTLSSPGPMELMPHDKKRFDTKDHSLSQWFSNFSEADELLKLAAARQQVQAHIAKLRRQLSMIEGMPQQSRVIPGPGQQFGHG

SEQ ID NO: 4673 - DNA, 1549 bp, Triticum aestivum
  misc_feature: Ceres CLONE ID no. 942597
  misc_feature: Ceres CDNA ID no. 40351506
  CDS (303)..(1253): REFERENCED BY SEQ ID NO: 4674
aacaaacgccgcacgcagcgacactgggtgcccctgctcgtcgtccccgaccccggcggctcggctcccgatctcgccggctcgccggacgccgtcgcccgtcgccgcctgcctctccgtcccgccccgcccctcccgccagaccggcgctcggcgccaccgggcccctctggtgcccctgcaagccggcgcccgccgcccagtccgctctccgccgactccggcactcggccggcagcaagccagccctgcccggcggccagcctttagcccgatttgaggactcgagggcgggtgtgtgaatggctcaaccttctgtcattcttgcaactgcaagttatgaccacacaatcagattttgggaagccaagagtggtcgctgttaccgcactattcagtatccagactcgcaagtaaatcgccttgagataaccccggacaagcggttcctagctgctgctggcaattctcatatccgcctttttgatgtgaactcaaatagcccacaaccggtaattagctatgattcgcatactagtaatgtgatggctgtggggttccattgtgatggcaactggatgtactcaggttctgaggatggcactgtgagaatttgggatttacggactgccacttgtcaacgagaatatgaaagtcgcgcagctgtcaacaccgtggtcctacacccaaatcagaaagaactaatatctggcgatcagaacggaaacatacgtgtgtgggatttggcagctaattcatgcagctgcgagttggtgccagaggtcgatacagctataagatctctgacagtcatgtgggatgggagtatggttgttgctgcaaataaccgtgggacatgttacgtttggcgcttgcttaagggtactcagacaatcaccagctttgagcccctccataagctgcaagcccatgatggctacattctgaagtgcctgctttcacctgaattttgtgaccctaacaggtatcttgcaactgcatcatctgaccacactgtaaagatttggaacgtggatggcttcaagttggaaaaaactttagtcggtcaccagcgctgggtttgggactgcgttttctcagtagacggtgcttacttgataacagcttcgtctgatacgacggcaagactgtggacaatgtcgactggggaggccatcagggtgtaccaggggcaccacaaagcaaccgtctgctgcgccctccatgacggggctgaatcggcaccctcataagcaacaccgccgcgacgcggcatggttctgtacatatctctgtcgattcgaacaacgcagcagggtgctctgctagattttcagcgccgtggcggctcgaggacaggcggttttaagatttgatttgctgtagtgctaggaccatgtgtaacaatgtacttatatgcagtgcagcctttgggggctgcgcacaggtgatttgtatggttgcttacattgttggatatttatttgtgcacaaccgaaataatatgcacccaccgccattggttccgcttggaaaaaaaaaaaaaaaa

SEQ ID NO: 4674 - protein, 316 aa, Triticum aestivum
  misc_feature: Ceres CLONE ID no. 942597
  misc_feature: Ceres CDNA ID no. 40351506
  misc_feature (111)..(147): Pfam Name: WD40 PFAM Desc: WD domain
MAQPSVILATASYDHTIRFWEAKSGRCYRTIQYPDSQVNRLEITPDKRFLAAAGNSHIRLFDVNSNSPQPVISYDSHTSNVMAVGFHCDGNWMYSGSEDGTVRIWDLRTATCQREYESRAAVNTVVLHPNQKELISGDQNGNIRVWDLAANSCSCELVPEVDTAIRSLTVMWDGSMVVAANNRGTCYVWRLLKGTQTITSFEPLHKLQAHDGYILKCLLSPEFCDPNRYLATASSDHTVKIWNVDGFKLEKTLVGHQRWVWDCVFSVDGAYLITASSDTTARLWTMSTGEAIRVYQGHHKATVCCALHDGAESAPS

SEQ ID NO: 4675 - DNA, 726 bp, Zea mays
  misc_feature: Ceres CLONE ID no. 981266
  misc_feature: Ceres CDNA ID no. 25446453
  CDS (96)..(620): REFERENCED BY SEQ ID NO: 4676
acaacaagctcgacggaacaactgactagaactagtacgtagaaatccaacactcgggacgaaattaaaagagacgagacgacgcatcatccggcatggcggcgcaggagggcggcatgaggctggtgtcgcacccgatcgcggcgcacgacgggcggctgccgcggcagtacacggcggaggggcagggcgccaagaaggacatgtcgccgccgctggaatggtacggcgtgcccgagggcgcgcggtcgctggcgctgctggtgcaggacatcgacgccgaccccatcgtgccgtggacgcactgggtggtggccaacatcccgcccgccaccaggggcctccccgaggggttctccggcgccgcgggggcggggccggggcgcgaccagctcggcggactgcaggagggggtcaacgactggaagcagcccggctggcgcgggcccgtgccgccctcccacggccaccgcatccagttcaagctctacgcgctcgacgacgaggtgcacctcggcaacaaggtgaccagggataagctcatggaggcgatcgacgggcacgtgctggaagaagccgagctgatcgccgtgttccagggagtcgtcgccaacaactaacacacacactcagagatatctttgttggcgtgctttgtatttgcttgtgtggctaccatgtaattttgatcgaataaaagggaacttcacaaaaaaaaaaaaaaaa

SEQ ID NO: 4676 - protein, 174 aa, Zea mays
  misc_feature: Ceres CLONE ID no. 981266
  misc_feature: Ceres CDNA ID no. 25446453
  misc_feature (17)..(170): Pfam Name: PBP PFAM Desc: Phosphatidylethanolamine
  misc_feature: Homolog of GI Number: 10799810 NR Desc: cold
  misc_feature: Homolog of GI Number: 26017213 NR Desc: cold regulated protein
  misc_feature: Homolog of GI Number: 50931765 NR Desc: putative cold regulated protein
  misc_feature: Homolog of GI Number: 54032089 NR Desc: COG1881: Phospholipid
  misc_feature: Homolog of GI Number: 48845201 NR Desc: COG1881: Phospholipid
  misc_feature: Homolog of GI Number: 55377691 NR Desc: phosphatidylethanolamine
  misc_feature: Homolog of GI Number: 48837860 NR Desc: COG1881: Phospholipid
  misc_feature: Homolog of GI Number: 41719815 NR Desc: COG1881: Phospholipid
  misc_feature: Homolog of GI Number: 53769716 NR Desc: COG0454: Histone acetyltransferase HPA2 and related acetyltransferases
  misc_feature: Homolog of GI Number: 23116193 NR Desc: COG1881: Phospholipid
MAAQEGGMRLVSHPIAAHDGRLPRQYTAEGQGAKKDMSPPLEWYGVPEGARSLALLVQDIDADPIVPWTHWVVANIPPATRGLPEGFSGAAGAGPGRDQLGGLQEGVNDWKQPGWRGPVPPSHGHRIQFKLYALDDEVHLGNKVTRDKLMEAIDGHVLEEAELIAVFQGVVANN

SEQ ID NO: 4677 - DNA, 874 bp, Zea mays
  misc_feature: Ceres CLONE ID no. 981378
  misc_feature: Ceres CDNA ID no. 40351507
  CDS (3)..(605): REFERENCED BY SEQ ID NO: 4678
acaaacagatacagcccgtccattccccaatccccgtgtcgcctgtgcccctctgccacctcgccgtcggcatgacaacagggtcgaccccgggttcggccccctctcagagaaaacgaaattctaccaaggattccgttgccctgtacgcggtgcaatgctataagtgctacaaatggagtacggttccaaaagaagaatttgagacgcttcgtgaaaacttcactaaggatccatggttctgcagcagacgaccagacagctcttgtgaagacgatgctgacattgagtacgacagcagccgcatttgggttttggacaagcccaacataccaaagcctccaccagagacggagaggctagtggttatgaggggcgactacagcaaaatggacacatattatgtcatgcccaatgggaagcgtgcaaggtgtgctggtgatgtggataagtttctggaggcaaatccggagtacaaagaccgcatatctgcttcggatttcagctttgcgccacccaaggttgttgaggagactgtttctcacaaccctgcctggcaagctgccaaggccaagaagcaggagaaggcagaggcacaaaagtgaatgatactcccaacggtgcttgtgttatgtttagatgatagtccgctcaagatcatgccccatcctatctagtgtgtacttgtctatctcgactgaagtcgatgtttaggtctttttagctgatttggctctgcatgcttcgttgcaacggagcccctgcgtgtcaattcctggggaataaatgagatgttgaataagtgctgtagagtgtagacctgcttttttataattaggcctcaagtcatgcttccctaaaaaaaaaaaaaaaa

SEQ ID NO: 4678 - protein, 177 aa, Zea mays
  misc_feature: Ceres CLONE ID no. 981378
  misc_feature: Ceres CDNA ID no. 40351507
  misc_feature (104)..(154): Pfam Name: MBD PFAM Desc: Methyl
  misc_feature (25)..(73): Pfam Name: zf PFAM Desc: CW
MTTGSTPGSAPSQRKRNSTKDSVALYAVQCYKCYKWSTVPKEEFETLRENFTKDPWFCSRRPDSSCEDDADIEYDSSRIWVLDKPNIPKPPPETERLVVMRGDYSKMDTYYVMPNGKRARCAGDVDKFLEANPEYKDRISASDFSFAPPKVVEETVSHNPAWQAAKAKKQEKAEAQK

SEQ ID NO: 4679 - DNA, 2340 bp, Zea mays
  misc_feature: Ceres CLONE ID no. 983784
  misc_feature: Ceres CDNA ID no. 36594108
  CDS (167)..(2032): REFERENCED BY SEQ ID NO: 4680
aaaatcgacgacgacgtctaatctatttaaggctgaaatccaccttgcctgcgtggccctcctccccatcgcgtctgtccgctacccctccccgaccagatcgctacgagacgccgcgcgatccgacccaggccgacgccgacgacccctctcgccgccggcggccatggcgtacggcgaccgcgtcaccaccttcgaggactccgagaaggagagcgagtacggctatgtccgcaaggtctctggacctgtggttgtggctgatggaatgggtggtgctgccatgtatgaacttgttcgtgtcggacatgataacctcattggggaaattatccgtcttgagggcgattcagctacaatccaagtttatgaggaaacagctggactgatggttaatgaccctgtattgagaacaagaaagcctctttcagttgaattgggacctggaattcttggaaacatttttgacggtatccagcggcctctaaaaaccatcgctattaagtcaggagatgtgtatattcctcgtggtgtttcagttcctgcccttgacaaagatgtattgtgggaatttcagccaacaaagctaggtgttggagatgtcatcacaggtggagatctatacgctactgtttttgagaacacattgatgcagcaccatgttgctcttccaccgggttctatggggaaaataagttacattgcaccagctggccagtacaacctgcaggacacagtgctagaattggaatttcagggcataaaaaagaaatttaccatgcttcagacatggcctgtgcgttcaccaaggcctgttgcatcgaagcttgctgcggatacacctcttctgacagggcagcgtgtactggatgcactattcccctcggttctgggaggcacttgtgctattccaggagcatttggctgtggtaaaactgtcattagtcaggcactttccaagtactccaattccgaagctgtggtttatgtgggctgtggtgaacgaggaaacgagatggctgaggttctcatggactttccccagttgacgatgacattgcctgatggccgtgaggagtctgtcatgaagagaacaacactggtggctaacacatcaaacatgcctgtcgctgctcgtgaagcttccatttacacaggaattacaattgctgagtatttccgtgatatgggctacaacgtcagtatgatggctgactccacctcccggtgggctgaggcattgcgtgagatctcagggcgtttggctgaaatgcctgctgatagtggttacccagcttacttggctgcacgtttggcatccttttatgaacgtgctggtaaggtaaaatgtctgggaagtccagacaggaatggcagtgtcacaattgttggagccgtctctcctcctggtggtgatttttcagaccctgttacctccgcaaccctcagtattgttcaggtcttctggggtttagataaaaagctcgctcaaaggaagcatttcccatctgtgaattggctcatttcctattcgaaatactccaaggcccttgagtctttttacgagaaattcgatccagatttcattgatattaggacaaaagcacgtgaggtgttgcagagggaggacgatctgaatgaaattgtgcagcttgttggtaaagacgcgctggcagaatctgacaagattacgctggagacagcaaagcttttgagagaagattatttggcacaaaatgcattcaccccatatgataagttctgcccattctacaaatccgtttggatgatgcgcaacattattcacttcaacacattggcaaatcaggctgtggagcgggcagctggtactgacggccataagataacatacagtgtcataaagcatcggttgggggatctattttatcgcctagtatcccaaaagttcgaggatcctgcagaaggcgaagaagctttggtcggcaagtttaagaaactgtatgatgaccttaccactgggttccgcaacctagaagatgaggcacagtgaactgctgtagattttgtgtaagacaataatggctgccaaatgttttataaggtacggaagttgtagattgagaccatgtatgagaattttccccaccgctactcatttctttgccaccactattttagtcatcagtgctggatgggcaccctgtttatttcgacgtaccctttattgctagcattgtaataagcgatgggcatgcttgtagttgaataagtacaatgtccatgtattcaaacatcagcgtcatgtttatttgtttgttgaaaaaactatgttgcctttttggaaaaaaaaaaaaaaaa

SEQ ID NO: 4680 - protein, 621 aa, Zea mays
  misc_feature: Ceres CLONE ID no. 983784
  misc_feature: Ceres CDNA ID no. 36594108
  misc_feature (22)..(84): Pfam Name: ATP PFAM Desc: ATP synthase alpha/beta family
  misc_feature (229)..(456): Pfam Name: ATP PFAM Desc: ATP synthase alpha/beta family
  misc_feature (474)..(618): Pfam Name: ATP PFAM Desc: ATP synthase alpha/beta chain
  misc_feature: Homolog of GI Number: 48477562 NR Desc: A1AO H+ ATPase subunit A
  misc_feature: Homolog of GI Number: 20129479 NR Desc: CG5075
  misc_feature: Homolog of GI Number: 54644218 NR Desc: GA18641
  misc_feature: Homolog of GI Number: 68359857 NR Desc:  similar to ATPase
  misc_feature: Homolog of GI Number: 12585490 NR Desc: Vacuolar ATP synthase catalytic subunit A
  misc_feature: Homolog of GI Number: 401322 NR Desc: Vacuolar ATP synthase catalytic subunit A
  misc_feature: Homolog of GI Number: 137460 NR Desc: Vacuolar ATP synthase catalytic subunit A
  misc_feature: Homolog of GI Number: 66845733 NR Desc: Vacuolar ATP synthase catalytic subunit A
  misc_feature: Homolog of GI Number: 50251203 NR Desc: putative vacuolar proton
  misc_feature: Homolog of GI Number: 52075907 NR Desc: putative vacuolar proton
MAYGDRVTTFEDSEKESEYGYVRKVSGPVVVADGMGGAAMYELVRVGHDNLIGEIIRLEGDSATIQVYEETAGLMVNDPVLRTRKPLSVELGPGILGNIFDGIQRPLKTIAIKSGDVYIPRGVSVPALDKDVLWEFQPTKLGVGDVITGGDLYATVFENTLMQHHVALPPGSMGKISYIAPAGQYNLQDTVLELEFQGIKKKFTMLQTWPVRSPRPVASKLAADTPLLTGQRVLDALFPSVLGGTCAIPGAFGCGKTVISQALSKYSNSEAVVYVGCGERGNEMAEVLMDFPQLTMTLPDGREESVMKRTTLVANTSNMPVAAREASIYTGITIAEYFRDMGYNVSMMADSTSRWAEALREISGRLAEMPADSGYPAYLAARLASFYERAGKVKCLGSPDRNGSVTIVGAVSPPGGDFSDPVTSATLSIVQVFWGLDKKLAQRKHFPSVNWLISYSKYSKALESFYEKFDPDFIDIRTKAREVLQREDDLNEIVQLVGKDALAESDKITLETAKLLREDYLAQNAFTPYDKFCPFYKSVWMMRNIIHFNTLANQAVERAAGTDGHKITYSVIKHRLGDLFYRLVSQKFEDPAEGEEALVGKFKKLYDDLTTGFRNLEDEAQ

SEQ ID NO: 4681 - DNA, 861 bp, Zea mays
  misc_feature: Ceres CLONE ID no. 983864
  misc_feature: Ceres CDNA ID no. 29191510
  CDS (286)..(735): REFERENCED BY SEQ ID NO: 4682
ctcctcaatcaaatttggaaccagtacagggtctttacaagaaaacgaccgataccgtctccgcctttccttccttttgcgctagcttccacagcatcaccaccgccaccccagctcgcttccctccccgctacacggacacggccgctcagcgctcaccaccgcttccatgctcctcgcctcgtctcccgctcgcgagacgtagctccagatcctctcccccacccacggcagcaccgcattaccctcagatccacccccgcgagcctcatttcagatccacccatgcgcctcccggtccttttcgccctgcagctggtcgccttggcggcggcagcttcggcggccgaggccgcggcgacgttctcctcgaggatggtgcaccgtctgtccgacgaggcccggctggaagcgggcccgcgcatggggttgtggccgcagcgcggaagcgggggctactaccgcgcgctgctgaggagcgatctccagcggcagaagcggcggctcgcgggcaagaaccagctcctctcgctctcaaagggcggcagcaccttctcccccggcaacgacttaggctggttatactacgcttgggtggatgttgggacgcctactacctcctttttggttgcattggatactggaagtgacctgttctgggtaccctgtgactgtattcagtgtgcccctttgtctagctaccgtggaaatctggtatgcatcccctttgtttagtagcttgatgttaatatctgaagatgtcgtgttgtaaaacagctgtcagcttgagttgggacctaagagaatctgtttttttttcaaagatatatgtggcttgttcatgtaaaaaaaaaaaaaaaa

SEQ ID NO: 4682 - protein, 149 aa, Zea mays
  misc_feature: Ceres CLONE ID no. 983864
  misc_feature: Ceres CDNA ID no. 29191510
  misc_feature (99)..(127): Pfam Name: Asp PFAM Desc: Eukaryotic aspartyl protease
  misc_feature: Homolog of GI Number: 50912821 NR Desc: aspartyl protease
  misc_feature: Homolog of GI Number: 72384474 NR Desc: 80A08_5
  misc_feature: Homolog of GI Number: 22655368 NR Desc: At2g17760/At2g17760
  misc_feature: Homolog of GI Number: 42567433 NR Desc: aspartyl protease family protein
  misc_feature: Homolog of GI Number: 32526671 NR Desc: chloroplast nucleoid DNA
  misc_feature: Homolog of GI Number: 18855042 NR Desc: putative chloroplast nucleoid DNA
  misc_feature: Homolog of GI Number: 42565828 NR Desc: aspartyl protease family protein
  misc_feature: Homolog of GI Number: 42565826 NR Desc: aspartyl protease family protein
  misc_feature: Homolog of GI Number: 50930905 NR Desc: OSJNBb0071D01.4
  misc_feature: Homolog of GI Number: 52076082 NR Desc: aspartic proteinase nepenthesin II
MRLPVLFALQLVALAAAASAAEAAATFSSRMVHRLSDEARLEAGPRMGLWPQRGSGGYYRALLRSDLQRQKRRLAGKNQLLSLSKGGSTFSPGNDLGWLYYAWVDVGTPTTSFLVALDTGSDLFWVPCDCIQCAPLSSYRGNLVCIPFV

SEQ ID NO: 4683 - DNA, 1403 bp, Zea mays
  misc_feature: Ceres CLONE ID no. 983889
  misc_feature: Ceres CDNA ID no. 40351508
  CDS (102)..(1133): REFERENCED BY SEQ ID NO: 4684
gctcgttgcgcgttcaaatttcgaaccacctcctgacctccgccttcgacgccccaaaccctagcccgacccctcctcctccacctgcgccaccgcccaccatgagctccgccgccgcgccagcttccgtcggcagcggcaaggagcttgccaacccgccagctgacgggatcaccaacctccgcttctccaaccacagcaacaacctcctcgtctcctcatgggacaagacggtgcggctctacgacgccgacgccaacgtgctcaagggggagttcatgcaccccggggccgtcctcgactgctgcttccacgacgactcctcgggctttagcgccggagccgaccacaccgttcggaggttggtatttagctcgtccaaggaagacgttttggggcggcatgatggtccggttcgttgcgtggaatactcttatgctgcaggtcaagtcatcaccggcagctgggataaaactgtaaaatgctgggatccaagaggagttagtggaccagagcgcacccttgttgggacatatgctcaacctgaacgtgtatattctctttcgttagtaggaaataggttggttgttgcaacagctggaagacatgtaaatatttatgatcttcgcaatatgtctcaacctgagcaaaaaagggactcttctttgaaatatcaaacacgatgtgttcgatgttttcccaacggaacaggatatgctcttagttctgttgaagggcgagtttctatggaattctttgatctatctgagtctgctcaatctaaaaagtatgctttcaagtgtcatcggaaatctgaggctggcagggacaccgtttatcctgtcaatgcaattgctttccatcccatatatggaacatttgccaccggagggtgtgatggatttgtgaatgtgtgggatggcattaacaagaaaagactatatcagtactcgaagtacgcatcaagcatcgctgctctatcattcagtaaggatgggcatctgcttgctgtggcatccagctacacttatgaagagggagaaaaaacgcatgagcctgacgctatatttatccggacagtgaatgaagtcgaggtgaagccgaagcccaaggcattggcagccccccagtagtgctgtgacctgttctggtggctagatgacccgtacttctctgcgttgatgtcaattacattagttgacggagtgcttgtttgtgttgaaagagctgaaacgcctgtttcttaatctggaaccctcttctcccgttttacttgtccgtggaaacatttcatgttccagctggttgtatattccgaaacagaccatgtttaagttcattcggttcttcgttgacttaagttatttatcaaatatttaagtatcgtaaaaaaaaaaaaaaaa

SEQ ID NO: 4684 - protein, 343 aa, Zea mays
  misc_feature: Ceres CLONE ID no. 983889
  misc_feature: Ceres CDNA ID no. 40351508
  misc_feature (236)..(273): Pfam Name: WD40 PFAM Desc: WD domain
MSSAAAPASVGSGKELANPPADGITNLRFSNHSNNLLVSSWDKTVRLYDADANVLKGEFMHPGAVLDCCFHDDSSGFSAGADHTVRRLVFSSSKEDVLGRHDGPVRCVEYSYAAGQVITGSWDKTVKCWDPRGVSGPERTLVGTYAQPERVYSLSLVGNRLVVATAGRHVNIYDLRNMSQPEQKRDSSLKYQTRCVRCFPNGTGYALSSVEGRVSMEFFDLSESAQSKKYAFKCHRKSEAGRDTVYPVNAIAFHPIYGTFATGGCDGFVNVWDGINKKRLYQYSKYASSIAALSFSKDGHLLAVASSYTYEEGEKTHEPDAIFIRTVNEVEVKPKPKALAAPQ

SEQ ID NO: 4685 - DNA, 1018 bp, Zea mays
  misc_feature: Ceres CLONE ID no. 984277
  misc_feature: Ceres CDNA ID no. 40351509
  CDS (169)..(717): REFERENCED BY SEQ ID NO: 4686
cttgattagcaatcactgctgcgcccgataggtggcagcgagccagcgagccagcgacccacccgactctgttccaacgagccttccctcccaaacttgcacgctgcccccgcgctcgcctccgcccccgatccagatccagggtggaatagggaacggccatacaccatggcggatttctccaaggaatcttgcccttctgtgaagaacattttacttctggattctgaaggaaagcgtgttgctgtaaagtatttctcagatgattggccgactaatgcatcaaagttagcctacgaaaagtctgtttttactaaaactctaaagacaaatgcacggacagaagctgagataacattgtttgatggttatattgtcgtttacaagtttgtacatgaccttcacttttttgtcaccgctggagatgatgagaatgagctcatcttagcaagtgtactacatggtttttctgattctgttggtcttctactcaggagtgatgttgagaagcggactgcgcttgagaacttggatttgatacttctctgcattgatgaaattgtagatgggggaatcatcctggaaacagatgcaaacaccattgctggtaaggttgcaaccaatgctgttgatggttctgtgcccttttctgagcagacgatatctcaggcactagccacagctagggagcaccttgcaagatctctactgaaatgaacaaccagcaatatgtatgacatatatgtgtgttaaaggttgggctactgaatgttaagggtctttgtagtcgttattcatcccaaagtgctgctgtgacagagcctagttgaatatccgagggattggtcacatgctcgttattttttttgaaccagtgagtttgtagctgccatatttcaggtaaaacataaaataaagagttgtaattgggtgtaatataattttcaccatacaaaaaaatcatctcaactatcaaaccatggtaaaaggttcaaaattatcaaaaaaaaaaaaaaaa

SEQ ID NO: 4686 - protein, 182 aa, Zea mays
  misc_feature: Ceres CLONE ID no. 984277
  misc_feature: Ceres CDNA ID no. 40351509
  misc_feature (11)..(154): Pfam Name: Clat_adaptor_s PFAM Desc: Clathrin adaptor complex small chain
MADFSKESCPSVKNILLLDSEGKRVAVKYFSDDWPTNASKLAYEKSVFTKTLKTNARTEAEITLFDGYIVVYKFVHDLHFFVTAGDDENELILASVLHGFSDSVGLLLRSDVEKRTALENLDLILLCIDEIVDGGIILETDANTIAGKVATNAVDGSVPFSEQTISQALATAREHLARSLLK

SEQ ID NO: 4687 - DNA, 519 bp, Zea mays
  misc_feature: Ceres CLONE ID no. 984278
  misc_feature: Ceres CDNA ID no. 40351510
  CDS (42)..(368): REFERENCED BY SEQ ID NO: 4688
aatagaacatcaagtttagattcttgttcacgcgttcaaagatgcgtggggaaaacaacatagtcctccttctcctcctcctgtttgctgtaatttctccgaaccaagtaattggtagtgcttgtactccggaacagaaggctgccatcctaaatcaatgcgaagagtacatcaagcctggatacccccttatactgccatcgtacgccagtgtgtgttgcgacaaggtgagagatgtgccaaatagggacatgaactgcatcgtcgatctgctcacgcctccagagaaggcgaaacacggtgtcgacaagataaaacgtctgaaagatctctgcgacaactcgcctcatcatcaggtggtggtgtagacagacagcagctgtcattgctaatggagttcggaggcaagatatatggtctagtaaataaagtcgtcgatcaaagcatgacaactgtcaaatgtatctttgattaagtaaagtatcactcaagatttccagtttaaaaaaaaaaaaaaaa

SEQ ID NO: 4688 - protein, 108 aa, Zea mays
  misc_feature: Ceres CLONE ID no. 984278
  misc_feature: Ceres CDNA ID no. 40351510
MRGENNIVLLLLLLFAVISPNQVIGSACTPEQKAAILNQCEEYIKPGYPLILPSYASVCCDKVRDVPNRDMNCIVDLLTPPEKAKHGVDKIKRLKDLCDNSPHHQVVV

SEQ ID NO: 4689 - DNA, 1144 bp, Zea mays
  misc_feature: Ceres CLONE ID no. 984571
  misc_feature: Ceres CDNA ID no. 29191381
  CDS (302)..(940): REFERENCED BY SEQ ID NO: 4690
acaggtttggaatcggcgctgtccgtcttcgctcttctcgccagggcaaattaaagctacaatgcaggctgcctactatgcaaaggatcttttggtttgaagtccagttgaccgaagttggaaaatacttctgatacttacagatttcacagaggtcttgtttattttctactattttccttcaagcacgtggaatagtacgtttgacaaacaatttgctgacgaggttttcgaacacggctgaacacgcgcgcaaggcgtgcacagtacacgcgcgcagggggaggaggagaacaagaggatggtgaaggcaaggcccaagccaacgccggtcaaggcggccccagaagtgatcttcgacccaatggcctctggtgcccggaagccccgccgcccaggggcgccgtcagccagcaaagaatggcacagcttcatgggatcgagtctgtcggatatgtatcggaagccagttttggagaaatctgctgacacatctgatgaggagcctgacattgatatcatgaagctgctgaaagatgttgagatcattggtgcccctacatttaaggggcgaaagcaaatcgagaaccgcagagtagttgagttgggtggaaagtccgttaagaagcaccgcacaccattaagtgttgcgaagccagctctgaagaatcagaagaaacgagaacagaagaaaatggaagaggaaaaactacttgggatctttaggaagagggacaaggacaccaaacctcacaagacaaggccagaggaccgagtgcttagggccacagaagggcgctttaggaacggtatactgaacgtcaagcatcttctggcgccaccgaaaccatcaggcaaggacatgtcggaaccgaagatgaggaaggacaagcacaaggggaagggtaagcagaaggggggcagaaggaagagacgttgaagaaagcacacttctgtaacctggtttgctattaagaatttaagatagatggttgatgaaacgtttaaatgacaacacctttttgtgtccgtcctgaaattaagacgtttccttgctctgctggaatctttgaagtgatccttgaaacgatgtaattctccaccttgaaacgaaacgatgtaattctccaaaaaaaaaaaaaaa

SEQ ID NO: 4690 - protein, 212 aa, Zea mays
  misc_feature: Ceres CLONE ID no. 984571
  misc_feature: Ceres CDNA ID no. 29191381
  misc_feature: Homolog of GI Number: 34904156 NR Desc: P0417G05.21
  misc_feature: Homolog of GI Number: 19310391 NR Desc: At2g44820/T13E15.17
MVKARPKPTPVKAAPEVIFDPMASGARKPRRPGAPSASKEWHSFMGSSLSDMYRKPVLEKSADTSDEEPDIDIMKLLKDVEIIGAPTFKGRKQIENRRVVELGGKSVKKHRTPLSVAKPALKNQKKREQKKMEEEKLLGIFRKRDKDTKPHKTRPEDRVLRATEGRFRNGILNVKHLLAPPKPSGKDMSEPKMRKDKHKGKGKQKGGRRKRR

SEQ ID NO: 4691 - DNA, 758 bp, Zea mays
  misc_feature: Ceres CLONE ID no. 984588
  misc_feature: Ceres CDNA ID no. 36704351
  CDS (114)..(644): REFERENCED BY SEQ ID NO: 4692
aacacaagctcgacggaactgtgactagaactagtagatccaatccaacactcgggacgaaattaaaggagacgacgcatcatccggccggcaggcatcgcacggtcaccaccatggcggcgcaggagggcggcatgaggctggtgtcgcacccgatcgcggcgcacgacgggcggctgccgcggcagtacacggcggaggggcagggcgccaagaaggacatgtcgccgccgctggagtggtacggcgtgcccgagggcgcgcggtcgctggcgctgctggtgcaggacatcgacgccgaccccgtcgtgccgtggacgcactgggtggtggccaacatcccgcccgccaccaggggcctccccgaggggttctccggcgccgcgggggcgggggcgggggcgggccgcgaccagctcggcggcctgcaggagggggtcaacgactggaagcagcccggctggcgcgggcccgtgccgccctcccacggccaccgcatccagttcaagctctacgcgctcgacgacgaggtgcacctcggcaacaaggtgaccagggataagctcatggaggccatcgacgggcacgtgctggaagaagccgagctgatcgccgtgttccagggagtcgtcgccaacaactaacacacacactcagagatatcttcgttggcgtgctttgtatttgcttgtgtggctaccatgtaattttgatcgaataaaagggaacttcacatgtgattaaaaaaaaaaaaaaaa

SEQ ID NO: 4692 - protein, 176 aa, Zea mays
  misc_feature: Ceres CLONE ID no. 984588
  misc_feature: Ceres CDNA ID no. 36704351
  misc_feature (17)..(86): Pfam Name: PBP PFAM Desc: Phosphatidylethanolamine
  misc_feature: Homolog of GI Number: 10799810 NR Desc: cold
  misc_feature: Homolog of GI Number: 26017213 NR Desc: cold regulated protein
  misc_feature: Homolog of GI Number: 50931765 NR Desc: putative cold regulated protein
  misc_feature: Homolog of GI Number: 57159464 NR Desc: phospholipid
  misc_feature: Homolog of GI Number: 55377691 NR Desc: phosphatidylethanolamine
  misc_feature: Homolog of GI Number: 66776365 NR Desc: PE
  misc_feature: Homolog of GI Number: 66778899 NR Desc: UvrD/REP helicase
  misc_feature: Homolog of GI Number: 68562394 NR Desc: L
  misc_feature: Homolog of GI Number: 66776103 NR Desc: LigA
  misc_feature: Homolog of GI Number: 66777243 NR Desc: Ribonuclease PH
MAAQEGGMRLVSHPIAAHDGRLPRQYTAEGQGAKKDMSPPLEWYGVPEGARSLALLVQDIDADPVVPWTHWVVANIPPATRGLPEGFSGAAGAGAGAGRDQLGGLQEGVNDWKQPGWRGPVPPSHGHRIQFKLYALDDEVHLGNKVTRDKLMEAIDGHVLEEAELIAVFQGVVANN

SEQ ID NO: 4693 - DNA, 974 bp, Zea mays
  misc_feature: Ceres CLONE ID no. 984608
  misc_feature: Ceres CDNA ID no. 4581199
  CDS (69)..(870): REFERENCED BY SEQ ID NO: 4694
atcacctataatattttgagcattcagaaacacaccaagcgaagcgcactagcaacaacctaacaacaatggctaccaagatattatccctccttgcgcttcttgcgctttttgcgagcgcaacaaatgcgtccattattccacaatgctcacttgctcctagttccattattccacagttcctcccaccagttacttcaatggccttcgaacacccagctgtgcaagcctataggctacaacaagcgattgcggcgagcgtcttacaacaaccaattgcccaattgcaacaacaatccttggcacatctaacaatacaaaccatcgcaacgcaacagcaacaacagttcctaccagcactgagccacctagccatggtgaaccctgtcgcctacttgcaacagcagctgcttgcatccaacccacttgctctagcaaacgtagttgcaaaccagcaacaacaacaactgcaacagtttctgccagcgcttagtcaactagccatggtgaaccctgccgcctacctacaacagcaacaactgctttcatctagcccgctcgctgtggccaatgcacctacatacctgcaacaagaattgttgcaacagattgtaccagctctaactcagctagctgtggcaaaccctgttgcctacttgcaacagctgcttccattcaaccaactaactatgtcgaactctgttgcgtacctacaacagcgacaacagttacttaatccattggcagtggctaacccattggtcgctgccttcctacagcagcaacaattgctgccatacaaccggttctctttgatgaatcctgtcttgtcgaggcagcaacccatcgttggaggtgccatcttttagattacatatgagatgtactcgataatggtgccctcataccggcatgtgtttcctagaaataatcaatatattggttgagatttatctcgaaaaaaaaaaaaaaaa

SEQ ID NO: 4694 - protein, 266 aa, Zea mays
  misc_feature: Ceres CLONE ID no. 984608
  misc_feature: Ceres CDNA ID no. 4581199
  misc_feature (1)..(266): Pfam Name: Zein PFAM Desc: Zein seed storage protein
MATKILSLLALLALFASATNASIIPQCSLAPSSIIPQFLPPVTSMAFEHPAVQAYRLQQAIAASVLQQPIAQLQQQSLAHLTIQTIATQQQQQFLPALSHLAMVNPVAYLQQQLLASNPLALANVVANQQQQQLQQFLPALSQLAMVNPAAYLQQQQLLSSSPLAVANAPTYLQQELLQQIVPALTQLAVANPVAYLQQLLPFNQLTMSNSVAYLQQRQQLLNPLAVANPLVAAFLQQQQLLPYNRFSLMNPVLSRQQPIVGGAIF

SEQ ID NO: 4695 - DNA, 816 bp, Zea mays
  misc_feature: Ceres CLONE ID no. 984649
  misc_feature: Ceres CDNA ID no. 29191511
  CDS (44)..(688): REFERENCED BY SEQ ID NO: 4696
cccaacattagcacaaagaacacaatagaccactgatttcacaatgaaaagggagacaatgccttcatggctagaactgttgcttgcaacacaattctttacgacttgtgctaaccatcttcttgctagtcgcaatgaatgtaacctattttgcacccagtgtgagaccaaaccagctgctttctgtaactattgtcgttcaagtgatcattccacccaccgtgtaatccagataaggcgttcatcgtaccatgacgttgtgagggtgtccgagattgaggatatctttgatgtcagcgatgtgcaaacttatgtaatcaatagtgcaaggattgtattcctgaatgagcggccacaactgcgtgcttctagtgtccccatttgtaaggcacccacatcatcaacacatagctgtgagacatgtagccgtgtgctacttgatgcatttcgcttctgctctcttggatgcaatcttagaggcttaaatatggaagctggtatgcaagctatggttggcaacaaccctcggtccaatggtatggatcatgtggctaggattgacaatgttggttcaagtactacaaatgaccaaaacagctgcaatgacaagaactacgaagaaccaccaccaaaaagggttgctcgtcacagacgcaagggaattccccaacgtgcgccattcttctaatctgaacatcatgacaatgtccagtaaatgttgtgggaaataagaagagataatatttgtcatgggtgaaatgaatgaatgaaataaataaaagaatgaatgaatggcccctaaaaaaaaaaaaaaaa

SEQ ID NO: 4696 - protein, 214 aa, Zea mays
  misc_feature: Ceres CLONE ID no. 984649
  misc_feature: Ceres CDNA ID no. 29191511
  misc_feature: Homolog of GI Number: 50901710 NR Desc: B1108H10.20
  misc_feature: Homolog of GI Number: 56202051 NR Desc: zinc
  misc_feature: Homolog of GI Number: 6714272 NR Desc: F6N18.8
  misc_feature: Homolog of GI Number: 18398555 NR Desc: zinc
  misc_feature: Homolog of GI Number: 50928391 NR Desc: OSJNBa0086O06.23
  misc_feature: Homolog of GI Number: 50901716 NR Desc: B1108H10.23
  misc_feature: Homolog of GI Number: 56202052 NR Desc: zinc
  misc_feature: Homolog of GI Number: 22136542 NR Desc: At1g21000/F9H16_1
  misc_feature: Useful for decreasing plant size
  misc_feature: Useful for making shorter plants
  misc_feature: Useful for making smaller plants
MKRETMPSWLELLLATQFFTTCANHLLASRNECNLFCTQCETKPAAFCNYCRSSDHSTHRVIQIRRSSYHDVVRVSEIEDIFDVSDVQTYVINSARIVFLNERPQLRASSVPICKAPTSSTHSCETCSRVLLDAFRFCSLGCNLRGLNMEAGMQAMVGNNPRSNGMDHVARIDNVGSSTTNDQNSCNDKNYEEPPPKRVARHRRKGIPQRAPFF

SEQ ID NO: 4697 - DNA, 617 bp, Zea mays
  misc_feature: Ceres CLONE ID no. 984679
  misc_feature: Ceres CDNA ID no. 25446002
  CDS (2)..(313): REFERENCED BY SEQ ID NO: 4698
tcgtggttcctcaagtcccgctgctgccgccctctccttctcgtcgcgctccgtgaccgcctcctctccttccactacagatgcctcctcatcggctcaccacccaggtttacccaccttgcagatccagtggcgattccattcctctccgtgtggacgcaaggactcagtgaaccacttccagatactcgctgcttctcccgtgcccatgggaaactgccagtgcagagaaggtcaaagaagcacacaagagagtgatggtggccaatcatccagatgcgggtggaagtcattaccttgcttcaaagattaacgaggcaaaggatgtaatgacagggaaaacaaaagggggtgggtctgccttttgatcggtacacggacaacgtgttcttccactgaaagagcaattttgtgtctccagactcgcattagaagatatgccgaaatctttgtgtgttttatgaaaatttgtggacaaaaaaaaagtagtggacctttatggagcaggcaattcgttgcttagtaaagctcggctcagttgtgcttgtgcccgaatcaattggacattgttgctaattgagtcccctgtcctttgtttttcaaaaaaaaaaaaaaaa

SEQ ID NO: 4698 - protein, 36 aa, Zea mays
  misc_feature: Ceres CLONE ID no. 984679
  misc_feature: Ceres CDNA ID no. 25446002
  misc_feature: Homolog of GI Number: 55770429 NR Desc: putative DNAJ domain
  misc_feature: Homolog of GI Number: 21554024 NR Desc: DNAJ protein
  misc_feature: Homolog of GI Number: 62858503 NR Desc: LOC549696
  misc_feature: Homolog of GI Number: 55621546 NR Desc:  similar to homolog of yeast TIM14 isoform a
  misc_feature: Homolog of GI Number: 41152084 NR Desc: homolog of yeast TIM14 isoform b
  misc_feature: Homolog of GI Number: 74003220 NR Desc:  similar to translocase of the inner mitochondrial membrane 14 isoform 1 isoform 4
  misc_feature: Homolog of GI Number: 74003214 NR Desc:  similar to translocase of the inner mitochondrial membrane 14 isoform a isoform 1
  misc_feature: Homolog of GI Number: 17509089 NR Desc: DNaJ domain
  misc_feature: Homolog of GI Number: 61835989 NR Desc:  similar to homolog of yeast TIM14 isoform a
MVANHPDAGGSHYLASKINEAKDVMTGKTKGGGSAF

SEQ ID NO: 4699 - DNA, 1068 bp, Zea mays
  misc_feature: Ceres CLONE ID no. 985017
  misc_feature: Ceres CDNA ID no. 36698309
  CDS (134)..(895): REFERENCED BY SEQ ID NO: 4700
atattatcccgtgccccttgtctttcttcctccacaagcagcgaaatccaatctagaagcgcccctctccctctctctctctctcttcgccgtccgaagctccgcaccccaatctaatcgacacctcgccgagatgggccgcaagttcttcgtcggtggcaactggaaatgcaatggaaccacagatcaggtcgagaagattgtcaaaaccctgaatgaaggacaggttcccccttcagatgttgtggaggtcgttgtcagccctccttatgtcttccttcctgtggtcaagagccagctgcgccaagagttccatgttgcggctcagaactgctgggttaagaagggaggtgctttcaccggtgaagtcagtgctgagatgctcgtcaaccttggtgttccctgggtcattcttggacactctgaaaggagagctctgctgggagaatcaaatgaatttgttggagacaaggttgcgtatgccctgtctcagggactaaaggtcattgcatgtgttggtgagacacttgagcagagggaggctgggtctaccatggaggttgttgctgcacaaacaaaagcaattgctgagaagatcaaggactggagcaacgtagttgttgcctatgaaccagtttgggctattggaactggtaaagttgccaccccagctcaggctcaggaagtgcacgcctccctgagggattggctaaagaccaacgtcagccctgaggttgctgaatctactaggatcatttacggaggctctgtaactgccgcgaactgcaaagagctagcagcacagcctgatgtcgatgggtttcttgtcggtggagcttctttgaagcctgagttcatcgacatcatcaacgcggccaccgtgaagtccgcttaagatgttacgctgaagacgaacatactttttttttgctcaactgtgctatgtaagctagtagcttttgcgcaggagcagagactgttttgcctgcccccaacttttagcttgagcttgctaataatgtttacctctggacgtatcaataatggtgcttaaaaaaaaaaaaaaaa

SEQ ID NO: 4700 - protein, 253 aa, Zea mays
  misc_feature: Ceres CLONE ID no. 985017
  misc_feature: Ceres CDNA ID no. 36698309
  misc_feature (5)..(245): Pfam Name: TIM PFAM Desc: Triosephosphate isomerase
  misc_feature: Homolog of GI Number: 168647 NR Desc: triosephosphate isomerase 1
  misc_feature: Homolog of GI Number: 50900728 NR Desc: putative triosephosphate isomerase
  misc_feature: Homolog of GI Number: 407525 NR Desc: triosephosphate isomerase
  misc_feature: Homolog of GI Number: 11124572 NR Desc: triosephosphat
  misc_feature: Homolog of GI Number: 1785948 NR Desc: cytosolic triosephosphate isomerase
  misc_feature: Homolog of GI Number: 38112662 NR Desc: triose phosphate isomerase cytosolic isoform
  misc_feature: Homolog of GI Number: 77745458 NR Desc: triose phosphate isomerase cytosolic isoform
  misc_feature: Homolog of GI Number: 602590 NR Desc: triosephosphate isomerase
  misc_feature: Homolog of GI Number: 553107 NR Desc: triosephosphate isomerase
  misc_feature: Homolog of GI Number: 556171 NR Desc: triosephosphate isomerase
MGRKFFVGGNWKCNGTTDQVEKIVKTLNEGQVPPSDVVEVVVSPPYVFLPVVKSQLRQEFHVAAQNCWVKKGGAFTGEVSAEMLVNLGVPWVILGHSERRALLGESNEFVGDKVAYALSQGLKVIACVGETLEQREAGSTMEVVAAQTKAIAEKIKDWSNVVVAYEPVWAIGTGKVATPAQAQEVHASLRDWLKTNVSPEVAESTRIIYGGSVTAANCKELAAQPDVDGFLVGGASLKPEFIDIINAATVKSA

SEQ ID NO: 4701 - DNA, 1082 bp, Zea mays
  misc_feature: Ceres CLONE ID no. 985044
  misc_feature: Ceres CDNA ID no. 36707266
  CDS (104)..(664): REFERENCED BY SEQ ID NO: 4702
aactactccgtcactttgtttgcaaagctcctcctcgatccatcgatcactgcaccggccggcggcaccgcgctcgcaggggctagccaacgagacggcagcaatggcggaccgtgaccgcagcggcatctacggcggcgcccacgccacctacgggcagcagcagcagcagggaggaggcgggcgcccgatgggtgagcaggtgaagggcatgctccacgacaaggggccgacggcgtcgcaggcgctgacggtggcgacgctgttcccgctgggcgggctgctgctggtgctgtcggggctggcgctgacggcctccgtggtggggctggccgtggccacgccggtgttcctgatcttcagccccgtgctggtccccgccgcgctgctcatcgggacggccgtcatggggttcctcacgtcgggcgcgctggggctcgggggcctgtcctcgctcacgtgcctcgccaacacggcgcggcaggcgttccagcgcaccccggactacgtggaggaggcgcaccgcaggatggcggaggccgcggcgcacgcgggccacaagaccgcgcaggcaggccaggccatccagggcagggcgcaggaggccggcgccgggggaggtgcaggtgccggcgctggcggcggcggcagggcttcctcgtaagcaagtcatccatgcatggattatggatagatgcgcgcgtgcgtgtctatcagtatcagcagccagcagggtcgtcgcggaatgctgtgttcctgtacgtgtgggtgaccgtccttccgtccttcgtctttctccccccgagtgtgtgttacgtatgtcctggtgttcgtcgtgtgtgttcatcgccgctccagttgaattccggtgtctgttcatcgccgctccaggtcgtagatgtgaatatactttgctaggggaataagtgataagtctgtctggaaggtaatgtttgagctttgctagtgtggctgggcactctggtcactggttgtgttgtgcatgcatcagctgtatgatcgtcgtctgttgtggaaaattggtcaatgtattctcttgctgaataaaaaaaaaaaaaaaa

SEQ ID NO: 4702 - protein, 186 aa, Zea mays
  misc_feature: Ceres CLONE ID no. 985044
  misc_feature: Ceres CDNA ID no. 36707266
  misc_feature (44)..(161): Pfam Name: Oleosin PFAM Desc: Oleosin
  misc_feature: Homolog of GI Number: 168509 NR Desc: oleosin KD18
  misc_feature: Homolog of GI Number: 1076818 NR Desc: oleosin 17
  misc_feature: Homolog of GI Number: 50917995 NR Desc: oleosin
  misc_feature: Homolog of GI Number: 4102969 NR Desc: 18 kDa oleosin
  misc_feature: Homolog of GI Number: 963062 NR Desc: high molecular weight oleosin
  misc_feature: Homolog of GI Number: 82051 NR Desc: lipid body
  misc_feature: Homolog of GI Number: 9963897 NR Desc: oleosin
  misc_feature: Homolog of GI Number: 10880961 NR Desc: 19 kDa oleosin
  misc_feature: Homolog of GI Number: 10834827 NR Desc: oleosin
  misc_feature: Homolog of GI Number: 22651523 NR Desc: oleosin
MADRDRSGIYGGAHATYGQQQQQGGGGRPMGEQVKGMLHDKGPTASQALTVATLFPLGGLLLVLSGLALTASVVGLAVATPVFLIFSPVLVPAALLIGTAVMGFLTSGALGLGGLSSLTCLANTARQAFQRTPDYVEEAHRRMAEAAAHAGHKTAQAGQAIQGRAQEAGAGGGAGAGAGGGGRASS

SEQ ID NO: 4703 - DNA, 850 bp, Zea mays
  misc_feature: Ceres CLONE ID no. 985350
  misc_feature: Ceres CDNA ID no. 25446455
  CDS (31)..(546): REFERENCED BY SEQ ID NO: 4704
actctaccaccccacccccgcccgccatcaatgcggtccatatgcgtgcgtcgccttaaatcggcctaccaccctccttcgcccccgccgcagcacgcagaattttcttactgctggctgctgctcgccattgctgaccacactcacagcagcctccctccccctcgccaccgaaagctagcccgttgcttgcaagcctcgccaactgccgctatatatacgcatacaagcgcgcgccgcgcacgcgcagcacgcaatcagaacagtggttgctggagagcgcgcgggccgggcaaggagcaaggacgagcagggtcgtcgatggtgttcttctgcttcctggtggagcagcggcggacggtgcggagcagcaagccggcggcggggatctgctcgcgctgcggcgggtgcgccagcgtggcggacatggagaccgccaccagggtctgctacctgctcaccgtgcaccgccgcacctggcgcgccatcatctgcaccttctgcggcgccatgctcaagtcctaccgccactacaggctctactgactctcggccgatcgacggagttgttcgagtcggtgggtggtggaggaacgcgcgccttcattcttcgcggcttgctgtgaggtgtagtgatgagctacgtacggtactagctagtgatctgttcttcctgatgagtcctcctctaactgggtgtcttgctcgcgactgctacaagctagattttgtttttgtttttgttttgttcctgcttgattatgctgctggggtttgcagatggttgtaatggcagagctgcgtgtaaatatagttatgtgtcatcactcatccaaaaaaaaaaaaaaaa

SEQ ID NO: 4704 - protein, 74 aa, Zea mays
  misc_feature: Ceres CLONE ID no. 985350
  misc_feature: Ceres CDNA ID no. 25446455
MVFFCFLVEQRRTVRSSKPAAGICSRCGGCASVADMETATRVCYLLTVHRRTWRAIICTFCGAMLKSYRHYRLY

SEQ ID NO: 4705 - DNA, 1127 bp, Zea mays
  misc_feature: Ceres CLONE ID no. 985461
  misc_feature: Ceres CDNA ID no. 40041376
  CDS (96)..(815): REFERENCED BY SEQ ID NO: 4706
cttttgcgctccttgcttccgcttgtagtgggagtgggagtggccgagtgggagaagggaagagatgagcagcagtgaggctagcacgcaagaccatggcgtgccggcgctcgaggcgcaggatagcacggatgaccatggcgtgcccgcgctcgaggcgcccacgcccgaggctacggacaaggtactggccgccatggcgcgtggacggtgaggtcgccgtcgtcgagggcgaggtgaacaacgccggccacacggtgggctccaccgccgtcgtggccgtcgtggggccccgtcacatcgtggtcgcgaactgcggcgactcccgcgccgtgctctcccgcggcggcgtccccgtgccgctgtcttccgaccacaagccagataggcctgatgagttggaaagggtagaatcagcgggcggcagggtcatcaactggaaggggtaccgtgtcctgggggtgcttgcgacgtcaaggtcaattggcgactactacatgaagccattcatatcagctgaaccagaggtgaccgttacggagcgtacgcacaaagacgagttcatcatcctggggagcgacgggctgtgggacgtcatgtccaacgaggtggcttgcaaggtggcgaggaactgcttgtgcgggcgcgcggcttccaagtaccctgaaaccgtccacgggagctcggccagcgatgccgccgcggtgctggtggagttcgccatggcgcggggcagcaccgacaacatcagcgtcgtggtggtggagctgaaacgtctgaagtggaagggcggtagacagaatggtaggacgtagtctgtaggagcctccggctcgtcgcgaaatataagcgtgtcgacagagccagagaggcaaagggaagcagccgagcgtatgacggaatgctgtaaaaaaaaaaaaaaacagagagagggctctgactctttgagagctgcacttgtgttgtgaccgctgtattgcgttggttacttggttctttagttcaatactaacaaaatggcattccggccaatggaagtagcaggaagcatgggctgctgtactagttctttcttgtcgttttgttcgagtcaaataagttctgaccgtccaaaaaaaaaaaaaaaa

SEQ ID NO: 4706 - protein, 239 aa, Zea mays
  misc_feature: Ceres CLONE ID no. 985461
  misc_feature: Ceres CDNA ID no. 40041376
  misc_feature (1)..(218): Pfam Name: PP2C PFAM Desc: Protein phosphatase 2C
  misc_feature: Homolog of GI Number: 55773943 NR Desc: protein phosphatase 2C
  misc_feature: Homolog of GI Number: 4336434 NR Desc: nodule
  misc_feature: Homolog of GI Number: 50899494 NR Desc: protein phosphatase 2C
  misc_feature: Homolog of GI Number: 10432446 NR Desc: protein phosphatase 2C
  misc_feature: Homolog of GI Number: 7768151 NR Desc: protein phpsphatase 2C
  misc_feature: Homolog of GI Number: 33309516 NR Desc: protein phosphatase 2C
  misc_feature: Homolog of GI Number: 16226419 NR Desc: AT5g59220/mnc17_110
  misc_feature: Homolog of GI Number: 50901862 NR Desc: protein phosphatase 2C
  misc_feature: Homolog of GI Number: 31711886 NR Desc: At5g57050
  misc_feature: Homolog of GI Number: 509419 NR Desc: ABI1
MACRRSRRRIARMTMACPRSRRPRPRLRTRYWPPWRVDGEVAVVEGEVNNAGHTVGSTAVVAVVGPRHIVVANCGDSRAVLSRGGVPVPLSSDHKPDRPDELERVESAGGRVINWKGYRVLGVLATSRSIGDYYMKPFISAEPEVTVTERTHKDEFIILGSDGLWDVMSNEVACKVARNCLCGRAASKYPETVHGSSASDAAAVLVEFAMARGSTDNISVVVVELKRLKWKGGRQNGRT

SEQ ID NO: 4707 - DNA, 837 bp, Zea mays
  misc_feature: Ceres CLONE ID no. 985483
  misc_feature: Ceres CDNA ID no. 25087710
  CDS (184)..(537): REFERENCED BY SEQ ID NO: 4708
acctcgcaccacaccgggcgctctagtgcgaacgctgtgcttgggcctgcactgcaccggtcgcgcgcggcctgcgactgcgagccgaggaatccaagaagccgggccggccggagtgtcgatcgttgtttccgccggttgcgagatcggagccagcaaggacaggtcgtcgtgggactagccatgctgcacgccgaggagaagaaggggaaggtgaagagagggtggctggcggtgcgcgtcggggcggcggagggcgacggcggctcccagcggttcgtcatccccatcgcgcacctgtaccacccgctgttccgccgcctgctggaggccgcgcgcgacgcctacggctacgactactccgcgggcccgctgcgcctgccctgctccgccaacgagttcctccgcctgcgcgcgctggtcgagcgggagacgccgccgcacgcggcgccagcgcccgcgtcctcgcaccgcgtgcacgaaggcggacactactctaccctctccccgtgcacccgcgccaaggtcacctcgtgatcgatcacggccggccggctggccgacctgcatgatcggctcgtcgaactcggctttcctacgcgcgcgcgcggcgaccgcgaagaagtttcccatgtctggtggtggtgtactggtatgtagtgtagagattagttagcccggccgtgcatgcatgggggtgggtgcttcctctttgatctccagttttggctgtttggtcttctctttttctgcgtttggttgtgcaggcgcatgtgctgtgtactaaagaattaacagatggatcagcgtatgattactacaaaaaaaaaaaaaaaa

SEQ ID NO: 4708 - protein, 117 aa, Zea mays
  misc_feature: Ceres CLONE ID no. 985483
  misc_feature: Ceres CDNA ID no. 25087710
  misc_feature (13)..(81): Pfam Name: Auxin_inducible PFAM Desc: Auxin responsive protein
  misc_feature: Homolog of GI Number: 2995951 NR Desc: auxin
  misc_feature: Homolog of GI Number: 28950689 NR Desc: At2g46690
  misc_feature: Homolog of GI Number: 38603994 NR Desc: At5g53590
  misc_feature: Homolog of GI Number: 38346069 NR Desc: OSJNBa0084K01.9
  misc_feature: Homolog of GI Number: 37535964 NR Desc: putative indole
  misc_feature: Homolog of GI Number: 50911152 NR Desc: auxin
  misc_feature: Homolog of GI Number: 28393887 NR Desc: putative auxin
MLHAEEKKGKVKRGWLAVRVGAAEGDGGSQRFVIPIAHLYHPLFRRLLEAARDAYGYDYSAGPLRLPCSANEFLRLRALVERETPPHAAPAPASSHRVHEGGHYSTLSPCTRAKVTS

SEQ ID NO: 4709 - DNA, 799 bp, Zea mays
  misc_feature: Ceres CLONE ID no. 985503
  misc_feature: Ceres CDNA ID no. 40041377
  CDS (101)..(517): REFERENCED BY SEQ ID NO: 4710
atcacagtacgcacgcacgcacacaccagcccagcagcagaagcgcccctcggccctcgctcccacaacaagctcaagccagccttctctctctgctccaatggcgcgcttccagctcgcagccgtggccatggccatgctcttcgccgcggcggcggcgcaggccccgaccgccaccccgacgccggctcccaaggcgtcccccccgccggcgacgccgccgccgacccccgcgccggtgtctccgcccgtgccgcccccgaccatgcctcctccggcgcccgcgcccgcccccaaggccccggccccggcgcccgaggcccccaccccggcgcccacggccgaggctcccactcccgacgtgagctccccgccgatgcccacggagggccccgctccgacgccctccgcggaggctcccccagcccccagcgccgccgtcgccggcgcctccccctccgccaagtggttcgccgccgccgcagccgtggccgccgccgccgccgccttctactgagagagcgggagatctgcgccgtcccctgctgtaatttatcgctatccgtgctgagccgttgattccttttttttttttttgttgttcttccctttcatccatattccattcggcattcgattcagtaggactggcatatctgttcgtgttactacagtgtaggatcgtggcttggacagattggtttggctggctggctggttgggtgggcccggtggtgttgtggcttccgttcctccatctgtataataccctgttgattttccaaaaaaaaaaaaaaaa

SEQ ID NO: 4710 - protein, 128 aa, Zea mays
  misc_feature: Ceres CLONE ID no. 985503
  misc_feature: Ceres CDNA ID no. 40041377
  misc_feature: Homolog of GI Number: 488731 NR Desc: chitinase
  misc_feature: Homolog of GI Number: 50924618 NR Desc: OSJNBa0086B14.8
  misc_feature: Homolog of GI Number: 6523547 NR Desc: hydroxyproline
  misc_feature: Homolog of GI Number: 30140331 NR Desc: putative arabinagalactan protein
  misc_feature: Homolog of GI Number: 76262498 NR Desc: pherophorin
  misc_feature: Homolog of GI Number: 71676055 NR Desc: Allergen V5/Tpx
  misc_feature: Homolog of GI Number: 10945166 NR Desc: TapA protein
MAMLFAAAAAQAPTATPTPAPKASPPPATPPPTPAPVSPPVPPPTMPPPAPAPAPKAPAPAPEAPTPAPTAEAPTPDVSSPPMPTEGPAPTPSAEAPPAPSAAVAGASPSAKWFAAAAAVAAAAAAFY

SEQ ID NO: 4711 - DNA, 1145 bp, Zea mays
  misc_feature: Ceres CLONE ID no. 985538
  misc_feature: Ceres CDNA ID no. 25446456
  CDS (408)..(896): REFERENCED BY SEQ ID NO: 4712
accggttttcacgcctccgaaggccgggcaggcaggctgcacccgcgaagacgcggagcctccactccccgtctcgcttcctcctctggatctagccgacgccgccctcaccctgtcacccaccgacgtcgccgtcgccgtcgccgtcgccacctatatcacccaccgcctctgaagaagaagacgcggatccgagggtagttaactgctgaggaagaagagccggtacggagaagacgcggagcagtacgtctccgatctggatgttggtaaggttcatcctgatttgaacggcaagctcactgataacgagttcctgggaggaggaagctagacgatttctgttagaggaggaagaagaggatgatgaactcttcttagtacttgtccctgctattctctcggccatgcaagaagagaaaagagccatagtagcatctgctgttgaaccggtgcaacatgtaccaagagcgggcagcgagatcaatgttgctgggccaagtgtgggcagtgagactaatgttgatggactaatgttggatcaagaggcttgtgaagttcagtctccaccttctgttacgtcagtatatagaagtgggaaaaagcggaagaaaagtcaagttgcaagtgttctggatgactatttggagcacaagaagaagcaaacacagaagattatggaggtgttacttgagaagaagagtcgtgaagaggagtactctatcgagaggtgtctcgacacagttgatgctatggaggagttgacggatgaggagaaggcccttgcagcagaggtgttcaagaatgaattgaatcgggagatgtttgtgatgcaaaaaaatgtaaacgtgcgactgatttggcttcggaggaagataaggattgcatgtacctgagagatggacaatgtgcggctgatggttctgtgcaaacataggtatgcctcatttcagtaggtatggctctgttacagctgttctgtattcttaataataactgatggcatatgtgttggccttgtttaaccataccagatataccttgctctccatctatagtatttatctacttgatgttgtcgcctttgctctccaagtactatttgattctatgtaaaagacagttaatgaaaaaaaaaaaaaaaa

SEQ ID NO: 4712 - protein, 162 aa, Zea mays
  misc_feature: Ceres CLONE ID no. 985538
  misc_feature: Ceres CDNA ID no. 25446456
  misc_feature: Homolog of GI Number: 50924980 NR Desc: OSJNBa0089K21.9
  misc_feature: Homolog of GI Number: 50924854 NR Desc: B1358B12.21
MQEEKRAIVASAVEPVQHVPRAGSEINVAGPSVGSETNVDGLMLDQEACEVQSPPSVTSVYRSGKKRKKSQVASVLDDYLEHKKKQTQKIMEVLLEKKSREEEYSIERCLDTVDAMEELTDEEKALAAEVFKNELNREMFVMQKNVNVRLIWLRRKIRIACT

SEQ ID NO: 4713 - DNA, 817 bp, Zea mays
  misc_feature: Ceres CLONE ID no. 985563
  misc_feature: Ceres CDNA ID no. 36695512
  CDS (192)..(659): REFERENCED BY SEQ ID NO: 4714
gtccaaatttcagttcgagaagactccatcaagcagctcatacgtatatcacttgccatgccagcctagcttcttccgtgtctttctttctcaataaatacatgccactcacatggtgctcctccatcttccaagtcaccaacgcaaattgcaccaagaaatccatcgagaggccgtcgacaggggaattaatggcgtcgtcgtctagcagcagccaccgccgcctcatcctcgcagccgccgtcctgctctccgtgctcgcggctgccagcgccagcgccgggacctcctgcgtgccggggtgggccatcccgcacaacccgctcccgagctgccgctggtacgtgaccagccggacctgcggcatcgggccgcgcctcccgtggccggagctgaagaggagatgctgccgggagctggcggacatcccggcgtactgccggtgcacggcgctgagcatcctcatggacggcgcgatcccgccgggcccggacgcgcagctggagggccgcctagaggacctgccgggctgcccgcgggaggtgcagaggggattcgccgccaccctcgtcacggaggccgagtgcaacctggccaccatcagcggcgtcgccgaatgcccctggattctcggcggcggaacgatgccctccaagtaactgcgaagagcatagtgcatgaggaatgagcttgtagctagctcatatgtctgaataataagcacagcaagaagatgaatgcatttctcggatcgttcatccggaacaataattaaaggggatccggatttgttcttgtgataaaaaaaaaaaaaaaa

SEQ ID NO: 4714 - protein, 185 aa, Zea mays
  misc_feature: Ceres CLONE ID no. 985563
  misc_feature: Ceres CDNA ID no. 36695512
  misc_feature (64)..(173): Pfam Name: Tryp_alpha_amyl PFAM Desc: Protease inhibitor/seed storage/LTP family
  misc_feature: Homolog of GI Number: 16305146 NR Desc: Hageman factor inhibitor
  misc_feature: Homolog of GI Number: 22327 NR Desc: corn Hageman factor inhibitor
  misc_feature: Homolog of GI Number: 75994199 NR Desc: hageman factor inhibitor
  misc_feature: Homolog of GI Number: 75994217 NR Desc: hageman factor inhibitor
  misc_feature: Homolog of GI Number: 75994187 NR Desc: hageman factor inhibitor
  misc_feature: Homolog of GI Number: 75994195 NR Desc: hageman factor inhibitor
  misc_feature: Homolog of GI Number: 75994185 NR Desc: hageman factor inhibitor
  misc_feature: Homolog of GI Number: 75994209 NR Desc: hageman factor inhibitor
  misc_feature: Homolog of GI Number: 75994181 NR Desc: hageman factor inhibitor
  misc_feature: Homolog of GI Number: 75994201 NR Desc: hageman factor inhibitor
MPLTWCSSIFQVTNANCTKKSIERPSTGELMASSSSSSHRRLILAAAVLLSVLAAASASAGTSCVPGWAIPHNPLPSCRWYVTSRTCGIGPRLPWPELKRRCCRELADIPAYCRCTALSILMDGAIPPGPDAQLEGRLEDLPGCPREVQRGFAATLVTEAECNLATISGVAECPWILGGGTMPSK

SEQ ID NO: 4715 - DNA, 931 bp, Zea mays
  misc_feature: Ceres CLONE ID no. 985666
  misc_feature: Ceres CDNA ID no. 36707045
  CDS (150)..(611): REFERENCED BY SEQ ID NO: 4716
gttggatcgtaactaacgctagagaagcactccgaagacctgctctccttcgttctgtttgttgtttttcttctcccgtccgcagtccgcttggcgtgcgcgacggctagggcgaccgccgccgccctacgccctacgtccagctgcccatgtcttcttcgggccccttgccggcgggaactcaccagaccaggaatcgtgctggcaaccggcgcaagtctggagatagggctgataaagctaattactcctacaataatgatggagagaagagcaatgttccttcattaaagaaccttcctccaattgttcatcatgaaacattcttcagcaatgttcagaatgactacaatcaaacaggattagtgcctttggagggatgttctgccagtgaggcttcacagcttctcagtgatcgctggactgctgcaatcaacatgtacaatgaccaaacaattgacccctcagagaaaccggtaatgtattctggatctagcagctcatcatggggtcacctgaagcttcctcatcagatgaacttcctcgaggagttgcgccgtgcagtggacgctcatacagaatttgcgtcgcctgtcgtcacctggaactaatcgaagcaggctgttcgccaggtctatgtatgatgtatcccatacacggatgatgtgccaaaagactttcgtctgacctgcagctgcttctggaatctgcatctgtacaattgtaccattgttacccctggccttgtagctgcaaagcagtttgttgtaacaattaaatgaggcgccggatcctcacgccatcgaaagtttgaaacagcttggttgttgtatggtagttccaagacttggtgattataatgtgcgcattttctcgacctggagttttagaatatgtagaaggtaatgcttattgaaaaaaaaaaaaaaaa

SEQ ID NO: 4716 - protein, 153 aa, Zea mays
  misc_feature: Ceres CLONE ID no. 985666
  misc_feature: Ceres CDNA ID no. 36707045
  misc_feature: Homolog of GI Number: 51964154 NR Desc: PREDICTED OSJNBa0030C08.45 gene product
  misc_feature: Homolog of GI Number: 21360368 NR Desc: iron
MSSSGPLPAGTHQTRNRAGNRRKSGDRADKANYSYNNDGEKSNVPSLKNLPPIVHHETFFSNVQNDYNQTGLVPLEGCSASEASQLLSDRWTAAINMYNDQTIDPSEKPVMYSGSSSSSWGHLKLPHQMNFLEELRRAVDAHTEFASPVVTWN

SEQ ID NO: 4717 - DNA, 1243 bp, Zea mays
  misc_feature: Ceres CLONE ID no. 985745
  misc_feature: Ceres CDNA ID no. 35383316
  CDS (127)..(1020): REFERENCED BY SEQ ID NO: 4718
gaaacgaggtaaagggtcaaaaaaggcatatgtgcatgaatacaacatgtagtgcgaacatatagaccatgtgcttactccactctctcgtcacggcctcacactgcagaggcttggacggacgggatggacatggcgcggtacgagtcatgctaccggcactggatcgccgggcaggaggcaggcctcgccgagctcgaggcggcgtcggccaatgccgccgcgggccgggcaacggacgccgagctgcggaccgtggtggagcggtgcatgctcgggtaccaggactacgccacccgcaggcgcgcgctgtcgcgggaggacggcgtcgccttcttcgccccgccctggtgcaccgccttcgagaactccgtgctctggctcgggggctgccgcccttcgctcaccgtccgcctgctctacaacctctccggggagggcctggaggcgcaggtggaggagctgctcggcggcctcagcaacggcgtcatcccgaccggggccctggggatcacgtccgctcagctggtgctcatcaacgacctccacagccggacggtgcaccaggagaacgccctgtcggaccggctcgccaccctgcaggaggacatcgccgaccgcccgctcctgcccatcgtgcggcagcgcgagctcgctgccgcggcacggttgggagctgcagctgctgccagcggaagctgcgacggcgcggcgcggcggcggctcagggcggcccggctaggagccgcggacgccgaggtggacgcggcgctggacagctacaaggccgcgctgtcgcggctgctggtggaggccgacgagctgaggatggcgacggcgcgggcgctggcgacggagatcctgacgcctcggcaagcggtggagatgctggcggcaggcaagcacctgcacctctccgtccgcgactggagccgccgtagggaagcagcagctggcgcacagcaacagcttggcgggcagagcgccggaacggacaacaccgtccgcccgagcacatgaaaggcttgccattcctcgcccttgcctgcagctagttagtagcatcccgtgtgtagcttggacaccacacaacctctctagtacccgcctgtctttctatatagaccgatcgatcaccatgtgcatggcgtccattaatatgtacaaagttggtgcttggtgtttttgttcctaagaacctaaattaaataccgcagtgcttgcatgaaaaaaaaaaaaaaaa

SEQ ID NO: 4718 - protein, 295 aa, Zea mays
  misc_feature: Ceres CLONE ID no. 985745
  misc_feature: Ceres CDNA ID no. 35383316
  misc_feature: Homolog of GI Number: 9758930 NR Desc: tumor
  misc_feature: Homolog of GI Number: 688423 NR Desc: tumor
  misc_feature: Homolog of GI Number: 66776365 NR Desc: PE
  misc_feature: Homolog of GI Number: 66780032 NR Desc: Negative regulator of class I heat shock protein
  misc_feature: Homolog of GI Number: 66776103 NR Desc: LigA
  misc_feature: Homolog of GI Number: 66780099 NR Desc: PE
  misc_feature: Homolog of GI Number: 67984658 NR Desc: type II secretion system protein E
  misc_feature: Homolog of GI Number: 66776664 NR Desc: Sigma
  misc_feature: Homolog of GI Number: 66778264 NR Desc: LigA
  misc_feature: Homolog of GI Number: 66779191 NR Desc: LigA
MARYESCYRHWIAGQEAGLAELEAASANAAAGRATDAELRTVVERCMLGYQDYATRRRALSREDGVAFFAPPWCTAFENSVLWLGGCRPSLTVRLLYNLSGEGLEAQVEELLGGLSNGVIPTGALGITSAQLVLINDLHSRTVHQENALSDRLATLQEDIADRPLLPIVRQRELAAAARLGAAAAASGSCDGAARRRLRAARLGAADAEVDAALDSYKAALSRLLVEADELRMATARALATEILTPRQAVEMLAAGKHLHLSVRDWSRRREAAAGAQQQLGGQSAGTDNTVRPST

SEQ ID NO: 4719 - DNA, 769 bp, Zea mays
  misc_feature: Ceres CLONE ID no. 986007
  misc_feature: Ceres CDNA ID no. 36707427
  CDS (104)..(556): REFERENCED BY SEQ ID NO: 4720
cttctgaagtttcggcggcggcgtaggtagcggcggtgtgcttgtgatctcaatctcaaccccaggcgagctcggctccggtcacccgtcgatccacgcaaccatgtcgaggaagaagaccagggagcccaaggaggagaacgttacccttggacccactgtccgtgaaggagagtttgtctttggtgttgctcacatctttgcatccttcaatgacaccttcattcatgtcactgatttgtctgggagggaaactttggttcggatcactggtggcatgaaggttaaggctgatcgtgatgagtcgtctccttatgctgctatgcttgctgcccaagatgttgcacagcgttgcaagaagctcggtatcacagcgctgcacattaagcttcgtgccactggaggcaacaagaccaagacccctggacctggtgctcagtctgctctcagggctcttgctcgttctgggatgaaaattggacgcattgaggatgttaccccggttcccactgacagcactcgcagaaagggtggtaggaggggaaggaggctgtaggcgtgtatccttgctatttgccatcactttgcactggtctctgagtagttctgctatttattagcttgccaaaaggagctttaattttgctcatttcgctctatgtcgaggatcatttattgttagccgaatctatgatgtgcattgataatgttttggttatggaattgacaattatgcttaaaaatgcattttccaaaaaaaaaaaaaaaa

SEQ ID NO: 4720 - protein, 150 aa, Zea mays
  misc_feature: Ceres CLONE ID no. 986007
  misc_feature: Ceres CDNA ID no. 36707427
  misc_feature: The plant is abnormally large.
  misc_feature: Useful for making plants with modulated biomass
  misc_feature (28)..(146): Pfam Name: Ribosomal_S11 PFAM Desc: Ribosomal protein S11
  misc_feature: Homolog of GI Number: 50905421 NR Desc: putative ribosomal protein S14
  misc_feature: Homolog of GI Number: 50924099 NR Desc: OJ000126_13.9
  misc_feature: Homolog of GI Number: 131772 NR Desc: 40S ribosomal protein S14
  misc_feature: Homolog of GI Number: 28436071 NR Desc: cytoplasmic ribosomal protein S14
  misc_feature: Homolog of GI Number: 77745450 NR Desc: ribosomal protein S14
  misc_feature: Homolog of GI Number: 131773 NR Desc: 40S ribosomal protein S14
  misc_feature: Homolog of GI Number: 21618105 NR Desc: putative ribosomal protein S14
  misc_feature: Homolog of GI Number: 21595448 NR Desc: putative 40S ribosomal protein S14
  misc_feature: Homolog of GI Number: 21593698 NR Desc: 40S ribosomal protein S14
  misc_feature: Homolog of GI Number: 2565340 NR Desc: ribosomal protein S14
MSRKKTREPKEENVTLGPTVREGEFVFGVAHIFASFNDTFIHVTDLSGRETLVRITGGMKVKADRDESSPYAAMLAAQDVAQRCKKLGITALHIKLRATGGNKTKTPGPGAQSALRALARSGMKIGRIEDVTPVPTDSTRRKGGRRGRRL

SEQ ID NO: 4721 - DNA, 1067 bp, Zea mays
  misc_feature: Ceres CLONE ID no. 986590
  misc_feature: Ceres CDNA ID no. 25446457
  CDS (243)..(701): REFERENCED BY SEQ ID NO: 4722
agcgagcacgatttctcctctctctgtgagtgtgttttttttttacgtgctctcttgtctgcggccaacatacagctaactggcgagccgtggacgctcggccagctctgctggccgactaaggagggcgtcgtgggcctcaccgccggcgagtgcgtccctgcgggtgggcacactgccgtcggttgtccagcacagctacaagttgaggagctctgcagtaaaggaagtgtgtagtcaccatggtccatttcaagaataggtatatggtggtggagatctttatagatgcaggtagaggtgaacaggaccctataatcctcacccaatttaatataacaaaagttataaaagacagcattcagctcaactttggtgagtgtggcctagctggatctcttggatcattgcaagttaagtatgtcaatcctgtaacgaagctctgcattgtccgcgtgtctcgcgaagaccaccagaaagtttgggctgctatgacgatggtgcggtgcattgggaagatccccgtttcgttcaacttgctcgacatgagtggaagcatcagggcttgcaagaaagctgcattggagtgcgatgaagcgaaatttgagcaatacaagctggttgcaggtgattgtatcacggcagagatcacccagtctgtagagaagtgctttgagaagatcagaggactagagagctaagcagaagaattgacatcatgtccacccacactcggatcctaaaacctgctgaccctgcaccacatccgtgatcacgtcacaccacaagttgtgtgtccagcgcccaccacagcaacggcctcttgctgccagcagcctccgtgcctccagcagctctcctctccaaggaaaagtctgaagtccgcaaccaaacaagtgttctgcagctgctctttgccgttggttgaagtctgcaaccaaacaagtgttatgcagctgctctttgccgttggttggagttcttggctccacactttcagaaagaattcatgtatacataaaatttattatatagagagtttgcttcgtataaaaaaaaaaaaaaaa

SEQ ID NO: 4722 - protein, 152 aa, Zea mays
  misc_feature: Ceres CLONE ID no. 986590
  misc_feature: Ceres CDNA ID no. 25446457
  misc_feature (7)..(116): Pfam Name: RNase_P_Rpp14 PFAM Desc: Rpp14 family
  misc_feature: Homolog of GI Number: 38343977 NR Desc: OSJNBa0041M21.1
  misc_feature: Homolog of GI Number: 50922603 NR Desc: OSJNBb0068N06.26
  misc_feature: Homolog of GI Number: 53850511 NR Desc: At1g04635
  misc_feature: Homolog of GI Number: 19075979 NR Desc: putative pre
  misc_feature: Homolog of GI Number: 20270249 NR Desc: processing of precursor 5
  misc_feature: Homolog of GI Number: 72057243 NR Desc:  similar to processing of precursor 5
  misc_feature: Useful for making plants that grow better in shade
  misc_feature: Useful for making plants with increased biomass
MVHFKNRYMVVEIFIDAGRGEQDPIILTQFNITKVIKDSIQLNFGECGLAGSLGSLQVKYVNPVTKLCIVRVSREDHQKVWAAMTMVRCIGKIPVSFNLLDMSGSIRACKKAALECDEAKFEQYKLVAGDCITAEITQSVEKCFEKIRGLES

SEQ ID NO: 4723 - DNA, 809 bp, Zea mays
  misc_feature: Ceres CLONE ID no. 986597
  misc_feature: Ceres CDNA ID no. 25445493
  CDS (186)..(566): REFERENCED BY SEQ ID NO: 4724
gaaaggctcgcgtatgccttccccctcctccacctttttcccccgttcgagtgctcgagctccgaccaaatctcgcagcggtagcaatccccgagcggccgagcccgaagcgggatcagtggaggacgagtggacgacaccctcgattctgacctgcggtcggcgcgacttacagagaaccggagatgcagcagggcgacagcacggaggcgcaggtgacgtgggaggaccagcagaacatcaaccgcttcggtcgcctcaacaaccgcctccacgagctccaggacgagatcaaactcgcgaaggaaacgaacgagaaccttgacgatgctgggaacgaactcatcctgtcggacgaagatgtcgtgcgcttccagatcggggaggtgtttgctcacatgccgagggacgacgtcgagactaggctggagcagatgaaagaggatgcggctaagaagctggagaggctagaggaggagaaggaatccgtcctcgcccagatggccgagctgaagaagatactgtacgggaagttcaaggacgccatcaacctggaggaagattaagagtagtactggagttgtgacgacgtggccctctctttctagttcaggtcctgtttttgttcccctgctccccccacagaagcgcttggcccgctcgtgtaatggaagcttgagtctctcagtctttcagaagctcttttcaccaagaacccagaatagttttcattctgcgggtttatacggattgaagctaatggcgctgggcccatgaatcctttttcagtttgaaaaaaaaaaaaaaaa

SEQ ID NO: 4724 - protein, 126 aa, Zea mays
  misc_feature: Ceres CLONE ID no. 986597
  misc_feature: Ceres CDNA ID no. 25445493
  misc_feature (16)..(120): Pfam Name: KE2 PFAM Desc: KE2 family protein
  misc_feature: Homolog of GI Number: 13446646 NR Desc: VIP3 protein
  misc_feature: Homolog of GI Number: 13446644 NR Desc: VIP3 protein
  misc_feature: Homolog of GI Number: 6996146 NR Desc: VIP3 protein
  misc_feature: Homolog of GI Number: 28466891 NR Desc: At1g08780
  misc_feature: Homolog of GI Number: 9802572 NR Desc: F22O13.27
  misc_feature: Homolog of GI Number: 21554096 NR Desc: probable prefoldin subunit 4
  misc_feature: Homolog of GI Number: 45198557 NR Desc: AFR039Cp
  misc_feature: Homolog of GI Number: 62660893 NR Desc:  similar to prefoldin 4
  misc_feature: Homolog of GI Number: 48103768 NR Desc: similar to CG8378
MQQGDSTEAQVTWEDQQNINRFGRLNNRLHELQDEIKLAKETNENLDDAGNELILSDEDVVRFQIGEVFAHMPRDDVETRLEQMKEDAAKKLERLEEEKESVLAQMAELKKILYGKFKDAINLEED

SEQ ID NO: 4725 - DNA, 813 bp, Zea mays
  misc_feature: Ceres CLONE ID no. 986724
  misc_feature: Ceres CDNA ID no. 40351512
  CDS (145)..(552): REFERENCED BY SEQ ID NO: 4726
ttccccatctccggataaaagataaggagtgtctctctctctcttagatagtcttttgaatccatctctagggctcttgtttctccccaccccaccccacaccaaacacaagtccccttgttcaatccgacaagacaagcatccatgtcgtcgtcacgccggtgctcgagccccgacagcaacgacacgacggacgagcgcaagcgcaagcggatgctgtccaacagggagtcggcgcggcggtcgcgcgcgcggaagcagcagcggctggaggagctggtggcggaggtggcccgcctgcaggcggagaacgcggcgacgcaggcccgcaccgcggcgctggagcgcgacctgggcagggtggacggcgacaacgcggtgctgcgcgcccgccacgccgagctggccggccgcctgcagtcgctgggcggcgtcctcgaggtgctccagatggccggcgccgccgtcgacatcccggagatggtcaccgacgaccccatgctccgcccctggcagccgtccttccccccgatgcagcccatcgggttctgagaatctgagcctcagccggcgggagagagccaatttctgtcgtcgtgccgctgtctatctcgtattggtatatctattcataaatcatcgttgtcatggtttgctcttcttgtcagtgttataaatttgcttcttgttagtgttataaatttggccatcggaaaggatgtgtttgtagttgtaatatcttgtttggagttgtaatatcttatcttgcttatgaattcgaatatgcctatatatacaaaaaaaaaaaaaaaa

SEQ ID NO: 4726 - protein, 135 aa, Zea mays
  misc_feature: Ceres CLONE ID no. 986724
  misc_feature: Ceres CDNA ID no. 40351512
  misc_feature (15)..(69): Pfam Name: bZIP_2 PFAM Desc: Basic region leucine zipper
MSSSRRCSSPDSNDTTDERKRKRMLSNRESARRSRARKQQRLEELVAEVARLQAENAATQARTAALERDLGRVDGDNAVLRARHAELAGRLQSLGGVLEVLQMAGAAVDIPEMVTDDPMLRPWQPSFPPMQPIGF

SEQ ID NO: 4727 - DNA, 626 bp, Zea mays
  misc_feature: Ceres CLONE ID no. 986751
  misc_feature: Ceres CDNA ID no. 25446458
  CDS (123)..(332): REFERENCED BY SEQ ID NO: 4728
actggtcctacactctccctaccacaccgaaccaaacacaaccacaaggagcaagaggtagacagagctgctcgctgagagtgtgctgtgctttgctcatcgaccgaccgatcgatctcggcatggcggactgggggccagtgctgatcgggctggtgctcttcatcctgctctccccgggcctgctcttccagatccccggcaagggccggatcatcgagttcggcaacttccagaccagcggcctctccatcctcatccacgccgtcatctacttcgccctcctcgccatcttcctcctcgccgtcggcgtccacatttacctcggctagctcgtcgccggcgggctgagcgaggctagctgctggcgcgcgttggcccggcccggcctggctttatttgacatcaatctgggtggctggattaggtactgcgtggtgcggaggcatatactactatatatatacatttacatgttcatctccatctgcttgctagctgtatgttgatttatttagctactactttatcaacgacatcctcgagtccagatacagtatatccaattaatcccttatgagcatgcttctgatagatggccattaataataaaaaaaaaaaaaaaa

SEQ ID NO: 4728 - protein, 69 aa, Zea mays
  misc_feature: Ceres CLONE ID no. 986751
  misc_feature: Ceres CDNA ID no. 25446458
  misc_feature: Homolog of GI Number: 50923841 NR Desc: OSJNBa0044M19.15
  misc_feature: Homolog of GI Number: 50904308 NR Desc: P0592G05.7
MADWGPVLIGLVLFILLSPGLLFQIPGKGRIIEFGNFQTSGLSILIHAVIYFALLAIFLLAVGVHIYLG

SEQ ID NO: 4729 - DNA, 1013 bp, Zea mays
  misc_feature: Ceres CLONE ID no. 986854
  misc_feature: Ceres CDNA ID no. 25446459
  CDS (65)..(466): REFERENCED BY SEQ ID NO: 4730
acgaaaagtcagttcgttccctcctctgtgtaccggccagtaaaatccgaacccacagcgagaaatggcggcggcagcgctccgtccggcgatcctccgccgcatccgcctctccccctccccttcgctcgccctcgccgccgctgggacaggtgcatcccacccgcacgcgctggggcggtggctcgcgcggcccatgtcctcccacgacgcgcacctcacccgcgacgaagtcatcgaccggatcctcgacgtcatcaagagccaccccaagatcgacccctccaaggtgaccccggaggcgcacttcgagaaggatctcgggctcgacagcctggacaccgtcgaggtggtcatggccatcgaggaggagttcaagctcgagatcccagacatggaggctgacaagatcgactcactccctctggccatcgagtacgtcgccaaccaccccatggctggctgagcctctgctcgcccgagaggaggcgagttgaggtgaggcttcgcttggttttgtttccgagggcaaataatctgctggagtggcacagaaaaacttgttcttggtgctctgcattgcttcacggtgacggatgatgatgtcgaaatggaacattaacattttcagcgttagattgttgtttttgtgtgcgtgttatatctatatatactggttgacaaactagtttggttgattgagtctgatcgttgttgggttatttgaattgggtttgtgatagtttcccatgatattttatctgttttccatgtgcttttgggaacctaaattgataagaacggcttacaaggattgatgtaggttaaaagtctcagggttcatgacagctgttagtgtggcctcttgttgtccaactcttgttcctgttaatgaggcttgagtctgttttatttgtcaacattatggttttgttggttggaagtattccacctattgcatgagaagagatcaaaggaaagtgtggcctcttgttctaaaaaaaaaaaaaaaa

SEQ ID NO: 4730 - protein, 133 aa, Zea mays
  misc_feature: Ceres CLONE ID no. 986854
  misc_feature: Ceres CDNA ID no. 25446459
  misc_feature (59)..(126): Pfam Name: PP PFAM Desc: Phosphopantetheine attachment site
  misc_feature: Homolog of GI Number: 34900336 NR Desc: putative acyl carrier protein
  misc_feature: Homolog of GI Number: 3341682 NR Desc: acyl carrier protein
  misc_feature: Homolog of GI Number: 16974477 NR Desc: At2g44620/F16B22.11
  misc_feature: Homolog of GI Number: 21553376 NR Desc: acyl carrier protein
  misc_feature: Homolog of GI Number: 3335337 NR Desc: Similar to acyl carrier protein (ACP) NADH-ubiquinone oxidoreductase 9.6 KD subunit (MYACP-1)
  misc_feature: Homolog of GI Number: 53801502 NR Desc: mitochondrial acyl carrier protein
  misc_feature: Homolog of GI Number: 70799934 NR Desc: acyl carrier protein
  misc_feature: Homolog of GI Number: 70879980 NR Desc: acyl carrier protein
  misc_feature: Homolog of GI Number: 34485510 NR Desc: acyl carrier protein 1
MAAAALRPAILRRIRLSPSPSLALAAAGTGASHPHALGRWLARPMSSHDAHLTRDEVIDRILDVIKSHPKIDPSKVTPEAHFEKDLGLDSLDTVEVVMAIEEEFKLEIPDMEADKIDSLPLAIEYVANHPMAG

SEQ ID NO: 4731 - DNA, 1411 bp, Zea mays
  misc_feature: Ceres CLONE ID no. 987378
  misc_feature: Ceres CDNA ID no. 40041378
  CDS (1)..(1323): REFERENCED BY SEQ ID NO: 4732
aattgcaagcagcacaagctagtctccaagatgcaccgctccttcctcctcgtctgtgcactcgtagccaccgcgctttccaccgacaccaccgttgccgccgcccagagccagagccagagccagagccagaggtcatgggccgaactcagcgggcgggacaactgggacgggctcctggacccgctcgacggcgacctccggcgcgccgtcatccggtacggggagctggcgcaggcgacgtcggacgcgttcatcggcgacccggcgtcgccgtacgcgggcgcgtcgcggtacgcccccggcgcgttcctccgcagggcgcaggcgcccgacccggacgcgtacaacgtgacgaggttcctgtacgcgacgtcgagcgcgcgcgtccccggccagttcatcacgcggccggcgccgccgggggcgtggagcgccgagtccaactggatggggtacgtcgccgtggccacggacgccggcgtcgcgaggctggggaggcgggacatcgtggtggcgtggcgcgggaccaagcgcgccgtggagtgggccaacgacctggacatcacgctggtgccggcggcgggcgtcgtcgggcctggccccgggtggtcgcagccggcggtgcaccggggtttcttgtccgtgtacgcgtcgaggaactccacgtcgcggttcaacaagcaaagcgccagagagcaggtgttggccgagattagaaggctattggacgcgtacaagggcgagaactgcagcatcacgctaaccggccacagcctgggcgcggcgctctccacgctcaccgccatcgacatcgtcgccaacggcctcaacgtccggggccccaacaacgacacggtccccgtcgccgccatcgtcttcggcagcccccgcgtgggcgacgaccagttcaagaaggcgttcgactcgacgcccggcgcccggctgctccgggtccggaacgcgcccgacgtcgtgcccaccgtcctgcccaacgccttctacaaggatgtcggcgtggagctgctgctggacacgcgcaagtcgccgcacctcaagaggcccggcccgggccccgccgcctggcacaacctcgagtgctacctgcacggcgtcgccggcacgcagggcgccggcgacgccgccgggttcagcctggaggtggaccgcgacgtcgcgctggtgaacaaggaggtggacgcgctcagcgacgactaccccgtgccggcggcctggtgggtggaggggaacaagggcatgaccagggacgccagcggacgctgggttttgcaggatcatgaggagggtaacctcgctatgtgatgattttgataacttcattaaaggtggttattaacgaattaataatacgaaagcaagagttttctcgacaagaaaaaaaaaaaaaaaa

SEQ ID NO: 4732 - protein, 430 aa, Zea mays
  misc_feature: Ceres CLONE ID no. 987378
  misc_feature: Ceres CDNA ID no. 40041378
  misc_feature (161)..(324): Pfam Name: Lipase_3 PFAM Desc: Lipase
  misc_feature: Homolog of GI Number: 34911842 NR Desc: lipase
  misc_feature: Homolog of GI Number: 34911870 NR Desc: lipase
  misc_feature: Homolog of GI Number: 50932765 NR Desc: putative lipase
  misc_feature: Homolog of GI Number: 34911830 NR Desc: lipase
  misc_feature: Homolog of GI Number: 50932763 NR Desc: putative lipase
  misc_feature: Homolog of GI Number: 34911832 NR Desc: lipase
  misc_feature: Homolog of GI Number: 55297551 NR Desc: lipase
  misc_feature: Homolog of GI Number: 7268648 NR Desc: lipase
  misc_feature: Homolog of GI Number: 15221426 NR Desc: lipase class 3 family protein
  misc_feature: Homolog of GI Number: 21537306 NR Desc: lipase
MHRSFLLVCALVATALSTDTTVAAAQSQSQSQSQRSWAELSGRDNWDGLLDPLDGDLRRAVIRYGELAQATSDAFIGDPASPYAGASRYAPGAFLRRAQAPDPDAYNVTRFLYATSSARVPGQFITRPAPPGAWSAESNWMGYVAVATDAGVARLGRRDIVVAWRGTKRAVEWANDLDITLVPAAGVVGPGPGWSQPAVHRGFLSVYASRNSTSRFNKQSAREQVLAEIRRLLDAYKGENCSITLTGHSLGAALSTLTAIDIVANGLNVRGPNNDTVPVAAIVFGSPRVGDDQFKKAFDSTPGARLLRVRNAPDVVPTVLPNAFYKDVGVELLLDTRKSPHLKRPGPGPAAWHNLECYLHGVAGTQGAGDAAGFSLEVDRDVALVNKEVDALSDDYPVPAAWWVEGNKGMTRDASGRWVLQDHEEGNLAM

SEQ ID NO: 4733 - DNA, 1137 bp, Zea mays
  misc_feature: Ceres CLONE ID no. 987581
  misc_feature: Ceres CDNA ID no. 36698310
  CDS (193)..(954): REFERENCED BY SEQ ID NO: 4734
atatataaaaaaagaaagtgatgaattgggatcacatgagaggccacaaacctcaccccacctatattatcccgtgccccttgtctttcttcctccacaagcagcgaaatccaatctagaagcacccctctccctctctctctcttcgccgtccgaagctccgcaccccaatctaatcgacacctcaccgagatgggccgcaagttcttcgtcggtggcaactggaaatgcaatggaaccacagatcaggtcgagaagattgtcaaaaccctgaatgaaggacaggttcccccttcagatgttgtcgaggtcgttgtcagccctccttatgtcttccttcctgtggtcaagagccagctgcgccaagagttccatgttgctgctcagaactgctgggtgaagaagggaggtgctttcactggtgaagtcagtgctgagatgctcgtcaaccttggtgttccctgggtcattcttggacactctgaaaggagagctctgctgggagaatcaaatgaatttgttggagacaaggttgcgtatgccctgtctcagggactaaaggtcattgcatgtgttggtgagacccttgagcagagggaggctgggtctaccatggatgttgttgctgcacaaacaaaagcaattgctgagaagatcaaggactggagcaacgtagttgttgcctatgaaccagtttgggctattggaactggtaaagttgccaccccagctcaggctcaggaagtgcacgcctccctgagggattggctaaagaccaatgccagccctgaggttgctgaatctactaggatcatctacggaggctctgtaactgctgcgaactgcaaagagctagcagcacagcctgatgtcgatggttttcttgtcggtggagcttctttgaagcctgagttcatcgacatcatcaacgcggccaccgtgaagtccgcttaagatgctacgctgaagacgaacatactttttttttgctcaactgtgctatgtaagctagtagcttttgcgcaggagcagagactgttttgcctgcccccaacttctagcttgagcttgctaataatgtttacctctggacgtatcaataatggtgcttatgtatccccaaaaaaaaaaaaaaaa

SEQ ID NO: 4734 - protein, 253 aa, Zea mays
  misc_feature: Ceres CLONE ID no. 987581
  misc_feature: Ceres CDNA ID no. 36698310
  misc_feature (5)..(245): Pfam Name: TIM PFAM Desc: Triosephosphate isomerase
  misc_feature: Homolog of GI Number: 168647 NR Desc: triosephosphate isomerase 1
  misc_feature: Homolog of GI Number: 50900728 NR Desc: putative triosephosphate isomerase
  misc_feature: Homolog of GI Number: 11124572 NR Desc: triosephosphat
  misc_feature: Homolog of GI Number: 407525 NR Desc: triosephosphate isomerase
  misc_feature: Homolog of GI Number: 1785948 NR Desc: cytosolic triosephosphate isomerase
  misc_feature: Homolog of GI Number: 38112662 NR Desc: triose phosphate isomerase cytosolic isoform
  misc_feature: Homolog of GI Number: 77745458 NR Desc: triose phosphate isomerase cytosolic isoform
  misc_feature: Homolog of GI Number: 602590 NR Desc: triosephosphate isomerase
  misc_feature: Homolog of GI Number: 553107 NR Desc: triosephosphate isomerase
  misc_feature: Homolog of GI Number: 556171 NR Desc: triosephosphate isomerase
MGRKFFVGGNWKCNGTTDQVEKIVKTLNEGQVPPSDVVEVVVSPPYVFLPVVKSQLRQEFHVAAQNCWVKKGGAFTGEVSAEMLVNLGVPWVILGHSERRALLGESNEFVGDKVAYALSQGLKVIACVGETLEQREAGSTMDVVAAQTKAIAEKIKDWSNVVVAYEPVWAIGTGKVATPAQAQEVHASLRDWLKTNASPEVAESTRIIYGGSVTAANCKELAAQPDVDGFLVGGASLKPEFIDIINAATVKSA

SEQ ID NO: 4735 - DNA, 679 bp, Zea mays
  misc_feature: Ceres CLONE ID no. 987609
  misc_feature: Ceres CDNA ID no. 40351513
  CDS (213)..(542): REFERENCED BY SEQ ID NO: 4736
ttttttttccattcttggtgacatacctttgtattcgattattctcgtatctacttagttttgttaaaacgcttgattatgtataatggcttatatttttttttgtctggggtgttgaatgtattttctttacagatgaatctagccatgcactggaaatatcccaagcaaatttcgaaccggagaatgaacctcataatgttgacgtgaacatggagcaaccgacagttatgagtagcgccaaggggcaaaagggagctcaaaggagaaacaagaccaaaaaattgaatcaaagaaaaatccttggagatgttgaccttgcgcggcagtctggagtgagaagaagctcaagaatacgctcgaggcctttggagtattggcttggtgaaagattactatatgggccgatacaggacactttgcctgcagttattggcatcaaagcatactctcctggccaggatggcaagaaaacattgaaagtgaaatctttcgtgtctgaacagtattcagatcttgtcgctcaatttgcgaagtactaaacaagacaccatttttctaagaggatcacgccttgtgacttgttgctttgtcacctgactttatgatgttacatgtgttggtggaaccatagtactgcacaatgaaaaggcacacgtcctaccaaaaaaaaaaaaaa

SEQ ID NO: 4736 - protein, 109 aa, Zea mays
  misc_feature: Ceres CLONE ID no. 987609
  misc_feature: Ceres CDNA ID no. 40351513
MEQPTVMSSAKGQKGAQRRNKTKKLNQRKILGDVDLARQSGVRRSSRIRSRPLEYWLGERLLYGPIQDTLPAVIGIKAYSPGQDGKKTLKVKSFVSEQYSDLVAQFAKY

SEQ ID NO: 4737 - DNA, 2037 bp, Zea mays
  misc_feature: Ceres CLONE ID no. 987710
  misc_feature: Ceres CDNA ID no. 29191512
  CDS (165)..(1628): REFERENCED BY SEQ ID NO: 4738
ataattttgggcattaattgcacgtctcctccccacctctccttccctccacccgtgccgtcgcctcgcctatccgatctgccacctcctcccgtctcgcacgttccttcccaactccgcagcgtagcctctccgcggcgcgatccagatccaggtttttcagcatgggcctggtgaaggaaggcatcgacatggaggagggaacccttgagatcggcatggagtacaggactgtatctggtgttgctgggcctctggtcatattggataaagtaaagggcccaaagtaccaagaaattgtaaacatccgacttggagatggcaccaatcgccgtggtcaagtcctggaagttgatggcgaaaaagctgttgtgcaggtctttgaaggaacttctggaatagacaacaaatacacaaccgtgcagtttacaggcgaggttttgaaaactcctgtctcacttgatatgcttgggcgcatttttaatggttctggaaaacctattgacaatggccccccgatattgcccgaagcctacttggatatctctggaagttctattaaccccagtgagagaacctatccagaggagatgatccaaactgggatatccaccattgatgtcatgaattccattgctcgtggacaaaagattccactgttttctgctgctgggctccctcacaatgaaattgctgctcagatttgtcgtcaggctggtcttgtgaagacattggagaaaggaaagcatgctgagggtggtgaagatgacaactttgctattgtgtttgctgctatgggagtgaacatggaaacagctcaattcttcaaacgtgattttgaagagaatggttccatggagcgggtcaccctttttctgaatctggctaacgaccccaccattgaacgtattatcacccctcggattgctctaacaacagcggaatatttggcatatgaatgtgggaagcatgtacttgttatcttgacagatatgagctcttatgcagatgcacttcgtgaggtttctgcagcccgagaagaggtgccaggtaggcgtggttatcctggatatatgtatactgatttggcaacaatatatgagcgtgctgggcgtattgaaggaagaacaggctccattacccagattcctattctaacaatgcctaacgatgatatcacacacccaactcctgaccttactggatacattactgagggacagatatacattgataggcagctccataacagacagatttatccacctattaatgtcctgccatctctttcacgattgatgaagagtgctattggtgagggcatgacacgtcgagaccattcggatgtatctaatcagctttatgccaactatgctattggaaaggatgttcaggccatgaaggctgtcgttggagaggaggcactctcgtctgaggatctgctttacttagagttccttgacaagtttgagaggaagtttgtgacacaaggagcatatgacacacggaacatcttccagtcactcgatcttgcatggacattgcttcggatcttccctcgcgaacttctccaccgtattccagcaaagaccttggaccagtactatagcagagatgcttcccactgaatcactgatcgttgatcagtgttccaatattttggcaagtgcagctttgaataaattgaacagattggcctcgtggccattttcctgtatttatctgtagtcaggtccaattcttttctgttggtgagcgcaagttattcatagatgactcggtcatgggaatatttgtaatattatgtcatgtatcgttaaatttcagttgttttgtttcagctgccagaactgttagcaagagtattctggagctggaagctcgaacgcaactggttgtatctatatccgtgaatgccgaataaaggaggggcaataaactgcagcgaaatatgtgctgtcagacattgttgaacattttctcgattttgctgttttgagatgtgagaaatcttttcactgaaaaaaaaaaaaaaaa

SEQ ID NO: 4738 - protein, 487 aa, Zea mays
  misc_feature: Ceres CLONE ID no. 987710
  misc_feature: Ceres CDNA ID no. 29191512
  misc_feature (146)..(376): Pfam Name: ATP PFAM Desc: ATP synthase alpha/beta family
  misc_feature (24)..(90): Pfam Name: ATP PFAM Desc: ATP synthase alpha/beta family
  misc_feature (393)..(487): Pfam Name: ATP PFAM Desc: ATP synthase alpha/beta chain
  misc_feature: Homolog of GI Number: 11266665 NR Desc: H+
  misc_feature: Homolog of GI Number: 55630310 NR Desc:  ATPase
  misc_feature: Homolog of GI Number: 55596846 NR Desc:  similar to ATPase
  misc_feature: Homolog of GI Number: 57105320 NR Desc:  similar to Vacuolar ATP synthase subunit B
  misc_feature: Homolog of GI Number: 56473213 NR Desc: V
  misc_feature: Homolog of GI Number: 2493129 NR Desc: Vacuolar ATP synthase subunit B isoform 1
  misc_feature: Homolog of GI Number: 166627 NR Desc: nucleotide
  misc_feature: Homolog of GI Number: 7270834 NR Desc: probable H+
  misc_feature: Homolog of GI Number: 34910488 NR Desc: putative H+
  misc_feature: Homolog of GI Number: 167108 NR Desc: vacuolar ATPase B subunit
MGLVKEGIDMEEGTLEIGMEYRTVSGVAGPLVILDKVKGPKYQEIVNIRLGDGTNRRGQVLEVDGEKAVVQVFEGTSGIDNKYTTVQFTGEVLKTPVSLDMLGRIFNGSGKPIDNGPPILPEAYLDISGSSINPSERTYPEEMIQTGISTIDVMNSIARGQKIPLFSAAGLPHNEIAAQICRQAGLVKTLEKGKHAEGGEDDNFAIVFAAMGVNMETAQFFKRDFEENGSMERVTLFLNLANDPTIERIITPRIALTTAEYLAYECGKHVLVILTDMSSYADALREVSAAREEVPGRRGYPGYMYTDLATIYERAGRIEGRTGSITQIPILTMPNDDITHPTPDLTGYITEGQIYIDRQLHNRQIYPPINVLPSLSRLMKSAIGEGMTRRDHSDVSNQLYANYAIGKDVQAMKAVVGEEALSSEDLLYLEFLDKFERKFVTQGAYDTRNIFQSLDLAWTLLRIFPRELLHRIPAKTLDQYYSRDASH

SEQ ID NO: 4739 - DNA, 778 bp, Zea mays
  misc_feature: Ceres CLONE ID no. 988157
  misc_feature: Ceres CDNA ID no. 36707669
  CDS (82)..(486): REFERENCED BY SEQ ID NO: 4740
gcttcgctagcggtccgcacccgttgcctccaaagtcatttcacccgagcgccgccgcgagcctccgttccagcttcgtccatggcttccctcaccggatccgctctctcctttgcgaggcccgtcaaggcaatcagcattaagtctgtctctttctctggtctaaggaaggataatgtagccttccgcttgcagccagtgccacaaagattcgctgtctgctgtcctgctaaaaaggagactgtggatcgggtttgtgatattgtcaagaagcagcttgcacttcctgagggcactgaggtctgtggctcctctaagtttcaagacctcggtgctgattcgttggacactgttgagattgttatgggccttgaggaggctttcaagatcactgtagaggagtcgagcgcgcagtcaatcgcaactgtggaagatgctgctaatctcatcgacgaacttgttgcaggagcagcaaaatcgtgttaaactcgtggtggtattgcgttgggtgctgtaccagggcatcacttgttgttctatgcccccgtgcctactagcttttctaccctgggcctggagagatgtttctgtcatgactgtcattgtggatctcgcgatattgttatattgaagcttttgtgcttgttcaagaaaagaaaatgttgttgcgatatatatgttattatattgaattttttttgtccatgttcaaggatattttatatattttaagtgatctgaggggtactggtaggctcgctcaaaaaaaaaaaaaaaa

SEQ ID NO: 4740 - protein, 134 aa, Zea mays
  misc_feature: Ceres CLONE ID no. 988157
  misc_feature: Ceres CDNA ID no. 36707669
  misc_feature (56)..(123): Pfam Name: PP PFAM Desc: Phosphopantetheine attachment site
  misc_feature: Homolog of GI Number: 113169 NR Desc: Acyl carrier protein II
  misc_feature: Homolog of GI Number: 113172 NR Desc: Acyl carrier protein III
  misc_feature: Homolog of GI Number: 50948281 NR Desc: putative acyl carrier protein III
  misc_feature: Homolog of GI Number: 166975 NR Desc: acyl carrier protein III precursor
  misc_feature: Homolog of GI Number: 453189 NR Desc: acyl carrier protein
  misc_feature: Homolog of GI Number: 77556020 NR Desc: acyl carrier protein
  misc_feature: Homolog of GI Number: 50920229 NR Desc: putative acyl carrier protein
  misc_feature: Homolog of GI Number: 30102979 NR Desc: putative acyl carrier protein
  misc_feature: Homolog of GI Number: 2465010 NR Desc: acyl carrier protein
  misc_feature: Homolog of GI Number: 1838961 NR Desc: acyl carrier protein
MASLTGSALSFARPVKAISIKSVSFSGLRKDNVAFRLQPVPQRFAVCCPAKKETVDRVCDIVKKQLALPEGTEVCGSSKFQDLGADSLDTVEIVMGLEEAFKITVEESSAQSIATVEDAANLIDELVAGAAKSC

SEQ ID NO: 4741 - DNA, 1710 bp, Zea mays
  misc_feature: Ceres CLONE ID no. 988175
  misc_feature: Ceres CDNA ID no. 40351514
  CDS (153)..(1496): REFERENCED BY SEQ ID NO: 4742
ttataaaacctagctcctcaagctccagacgcagtcgaccgccgcagaccgggagtagtcgacgcgccgtcactgaatcctcagatcacggctagccgtaatcacgccactctgctgactcccggcgagcagtgtaacattttccttcagccatgggcaaggagaagactcacatcaacattgtggtcattggacatgtcgactctggcaagtcgaccaccactggccacctgatctacaagctcggcggtattgacaagcgtgtgattgagaggttcgagaaagaggccgcggagatgaacaagcggtcattcaagtatgcctgggtgcttgacaagctcaaggccgagcgtgagagaggtatcacaattgatattgctttgtggaagttcgagaccaccaagtactactgcactgtcattgatgcccctggacaccgtgacttcatcaagaatatgattactggcacttcccaagctgactgcgctgttcttatcattgactccactactggtggttttgaggctggtatctccaaggatggacagacccgcgagcatgctctccttgctttcacgcttggagtgaagcagatgatttgctgttgcaacaagatggatgccaccacacccaagtactccaaggcccgttatgatgagattgtgaaggaagtctcttcctacctgaagaaggttggatacaaccctgacaagatccactttgttcccatctctggtttcgaaggtgacaacatgattgagaggtccaccaaccttgactggtacaagggcccaaccctacttgaggctttggacttgatcaatgagccgaagaggccttcagacaagcccctgcgtctccccctacaggatgtgtacaagattggtggtattggaactgttcctgttgggcgtgttgagactggtatcatcaagcctggtatggttgttacctttggtcctagtggccttactactgaggtgaagtctgttgaaatgcaccatgaggctctccaggaggcccttcctggtgacaatgttggcttcaatgttaagaatgttgctgtgaaggatctgaagcgtgggtatgtggcctccaactccaaggatgaccctgccaaggaggctgctagcttcacgtcccaggtcatcatcatgaaccaccctgggcagattggcaacggctatgccccagtgctggactgccacacctcgcacattgctgtcaagtttgcggagctcattaccaagattgataggcggtctggcaaagagcttgagaaggagcccaaattcctcaagaatggtgatgctggtatggtgaagatggttcccactaagcccatggtagtggagaccttttctgaatatcctcctcttggtcgctttgctgtccgtgacatgaggcaaacggtggctgtcggagtcatcaagagtgtggagaagaaggatccaactggagccaaggtgaccaaggctgccgcaaagaagaaatgatgtgtctggctggttctgtgtttgcttgagggaaacctagtggaaacataaaatatctcgtcttgttcacgtcattgtctgaactatgctcgcaacgtttgcctggtcgatttagaatggttattttcgttaaaaccagagtgttatttaagacttatccgaacatctggtgagccatatatggttactagttttgttaaaaaaaaaaaaaaaa

SEQ ID NO: 4742 - protein, 447 aa, Zea mays
  misc_feature: Ceres CLONE ID no. 988175
  misc_feature: Ceres CDNA ID no. 40351514
  misc_feature (248)..(315): Pfam Name: GTP_EFTU_D2 PFAM Desc: Elongation factor Tu domain 2
  misc_feature (322)..(430): Pfam Name: GTP_EFTU_D3 PFAM Desc: Elongation factor Tu C
MGKEKTHINIVVIGHVDSGKSTTTGHLIYKLGGIDKRVIERFEKEAAEMNKRSFKYAWVLDKLKAERERGITIDIALWKFETTKYYCTVIDAPGHRDFIKNMITGTSQADCAVLIIDSTTGGFEAGISKDGQTREHALLAFTLGVKQMICCCNKMDATTPKYSKARYDEIVKEVSSYLKKVGYNPDKIHFVPISGFEGDNMIERSTNLDWYKGPTLLEALDLINEPKRPSDKPLRLPLQDVYKIGGIGTVPVGRVETGIIKPGMVVTFGPSGLTTEVKSVEMHHEALQEALPGDNVGFNVKNVAVKDLKRGYVASNSKDDPAKEAASFTSQVIIMNHPGQIGNGYAPVLDCHTSHIAVKFAELITKIDRRSGKELEKEPKFLKNGDAGMVKMVPTKPMVVETFSEYPPLGRFAVRDMRQTVAVGVIKSVEKKDPTGAKVTKAAAKKK

SEQ ID NO: 4743 - DNA, 883 bp, Zea mays
  misc_feature: Ceres CLONE ID no. 988539
  misc_feature: Ceres CDNA ID no. 25446087
  CDS (1)..(831): REFERENCED BY SEQ ID NO: 4744
aaatccaccaagcccactcctctgctgccgcattccaagtttccaacccattcccatcctcttcaacggtcaacccagcgccaccagcagcgccatcagcaggagagagatcgccggagccatgacgaggggcggcggaggcgacatgaagtccttcttccgtcagcagaagacgcacgccgccgccgccactaccaagcccactggcggcgtctccaagaaggcggcggcgcatcaccacaagaaggccgcactcgccaccaacatccacccggccccaggtaccgatcccggtccgaatcccccgatcgctgttcgcttccgcggcagtaccggcggatcgaccgattgattcgatttcgattcgtctctcgtcaccgcagatcacggcgccggcagccgccagcagggggaggcggaggcggagcagcgggagagggcgggccgcgagttcgacatggacacgcgctacgggccatgcctcggcgtcacccgcccccagcggtggcgccgcgccgccgcgctcggcctcgcaccgccgccggcgctcctcgccctctgcgccgacgaacagccctgcctctgggagggccgcgtctaggctactggcgggatgcacattccttccccgcgtttcgccgacatgctccatcagtgttcagtactagctctgtgttggagatgcggtgtcgcgtccatccgttctgctcccgtctaccgcatctcgtggtagcagtggcaccagtagtagtacaatctgtgcctgtcacgtgttgtgttgcctctagtatccacatgatgaacccttcatgtctggtgtgttatttgtgatcagagcagaaatggcatgtcttcctgcaacatggcaaaaaaaaaaaaaaaa

SEQ ID NO: 4744 - protein, 117 aa, Zea mays
  misc_feature: Ceres CLONE ID no. 988539
  misc_feature: Ceres CDNA ID no. 25446087
  misc_feature: Homolog of GI Number: 18391073 NR Desc: DNA polymerase delta subunit 4 family
  misc_feature: Homolog of GI Number: 58388035 NR Desc: ENSANGP00000010844
  misc_feature: Homolog of GI Number: 67987177 NR Desc: 4Fe
  misc_feature: Homolog of GI Number: 72547041 NR Desc: proteophosphoglycan ppg1
  misc_feature: Homolog of GI Number: 31431781 NR Desc: putative polyprotein
MPRRHPPPAVAPRRRARPRTAAGAPRPLRRRTALPLGGPRLGYWRDAHSFPAFRRHAPSVFSTSSVLEMRCRVHPFCSRLPHLVVAVAPVVVQSVPVTCCVASSIHMMNPSCLVCYL

SEQ ID NO: 4745 - DNA, 774 bp, Zea mays
  misc_feature: Ceres CLONE ID no. 988546
  misc_feature: Ceres CDNA ID no. 36698242
  CDS (78)..(488): REFERENCED BY SEQ ID NO: 4746
tttttttccggcctcccattcctcgcgcggcgaccacccgattcgaagcgtgcggagagaccgaagaagcgggagagatggctcgtaccaagcagactgctcgcaagtccacgggagggaaggctcccaggaagcagcttgccaccaaggctgcccgtaagtctgcccccaccactggtggagtgaagaagcctcaccgctaccgccctggaactgttgcactccgtgagatccgcaagtaccagaagaacactgagctgctgatcaggaagctgcccttccagaggctcgttagggaaattgcacaggacttcaagactgatttgcgtttccagagccatgcggtgcttgctctccaggaggctgctgaggcataccttgttggcctgtttgaggacaccaacctgtgcgccatccatgctaagcgtgtgaccatcatgcccaaggacattcagctggcaaggaggatccgcggcgagagggcctaatcgccacctcaaacatcgtgacaaaaaaatgaagtcctggggttattgttaatctggtgccattgtaaggacatatgagtagggtttgttttgtggatcgcaagtttctcttctgctactgttgctgctacctttgctggtgttattgctagggttgaatacttaagttaactatgcgctgacagtctggactagcagtgttatgtgcgctgctggaccttgcgcgcgatgctgtggccgattttgttcgttaatgtcaagaattgtgttaaaaaaaaaaaaaaaa

SEQ ID NO: 4746 - protein, 136 aa, Zea mays
  misc_feature: Ceres CLONE ID no. 988546
  misc_feature: Ceres CDNA ID no. 36698242
  misc_feature (58)..(134): Pfam Name: Histone PFAM Desc: Core histone H2A/H2B/H3/H4
  misc_feature: Homolog of GI Number: 37991915 NR Desc: histone H3.2 protein
  misc_feature: Homolog of GI Number: 18698662 NR Desc: disease
  misc_feature: Homolog of GI Number: 62642119 NR Desc: histone 3
  misc_feature: Homolog of GI Number: 73808026 NR Desc: histone H3
  misc_feature: Homolog of GI Number: 50728592 NR Desc:  similar to histone protein Hist2h3c1
  misc_feature: Homolog of GI Number: 68441481 NR Desc:  similar to CG31613
  misc_feature: Homolog of GI Number: 61839509 NR Desc:  similar to histone 1
  misc_feature: Homolog of GI Number: 515005 NR Desc: histone H3.2 protein
  misc_feature: Homolog of GI Number: 24585677 NR Desc: CG31613
  misc_feature: Homolog of GI Number: 68362812 NR Desc:  similar to CG31613
MARTKQTARKSTGGKAPRKQLATKAARKSAPTTGGVKKPHRYRPGTVALREIRKYQKNTELLIRKLPFQRLVREIAQDFKTDLRFQSHAVLALQEAAEAYLVGLFEDTNLCAIHAKRVTIMPKDIQLARRIRGERA

SEQ ID NO: 4747 - DNA, 782 bp, Zea mays
  misc_feature: Ceres CLONE ID no. 988861
  misc_feature: Ceres CDNA ID no. 24766553
  CDS (83)..(529): REFERENCED BY SEQ ID NO: 4748
aagaaaagcctccattcccgagtctccagccaaccgcatccagtccacccccatccccctcgaccccgacaaacccgacccgatggcgcccaaggccgagaagaagccagcggagaagaagccggcggccgaggagaaggcggagaagacgaccgcaggtaagaagcccaagtccgagaagcgcctgccggcctcgaagtcctccggcaaggagggcggcgagaagaaggggaagaagaaggccaagaagagcgtggagacctacaaaatctacatcttcaaggtcctgaagcaggtgcaccccgacatcggcatctcctccaaggccatgtccatcatgaactccttcatcaacgacatattcgagaagctcgccggcgaggccgccaagctcgcgcggtacaacaagaagcccaccatcacctcccgcgagatccagacctccgtgcgcctcgtcctcccaggagagctcgccaaacatgccgtctccgagggaaccaaggccgtcaccaagttcaccagcaattgagcagcctgcagcgtccacggatttgttaggtctccccttcttacaagggttcttcgtcgtgtcctctacccctccccgcctatgtatgtgctgtgaaatcgttgatgttctcgtcgggtgaacaaaggccagtagctagcttgcctgcttcataaatcgtgccggattgtaatgggcctcttagatttgacgcccctattttggaatatagttgtatcggtgccttccctgcttgctaaaaaaaaaaaaaaaa

SEQ ID NO: 4748 - protein, 148 aa, Zea mays
  misc_feature: Ceres CLONE ID no. 988861
  misc_feature: Ceres CDNA ID no. 24766553
  misc_feature: No seed is being produced by the plant
  misc_feature: The plant flowers significantly late compared to wild-type.
  misc_feature: Useful for biocontainment applications
  misc_feature: Useful for making plants with modulated flowering time
  misc_feature (55)..(127): Pfam Name: Histone PFAM Desc: Core histone H2A/H2B/H3/H4
  misc_feature: Homolog of GI Number: 21801 NR Desc: histone H2B
  misc_feature: Homolog of GI Number: 577825 NR Desc: H2B histone
  misc_feature: Homolog of GI Number: 22325 NR Desc: H2B histone
  misc_feature: Homolog of GI Number: 1708107 NR Desc: Histone H2B
  misc_feature: Homolog of GI Number: 22323 NR Desc: H2B histone
  misc_feature: Homolog of GI Number: 50947133 NR Desc: putative Histone H2B.2
  misc_feature: Homolog of GI Number: 34895888 NR Desc: putative histone H2B
  misc_feature: Homolog of GI Number: 34895838 NR Desc: putative histone H2B
  misc_feature: Homolog of GI Number: 34895832 NR Desc: putative histone H2B
  misc_feature: Homolog of GI Number: 34895896 NR Desc: putative histone H2B
MAPKAEKKPAEKKPAAEEKAEKTTAGKKPKSEKRLPASKSSGKEGGEKKGKKKAKKSVETYKIYIFKVLKQVHPDIGISSKAMSIMNSFINDIFEKLAGEAAKLARYNKKPTITSREIQTSVRLVLPGELAKHAVSEGTKAVTKFTSN

SEQ ID NO: 4749 - DNA, 1653 bp, Zea mays
  misc_feature: Ceres CLONE ID no. 988941
  misc_feature: Ceres CDNA ID no. 36589734
  CDS (397)..(1389): REFERENCED BY SEQ ID NO: 4750
aaatttaattagacatctagaggctatcaacaaacaccttgcgtgccttcaaccaggtgtggtggaagtggaagtcaccaatttctcatccggcaccaattagctcacgagcgttgctaagctgatcggcggcgactgagcgacgttacgcagctaccgccaaatcaaagagaggaacatgtgcgattgtgcgagtgcgatccggtccctttcgtggagtgacctcgacgaactgggccataactagtcaaggcaggggcataagggctttaaccctggtgcactgactgggccgacataggttcaatggagaaatcataaggcccaacgctcgcgagctaaaacctcagagaaaaaaaagggtgactcactgactccactgctccacccaaaaaaatggcggcggcgccggaggagctgctctgcgcggcggcgaagtccggtgaagagggcgaagtcgctaaactccttgcttcaggagctgacgcgacccacttcgatgccgacggcttgacgccgctgatgcacgcgtccgcgggggggcacgccgccgttgcgcgcctcctcctcgactgcggtgcgccctggaacgcgctctccccctcgggcctctcggcaggggacctagcctccgaccccgacacctacgacctcctcctcgaccacgccatccgctccgagctcgtcctgggcaccgtcgcgcggcggcaagcggcccccgcgaacggtcccccggccgagagctacctcgaatccagggtctcgttcagcgaggagagggtgatggacgcggagagcaaggcggtgatgatggcgtgggagcggccgctgatggaggcgcacgcgcgggcggtgtgccaaggcggcggcaaggtgctcaacgtggggttcggcatggggctcgtggacgaagcgatacagaggtacgggcccgaggagcacaccattgtcgaggcccacccggaggtgtacgagcggatgctcaagctcggatggggcgacaagaagaacgtcaggatcgtgttcgggcgatggcaggacgtgatgccgcagctcggatcttatgacggcatattcttcgacacgtacggggaatactacgaggacatgagagagttccaccagcaccttcctaagctactgaagcccggaggcatctactcgtacttcaacggcctctgcggcgacaacgcgttcttccacgccgtgtattgccagctcgtcgcgctggagctcgcgaaccttgggtactcgacgcagttcatccctctgccggtcaaagattgcctggcggaggaggtctggaagggcgtgaagcggaagtactggcaactggacacctactacctccctgcttgccagtcagaatcagaatctactatcaagtagtgatgagttatttctagtctgcgttctgaagttggttgtctgttttgagctacgtacatttttgttctgtgttacgaatgttaaccctttcactttcgggagctgaattttctttgggcgtgtggtgatttgccctctctcgtatgctcctgacgcgtgcgtgcattcgtggttcgaaaaatagaattgtcatggaaaaatttggttccctgacgatcattttccttgccatgttggaccgcgtggctctaaaaaaaaaaaaaa

SEQ ID NO: 4750 - protein, 330 aa, Zea mays
  misc_feature: Ceres CLONE ID no. 988941
  misc_feature: Ceres CDNA ID no. 36589734
  misc_feature (37)..(69): Pfam Name: Ank PFAM Desc: Ankyrin repeat
  misc_feature: Homolog of GI Number: 50918925 NR Desc: putative methyltransferase
  misc_feature: Homolog of GI Number: 42568802 NR Desc: ankyrin repeat family protein
  misc_feature: Homolog of GI Number: 1177364 NR Desc: SPAC26A3.17c
  misc_feature: Homolog of GI Number: 66852880 NR Desc: arginine N
  misc_feature: Homolog of GI Number: 45188035 NR Desc: ADR161Wp
  misc_feature: Homolog of GI Number: 27924205 NR Desc: Gamt
  misc_feature: Homolog of GI Number: 71042535 NR Desc: Chain D
  misc_feature: Homolog of GI Number: 17389854 NR Desc: Guanidinoacetate N
MAAAPEELLCAAAKSGEEGEVAKLLASGADATHFDADGLTPLMHASAGGHAAVARLLLDCGAPWNALSPSGLSAGDLASDPDTYDLLLDHAIRSELVLGTVARRQAAPANGPPAESYLESRVSFSEERVMDAESKAVMMAWERPLMEAHARAVCQGGGKVLNVGFGMGLVDEAIQRYGPEEHTIVEAHPEVYERMLKLGWGDKKNVRIVFGRWQDVMPQLGSYDGIFFDTYGEYYEDMREFHQHLPKLLKPGGIYSYFNGLCGDNAFFHAVYCQLVALELANLGYSTQFIPLPVKDCLAEEVWKGVKRKYWQLDTYYLPACQSESESTIK

SEQ ID NO: 4751 - DNA, 848 bp, Zea mays
  misc_feature: Ceres CLONE ID no. 989018
  misc_feature: Ceres CDNA ID no. 25446867
  CDS (136)..(483): REFERENCED BY SEQ ID NO: 4752
aacacaaaacacatccatcctccttgcaactccagtgctgctcactgccactgccagcagatcgagctgctccgtctcacaaaccctctagcttgctttgctgctccacctgcaagtctgcaaccgcgtacagagatgtcgacggtgagccgtgcgtccctcgaccagaagctcgccctcgccaagcgctgctcccgagaggcgaccctcgccggagccaaggcggcagccgtggcgactatcgcctccgcgatccccaccctggccagcgtgcggatgctgccatgggccaaggccaacatcaaccccaccggccaggcgctcatcgtctccacggtggctgggatggcctacttcatcgccgccgacaagaagatcctgtcgctggcgaggcgccactcgttcgagcaagcccctgaccacctcaagaacacctccttccagggcaccggccgtccccacccggctttcttcaggccgtgagacgtggccttcgtccagagctagctacctacctctttcaattcgatcgtcgtcagtgcaaagcaccaccaatgcctgaataaatttaactacgaggctagctgctgaacatcgatctgctactgctagtattactacggcgaggctgctgaacagcgctgtagagtagtattggtgctcagttcagaatgtataatgttacttctaccgattaaactgttaaaaaaccctagtacgcttatgtggtcaaataccacttatatctgtgagcagtgtcgcatctctatataaaggaatatgtatcttctcagaaagaggttagagacccaactctacatactgtttttttaaaaaaaaaaaaaaaa

SEQ ID NO: 4752 - protein, 115 aa, Zea mays
  misc_feature: Ceres CLONE ID no. 989018
  misc_feature: Ceres CDNA ID no. 25446867
  misc_feature (11)..(89): Pfam Name: ENOD93 PFAM Desc: Early nodulin 93 ENOD93 protein
  misc_feature: Homolog of GI Number: 50948739 NR Desc: putative early nodulin
  misc_feature: Homolog of GI Number: 50948751 NR Desc: putative early nodulin
  misc_feature: Homolog of GI Number: 50948749 NR Desc: putative early nodulin
  misc_feature: Homolog of GI Number: 50948737 NR Desc: putative early nodulin
  misc_feature: Homolog of GI Number: 50948753 NR Desc: putative early nodulin
  misc_feature: Homolog of GI Number: 50948755 NR Desc: putative early nodulin
  misc_feature: Homolog of GI Number: 4809191 NR Desc: early nodulin
  misc_feature: Homolog of GI Number: 218262 NR Desc: early nodulin
  misc_feature: Homolog of GI Number: 4731119 NR Desc: root
  misc_feature: Homolog of GI Number: 50948733 NR Desc: Similar to OsENOD93a gene for early nodulin
MSTVSRASLDQKLALAKRCSREATLAGAKAAAVATIASAIPTLASVRMLPWAKANINPTGQALIVSTVAGMAYFIAADKKILSLARRHSFEQAPDHLKNTSFQGTGRPHPAFFRP

SEQ ID NO: 4753 - DNA, 813 bp, Zea mays
  misc_feature: Ceres CLONE ID no. 989155
  misc_feature: Ceres CDNA ID no. 40351515
  CDS (138)..(488): REFERENCED BY SEQ ID NO: 4754
aacacaaaacacatccatcctcgctagctcgctctctcttgcaactccagtgcttctcactgccactgccagcaggtcgagctgctccgcaagtctgctttgctgctgcacctgcaagtctgcaaccgcgcacagagatgtcgacgactgtgagccgtgcgtccctcgaccagaaactcgccctcgccaagcgctgctcccgagaggcgaccctcgccggagccaaggcggcagccgtggcgactatcgcctccgcgatccccaccctggccagcgtgcggatgctgccatgggccaaggccaacatcaaccccaccggccaggcgctcatcgtctccacggtggctgggatggcctacttcatcgccgccgataagaagatcctgtcgctggcgaggcgccactcgttcgaccaagcccctgagcacctcaagaacacctccttccagggcaccggccgtccccacccggctttcttcaggccgtgagacgagacctccgtcgagctagctagctacctgcctctttcagttcgtcagtgcaaattaagcaccaaatgtcgaccgatgcctctgaataaatttaactgcgaggctagctagctgctgtacatcgatctgctagtattactacggcgaggctgctgaacagcgctgtagagtagtattggtgctcagttcggaatgtatgtgtaatctgaacgccaagtttaattttatgttacttctaccgattaaccaaccttgtctgttattctcctgtaaagagagagagagcaacaataagggcctgtttggaaaaaaaaaaaaaaaa

SEQ ID NO: 4754 - protein, 116 aa, Zea mays
  misc_feature: Ceres CLONE ID no. 989155
  misc_feature: Ceres CDNA ID no. 40351515
  misc_feature (12)..(90): Pfam Name: ENOD93 PFAM Desc: Early nodulin 93 ENOD93 protein
MSTTVSRASLDQKLALAKRCSREATLAGAKAAAVATIASAIPTLASVRMLPWAKANINPTGQALIVSTVAGMAYFIAADKKILSLARRHSFDQAPEHLKNTSFQGTGRPHPAFFRP

SEQ ID NO: 4755 - DNA, 1032 bp, Zea mays
  misc_feature: Ceres CLONE ID no. 989161
  misc_feature: Ceres CDNA ID no. 40351516
  CDS (394)..(579): REFERENCED BY SEQ ID NO: 4756
attcacccaattgaaaggaagaagcgctccctacccaccgcggttgccccctttcggcctttccccttctcgatcgaactcgggtccttcggcgacgtgcggatttttcgtccctcccgatgcttcgcctgtatctgatccggggtgcgtggattgactaccggtgttgatttggcgaggcaatcggcggggagggagggggtattaatttcgatcgctgcgccgccgattcccccggtccttagaggaggaacaggagaaccaggagggaacctataacagtggttgacttggaggttgaagctagccgggaagggagcaaacgccagagggttgaaccagtaggacgtcacctctatccagattggggagcaaggtctagcttgcagtcaaatgccgtacaaaccagcaaagagcctgccaaggaggtccccgaggaaccatcttttacctgcccaatatgttggaataagatggaggagccttccacgacgacttgtggccatgtcttctgcgacacgtgcatcaagcaggccatcaaggttcagaagaaatgccctacttgcaggaaggggctgaaaatgaatagtgttcatcgtatttaccttccgaacggttctagttaagctgagcagctttacatatctgatggcttgtaactttgggggcaattagcttaacctctgttatccgatacatgctgactggctttgtcaaagaaacttctggtaacgtaaggctgtgcaatgtactgtgaggatcaggaattcttagcctgaacagcagatagatgtttcatcccagtctgtattatttatcggcatcaccaggagttcatcatgagaacttcctgactagggaagtcgatatcagcctcagttttactctcttattgcatccatggttcccagaatgtgttgttttgttaggatgtgaccatcggatggtgcatatgaccgtgtaaaacattattttgcaccgtattctgtattatttatatagtagagttttaaaataaaaaaaaaaaaaaaa

SEQ ID NO: 4756 - protein, 61 aa, Zea mays
  misc_feature: Ceres CLONE ID no. 989161
  misc_feature: Ceres CDNA ID no. 40351516
MPYKPAKSLPRRSPRNHLLPAQYVGIRWRSLPRRLVAMSSATRASSRPSRFRRNALLAGRG

SEQ ID NO: 4757 - DNA, 711 bp, Zea mays
  misc_feature: Ceres CLONE ID no. 989398
  misc_feature: Ceres CDNA ID no. 25446088
  CDS (134)..(379): REFERENCED BY SEQ ID NO: 4758
attcagaacattagcaaccgcccaccaccgccctaagcccctaaccctcacgcaactgcctctttgcggcggcgggaaacactgacacgtcttccgagcacggtcggaggagctagggtttcgccgcggcgagatgtcggcgtacgacgaggtggagatcgaggacatggagtggaacgcggagctgaaggcgtacacgtacccgtgcccctgcggcgacctcttccagatcacgctcgacgacctccgcctcggggaggagattgcgcgctgcccctcgtgctccctcttcctcaccgtcgtctacaacgccgaggatttcgccgactccaaggagccgacccacaagccgtccccgagcccagtcgccgtcgcctgatgtggcccgttcgaggctagatggacgaatggaatggatctcagagcaggaaaaaaggaacgagttcatgtttgacacacacaccactacgggagtatttgtttgtactactaaagatgagtggacccgctgcatattttcaaagctcaggctgttaaacctatttttttttatgtgggtgacatagttgtaaggtgacatggacaactcatgctatgaaaaattttgttcgtccccactatatatcgttgactgtggccttgacaaatttgaaacccgatcgattcttcggtgataaattcatttatgttccaccaaaaaaaaaaaaaaaa

SEQ ID NO: 4758 - protein, 81 aa, Zea mays
  misc_feature: Ceres CLONE ID no. 989398
  misc_feature: Ceres CDNA ID no. 25446088
  misc_feature (5)..(59): Pfam Name: zf PFAM Desc: CSL zinc finger
  misc_feature: Homolog of GI Number: 21648335 NR Desc: Kti11p
  misc_feature: Homolog of GI Number: 62738697 NR Desc: Chain A
  misc_feature: Homolog of GI Number: 45201470 NR Desc: AGR374Cp
  misc_feature: Homolog of GI Number: 50732744 NR Desc:  similar to RIKEN cDNA 2610018L09
  misc_feature: Homolog of GI Number: 57103884 NR Desc:  similar to Zinc finger
  misc_feature: Homolog of GI Number: 61822745 NR Desc:  similar to Zinc finger
MSAYDEVEIEDMEWNAELKAYTYPCPCGDLFQITLDDLRLGEEIARCPSCSLFLTVVYNAEDFADSKEPTHKPSPSPVAVA

SEQ ID NO: 4759 - DNA, 645 bp, Zea mays
  misc_feature: Ceres CLONE ID no. 989515
  misc_feature: Ceres CDNA ID no. 25446089
  CDS (1)..(435): REFERENCED BY SEQ ID NO: 4760
agagttcgacctagcacgcccggccgccgccgcagcccgcaatggcgtcccttttcaaggaccccagcaagctctcggcgtacagggaccgccggttcaaggggacgcaggaggagtatgaggcggcgctgcttgcgtcgacaacgctgtacatcggtaatatgtccttctacaccacggaggagcaggcctacgagctcttctcccgcgccggcgagatcaagaagatcatcatggggctcgacaagaactccaagaccccatgcggtttctgctttgtactgtgcgggcctcttcccttccttgatacgtcgcgttaattggctctttgattttggattcggtgctgtagtttccttcaatctacaggaacataaccttcgccctagtttaattagaaggggagatagtcccaattgttctgctggaatgtagtttgatgcaattagacgctgagtagatgggttccagacctgtttatgtattgatttgtttcctcagtagtgtgagttgttcatctgctagttgcaattggacattgcttcgtgaaattttatttgctgccaggaacatgtgagatgcctagaacatgaatagagaactgtgctatctcagcatgtacattcctcaaaaaaaaaaaaaaaa

SEQ ID NO: 4760 - protein, 92 aa, Zea mays
  misc_feature: Ceres CLONE ID no. 989515
  misc_feature: Ceres CDNA ID no. 25446089
  misc_feature (36)..(80): Pfam Name: RRM_1 PFAM Desc: RNA recognition motif.
  misc_feature: Homolog of GI Number: 50910401 NR Desc: cap
  misc_feature: Homolog of GI Number: 4768968 NR Desc: nuclear cap
  misc_feature: Homolog of GI Number: 46949206 NR Desc: cap
  misc_feature: Homolog of GI Number: 48142250 NR Desc: similar to CG12357
  misc_feature: Homolog of GI Number: 58383094 NR Desc: ENSANGP00000012757
  misc_feature: Homolog of GI Number: 30583899 NR Desc: Homo sapiens nuclear cap binding protein subunit 2
  misc_feature: Homolog of GI Number: 1060899 NR Desc: NCBP interacting protein 1
  misc_feature: Homolog of GI Number: 57109606 NR Desc:  similar to Nuclear cap binding protein subunit 2
  misc_feature: Homolog of GI Number: 55621796 NR Desc:  similar to Nuclear cap binding protein subunit 2
  misc_feature: Homolog of GI Number: 27666152 NR Desc: similar to nuclear cap binding protein subunit 2
  misc_feature: Useful for increasing chlorophyll and photosynthetic capacity
  misc_feature: Useful for increasing increasing anthocyanin content
  misc_feature: Useful for making plants with altered leaf shape eg curled leaves
  misc_feature: Useful for making plants with increased biomass and foliage
  misc_feature: Useful for making plants with increased biomass and foliage
  misc_feature: Useful for making shorter plants
MASLFKDPSKLSAYRDRRFKGTQEEYEAALLASTTLYIGNMSFYTTEEQAYELFSRAGEIKKIIMGLDKNSKTPCGFCFVLCGPLPFLDTSR

SEQ ID NO: 4761 - DNA, 1489 bp, Zea mays
  misc_feature: Ceres CLONE ID no. 989630
  misc_feature: Ceres CDNA ID no. 40041379
  CDS (710)..(1198): REFERENCED BY SEQ ID NO: 4762
atctccatatccccgtatccgtccacgcccgcccgcccgccttgccaccagccagcacccccctcaacccccggcctcgccgccgccgccgcaccccccaccccccgctgccgcgcaggccggttgctccgattgggctggagtgccaatcggagccaacatcagggggaagcacatgctgccgttcgcgcgccctagagttcctcattgatgtcgcctgtgatcagtgagatcctcctctcggggtttatgatcaactccacactccggcgccgcacccacctcgtccagtccttctccgtcgtcttcctctactggttctatgtcttctcataaactactcgcccccgtcaccgccacgcccctctcctcctccccgtccctgccttcttctcctccttcttcccgttccatctagtagcatccaccgtcaccctcttctcgtttcttctgcccagtctctgccttcttcttcgtcgtcgtcgtctcggtttcagtcgtttcctaaaactttaccttgcatgcacttccctactactgctgctgctagcgaagacctttattagttattagtagtgttaagttattaccaacaagaagcagaaagaaagaaagaaaaaagggatcaagaagcagagagctgttctgttcttttttccccctctcttgcaagaaagggcggttcttgcgcggacggaacgcaggaacaatggcttcctccagcgggagcgggagcgggagctcgggcttcctctcggcggcgctggacttggcggcggcgggaacggaggaggagctgcgcgcgctcatggcgcagcgccgcgccaagcggatgctgtcgaaccgcgagtcggcgcggcggtcgcggatgcgcaagcagcgccacctggacgagctcacggcgcaggccgcgcacctgcgccgcgagaacgcgcacgtggccaccgcgctcgggctcaccgcgcagggcctcctggccgtcgacgccgacaacgccgtcctccgcacccaggccgccgagctcgccgcgcgcctcggctccctcaacgacatcctcgcctgcatgaacaccaccaacgccgccgccgccgccgctttctccgacccctacctcgccttcgacggcgccgccaccgccttggacgacctcctcagatcctgccccgacagcatgatgttcgagtaccagctctgctagctcgggaccgaagtcgccatggcagcacaaagcatcgagaggagggaaaaaaacatcttttttttttgctgctggtgtttcaggttagtgatctgctagtgagatggaactgaagggcagatcagacgtggcggtgagccatgaaactaccgtcactgtactgtgctatcaactgggggtgggaaaaaaaacccaactgggggctgggtcactgcacctaattagctagctagatgatgctggggttatggttaatgaactactacttactactgaaaaaaaaaaaaaaaa

SEQ ID NO: 4762 - protein, 162 aa, Zea mays
  misc_feature: Ceres CLONE ID no. 989630
  misc_feature: Ceres CDNA ID no. 40041379
  misc_feature (33)..(97): Pfam Name: bZIP_1 PFAM Desc: bZIP transcription factor
  misc_feature: Homolog of GI Number: 4457221 NR Desc: putative bZIP DNA
  misc_feature: Homolog of GI Number: 16580130 NR Desc: bZIP transcription factor BZI
  misc_feature: Homolog of GI Number: 24460973 NR Desc: bZIP transcription factor
  misc_feature: Homolog of GI Number: 22597162 NR Desc: bZIP transcription factor ATB2
  misc_feature: Homolog of GI Number: 9650828 NR Desc: common plant regulatory factor 7
  misc_feature: Homolog of GI Number: 60459385 NR Desc: bZIP protein
  misc_feature: Homolog of GI Number: 1865679 NR Desc: ATB2
  misc_feature: Homolog of GI Number: 20465863 NR Desc: putative bZIP transcription factor ATB2
  misc_feature: Homolog of GI Number: 51091704 NR Desc: putative bZIP transcription factor
MASSSGSGSGSSGFLSAALDLAAAGTEEELRALMAQRRAKRMLSNRESARRSRMRKQRHLDELTAQAAHLRRENAHVATALGLTAQGLLAVDADNAVLRTQAAELAARLGSLNDILACMNTTNAAAAAAFSDPYLAFDGAATALDDLLRSCPDSMMFEYQLC

SEQ ID NO: 4763 - DNA, 566 bp, Zea mays
  misc_feature: Ceres CLONE ID no. 989817
  misc_feature: Ceres CDNA ID no. 36706139
  CDS (86)..(325): REFERENCED BY SEQ ID NO: 4764
agatcaaacaatccccaaacgcctccgcctccgcctccctagggttttgctctcggctcgtcggatccagttcgggggatcctccatggcgtcgcgtccgtcgctgaagtcgaagcccaagggcaagggcgggaagaaggccaccgccgacgacgaggacgccaccgcggcggcgaccacggtgcggctcatgaaggagtggaccacgtggacgatgaagaaggcgaaggtggtggcgcactacggcttcatccccctcgtcatcgtcatcggcatgaactccgagcccaagccctccgtgttccagctcctctcccccgtctgatcggatctccccgtcagggcccggatgaggtcggtccgtagtagtttgtagctggtacttcatttgcttacatatgtccgagatcgagttgaagaaggtggatcatgctttctgggcgaatttgaaggatttggtttaataattttgtagtggcggatgtcttctatacatcggatcaaaaatgtcttggttatgtgatctgcagtgcttatgattgtatgaactaaaaaaaaaaaaaaaa

SEQ ID NO: 4764 - protein, 79 aa, Zea mays
  misc_feature: Ceres CLONE ID no. 989817
  misc_feature: Ceres CDNA ID no. 36706139
  misc_feature (37)..(76): Pfam Name: Tom7 PFAM Desc: TOM7 family
  misc_feature: Homolog of GI Number: 34912862 NR Desc: P0006C01.15
  misc_feature: Homolog of GI Number: 50313239 NR Desc: TOM7
  misc_feature: Homolog of GI Number: 3319774 NR Desc: TOM7 protein
  misc_feature: Homolog of GI Number: 13605535 NR Desc: AT5g41690/MBK23_23
  misc_feature: Homolog of GI Number: 15222645 NR Desc: preprotein translocase
  misc_feature: Homolog of GI Number: 7949115 NR Desc: Ser/Arg
MASRPSLKSKPKGKGGKKATADDEDATAAATTVRLMKEWTTWTMKKAKVVAHYGFIPLVIVIGMNSEPKPSVFQLLSPV

SEQ ID NO: 4765 - DNA, 963 bp, Zea mays
  misc_feature: Ceres CLONE ID no. 989892
  misc_feature: Ceres CDNA ID no. 25446460
  CDS (208)..(624): REFERENCED BY SEQ ID NO: 4766
gagctcactcgctggtcgttgcctgctgcggattgcccccactcactccgctgctgatatttcgtttggttctcctttccgtcttgtccgtcgccgaggccttccgctcgctcggtcgctccccagctccagcaggcagatcagatccatccaaccacgaacaggaaggaaggtaggaggcctgaggggctgggctgaagttgaaccatgagtgccgtcgcggtttcgtcgtcgctgaacccgaacgcgccgctcttcatcccggcggcgctgctgcaggtggaggacttctcgccgcagtggtgggacctcatcaccaccaccgcctggttccgcgaccactggtcccgcgagcacgcccacctggacgagatagccgagcagctcgagttggtcgccctccttgcctacgatgaggatgaggacctcttctacggcgagcaggcccccgccgccgccgcccttaagacagattcggtgctcaaggcgctgaacttgggctccccgaagagcggcgacgccccgcgggggttccgggagaaacccaggcactccgagaagccgaccaagtacgccggcagccccaagagcagcgctcctcgcgtgatccaccagcctcgctaggttcgctggctggccctggcctgatggggactcagtgactcacatggaaggctgctgcctctctagcagcatctgctcctggctgcagctgccgtcggcgtcgtggtctgtctgtcaaagtcgaagtaaaaaaacgtgagtagttgtactactgtagaagtttcttttgtatagcatgcacgtaagaaatgaccaaaaaatataacaagaatgcagctgttagtttactgctgctctcctcgtgtgtctagggtgcacttctgtaagcaaacgtatatgatgtgtaatggcagacagcttaatgttacaactagctcttctacaaaaaaaaaaaaaaaa

SEQ ID NO: 4766 - protein, 138 aa, Zea mays
  misc_feature: Ceres CLONE ID no. 989892
  misc_feature: Ceres CDNA ID no. 25446460
  misc_feature (5)..(22): Pfam Name: PAM2 PFAM Desc: Ataxin
  misc_feature: Homolog of GI Number: 21592689 NR Desc: ERD15 protein
  misc_feature: Homolog of GI Number: 20197424 NR Desc: ERD15 protein
  misc_feature: Homolog of GI Number: 56481295 NR Desc: early response to dehydration 15
  misc_feature: Homolog of GI Number: 56481331 NR Desc: early response to dehydration 15
  misc_feature: Homolog of GI Number: 33415268 NR Desc: poly
  misc_feature: Homolog of GI Number: 56481323 NR Desc: early response to dehydration 15
  misc_feature: Homolog of GI Number: 8489786 NR Desc: dehydration
  misc_feature: Homolog of GI Number: 75755868 NR Desc: TO44
  misc_feature: Homolog of GI Number: 42571167 NR Desc: dehydration
MSAVAVSSSLNPNAPLFIPAALLQVEDFSPQWWDLITTTAWFRDHWSREHAHLDEIAEQLELVALLAYDEDEDLFYGEQAPAAAALKTDSVLKALNLGSPKSGDAPRGFREKPRHSEKPTKYAGSPKSSAPRVIHQPR

SEQ ID NO: 4767 - DNA, 879 bp, Zea mays
  misc_feature: Ceres CLONE ID no. 989924
  misc_feature: Ceres CDNA ID no. 40351517
  CDS (151)..(627): REFERENCED BY SEQ ID NO: 4768
agcacccctcagtccctcagcgactctggggctctgggctctggcctagcctccactgtctcccagtccccactccccaggtcctcatcggcctccggtcttctggtctccccagatctcccaccggggaaccctacccgagcatcagccatggcgatcgcggcgcgcgtcctgcgccgcctcccgctccacctctacccctcgctcgctcgctctttctgcgcagtttccccggccgccgcctcggccgccccggcgtccgccaaggtcgccgatcgcatcgtgcgcgttctcgccatcgatctcgagggggggcgccgcgaggtcgtcggcctctccgggcagacactcctccgcgcgctcgccaacgcggagctcatcgagccggcctcccaccgcctcgaggatatcgacgcgtgctccgccgagtgcgaggtccacatcgcgcaggagtggctcgacaagctgccgccaccgtcctacgaggagcggtacgtgctcacgcgcgcgtccaggaaccgcgagctcaacaagcacgcgcgcctgggctgccaggtcgtcctcacgccggagctgcatggcatggtcgtcgctgtccccgagcctaagccgtgggacatcccgtaatggcctgccgcgacgaatggcaaggtgcggctttcgacgctgtgagccttccttcattcccctggctcggtcaagcttgtgcgcctctgccatacccttttatgttacggatttgatgaagaataatagtttgatgggaaaaacctgccattggttaacttttgttcttttgaatgtggagtgtaatggatgctgtaatgtggaatcccgttgcaattaccgcagttcaatgttccaaaaaaaaaaaaaaaa

SEQ ID NO: 4768 - protein, 158 aa, Zea mays
  misc_feature: Ceres CLONE ID no. 989924
  misc_feature: Ceres CDNA ID no. 40351517
MAIAARVLRRLPLHLYPSLARSFCAVSPAAASAAPASAKVADRIVRVLAIDLEGGRREVVGLSGQTLLRALANAELIEPASHRLEDIDACSAECEVHIAQEWLDKLPPPSYEERYVLTRASRNRELNKHARLGCQVVLTPELHGMVVAVPEPKPWDIP

SEQ ID NO: 4769 - DNA, 860 bp, Zea mays
  misc_feature: Ceres CLONE ID no. 990043
  misc_feature: Ceres CDNA ID no. 36589881
  CDS (258)..(605): REFERENCED BY SEQ ID NO: 4770
agccagtttttttccatcggaacggcggttcgcgcacctaattatatgcaccacacgcctataaagccaaccaacccggcggaggggtgcaagccagacagaagacaacccgtcagcccctctcgtttttcatccgccttcgcctccaaccgcgtgcgctccacgcctcctccaggaaagcgagagcttctgcataagaacaacaaatcaaaagcgtgatcagctcggtgccaacaaaacctcaacaaccaagtttcatgtctgatctcgacgtccagcttccatctgcctttgatccgtttgctgaggcaaatgctgaggactctggtgctggtcctggaacgaaggattatgtgcatgtgcgcatccagcagcgcaacggcagaaagagtctgactacagtccagggtctgaagaaagagttcagctataacaagatcctcaaggatctgaagaaggaattctgctgcaatggtactgtagttcaggacccagagctaggccaggtcattcagctccaaggtgatcagcgcaagaatgttgctactttcctagttcaggctgggattgcgaagaaagagaacatcaagattcacgggttctaagggacctgtaaatgcttgtgccctatattgtgtgcctccacatattggggagcttgaagcatcgacaagttactagtcattgcttacttatataagaacataagtagtatttgctattgtcaagtgtgccttgcttgatgcaagttgtgttttcgtatcattattattatgcacggccatcgtacgtgtatggcttgtatgggttattgccaacttaataaaagcacactctgtttgcctaaaaaaaaaaaaaaa

SEQ ID NO: 4770 - protein, 115 aa, Zea mays
  misc_feature: Ceres CLONE ID no. 990043
  misc_feature: Ceres CDNA ID no. 36589881
  misc_feature: The plant flowers significantly earllier than wild-type.
  misc_feature: The plant is abnormally small.
  misc_feature: null
  misc_feature: Useful for making plants with modulated biomass
  misc_feature: Useful for making plants with modulated flowering time
  misc_feature (27)..(108): Pfam Name: SUI1 PFAM Desc: Translation initiation factor SUI1
  misc_feature: Homolog of GI Number: 53791638 NR Desc: putative translation initiation factor
  misc_feature: Homolog of GI Number: 50937977 NR Desc: translational initiation factor eIF1
  misc_feature: Homolog of GI Number: 6478142 NR Desc: putative translation initiation factor eIF
  misc_feature: Homolog of GI Number: 2668740 NR Desc: translation initiation factor
  misc_feature: Homolog of GI Number: 20218809 NR Desc: putative translation factor
  misc_feature: Homolog of GI Number: 21070377 NR Desc: translation initiation factor
  misc_feature: Homolog of GI Number: 3334346 NR Desc: Protein translation factor SUI1 homolog
  misc_feature: Homolog of GI Number: 4585973 NR Desc: translation initiation factor
  misc_feature: Homolog of GI Number: 28193048 NR Desc: SUI1 protein
  misc_feature: Homolog of GI Number: 34873704 NR Desc: similar to Protein translation factor SUI1 homolog
MSDLDVQLPSAFDPFAEANAEDSGAGPGTKDYVHVRIQQRNGRKSLTTVQGLKKEFSYNKILKDLKKEFCCNGTVVQDPELGQVIQLQGDQRKNVATFLVQAGIAKKENIKIHGF

SEQ ID NO: 4771 - DNA, 489 bp, Zea mays
  misc_feature: Ceres CLONE ID no. 990173
  misc_feature: Ceres CDNA ID no. 40351518
  CDS (44)..(328): REFERENCED BY SEQ ID NO: 4772
atttttggtattagactattgtagctcatatcatctgtcacccatggcgaagtgcagcagcttccaaggattattctggttgctttccatgattcttctagcatcctttgttgctcatgcacgcacaagtgggcaaaccaaagaggacagcaatgctaggaacatgacgatgaccaagacgagggcatcgggcaacatacttgttagccgtaatgacgacgggccatgctatctagattccggtcttaatgagtacgtctgcagaaagactaataagtgctataagagcttggtgctctgcgtggcgagttgtcaaccatcatcatgaattcatgatactgcggagacatcatgatactgcggagacagacggcgagagatgaggctagctagatgctgtttcaccaaaatattatgtaacacccaaatctcccattttaagaaataaataagattttcgaaaagattatttgaaaaaaaaaaaaaaaa

SEQ ID NO: 4772 - protein, 94 aa, Zea mays
  misc_feature: Ceres CLONE ID no. 990173
  misc_feature: Ceres CDNA ID no. 40351518
  misc_feature (16)..(90): Pfam Name: BAP PFAM Desc: Basal layer antifungal peptide
MAKCSSFQGLFWLLSMILLASFVAHARTSGQTKEDSNARNMTMTKTRASGNILVSRNDDGPCYLDSGLNEYVCRKTNKCYKSLVLCVASCQPSS

SEQ ID NO: 4773 - DNA, 2031 bp, Zea mays
  misc_feature: Ceres CLONE ID no. 990656
  misc_feature: Ceres CDNA ID no. 36589921
  CDS (229)..(1707): REFERENCED BY SEQ ID NO: 4774
atcctccctccattgtttcccggctctccgtcccttgggagttgggccttggcatttccttaagataaaaaaggggggaaatcggcttcctactccccgtccttatcgccagccgaaccgacattgttttctccccccttctcgccttctccttctcccccctagtctagaggcgtttgctccccaatcccttcggcccgcccgctcgacgtgatcccaccggcagccatggatccatacaagcaccgcccgtctagtgggagcaactccagcttctggaccaccaactccggcgcccccgtctggaacaacaactctgccctcaccgtcggacagcgaggtccaatcctccttgaggattatcatctaatcgaaaagcttgctcagttcgacagagaacgtatccctgaacgtgttgtgcatgcacggggagccagtgccaagggtttctttgaggtcactcatgatgtctctcaccttacatgtgctgattttctccgtgctcctggggtccagacacctgttattgtccgtttctctacagttgtgcatgagcgtggaagccctgagaccttgagggatccacgtggttttgctgtcaagttctacaccagagagggtaactttgacctcgtgggtaacaacatgcctgtgtttttcatacgagatgggatgaaattccctgacatggtccacgctttcaagccgaatccaaagaccaatttgcaggagaactggagaatagtagatttcttctctcaccacccagagagcctacacatgttcaccttcctctttgacgatgttggcatcccactcaactacaggcacatggagggctttggtgtcaatacctacaccttgatcaacagggatggaaagcctcaccttgtgaaattccattggaagcctacttgtggtgtgaaatgcttgctcgacaatgaagctgtgactgttggaggcacctgccacagccatgcgacgaaggatctatatgattccatcgcagctgggaattaccctgaatggaagctctacatccagactattgatcttgaccatgaggataagtttgactttgacccgctcgatgtcaccaagacctggcctgaggatatcatcccgctgcagcccgttggacggatggtcctgaacaagaacgtcgacaacttctttgcagagaatgaacagattgctttctgcccagcgattattgttcctggaattcactattctgatgataagctgctccagacgagaatcttctcctatgctgatacccagaggcaccgccttggtccaaactatctgatgcttcctgtgaatgcaccaaaatgtgcccaccacaataaccaccatgatgggttcatgaacttcatgcacagggacgaagaggtgaactacttcccttcgaggtttgatcccgcccgtcacgcggagaaggtccccattcctccccgtgttctaacaggctgtcgtgagaagtgcatcattcagaaggagaacaacttcaagcaggctggcgagagatatcgttccttcgaccctgcaaggcaagaccggttcatccagcgatgggttgacgcactgacagaccctcgcgtgacccatgaacaccgtaccatttggatctcctactggtcccagtgcgacgccgctcttggccagaagctggcttctaggctgaacctgaagccgagcatgtaagatcgacgaggaagaaagcaggcaccggtggccaaggatgcaacgcaacatggagcgtgtgatgtttacaccaatataattgaataaacaggggatgtgcgcgtcgttgtacttatgctgatgctgatggtcggtggtcgattatatatactggaacttctggtgtatgctcttctcttctggggagacgtaatgtaacgaagaagaatgtgtcattgtggcctgtggtacaaaccctgctgtgtatgggcctgtctataagaaacagcgatgagctgtgacgttatgtttctgacagtttatttactaaaaaaaaaaaaaaaa

SEQ ID NO: 4774 - protein, 492 aa, Zea mays
  misc_feature: Ceres CLONE ID no. 990656
  misc_feature: Ceres CDNA ID no. 36589921
  misc_feature (18)..(401): Pfam Name: Catalase PFAM Desc: Catalase
  misc_feature: Homolog of GI Number: 115679 NR Desc: Catalase isozyme 1
  misc_feature: Homolog of GI Number: 1705612 NR Desc: Catalase isozyme 1
  misc_feature: Homolog of GI Number: 2117614 NR Desc: catalase
  misc_feature: Homolog of GI Number: 6635734 NR Desc: catalase 1
  misc_feature: Homolog of GI Number: 66968812 NR Desc: catalase
  misc_feature: Homolog of GI Number: 3868754 NR Desc: catalase
  misc_feature: Homolog of GI Number: 54291140 NR Desc: catalase
  misc_feature: Homolog of GI Number: 516839 NR Desc: catalase
  misc_feature: Homolog of GI Number: 1149554 NR Desc: catalase
  misc_feature: Homolog of GI Number: 22232 NR Desc: catalase
MDPYKHRPSSGSNSSFWTTNSGAPVWNNNSALTVGQRGPILLEDYHLIEKLAQFDRERIPERVVHARGASAKGFFEVTHDVSHLTCADFLRAPGVQTPVIVRFSTVVHERGSPETLRDPRGFAVKFYTREGNFDLVGNNMPVFFIRDGMKFPDMVHAFKPNPKTNLQENWRIVDFFSHHPESLHMFTFLFDDVGIPLNYRHMEGFGVNTYTLINRDGKPHLVKFHWKPTCGVKCLLDNEAVTVGGTCHSHATKDLYDSIAAGNYPEWKLYIQTIDLDHEDKFDFDPLDVTKTWPEDIIPLQPVGRMVLNKNVDNFFAENEQIAFCPAIIVPGIHYSDDKLLQTRIFSYADTQRHRLGPNYLMLPVNAPKCAHHNNHHDGFMNFMHRDEEVNYFPSRFDPARHAEKVPIPPRVLTGCREKCIIQKENNFKQAGERYRSFDPARQDRFIQRWVDALTDPRVTHEHRTIWISYWSQCDAALGQKLASRLNLKPSM

SEQ ID NO: 4775 - DNA, 2136 bp, Zea mays
  misc_feature: Ceres CLONE ID no. 990900
  misc_feature: Ceres CDNA ID no. 25401184
  CDS (174)..(1895): REFERENCED BY SEQ ID NO: 4776
aacaacctcggcttctacgactacccgtaggagtcgaagtcgactggcgtagcgtaggaggcggcggttccaggcgaccatccaataatcgccaccctcacgcgagaaatccccggcaacttttggggaactacacgtgtatggagttttattagtattccaggggcatcacaatggcatactttcctgatgaagtagtagggtatatccttggttatgtaacgtcgcatcaggaccgcaacgcggtgtccttggtctgccgggcatggtacgacattgagcgtcatggccgccattcagtgcttgtaagaaactgttatgcggtgtgcccagagcgtgtacacatgcggtttcccaacatgcgtgcactgagcttgaagggcaaaccgcactttgctgaattcaaccttgtcccggcgggttggggtgccactgcaaatccatgggtggatgcgtgcgcccgtgcatgcccaggtcttgaggagctccggctgaagtttatggttgtgactgatgaatgcctcaagttgctttctctatcctttaccaactttaaatcacttgtccttgtttgttgtgaggggttcagtactaccgggcttgctaatattgccaccaattgcaggtttcttaaggaactagacttacaaaagagttgtgtgaaacatcaagaccatcagtggattaattgttttcccaagtcttcaacatcactagaatgcttgaatttttcctgcttgactggggaggtgaatgctgttgcactggaggaacttgttgcaaggagtccaaatcttaaaagtttaaggctgaatcttgcagttccatttgatgttttgtccagaatcctttctcgcacacctaagctagaggatttaggcacaggatcctttttacaaggcaatgaccctgctgcatatgccagtttatgtagagctcttgagaactgcacttcactgaagagtatatctggtttttgggatgctccaggcttttatgttcaaggaattttgtcaaattgcaagatcagaaatcttacatgcttgaatctcagctatgctacattgattcagagtacccagcttatcggtattattcgtcattgtaagaagctccatgtcttatgggtgttagatcacattggtgatgagggcttgaaggctgtgtccttttcttgtcctgatcttcaggagttgagggtatatccaagtgttgttgcaccaagaggtactgtgacgggggaagggttggtagccctatcatcgtgtcggaagttacagcgtgtgctcttcttttgtgatcgaatgacaaacacggcgctgatgacaatagcaaggtactgcccacggctaacgtccttcagactatgcattcgcaagcccaggtcagcagacgccgtcacaggacagccactggacgaaggctttggggcgatagtgcggtcctgcagaggcctgaggcgtcttgccatgtccggcttcctcacggacagcgtgttcctgtacatcggcatgtacgcggagaagctggagatgctctcggtaacgttcgcgggggacaccgacgacggcatggtctatgtgctcaatggctgcaggaacctcaagaagctggtaatcaaggagagccccttcggtgacgccgctctcctcgcgggcgcgcacaggtacgagtcaatgcgcagtctctggatgtcgtcctgccagatcaccctgggtggctgcaaggcccttgcggccaccatgccaaacatcaatgtcgaggtcatcggtggggcgagctttggtgcgatggatggtggtgtcagcggtgcgaggaaggtggacatgctctacctctaccgtactctggctggacctagatgcgatacgccagggttcgtctcgatattgtgagctgtatctatggctactgttggtggcgttcagggaaacccgatgttcttaaccgtgcctgctgcgggctgtggctgtgctactctgtctggtagtgtttcggaaacatgatgtttatttgcgtaaggtagtgtttggttctggaaccattttaagccttgttcagatattcatatacctcatggattggaagtgattagaaaaaaatatgaataattttgacttaaaaaaaaaaaaaaaa

SEQ ID NO: 4776 - protein, 573 aa, Zea mays
  misc_feature: Ceres CLONE ID no. 990900
  misc_feature: Ceres CDNA ID no. 25401184
  misc_feature: Homolog of GI Number: 34098913 NR Desc: At3g26830
  misc_feature: Homolog of GI Number: 30102460 NR Desc: At4g24390/T22A6_220
  misc_feature: Homolog of GI Number: 13249030 NR Desc: F
  misc_feature: Homolog of GI Number: 12658970 NR Desc: GRR1
  misc_feature: Homolog of GI Number: 50923929 NR Desc: OSJNBa0072K14.18
  misc_feature: Homolog of GI Number: 23297438 NR Desc: putative F
  misc_feature: Homolog of GI Number: 15027885 NR Desc: putative F
  misc_feature: Homolog of GI Number: 50949123 NR Desc: similar to Arabidopsis thaliana transport inhibitor response 1
  misc_feature: Homolog of GI Number: 7573427 NR Desc: transport inhibitor response 1
  misc_feature: Homolog of GI Number: 20466151 NR Desc: transport inhibitor response 1
MAYFPDEVVGYILGYVTSHQDRNAVSLVCRAWYDIERHGRHSVLVRNCYAVCPERVHMRFPNMRALSLKGKPHFAEFNLVPAGWGATANPWVDACARACPGLEELRLKFMVVTDECLKLLSLSFTNFKSLVLVCCEGFSTTGLANIATNCRFLKELDLQKSCVKHQDHQWINCFPKSSTSLECLNFSCLTGEVNAVALEELVARSPNLKSLRLNLAVPFDVLSRILSRTPKLEDLGTGSFLQGNDPAAYASLCRALENCTSLKSISGFWDAPGFYVQGILSNCKIRNLTCLNLSYATLIQSTQLIGIIRHCKKLHVLWVLDHIGDEGLKAVSFSCPDLQELRVYPSVVAPRGTVTGEGLVALSSCRKLQRVLFFCDRMTNTALMTIARYCPRLTSFRLCIRKPRSADAVTGQPLDEGFGAIVRSCRGLRRLAMSGFLTDSVFLYIGMYAEKLEMLSVTFAGDTDDGMVYVLNGCRNLKKLVIKESPFGDAALLAGAHRYESMRSLWMSSCQITLGGCKALAATMPNINVEVIGGASFGAMDGGVSGARKVDMLYLYRTLAGPRCDTPGFVSIL

SEQ ID NO: 4777 - DNA, 767 bp, Zea mays
  misc_feature: Ceres CLONE ID no. 990983
  misc_feature: Ceres CDNA ID no. 40041380
  CDS (2)..(217): REFERENCED BY SEQ ID NO: 4778
attaaccgcctctccctcgctcctctcgctcgctcggctcactccctctccaaagcggcagcctcacgcagtcacgcgctccaccacgccacctccctctactcactcatgttgttttccgtccatccgcccaccggttcgtagcccgcgccgcaaaaccctagccccgggaggatcgcggggcgcctccgcggtgccagcgacgtggctcgtttgatccgattgctggtcgagccccgccctcgctgccgcgcttcgctccggctgtgcagcggcgtgagcaccgagcacactcgcgaatggggaactgctagggtgcttggatcaaggatgggagccctcaccctggggcctcaggatcctctaggaaaattgatttctggagctgattcttcgacatcaacaatccagcagtgctagatttttttttgccaaagatggcttcatggcaagcagatatctcagaagacagcacttcatttctcttaagttctaaggtgtggcgttcgttggggaagagcgaagacttgttgaaggctgaggctgccagtccttcatcgtcggagtcgaatgaagagcagtctgagtcccattctttgccaagatgagcctcgccttttgccttcctatagattttcttcttcttcttcccatgtctttcttccccctggtcattttcattatcgggacattgagcaataaaatgacatgtattaccgcatttgaagcaggagcgctttccccttgtcttaaaaaaaaaaaaaaaa

SEQ ID NO: 4778 - protein, 56 aa, Zea mays
  misc_feature: Ceres CLONE ID no. 990983
  misc_feature: Ceres CDNA ID no. 40041380
MASWQADISEDSTSFLLSSKVWRSLGKSEDLLKAEAASPSSSESNEEQSESHSLPR

SEQ ID NO: 4779 - DNA, 1437 bp, Zea mays
  misc_feature: Ceres CLONE ID no. 991014
  misc_feature: Ceres CDNA ID no. 25446463
  CDS (188)..(1120): REFERENCED BY SEQ ID NO: 4780
acctgcacgctgcccccccgccccgccgcgggatcaaatacgccgcctccgcccgtccactccctcgccgcccccatctcctctcctccgcatccacggccgcaggcagcagccagccactcgacgatctagtcgtctctctccccgctctgccgcctcgctgccgcggcttcccgtcggctggaggatgaaggtcacggtcgtgtcccggagcggccgggaggtcgtcaagggcggcatcgacctcaaggactcggccaaggtcgcggacctgcaggaggccatccatgccaggactaagaagtattatccttctaggcagcggctcaccctcccccttcaacctggaaaaggcgggaagccagttgtcctcagtccgaaggccagcctgctagaatactgcgagaagggttctgggtcactgacagtggtcttcaaagatttagggccacaggtctactacagcacactgttcttcttcgagtacctgggtcctctcatcatctaccccatgttctactatctgcccgtctacaagtacttcgggtacgagggggagcgggccatgcaccctgtccagacctacgccatgtactactggtgcttccactacttcaagcggatcatggagacgttcttcgtgcaccgcttcagccacgcgacgtcgccgctctcgaacgtcttcaggaactgtgcctactactggaccttcggcgcctacattgcttactactgcaaccacccgctgtacaccccagtgagtgatctgcagatgaagattgggtttggttttggggtcgtctgccaggtcgcgaacttctactgccacatcctgctgcggaacctcaggagcccaagcggcagcggagggtaccagatcccccgcggtttcttgttcaacatcgtgacctgcgccaattacaccaccgagatctaccagtgggtcggcttcaacatcgccacacagaccgtggcaggttacgtcttccttgtcgtggcggcaggcatcatgaccaactgggcgctcggcaagcacagccgtctgaagaagctgtttgacggcaaggatgggaggcccaagtaccctcgccggtgggtgattctccctccgttcctgtgaagaggcggtggtggtggctcactgttggtggtcggcccattgtgattcgatgtctacagacagttgtactgtactaatcgtgcctgtttagcggttgaacttggattccgttgtccgaagtttctaatccgaaagatggatttcattttcttcttcttttcttagcattatgtcactgtcccacgtcgtcctgtctcaatacattctaaggttcatgtgatgttatccccatttgtccacgcagaagtgaagtgaatgcagttactatttcgattcgacactttttctgctgtcgtgtcctaaaaaaaaaaaaaaaa

SEQ ID NO: 4780 - protein, 310 aa, Zea mays; identical to SEQ ID NO: 442
  misc_feature: Ceres CLONE ID no. 991014
  misc_feature: Ceres CDNA ID no. 25446463
  misc_feature (158)..(310): Pfam Name: Steroid_dh PFAM Desc: 3
  misc_feature: Homolog of GI Number: 62866633 NR Desc: TSC13 protein
  misc_feature: Homolog of GI Number: 34895848 NR Desc: putative glycoprotein
  misc_feature: Homolog of GI Number: 55770329 NR Desc: putative synaptic glycoprotein SC2
  misc_feature: Homolog of GI Number: 25004880 NR Desc: steroid 5
  misc_feature: Homolog of GI Number: 21594270 NR Desc: synaptic glycoprotein SC2
  misc_feature: Homolog of GI Number: 17531783 NR Desc: steroid Alpha ReducTase family
  misc_feature: Homolog of GI Number: 30585427 NR Desc: Homo sapiens glycoprotein
  misc_feature: Homolog of GI Number: 30583197 NR Desc: glycoprotein
  misc_feature: Useful for making ornamental plants with modified flowers
  misc_feature: Useful for modifying plant structure
  misc_feature: Useful for sterility

SEQ ID NO: 4781 - DNA, 1014 bp, Zea mays
  misc_feature: Ceres CLONE ID no. 991038
  misc_feature: Ceres CDNA ID no. 29191891
  CDS (197)..(865): REFERENCED BY SEQ ID NO: 4782
atccgtcagccagccccatctccaccacccctccccgtccccgacgtagcagcagagcggagaggcggccaagccaattcctcaccggtagcttctccgcgctcccgggctccgcctcgccgcactcggatgccccctgcgctggcgcctagagcggcggcggtctagcgggcgccgggagcggtgaaatccacccatggccgacgctctcctccttccgtgccgcttcctcgcgccgttgtcagtcacatccggcgcctcttcatcagcctcttcgtccccgccgtgtcgttgggtgctctcgtcgcccggctcgccgtggcggccgcgcttggctgccgggcaacggcaaccccgacctcgccggttcactcggcacaagatttgtgcagcagagcgtggtgagcaaccgaaatggtgggagaaaaatgctgggccaaacatgattgacatccactccacagtggagttcttggatgcactaagagatgctggagacaggcttgttattgttgagttctacggaacctggtgtggttcatgcagggctctctttccaaggctctgccggacagctttggagacccctgatgtattgtttctaaaagtgaattttgatgaaaacaaacccatgtgcaaacgactgaatgtcaaagtccttcctttcttccatttttaccgtggagctgatgggctactggaggctttctcctgttccttagctaagtttcagaagctgaaggatgccgttgcaatgcacaacacggctcgttgcagcattggtccacctgttggagttggcgatgttgacttgctggatagcacgagccctcaagagaaacctgcagaagctagcccacattagattaatgagaaggagctcctccccatccacgtctacatcctgctcattgttttcttcactatagaccttaatgtaatcagttcaggagaactaaagtaccctcaattcatgaatcagatgtatggattatcgtaaaaaaaaaaaaaaaa

SEQ ID NO: 4782 - protein, 222 aa, Zea mays
  misc_feature: Ceres CLONE ID no. 991038
  misc_feature: Ceres CDNA ID no. 29191891
  misc_feature (83)..(187): Pfam Name: Thioredoxin PFAM Desc: Thioredoxin
  misc_feature: Homolog of GI Number: 55733862 NR Desc: putative thioredoxin
  misc_feature: Homolog of GI Number: 18417441 NR Desc: thioredoxin family protein
  misc_feature: Homolog of GI Number: 21554313 NR Desc: thioredoxin
  misc_feature: Homolog of GI Number: 21553512 NR Desc: putative thioredoxin
  misc_feature: Homolog of GI Number: 4538945 NR Desc: putative thioredoxin
  misc_feature: Homolog of GI Number: 4973258 NR Desc: thioredoxin
  misc_feature: Homolog of GI Number: 7269866 NR Desc: Thioredoxin
  misc_feature: Homolog of GI Number: 18377422 NR Desc: thioredoxin
  misc_feature: Homolog of GI Number: 53748517 NR Desc: thioredoxin 2
  misc_feature: Homolog of GI Number: 50940093 NR Desc: putative thioredoxin
MADALLLPCRFLAPLSVTSGASSSASSSPPCRWVLSSPGSPWRPRLAAGQRQPRPRRFTRHKICAAERGEQPKWWEKNAGPNMIDIHSTVEFLDALRDAGDRLVIVEFYGTWCGSCRALFPRLCRTALETPDVLFLKVNFDENKPMCKRLNVKVLPFFHFYRGADGLLEAFSCSLAKFQKLKDAVAMHNTARCSIGPPVGVGDVDLLDSTSPQEKPAEASPH

SEQ ID NO: 4783 - DNA, 579 bp, Zea mays
  misc_feature: Ceres CLONE ID no. 991126
  misc_feature: Ceres CDNA ID no. 40351519
  CDS (113)..(361): REFERENCED BY SEQ ID NO: 4784
attgattgattgatcggtcacctgacctcatagataactctagggcggacggacggacgcgcgtctccggtcccgtccgtaatagcactgatccgatccacgccggccggcgatggagctcatcaagtccagggcgaccgtgtgcgcgctcctcctggcgctgctcctgctctcgcactacgacggcgggacgacgacgacgatggtggcggaggcccgggtgtgcatgggcaagagccagcaccactcgttcccctgcatctccgaccgcctctgcagcaacgagtgcgtcaaggaggacggcgggtggaccgccggctactgccacctccgctactgcaggtgccagaaggcgtgctaagcaaagctcttgaaacacccttggcttgccagaactgaactgtggtagtactaagtaacacccttggctagctgtgcacaacctacgtaccgtgcatgcatgtaatgtggtgtcatgtaacgtgacagcaataaatattaataacaataataacacggcatgtagcctttgcatgcttctagcaaaaaaaaaaaaaaaaaagaaaaaaaaaaaaaaaa

SEQ ID NO: 4784 - protein, 82 aa, Zea mays
  misc_feature: Ceres CLONE ID no. 991126
  misc_feature: Ceres CDNA ID no. 40351519
  misc_feature (36)..(82): Pfam Name: Gamma PFAM Desc: Gamma
MELIKSRATVCALLLALLLLSHYDGGTTTTMVAEARVCMGKSQHHSFPCISDRLCSNECVKEDGGWTAGYCHLRYCRCQKAC

SEQ ID NO: 4785 - DNA, 907 bp, Zea mays
  misc_feature: Ceres CLONE ID no. 991584
  misc_feature: Ceres CDNA ID no. 40351520
  CDS (25)..(711): REFERENCED BY SEQ ID NO: 4786
attatatatcctggtgcttttgccatggctggtgcatcgctcctctccccatcctgcacgctcctccgcctgattcccagcgcgtcgcacatctgctgctcgtcgcacttcaagagattcgatcgggttcgccggttcgcgcccgccgccatggcgacttcctcaggaccaaaggaggcgccagcgaataaccctgggctccagaccgaggtcgaccccgccaccaaaggctacttcttgcaacaaacgatgttacgtgtgaaggacccaaaagtgagccttgacttctactcacgtgtgatgggcatgtcgttgctgaaaaggttggattttgaagagatgaaattcagtttgtattttctaggttacgaggatgtgaccttagcccctgatgatcatatcaagcggactgaatggacttttaggcaaaaagctactcttgagctcacccacaactggggcacggaaaatgaccctgaattcaaaggttaccataatgggaactcagaccctcgtggttttggtcatataggagtaactgtggatgatgtccacaaggcatgtgaacgctttgaacgtcttggggttgagtttgtgaagaaacctgatgatggaaaaatcaaaggcatcgctttcatcaaagatcctgatggttactggattgaaatatttgaccagacgattgggacggtaacttcttcagcatcatgatgaacagtagtggttccttatatggtgcgcaagatcatacaactctggcataagagcttttcatatgtgtgtctggggtctggactcggattaagggctggaatctgtttacttctagcatcttcttgctttaataatatgcgaactatgttgaggaatgaaataaaataagttcgggcaaaaaaaaaaaaaaaaa

SEQ ID NO: 4786 - protein, 186 aa, Zea mays
  misc_feature: Ceres CLONE ID no. 991584
  misc_feature: Ceres CDNA ID no. 40351520
  misc_feature (29)..(173): Pfam Name: Glyoxalase PFAM Desc: Glyoxalase/Bleomycin resistance protein/Dioxygenase superfamily
MATSSGPKEAPANNPGLQTEVDPATKGYFLQQTMLRVKDPKVSLDFYSRVMGMSLLKRLDFEEMKFSLYFLGYEDVTLAPDDHIKRTEWTFRQKATLELTHNWGTENDPEFKGYHNGNSDPRGFGHIGVTVDDVHKACERFERLGVEFVKKPDDGKIKGIAFIKDPDGYWIEIFDQTIGTVTSSAS

SEQ ID NO: 4787 - DNA, 1715 bp, Zea mays
  misc_feature: Ceres CLONE ID no. 991712
  misc_feature: Ceres CDNA ID no. 25446464
  CDS (2)..(1474): REFERENCED BY SEQ ID NO: 4788
atcgcataccagcaattccctccccccgctccggcccctcgcaccgtttccctttccccgccgctcctccgaagccaccaccgtgccccgccccgcgagggcacgaaagaggaggaacgcggccaccgccggcgagggttcgggctccgctcccgacggtttgcaacccgggagggagccgaccgtgcgcgcgcattgggcccgcgcgggggaagcggcaggcgcgtgccgtttttatttagcccgctccgctccgcgcccggcggctgcggggtgtggtgctcctgctgattttcttctcggcgccatggaggccggctactgcaaccgcaagaagaccgacggcatctgcgacggcgtctgcgacagcgagcttggttcaaagtcagtcctgagcatgtcgaggctgaagtgcgcgctgcggacattcgatctgagggttctcttgattctgctgatcggtgtgccaatcctgctcttcgcgatatacgtgcacggccagaaggtgacctacttcctccggccgatatgggagaagcccccaaagcccttcaaagtactcccccactactaccacgagaacgtctcgatggccaacctctgcaagctgcacggatggagagtcagggagaccccgcgccgcgtcttcgacgccgtgctcttcagcaacgagctcgacatccttgacatccgctggcacgagctgagcccctacgtgtcggagttcgtgctgctggagtccaactcgaccttcaccggcataaggaaggacctccacttcagggagaaccggcagcggttcggcttcgccgagtcgcggctgacctacggcaccataggcgggaggttcgtgaagggagagaacccgttcgtggaggagtcgtaccagagggtcgccctcgaccagctgatcaagatcgcgggcatcgcggacgacgacctgctgatcatgtcggacgtggacgagatcccgagcgggcacaccgtgaacctcctgagatggtgcgacgacgtccccgaggtactccacctccagctccggaactacctctactcgttcgagttcctgctcgacgacaggagctggcgggcctcggtgcacaggtacagggccgggaggacgaggtacgcgcacttccggcagacggacgacctcctggccgattccggatggcactgcagcttctgcttccgccgcatagacgacttcgtcttcaagatgaaggcctacagccacgtggaccggatcaggttcgggtacttcctgaacccgaggaggatccagcacgtgatctgcgagggggccgatctcttcgacatgctccccgaggagtacacgttccaggagatcatcgccaagctggggcctatcccgagcacgttctccgctgtccatctccccgcctatctgctggagcacaacgagcggtacaggtaccttctcccgggcaactgcgttagagagagtggctagtagctaaggctgtaaggcagctagctgtgttgctgtctgcatcgccatggcctgaggcgcaccgacgtcgctcgcggatgcatgcatgcgtggaggagcgccctgccgttgccggggttgttgtatctggatatacgactggctgggctgacttatatatttagatgatgaatgaatggtcgcttgaccgctgctggttcagttcgtatgaaaaaaaaaaaaaagaaaaaaaaaaaaaaaa

SEQ ID NO: 4788 - protein, 388 aa, Zea mays
  misc_feature: Ceres CLONE ID no. 991712
  misc_feature: Ceres CDNA ID no. 25446464
  misc_feature (28)..(387): Pfam Name: Glyco_transf_17 PFAM Desc: Glycosyltransferase family 17
  misc_feature: Homolog of GI Number: 50925145 NR Desc: OSJNBa0044K18.7
  misc_feature: Homolog of GI Number: 61845111 NR Desc: beta 1
  misc_feature: Homolog of GI Number: 30683061 NR Desc: glycosyl transferase family 17 protein
  misc_feature: Homolog of GI Number: 50910059 NR Desc: glycosyl transferase
  misc_feature: Homolog of GI Number: 50910063 NR Desc: glycosyl transferase
  misc_feature: Homolog of GI Number: 45433905 NR Desc: putative N
  misc_feature: Homolog of GI Number: 56283929 NR Desc: CG3047
  misc_feature: Homolog of GI Number: 72547041 NR Desc: proteophosphoglycan ppg1
  misc_feature: Homolog of GI Number: 72547036 NR Desc: proteophosphoglycan 5
  misc_feature: Homolog of GI Number: 72547023 NR Desc: proteophosphoglycan ppg4
MEAGYCNRKKTDGICDGVCDSELGSKSVLSMSRLKCALRTFDLRVLLILLIGVPILLFAIYVHGQKVTYFLRPIWEKPPKPFKVLPHYYHENVSMANLCKLHGWRVRETPRRVFDAVLFSNELDILDIRWHELSPYVSEFVLLESNSTFTGIRKDLHFRENRQRFGFAESRLTYGTIGGRFVKGENPFVEESYQRVALDQLIKIAGIADDDLLIMSDVDEIPSGHTVNLLRWCDDVPEVLHLQLRNYLYSFEFLLDDRSWRASVHRYRAGRTRYAHFRQTDDLLADSGWHCSFCFRRIDDFVFKMKAYSHVDRIRFGYFLNPRRIQHVICEGADLFDMLPEEYTFQEIIAKLGPIPSTFSAVHLPAYLLEHNERYRYLLPGNCVRESG

SEQ ID NO: 4789 - DNA, 719 bp, Zea mays
  misc_feature: Ceres CLONE ID no. 991727
  misc_feature: Ceres CDNA ID no. 40351521
  CDS (2)..(475): REFERENCED BY SEQ ID NO: 4790
acgagcccagcggcgtccttgtccggacgcgcatacgcatgttcaggcacgtgtcctgtcgtgtcttttttttttattcgatcagttcgttcatcgccttttatttcggccattttgtgctgtgtgtgcgactgtgcgctgtaccagctcgaaggaatggcccaacccggtgtcgaagaactgctacggcgagacggcaccggcgaccgggctcaactcgaccggccaggcctcgggccaggaccaggtgatccaggccgtgctgcggggcatgaagagccccgtccgtctcctcgacatcacggcgctgtcggcgatgcggaaggacgcgcacccgtcggcatacagcggcgacttctcgccggcgcagcgcgccaaccccggcgccggctccgttgactgcagccactggtgccttcccggcctcccggacacctggaaccagctcttctacacactcctcttctacaaatagcagtgacaccgcgatcgacacagaagaaagtcatccaaaatccaactgtacacctagcagctcgccagccattcgtatttttttttcgttgtgtgtaaaactagtgtgacgtcgttgcatcacaggagtatacgcaattagttggcgggagaaatgcgtcgataacgtttaaataaaagtgaagagcgtacaatctccgcatcaattgaacgtacatggcatttgcacaaaaaaaaaaaaaaaa

SEQ ID NO: 4790 - protein, 67 aa, Zea mays
  misc_feature: Ceres CLONE ID no. 991727
  misc_feature: Ceres CDNA ID no. 40351521
MKSPVRLLDITALSAMRKDAHPSAYSGDFSPAQRANPGAGSVDCSHWCLPGLPDTWNQLFYTLLFYK

SEQ ID NO: 4791 - DNA, 731 bp, Zea mays
  misc_feature: Ceres CLONE ID no. 991790
  misc_feature: Ceres CDNA ID no. 36591027
  CDS (72)..(533): REFERENCED BY SEQ ID NO: 4792
ctaaaccctacccacagccaccgccgccgccgccgctccctgacccctagtgtccggatttaacttcaaacatggcggacgtcgatgtcgagccggaggtcgccgccggtgctcccaagaagaggacgttccgcaagtacagctaccgcggcgtcgacctcgatgcgctgcttgacatgtccaccgacgacctcgttcagctcttcccagcgcgcgccaggagaaggttccagaggggtttgaagaggaagcccatggcgctcatcaagaagctgcgcaaggcgaaaaaggatgctcctgtcggcgagaagccagagccagtgaagacccatctccgcaacatgatcattgtccccgagatgattgggagcattgttggtgtctacaatggcaagaccttcaaccaggttgagatcaagcctgagatgattggccactatcttgcagagttctccatttcctacaagccggtcaagcacgggaggcccggtattggtgccactcactcctcgcggtttatccctctgaaatgagttgttacccagatctgtagcgtcccaagggtgtccagtggcattgccctttcagctttgctgcttgtttcgaacaagttacatacccaagacattttgttctgtttccagcactagatttcaaagctaagcattgcataactatgctgttttgttggaagtatgtgagtataatcttatctaaaaaaaaaaaaaaaa

SEQ ID NO: 4792 - protein, 153 aa, Zea mays
  misc_feature: Ceres CLONE ID no. 991790
  misc_feature: Ceres CDNA ID no. 36591027
  misc_feature (55)..(136): Pfam Name: Ribosomal_S19 PFAM Desc: Ribosomal protein S19
  misc_feature: Homolog of GI Number: 50919151 NR Desc: putative 40S ribosomal protein S15
  misc_feature: Homolog of GI Number: 50934735 NR Desc: putative 40S ribosomal protein S15
  misc_feature: Homolog of GI Number: 15425963 NR Desc: 40S ribosomal protein S15
  misc_feature: Homolog of GI Number: 20465567 NR Desc: putative ribosomal protein S15
  misc_feature: Homolog of GI Number: 20147171 NR Desc: At1g04270/F19P19_29
  misc_feature: Homolog of GI Number: 1107485 NR Desc: 40S ribosomal protein S15
  misc_feature: Homolog of GI Number: 82621162 NR Desc: 40S ribosomal protein S15
  misc_feature: Homolog of GI Number: 81076490 NR Desc: 40S ribosomal protein S15
  misc_feature: Homolog of GI Number: 2982268 NR Desc: probable 40S ribosomal protein S15
  misc_feature: Homolog of GI Number: 79316582 NR Desc: RPS15
MADVDVEPEVAAGAPKKRTFRKYSYRGVDLDALLDMSTDDLVQLFPARARRRFQRGLKRKPMALIKKLRKAKKDAPVGEKPEPVKTHLRNMIIVPEMIGSIVGVYNGKTFNQVEIKPEMIGHYLAEFSISYKPVKHGRPGIGATHSSRFIPLK

SEQ ID NO: 4793 - DNA, 895 bp, Zea mays
  misc_feature: Ceres CLONE ID no. 991802
  misc_feature: Ceres CDNA ID no. 25446465
  CDS (111)..(728): REFERENCED BY SEQ ID NO: 4794
atatccaccaccaccagtgcctccaccgaatcttcaacaggcaaagccaatcaataatcaccagccacatccacatcaatccattccctttcctctcccgctccacttccatgggcaaggttcggtccttcttctcccgctcccgcagcggcaagcgcggcagcgcccggagggcaggctcgtcctcgccgcactcctccgcggcgagcgcgccgccgtccccgtccccactcccactcccgaggaggtcgccgtcgtcgtcgtcgtcgaccagggacgagacggagcgcgtgttccgcaagttcgacgcgaacggcgacgggcagatctcgcggtccgagctggcggcgctgttcgagggcgtgggccacgccgtgaccgacgacgaggtgtcgcgcatgatggaggaggcggacgcggacggcgacggctgcatcagcctgcccgagttcgccgcgctcatggagtccgcgtccgccgacgccgccgccgtggaggaggacctgcgccacgccttcatggtcttcgacgccgacggcaacggcctcatcacgcccgccgagctcgcgcgcgtcctgcgcggcctcggggagtccgccaccgtcgcccagtgccgccgcatgatccagggcgtcgaccgcaacggcgacggcctcgtctccttcgacgagttcaagctcatgatggccgcgggcggcggcggcggattcggcaggatcggtgcctaggaacaaggatcctgtgcctgtcctgctctgcctctgctccgctccgctccgctccgctcccacaaattggatttctttcattttattatgtatgtacatatactacactggaatcacacggacagcgccacgtaaaaaagcccccttttccaaaaaaaaaaaaaaaa

SEQ ID NO: 4794 - protein, 205 aa, Zea mays
  misc_feature: Ceres CLONE ID no. 991802
  misc_feature: Ceres CDNA ID no. 25446465
  misc_feature (93)..(121): Pfam Name: efhand PFAM Desc: EF hand
  misc_feature: Homolog of GI Number: 50904487 NR Desc: B1147A04.10
  misc_feature: Homolog of GI Number: 71040671 NR Desc: calcium
  misc_feature: Homolog of GI Number: 25403253 NR Desc: protein F21J9.28
  misc_feature: Homolog of GI Number: 14589311 NR Desc: calcium binding protein
  misc_feature: Homolog of GI Number: 5391446 NR Desc: pollen allergen Jun o 4
  misc_feature: Homolog of GI Number: 28301674 NR Desc: calcium
  misc_feature: Homolog of GI Number: 21592699 NR Desc: putative calcium binding protein
  misc_feature: Homolog of GI Number: 40850579 NR Desc: calmodulin
  misc_feature: Homolog of GI Number: 4586262 NR Desc: putative calmodulin
  misc_feature: Homolog of GI Number: 34895640 NR Desc: OSJNBa0083M16.33
MGKVRSFFSRSRSGKRGSARRAGSSSPHSSAASAPPSPSPLPLPRRSPSSSSSTRDETERVFRKFDANGDGQISRSELAALFEGVGHAVTDDEVSRMMEEADADGDGCISLPEFAALMESASADAAAVEEDLRHAFMVFDADGNGLITPAELARVLRGLGESATVAQCRRMIQGVDRNGDGLVSFDEFKLMMAAGGGGGFGRIGA

SEQ ID NO: 4795 - DNA, 728 bp, Zea mays
  misc_feature: Ceres CLONE ID no. 991910
  misc_feature: Ceres CDNA ID no. 25446466
  CDS (3)..(329): REFERENCED BY SEQ ID NO: 4796
ctaaaaccctaaaccgcacaaaaccgcctacgccattccgctgtccgcaatccactccctcctcccacgaaactcttggccatggcttggcgcggcgccgcctcccgctcaatcttcgccgccgtccgtgcccgcgccgcatcctcctcctcctcctcagcggccacgcgcctccgctcggcggctccaattgccgccaccccgcgccgcaccgtccccgcctttgctttcgcggccgcgaggccgttggcggcgatggcggggtaccccgcggcggtcgcggtgaggctcaccgggcactcggcgacgagcgtgcgggcgtgctgtgagctctcccagggcacttgaatgcacacttttgtcttccaatgcaagggtaggatctctcgtcgggcttgcggcctttttcctgcattttgcagagtgcctcgtgtgtcggcaaacggacagtacacttgctgcaactaaaatataaacaagcctatgttagcctgctacgcagtacgcactgtgttcgtgcatgttttcatttgaccttgtttccatgatgcttcgacgtgttacgcgtgctcgtgcttcttgctgtgtcatcactggtccacattttcttgcggaaagtgttcctttgtacgagcttatgaaaccagtgtgcacaagcgacggacggatttgtaccatccagaacgatagtgatccgttttaccaactcccgaaaaaaaaaaaaaaaa

SEQ ID NO: 4796 - protein, 88 aa, Zea mays
  misc_feature: Ceres CLONE ID no. 991910
  misc_feature: Ceres CDNA ID no. 25446466
MAWRGAASRSIFAAVRARAASSSSSSAATRLRSAAPIAATPRRTVPAFAFAAARPLAAMAGYPAAVAVRLTGHSATSVRACCELSQGT

SEQ ID NO: 4797 - DNA, 740 bp, Zea mays
  misc_feature: Ceres CLONE ID no. 992093
  misc_feature: Ceres CDNA ID no. 25445735
  CDS (229)..(441): REFERENCED BY SEQ ID NO: 4798
agaccgttcgatcttcgatctagcactagatcaccaactggaaaaaataacacgcacgcaagaggagaaaacaatccgcaaatcggcgctcggcttccgtcctttccgtgcctccgccgatccgccgcaaccgcgtcgtccgtccccccgttcggtcgccgccctctttcccgcctcccttctcggcctccgtcctcctccgcgtccgcggcctcctcctcgtgcttcatgtctgcgctcttcaacttccactcgtttgtgacggtggtgctgctgctgatctgcacttgcacgtacctcaagatgcacttcccctccctcctcatccgccggacagggttccgtggtttcttttggaaggctgctaggataggtgaacgccttagcccctgggtagccattgggtgctctgtgatgggcatatcaattttattttggtgaaattggaagatttgtatggccttctttgcttacgattactccattgtaagatagcccgttacttgcttctttcataagcatgtaagaaactgcacagtccttaattgtccttttatcacatttcagaagagaagcatcagaattttgcagttacagtctgattcttcgagatgtcgcatgcttgtaatcttgtagctgtggtgtattattgtgctatgttatgcattttgactattgggcaccatcatgttatgttgttttattgtattgtcagcatgctaacaaaaaaaaaaaaaaaa

SEQ ID NO: 4798 - protein, 70 aa, Zea mays
  misc_feature: Ceres CLONE ID no. 992093
  misc_feature: Ceres CDNA ID no. 25445735
  misc_feature: Homolog of GI Number: 24643250 NR Desc: CG14199
  misc_feature: Homolog of GI Number: 55233291 NR Desc: ENSANGP00000027958
  misc_feature: Homolog of GI Number: 54643799 NR Desc: GA12819
  misc_feature: Homolog of GI Number: 73952320 NR Desc:  similar to CG14199
  misc_feature: Homolog of GI Number: 76669099 NR Desc:  similar to CG14199
  misc_feature: Homolog of GI Number: 32404220 NR Desc: predicted protein
MSALFNFHSFVTVVLLLICTCTYLKMHFPSLLIRRTGFRGFFWKAARIGERLSPWVAIGCSVMGISILFW

SEQ ID NO: 4799 - DNA, 785 bp, Zea mays
  misc_feature: Ceres CLONE ID no. 992235
  misc_feature: Ceres CDNA ID no. 40351522
  CDS (136)..(360): REFERENCED BY SEQ ID NO: 4800
aaaaacaagcgtcgtcattcatttcctcactcagcgaggctaggcaagctggccgtcaagctcaggccgtcaggcgatacaactacaagcctacagtgcctacccctccgccgcctagagagagagaggccagcgatgacgaagacgacgccgccggcgttcgtgtaccggatcagcacggccgacgagtgggcggagtttcagcgcacgggcgccacccttggaggcgacctcgacagctccaccggctgcatccatctcagcgacctaaaccaggtgaagatgactttaaaaaactttttccttggaaggaatgatctgtacctactgcaaattgatactttcaagatactgttgtgaaggcagacaaaatagagtttgcagacaatgattttacctgtggtctacttgatggaagttatctcccaagctgatctgtagagtctcaccttcatcttagcaatgctcatttgagttctctgccaaaggttagtgtttaatatgtctatatatgcagaagtcggtcatatatttgagtgacagattgtaccatccagaattttccacagttattcatatactttctggtggaagataaaatatgaaactgtatgtaattgacgcatcatgatggatacggatgttcattatgctatagcaagtagtacaatgtgtacttgctgtcatgttacatccagtgcctggttgcataaacaataagcactatatgttaccttgggtaacatacttgtaataatgatatgaattcaaaaaaaaaaaaaaaa

SEQ ID NO: 4800 - protein, 74 aa, Zea mays
  misc_feature: Ceres CLONE ID no. 992235
  misc_feature: Ceres CDNA ID no. 40351522
MTKTTPPAFVYRISTADEWAEFQRTGATLGGDLDSSTGCIHLSDLNQVKMTLKNFFLGRNDLYLLQIDTFKILL

SEQ ID NO: 4801 - DNA, 642 bp, Zea mays
  misc_feature: Ceres CLONE ID no. 992519
  misc_feature: Ceres CDNA ID no. 40351523
  CDS (47)..(505): REFERENCED BY SEQ ID NO: 4802
agtacaaactcccgtcgtggcatctcaccgtttccaggatacgaccatgaggtcggccatcctgcttacgatctgcaccttgtccgcgctgctgctggtagcgcgcggctcggagaagccatcggccgcgccgccgccggtggtggccgtgggcgtggcggcggccagcgacctcatccgctccggcggtcaccgctacctggacgtcagaacagaggaggaattcaggagtgggcatgtggaggattcactcaacgtgccctatcttttcttcacttcacaaggaagggagaagaaccccaagttcatcgcacaggtcgcagcgggtttcgacaaagaggacaacatagttgtgggctgcaaaagcggagtgaggtctgaattagcatgtgctgatctcatggcagctggatttagaaatgtgaagaacatcgaaggtggttataccgcatgggtggaaagtggccttgccgtgaagaaatctcaagcacaagatgaactatgatgtgccctatcatgttggttcttccttgctttgacgacaaccttcgtatagaaaataataggtttaaatgagcaaaaatatacttccttggttatttaaatatatgacacagttgattttcaaaaaaaaaaaaaaaa

SEQ ID NO: 4802 - protein, 152 aa, Zea mays
  misc_feature: Ceres CLONE ID no. 992519
  misc_feature: Ceres CDNA ID no. 40351523
  misc_feature (36)..(139): Pfam Name: Rhodanese PFAM Desc: Rhodanese
MRSAILLTICTLSALLLVARGSEKPSAAPPPVVAVGVAAASDLIRSGGHRYLDVRTEEEFRSGHVEDSLNVPYLFFTSQGREKNPKFIAQVAAGFDKEDNIVVGCKSGVRSELACADLMAAGFRNVKNIEGGYTAWVESGLAVKKSQAQDEL

SEQ ID NO: 4803 - DNA, 520 bp, Zea mays
  misc_feature: Ceres CLONE ID no. 992959
  misc_feature: Ceres CDNA ID no. 29191513
  CDS (139)..(348): REFERENCED BY SEQ ID NO: 4804
acgcacctgctccattacccgtctgccgtcggcataacataatcgtcgtcgcgtgcagtccccattcccttttccagtggtctgttgctcgcgcttcgtccagcttccccggaagaggtagcacggcaagggcagaggatgagtgaccccaagtacgcctacccctaccccgcgcaaggttactaccaggggccgtaccagggcccgccggtgatggcgccgccacagtacgccgcgccgccgcccagaagggagccgagcttcctggaaggctgcctggccgcgctgtgctgctgctgcttgatcgacgagtgctgctgcgacccgtccatcatcttcgtcagctagactagacgatgaagcgaggaagaacctattggtatatataatatgtatgtatccagttgtactcttagctttattcctgcaaccttcaagctcgagatgatctgtatctcggtcgagttggtgtgtatcaactatcatctgtcatggtattgcttcaaaaaaaaaaaaaaaa

SEQ ID NO: 4804 - protein, 69 aa, Zea mays
  misc_feature: Ceres CLONE ID no. 992959
  misc_feature: Ceres CDNA ID no. 29191513
  misc_feature: Homolog of GI Number: 50919167 NR Desc: unknow protein
  misc_feature: Homolog of GI Number: 8515092 NR Desc: adhesive/proline
  misc_feature: Homolog of GI Number: 50938779 NR Desc: adhesive/proline
  misc_feature: Homolog of GI Number: 42565788 NR Desc: proline
MSDPKYAYPYPAQGYYQGPYQGPPVMAPPQYAAPPPRREPSFLEGCLAALCCCCLIDECCCDPSIIFVS

SEQ ID NO: 4805 - DNA, 634 bp, Zea mays
  misc_feature: Ceres CLONE ID no. 993304
  misc_feature: Ceres CDNA ID no. 40351524
  CDS (127)..(378): REFERENCED BY SEQ ID NO: 4806
tcctctcttcagtctctccccttcgcggctgcctcccaccgcgtgccgccgccctacgccaggtgccccccacgtcgtcatcgtgcccgtggccgccggcgacgaacgcccagcagggggaggaggatgggcgagttcgacgactactgggcgcgggcgtacaggggcgaccccgcggtcccgcactccgacccgcagcggctcatctccacctggaccggcgcctttgccctcggcgcggccgcctgcgtccaccaccacgcctccgcgctcgcatcccacctcaagtccctaccggcgacttggcaagacatgacattggcccttgatcaaaagcgatggaagaaagcttttgagaaaaaacggcagcaagcttaagctcgttgttctatccaacttcttgggccagttggatgagcacgtgtctggtcatcaattctggcgcatgaagcttcaaagttctctctatatacacatgatgtattgactgaggttctacttttggttttcttgtttagcgttacaactttctcagtttgtgtatttgctccatctcagatcatcagatgacattcagaatgatttgtctattcttaaattctctattatctttttaacaaaaaaaaaaaaaaaa

SEQ ID NO: 4806 - protein, 83 aa, Zea mays
  misc_feature: Ceres CLONE ID no. 993304
  misc_feature: Ceres CDNA ID no. 40351524
MGEFDDYWARAYRGDPAVPHSDPQRLISTWTGAFALGAAACVHHHASALASHLKSLPATWQDMTLALDQKRWKKAFEKKRQQA

SEQ ID NO: 4807 - DNA, 745 bp, Zea mays
  misc_feature: Ceres CLONE ID no. 993322
  misc_feature: Ceres CDNA ID no. 25402633
  CDS (170)..(436): REFERENCED BY SEQ ID NO: 4808
attggtcggacccgcgtggttctcccgtgtcctctctctctagtgtcgacgagtgggcgaacgccgccaccgccttacgccagtcgccaggcgctcaggttttcatcttcgggcccttcaccggcgaccagcacccaacaggctttgatgattgctgtacaaggatgatatggcctcccgcccaaagctgtctggtattcagaagcaggttttggcgctgtacaggggattccttcggacagcacgccttaaggcccctgaagaacgccgcaggatcgagtctgttgtctttgcagagttccgtgacaacgcaaggagtgttgaccgtaggaactttgtacacatagagtacttgttgaggagagggaagaagcagcttgagcagctcaagaatcctgatattactggactcgctacccttgtagtaaagaaatgaggtccattcattgccagaacaaagtatcatcatgataccggtgtttctaatgtgaagatttggaacctgccactgatggtgtccaaataaaataaatatgaccacagattacagatttgatatccagggactttctaatcagcctattagaatctgaagataaatcttgtagcacctgtccggtgacccatagtaatattattttactcttgctgtaagcagaggttaacactaaaaaaagtattgtgattggtctgaactttttgtgcggtataaagcatgtgattcagctcaaaaaaaaaaaaaaaa

SEQ ID NO: 4808 - protein, 88 aa, Zea mays
  misc_feature: Ceres CLONE ID no. 993322
  misc_feature: Ceres CDNA ID no. 25402633
  misc_feature (9)..(75): Pfam Name: Complex1_LYR PFAM Desc: Complex 1 protein
  misc_feature: Homolog of GI Number: 45185892 NR Desc: ACR206Cp
  misc_feature: Homolog of GI Number: 13129166 NR Desc: Hypothetical ORF identified by homology. See FEBS Letters
MASRPKLSGIQKQVLALYRGFLRTARLKAPEERRRIESVVFAEFRDNARSVDRRNFVHIEYLLRRGKKQLEQLKNPDITGLATLVVKK

SEQ ID NO: 4809 - DNA, 666 bp, Zea mays
  misc_feature: Ceres CLONE ID no. 993517
  misc_feature: Ceres CDNA ID no. 36589923
  CDS (152)..(433): REFERENCED BY SEQ ID NO: 4810
acggaactcatcccgctgtgcgcttcgtttcgtggcggcgaacggccggtcgagcgccgccgcccttggctgggtcttcactcagtccttcgccggcgacgagcgtccacctggtgtctactgaactgagcagacagtagcaagagccactatgctgttcttctcctacttcaaggagctcgtggggaaggaggtgacggtggaactcaagaatgacctggcgatccgcgggacgctccactcggtagaccagtacctcaacatcaagctggaaaacacccgcgttgtcgaccaggacaagtatccccacatgctgtcagtgcggaactgcttcatccggggctcggtggtgcggtacgtgctgctcccgcaggacggcgtggacgtggacatcctgcacgacgccaccaggagggaggcgcgcggaggctgatcggcatcggcatcggcccccctcacctgtgctgcttctcccccggggaggagattgatctgccttgccctgatctcgtctggttgtacgaaacatatgctgatctgagtggccccaactcccccagcacacacttgatccaccacccacccagctccctgcctggtacttgcatgttccttgctgtgtgtgtgtgtgttcagcacacacttgatccaaaaaaaaaaaaaaaa

SEQ ID NO: 4810 - protein, 93 aa, Zea mays
  misc_feature: Ceres CLONE ID no. 993517
  misc_feature: Ceres CDNA ID no. 36589923
  misc_feature (5)..(72): Pfam Name: LSM PFAM Desc: LSM domain
  misc_feature: Homolog of GI Number: 50941255 NR Desc: putative snRNP core protein SMX5d
  misc_feature: Homolog of GI Number: 18379085 NR Desc: small nuclear ribonucleoprotein D
  misc_feature: Homolog of GI Number: 21553911 NR Desc: snRNP core Sm protein Sm
  misc_feature: Homolog of GI Number: 21358381 NR Desc: CG10418
  misc_feature: Homolog of GI Number: 54642144 NR Desc: GA10305
  misc_feature: Homolog of GI Number: 15679962 NR Desc: Lsm2 protein
  misc_feature: Homolog of GI Number: 61097894 NR Desc: smx5
  misc_feature: Homolog of GI Number: 11138539 NR Desc: snRNP core protein SMX5d
  misc_feature: Homolog of GI Number: 61844463 NR Desc:  similar to snRNP core protein SMX5d
MLFFSYFKELVGKEVTVELKNDLAIRGTLHSVDQYLNIKLENTRVVDQDKYPHMLSVRNCFIRGSVVRYVLLPQDGVDVDILHDATRREARGG

SEQ ID NO: 4811 - DNA, 773 bp, Zea mays
  misc_feature: Ceres CLONE ID no. 993570
  misc_feature: Ceres CDNA ID no. 29191514
  CDS (182)..(514): REFERENCED BY SEQ ID NO: 4812
ggttttggacggggtgggcgagtggcatctttcttctataagcttctagcagcatccgccaccgccgcggaggcccaaatatatctccccgcgtccgctagccctagccgccgtccgccgacttcatcgtcgccgtcgtctagacctcttcacgcactggaaaggttaaagtccgacatcaatggcgaagcatcatcctgatctcatcatgtgccggaagcagcctggcatcgcgattggccgcctttgcgagaaatgtgatggcaagtgtgttgtctgcgactcgtacgtgcgcccatgtacgcttgtccgggtctgcgacgagtgcaattatggttcgttccagggaaggtgtgtgatctgtggaggagtcggcatctcagacgcttactactgcaaggagtgcacccagcaggagaaggaccgggacggttgccccaagatcgtgaatctcggaagcgccaagacggatctcttctatgagcgcaagaagtatggttttaagaagagatgaccgagaagatggagctgtgtgtggttcactttggctgtgtggtctgttctatggcactgaatactgagagtaggcagctgagacagcagctttgtattcctgttatggtttgataattgatactggcatggaaatacagctgtgatatgcgttgtaataactaagtccaactgtatgatgcaagagactgcttatgtaatctgtgcttgatggtaatggttatgaatggacttgaaatattggaaaaaaaaaaaaaaaa

SEQ ID NO: 4812 - protein, 110 aa, Zea mays
  misc_feature: Ceres CLONE ID no. 993570
  misc_feature: Ceres CDNA ID no. 29191514
  misc_feature (1)..(106): Pfam Name: PHF5 PFAM Desc: PHF5
  misc_feature: Homolog of GI Number: 72032358 NR Desc:  similar to transcription factor INI
  misc_feature: Homolog of GI Number: 31234226 NR Desc: ENSANGP00000013177
  misc_feature: Homolog of GI Number: 57092723 NR Desc:  similar to transcription factor INI
  misc_feature: Homolog of GI Number: 54645620 NR Desc: GA21871
  misc_feature: Homolog of GI Number: 21711783 NR Desc: RH02789p
  misc_feature: Homolog of GI Number: 32564382 NR Desc: PHd Finger protein
  misc_feature: Homolog of GI Number: 61871038 NR Desc:  similar to transcription factor INI
  misc_feature: Homolog of GI Number: 62655406 NR Desc:  similar to transcription factor INI
  misc_feature: Useful for increasing seed/fruit yield or modifying fruit content
MAKHHPDLIMCRKQPGIAIGRLCEKCDGKCVVCDSYVRPCTLVRVCDECNYGSFQGRCVICGGVGISDAYYCKECTQQEKDRDGCPKIVNLGSAKTDLFYERKKYGFKKR

SEQ ID NO: 4813 - DNA, 633 bp, Zea mays
  misc_feature: Ceres CLONE ID no. 993650
  misc_feature: Ceres CDNA ID no. 25446467
  CDS (54)..(353): REFERENCED BY SEQ ID NO: 4814
acccgagcccttctccgcgaaatagccgtcgccgcactgccgcagctccggctatgtcaatcttcgagtacaatgggtccgccgtggtggcgatggtggggaagaactgcttcgcgattgccagcgaccggcggctcggcgtgcagcttcagaccatcgcgacagacttccagagggtgttcaagatccacgacaagctctacatcggcctctcagggctcgccaccgacgcccagacgctgtaccagcggttggtcttcaggcacaagctgtatcagctgcgcgaggagagggacatgaagcctgagacctttgccagccttgtctctgcgctcctctacgagaagaggtgaggattttgctagtgcgcttttgggggaattgtgtaggattctgggtaaacctactgcgggtagttgttattttaaattttgaatgcgctgccagaccgtggactctgtaaagagatgcaaaactatgttggttgcatgctgctgaaggatttggtcgtaggaagctagtgctaccaataccttgtactgtgatggtattggggatgcagaactttggagctagatctttatatgaaacgctttgccttttggacggacaattccaaaaaaaaaaaaaaaa

SEQ ID NO: 4814 - protein, 99 aa, Zea mays
  misc_feature: Ceres CLONE ID no. 993650
  misc_feature: Ceres CDNA ID no. 25446467
  misc_feature (5)..(99): Pfam Name: Proteasome PFAM Desc: Proteasome A
  misc_feature: Homolog of GI Number: 51535468 NR Desc: 20S proteasome subunit beta type 3
  misc_feature: Homolog of GI Number: 50905713 NR Desc: Proteasome subunit beta type 3
  misc_feature: Homolog of GI Number: 2982322 NR Desc: probable proteasome subunit
  misc_feature: Homolog of GI Number: 14594927 NR Desc: putative beta 3 proteasome subunit
  misc_feature: Homolog of GI Number: 19548049 NR Desc: At1g77440/T5M16_3
  misc_feature: Homolog of GI Number: 21387087 NR Desc: proteasome subunit
  misc_feature: Homolog of GI Number: 12744997 NR Desc: putative 20S proteasome beta subunit PBC2
  misc_feature: Homolog of GI Number: 21553663 NR Desc: putative 20S proteasome beta subunit PBC2
  misc_feature: Homolog of GI Number: 50760756 NR Desc:  similar to Zgc:56374
  misc_feature: Homolog of GI Number: 47028283 NR Desc: proteasome beta subunit
MSIFEYNGSAVVAMVGKNCFAIASDRRLGVQLQTIATDFQRVFKIHDKLYIGLSGLATDAQTLYQRLVFRHKLYQLREERDMKPETFASLVSALLYEKR

SEQ ID NO: 4815 - DNA, 743 bp, Zea mays
  misc_feature: Ceres CLONE ID no. 993749
  misc_feature: Ceres CDNA ID no. 25446468
  CDS (410)..(610): REFERENCED BY SEQ ID NO: 4816
agtcgccatgggcatcggctacgtagtgggcgtcctcggcggcgccatcctcgcccacgccgcctacgccaccatccagtgtacgctccatccttgtcccatcccgtcgccgcgctctcaccaaatttcgccgtggatctccgtttcccgagggcgcctttgatttgccgtcttgactctgggttgccgttccgtcgtgggttctcggtccttcggaacccgatgtgctctcggatcgatcctgccgttgagcctttagtgaagtgaggcgaggtttagatctagttcacgagcttctgtgatcctgggctctcttcaccgaccgggttcgacggctgcgtggttggctcagcagtgcacccaccgcgcggtgctcaagatcacggaggaggagttctcgcggccgcccatggatgtgatgatggagttgctcttagggttggtcttgtgcatgtgggcaggtcttgctgttcccactaaatttctctcggtgcttccacattctgatgagaataggatcgtctcgctcccggctaacctggatttcatgatcttcaaccaccgtggaagagcgctgccgtcagactcagacctgaaactccatacatagacatgtccagaatccagatcttttttctttattttctgtaaggccttgttcggttattcctattacacatggattagatgagattggaaaaaattaaaaataaatttgacttgcttgaaaaaaaaaaaaaaaa

SEQ ID NO: 4816 - protein, 66 aa, Zea mays
  misc_feature: Ceres CLONE ID no. 993749
  misc_feature: Ceres CDNA ID no. 25446468
MDVMMELLLGLVLCMWAGLAVPTKFLSVLPHSDENRIVSLPANLDFMIFNHRGRALPSDSDLKLHT

SEQ ID NO: 4817 - DNA, 1037 bp, Zea mays
  misc_feature: Ceres CLONE ID no. 994272
  misc_feature: Ceres CDNA ID no. 40351525
  CDS (180)..(845): REFERENCED BY SEQ ID NO: 4818
agaggaacccaaaccacctcggccggtcggcccacgggccacgacccaaaaaaggatcaaggtgggagaaacaaaacacaaggcggcgtccacagcttccccactccacgttccgtgtttccgactccggtgactccaccaccagcaacccgtgcagcgagcgcactccgaccatcgccatgtcgaggcgcggcgactgggtctacgagaacaacggcgggacctgcgtggccatcgccggcgctgattactgtgtcgtcgctgcggacacccgcctctctgtaggatacagtatcctcacgcgtgatcactccaagatctgcgacctggctgacaaatgtgtactggcatcttctggctttcaaggtgatattaaggctctgcagaagaacctagctgccagagaattgctgtaccaacaccagcataataaaaggatgagctgccccgccatggcacagctcctctccaataccctgtactacaagcgattcttcccatattacgccttcaatgtgctcggtgggcttgacagcgaggggaaaggatgcgttttcacctatgatgcagtaggttcctatgagagaaccggttacagtgctcagggaacgggatctactttgatcatgccagtcctggacaatcaactaaaatcaccaagtcctctattactccctgtcagggatgctgtcacaccattgtcggagtcagaggccatcgatctagttaaggacgtgttcgcatctgcaactgagagagacatctacactggagacaagttggaaattgtagtcattaacaaggccggtactatgcgcgagtatatcgacctgagaaaggattaagccaacacttcagttgtgctgcagctgtcatttgctttgaactttttttcctagtctggtgatttatgtctaaagctgttgcttcataggaacacttgtgtttacttgcatatgtaatgtacggtatgtaccaggattcagtgagttttttttctgttgaaacaaattgcttggataaaaaaaaaaaaaaaa

SEQ ID NO: 4818 - protein, 221 aa, Zea mays
  misc_feature: Ceres CLONE ID no. 994272
  misc_feature: Ceres CDNA ID no. 40351525
  misc_feature (10)..(206): Pfam Name: Proteasome PFAM Desc: Proteasome A
MSRRGDWVYENNGGTCVAIAGADYCVVAADTRLSVGYSILTRDHSKICDLADKCVLASSGFQGDIKALQKNLAARELLYQHQHNKRMSCPAMAQLLSNTLYYKRFFPYYAFNVLGGLDSEGKGCVFTYDAVGSYERTGYSAQGTGSTLIMPVLDNQLKSPSPLLLPVRDAVTPLSESEAIDLVKDVFASATERDIYTGDKLEIVVINKAGTMREYIDLRKD

SEQ ID NO: 4819 - DNA, 771 bp, Zea mays
  misc_feature: Ceres CLONE ID no. 994454
  misc_feature: Ceres CDNA ID no. 36589873
  CDS (180)..(572): REFERENCED BY SEQ ID NO: 4820
aaataaaacaaaaaacaaaaccgcagcagctcctccactggcacactccccctctggcctctaccctgcctgccgtttccatctccatccagttctccgcacccacccacgaccacgacccacccacccactcctttccccaacccacggccgtggacgccagggtcttctacctcaagatgaagggggactaccaccgctacctcgccgagttcaagaccggcgccgagcgcaaggacgccgcggactccacgctcgccgcctaccaggccgcgcaggacatcgccgtcaaggagctgccgcccacgcatcccatcaggctcggcctcgccctcaacttctccgtcttctactacgagatcctcagctcgccggaccgcgcctgctcgctggccaagcaggccttcgacgaagctatttcagagctggatagtcttggggaagagtcgtacaaggatagcacactcatcatgcagcttcttcgtgacaacctcaccttgtggacttctgacatgcaggaggatggtggcgatgaaatgcgggatgcaaacaagcctgacgaggagcagtagtagccaaacatctccatcgatcatgccatgccatgccatgcttgtacaaggaccattttcgtgtgtcctttccttcaatcgtcgacctttcgttttgttgttatactgctattgtggaaccctgttactgttactgttagtgtatcctattggcaataatcaaatgtggtatggttgactactaaaaaaaaaaaaaaaa

SEQ ID NO: 4820 - protein, 130 aa, Zea mays
  misc_feature: Ceres CLONE ID no. 994454
  misc_feature: Ceres CDNA ID no. 36589873
  misc_feature: Useful for making plants with modulated growth and phenotype characteristics
  misc_feature: The sequence is a functional homolog of  SEQ ID NO 793 in the  11/479,226 US patent application
  misc_feature (1)..(116): Pfam Name: 14 PFAM Desc: 14
  misc_feature: Homolog of GI Number: 50946923 NR Desc: putative TaWIN2
  misc_feature: Homolog of GI Number: 9798605 NR Desc: TaWIN2
  misc_feature: Homolog of GI Number: 4850247 NR Desc: 14
  misc_feature: Homolog of GI Number: 51964902 NR Desc: PREDICTED OJ1124_B05.7 gene product
  misc_feature: Homolog of GI Number: 44917143 NR Desc: 14
  misc_feature: Homolog of GI Number: 44917141 NR Desc: 14
  misc_feature: Homolog of GI Number: 1771170 NR Desc: 14
  misc_feature: Homolog of GI Number: 8099063 NR Desc: 14
  misc_feature: Homolog of GI Number: 3766535 NR Desc: 14
  misc_feature: Homolog of GI Number: 47558857 NR Desc: 14
MKGDYHRYLAEFKTGAERKDAADSTLAAYQAAQDIAVKELPPTHPIRLGLALNFSVFYYEILSSPDRACSLAKQAFDEAISELDSLGEESYKDSTLIMQLLRDNLTLWTSDMQEDGGDEMRDANKPDEEQ

SEQ ID NO: 4821 - DNA, 450 bp, Zea mays
  misc_feature: Ceres CLONE ID no. 994507
  misc_feature: Ceres CDNA ID no. 29191515
  CDS (46)..(303): REFERENCED BY SEQ ID NO: 4822
aaaaaaaaactcactcgacaaaaacaaatctccctaatttcagtcatgaaggcccaggtcgcagcagcaactgtcttggtcttgctcctcctgacctttgctgcggaggctcgtacgtgcatgtcgcgaagccaggaacagaaagggaggtgctttcacgatacggattgtgccgccgtctgcgtcaaacagagcttcaccggaggcttatgcaacgggcggccgccgttcaagcagtgcttctgcactaagccatgcaagagagagagagctgatgctacactccggtcgtcaggcctctgatcatgttgtgcttgatccgcatgacagcgcgactctcgcttgtatgcctaggttgatgtgtatgtaataaataaacaaaatagtaaatgacatgtttttcttacatgaaagtcaagcgattttgcttatcgaaaaaaaaaaaaaaaa

SEQ ID NO: 4822 - protein, 85 aa, Zea mays
  misc_feature: Ceres CLONE ID no. 994507
  misc_feature: Ceres CDNA ID no. 29191515
  misc_feature (23)..(71): Pfam Name: Gamma PFAM Desc: Gamma
  misc_feature: Homolog of GI Number: 7939581 NR Desc: thionin like protein
  misc_feature: Homolog of GI Number: 533692 NR Desc: protease inhibitor
  misc_feature: Homolog of GI Number: 45451621 NR Desc: Kunitz
  misc_feature: Homolog of GI Number: 20067024 NR Desc: gamma thionin
  misc_feature: Homolog of GI Number: 4753797 NR Desc: gamma
  misc_feature: Homolog of GI Number: 22324363 NR Desc: defensin
  misc_feature: Homolog of GI Number: 17066707 NR Desc: defensin protein precursor
  misc_feature: Homolog of GI Number: 1362092 NR Desc: gamma
  misc_feature: Homolog of GI Number: 32400845 NR Desc: proteinase inhibitor Rgpi9
MKAQVAAATVLVLLLLTFAAEARTCMSRSQEQKGRCFHDTDCAAVCVKQSFTGGLCNGRPPFKQCFCTKPCKRERADATLRSSGL

SEQ ID NO: 4823 - DNA, 738 bp, Zea mays
  misc_feature: Ceres CLONE ID no. 994518
  misc_feature: Ceres CDNA ID no. 25447521
  CDS (127)..(402): REFERENCED BY SEQ ID NO: 4824
cgaaaaatcaacgacagccccagacaacactcaccgatagcaagtagcgccgccgacgtttcgagagcagagtatccaagctagccaagcgcgcacctcggtgacctagctagttcaggcgacgatatggcgtcaggtcaggaaagcaggaaggagctggaccgcaaggcccgcgagggcgagaccgtcgtccccggcgggaccggcggcaagagcgtcgaggcccaggagcacctcgccgaagggcgcagccgcggaggccagactcgcagggagcagctggggcagcaggggtacagcgagatggggaagaagggcggtctgagcaccacggacgagtccggcggcgagcgcgccgccagggagggcgtcagcatcgacgagtccaagttcaccaagtagtcctatcgcgtgcgtgcgtacgcagcgttcgtagctgtctgcgtagtgtaccttggccgtagctagtgctactctctactttggagtagctgaatgataataatgtagctagcagcatgcatgtaggcgatcatacatacgtacgtacatgcaggtacttgtgtgtgatcatgtatgcttccagaagggtatcctagcttaattagtcatgtcgtcagtcgtcaaaatggcaggttcgcgtcagagctttgtagtttggtagcctgtttcacgactcctcaataatcagtagtgtaatgaaagtttggcggttccttgttaaaaaaaaaaaaaaaa

SEQ ID NO: 4824 - protein, 91 aa, Zea mays
  misc_feature: Ceres CLONE ID no. 994518
  misc_feature: Ceres CDNA ID no. 25447521
  misc_feature (1)..(91): Pfam Name: LEA_5 PFAM Desc: Small hydrophilic plant seed protein
  misc_feature: Homolog of GI Number: 22271 NR Desc: embrygenic protein
  misc_feature: Homolog of GI Number: 7594649 NR Desc: Early
  misc_feature: Homolog of GI Number: 19013 NR Desc: LEA B19.1
  misc_feature: Homolog of GI Number: 312519 NR Desc: Em protein
  misc_feature: Homolog of GI Number: 7594645 NR Desc: Early
  misc_feature: Homolog of GI Number: 1345529 NR Desc: gB19.1b
  misc_feature: Homolog of GI Number: 7594647 NR Desc: Early
  misc_feature: Homolog of GI Number: 6138910 NR Desc: Em H5 protein
  misc_feature: Homolog of GI Number: 4007844 NR Desc: Em protein
  misc_feature: Homolog of GI Number: 167381 NR Desc: storage protein
MASGQESRKELDRKAREGETVVPGGTGGKSVEAQEHLAEGRSRGGQTRREQLGQQGYSEMGKKGGLSTTDESGGERAAREGVSIDESKFTK

SEQ ID NO: 4825 - DNA, 669 bp, Zea mays
  misc_feature: Ceres CLONE ID no. 994587
  misc_feature: Ceres CDNA ID no. 25446470
  CDS (147)..(428): REFERENCED BY SEQ ID NO: 4826
actattttaaattttaggacctaattataagactctctcttggagatgctctaaggcaccgactcgccggggacagagagagagaccgacgcgccggcagatcccaagctcaccctagagggggaagagggcgaccgaaggcggcgatgggtttcatcatggacttcgcggagaatctgatcctccgtctgatggaggacccggacaagcgcgaccaggttcggcgggagcatgtctacaagatgaaggagcggtgcgagcgcactaaggcggcgtggagcctccctctgcgcccctacggcttctggaccttcgaccgcttcaactcgcagctctcctgggatccccagatcagccaggccgccggccgtcgggacccctacgacgacctcatcgcacgccactctggctcgccgccgtcttcctgaacacccgttccgatctttgcccagaaggtctacttgggcatcaataagaaactctttcccctcaaactgattgtggttccatcctcttctgtctggaaaatgttgtcaccaaactaccctatttcctgttccagtttggcatggaagtataagttgtgtacttctattctcaagttgttgtctttgtattatgaaatgtttccaataatcagcagtttttgatggaaaaaaaaaaaaaaaa

SEQ ID NO: 4826 - protein, 93 aa, Zea mays
  misc_feature: Ceres CLONE ID no. 994587
  misc_feature: Ceres CDNA ID no. 25446470
  misc_feature: Homolog of GI Number: 42565426 NR Desc: At1g67350
  misc_feature: Homolog of GI Number: 83776790 NR Desc: RW1
MGFIMDFAENLILRLMEDPDKRDQVRREHVYKMKERCERTKAAWSLPLRPYGFWTFDRFNSQLSWDPQISQAAGRRDPYDDLIARHSGSPPSS

SEQ ID NO: 4827 - DNA, 571 bp, Zea mays
  misc_feature: Ceres CLONE ID no. 994610
  misc_feature: Ceres CDNA ID no. 25446003
  CDS (17)..(400): REFERENCED BY SEQ ID NO: 4828
gacgacgacgacggcgatggcctggctgaggcggacggagacgctggtgctgctgctcgtggtgcttctggcctccgcttcaacctccgcggcggcggcggcggcgggagaggaggaggaaagagtgatcaggctgaagcactgtgatggtggttattcttataaccatactctggctcatattcttgtcgaatacgcgtctgcggtgtacacatctgacttgacatcacttttctcatggacctgtccaaggtgcaaaggccacacaaagggatttgaggtcatagagatcatagtagatgtggagaactgcttacaggcgtttgttggagttgcacctgaccctcgatccataatcattgcttttagaggcactcaacagcacagacgatggatatgattgatgtgtcgtgatgtttttttatgaaacactttgcaacacttgtttgtgagacacaatttcagtttgcaacaaccgtcgaacctatatgttggtagaacctatatgttgatgttaaatttgtgaatgttaatatttatgtgagaatatttgtgaaaaaaaaaaaaaaaa

SEQ ID NO: 4828 - protein, 127 aa, Zea mays
  misc_feature: Ceres CLONE ID no. 994610
  misc_feature: Ceres CDNA ID no. 25446003
  misc_feature: Homolog of GI Number: 77552336 NR Desc: triacylglycerol lipase
  misc_feature: Homolog of GI Number: 15238889 NR Desc: lipase class 3 family protein
  misc_feature: Homolog of GI Number: 23397205 NR Desc: putative triacylglycerol lipase
  misc_feature: Homolog of GI Number: 50198977 NR Desc: At5g18630
  misc_feature: Homolog of GI Number: 42573417 NR Desc: lipase class 3 family protein
  misc_feature: Homolog of GI Number: 51963632 NR Desc: PREDICTED P0625E02.103 gene product
  misc_feature: Homolog of GI Number: 50939829 NR Desc: putative triacylglycerol lipase
  misc_feature: Homolog of GI Number: 50931235 NR Desc: 'putative triglyceride lipase
  misc_feature: Homolog of GI Number: 21425569 NR Desc: triacylglycerol Lipase
  misc_feature: Homolog of GI Number: 21425571 NR Desc: triacylglycerol lipase
MAWLRRTETLVLLLVVLLASASTSAAAAAAGEEEERVIRLKHCDGGYSYNHTLAHILVEYASAVYTSDLTSLFSWTCPRCKGHTKGFEVIEIIVDVENCLQAFVGVAPDPRSIIIAFRGTQQHRRWI

SEQ ID NO: 4829 - DNA, 710 bp, Zea mays
  misc_feature: Ceres CLONE ID no. 994617
  misc_feature: Ceres CDNA ID no. 29191893
  CDS (89)..(394): REFERENCED BY SEQ ID NO: 4830
accaccacccgagcgggcccgaactccgtcacaacacgcaaaaccctaacccaatctcgtttcccacgtctctcgctcccagtcccagatgggtctcttctcgtggtggaggggagggcgacgcggcggcgccccgccggaccagcaagcctcggcggttgcgggggtcgtggggaccgacgtggcagcttctggcacccacggggcggtggaggtgcggcggcagcggcaggctgcggacgcgacggtgttcgaattcgggtccgcggcggagtctggcgccgctgtgacgctcgccggctactgccccgtatctgatgagctcgagccgtgccgctgggagcttgtcccggccgctgttgatggcgcgccgcagttccgcatcgtgttctgagcgtgagacatctcggatggtaccgaatttcataggtataaagatgtggtgtttgggggtgtactggtaaccaagcattcagctaaaataaaacttgtgatgtggttgatgagcttctgattagatatggatggtcatatatgctcactttgtctggatggattcttttatgattacagatgaactaattcgtcactacagacaaacagtaatgtaagagcgctaaaatttatggatgagttatagcatgatcgaaaaaaaatgcttggtagatgcagtggacatgagagagagtttcttaaaaaaaaaaaaaaaa

SEQ ID NO: 4830 - protein, 101 aa, Zea mays
  misc_feature: Ceres CLONE ID no. 994617
  misc_feature: Ceres CDNA ID no. 29191893
  misc_feature: Homolog of GI Number: 7019678 NR Desc: allyl alcohol dehydrogenase
MGLFSWWRGGRRGGAPPDQQASAVAGVVGTDVAASGTHGAVEVRRQRQAADATVFEFGSAAESGAAVTLAGYCPVSDELEPCRWELVPAAVDGAPQFRIVF

SEQ ID NO: 4831 - DNA, 714 bp, Zea mays
  misc_feature: Ceres CLONE ID no. 994636
  misc_feature: Ceres CDNA ID no. 40351526
  CDS (1)..(507): REFERENCED BY SEQ ID NO: 4832
acgattgttcagcgccggatgaatttaatggtacatatcggagctactgataagcctatttcaaaattcttcaccaagaaatcgactgcctacgatctatcagggaagtatgagaatatgtcacgggagcttgctcatgcttacaaagcagcgaaagtggaatgcgatggatcagtagaaaatcaaggaggggacggcaaccaacaccagtcccgagagaagcaaactactaattgtactataaaggatgaacctgtcaccttggaaccacaagttttcgagacaccgtggagcatcgagcatgaagatactatgactctggctggtgccactttggaaacacaacgtgatttgggattcaagagaaagatcgaggacactcaagtcgaagctagcatgaaaccctctcagcttaccaggaaggaaaaagctgtaaaagcagcttcggatgggcaggcatcgttgctttcatatttcgcaaggaagcagggtcgctcgatgaagtagtttgcggtagccgtgccatgtattcctgtgtaactcaaactttaccagtacctgtcctccgtgttcgggacaaactatttcggttttaattttgttttggctaccactaaaatgaaccagctagatttctgcggtcattaattttctgcggcccaacttagccgaggccaatgaaaaaagaactttatttcaaaaaaaaaaaaaaaa

SEQ ID NO: 4832 - protein, 162 aa, Zea mays
  misc_feature: Ceres CLONE ID no. 994636
  misc_feature: Ceres CDNA ID no. 40351526
MNLMVHIGATDKPISKFFTKKSTAYDLSGKYENMSRELAHAYKAAKVECDGSVENQGGDGNQHQSREKQTTNCTIKDEPVTLEPQVFETPWSIEHEDTMTLAGATLETQRDLGFKRKIEDTQVEASMKPSQLTRKEKAVKAASDGQASLLSYFARKQGRSMK

SEQ ID NO: 4833 - DNA, 1451 bp, Zea mays
  misc_feature: Ceres CLONE ID no. 994766
  misc_feature: Ceres CDNA ID no. 40041381
  CDS (65)..(1243): REFERENCED BY SEQ ID NO: 4834
acacgtttcacgcacctcgcgtcctcgccccgctctgttcgagttcccgttgtaggcgcacgccatggccgcggccattctccgccgccttgtccccaccgccgccagccagctcgtggcgccgctgccgcttctcgcgcgtggggtctccgactccgcggacgcggtcaccgttgacacctcggtgcccttcaagtcccacatcgtggacccgccaccgcgcgaggccaccacctcggcgcgggagctgctgtccttcttccgcgacatgtcgctcatgcggcgcttcgagatcgcggcggactcgctctacaaggccaagctcatccgaggcttctgccacctctacgacggccaggaggccgtcgccgtcggcatggaggccgcagccacccgcgccgacgccatcatcaccgcctaccgcgaccactgcgcgtacctcgcgcgcggcggggaccccgtcgccgccttcgccgagctcatgggccgccgggacggctgctccaggggcaagggcgggtccatgcacttctacaagcgggacgccaacttcttcggcggccacggcatcgtcggcgcgcaggtgccgctcgggtgcggcatcgccttcgcgcagaggtacaggaaggagggcaccgtcacgtttgacctctacggcgacggcgccgccaaccagggacagctcttcgaggcgcttaacatggccgcgctctggaagctgcctatcatattggtctgcgagaacaaccactatgggatggggacggcagagtggagggcctccaagagcccggcttactacaagcgcggggactatgtgcctggcttaaaggtcgatggaatggatgttcttgctgtgaagcaagcttgcaaatttgccaaagaacatgcccttgaaaatgggccaattatccttgagatggacacctacagataccacgggcactcaatgtcagatccaggtagcacctaccgcacaagggatgagatcgctggcataaggcaggagcgtgatccaattgaaagggttaggaagctcatgttggtccatgagttcgcaacggcccaagagctaaaggacatggagaaggagatcaggaagcaagtcgacgctgccattgctaaagcgaaggagtgtccactgcctgatccatctgagctcttcacaaatgtttatgttaatgactgcggtttggagtcgtttggtgtagacaggaaggaggtgaggaccgttcttccgtaggctggcaaacaaaaaaaaggttctactgatacagtacgaagaagtttgctgcgtatgtatatggacgcatcacaccgcagtagtttcctcacttgtggttatggtcctatggaccccgggttataatttcctctgctcgtcgagctatcacaatgtgcagccgagattttgtcaggtgctcatgtcatgccgaaaaaaaaaaaaaaaa

SEQ ID NO: 4834 - protein, 392 aa, Zea mays
  misc_feature: Ceres CLONE ID no. 994766
  misc_feature: Ceres CDNA ID no. 40041381
  misc_feature (151)..(286): Pfam Name: TPP_enzyme_C PFAM Desc: Thiamine pyrophosphate enzyme
  misc_feature: Homolog of GI Number: 473169 NR Desc: E1 alpha subunit of pyruvate dehydrogenase precursor
  misc_feature: Homolog of GI Number: 1709449 NR Desc: Pyruvate dehydrogenase E1 component alpha subunit
  misc_feature: Homolog of GI Number: 15293169 NR Desc: putative pyruvate dehydrogenase E1 alpha subunit
  misc_feature: Homolog of GI Number: 52076750 NR Desc: putative pyruvate dehydrogenase E1 alpha subunit
  misc_feature: Homolog of GI Number: 50912579 NR Desc: putative pyruvate dehydrogenase E1 alpha subunit
  misc_feature: Homolog of GI Number: 5080822 NR Desc: pyruvate dehydrogenase E1 alpha subunit
  misc_feature: Homolog of GI Number: 28465345 NR Desc: pyruvate dehydrogenase E1 alpha subunit
  misc_feature: Homolog of GI Number: 3851005 NR Desc: pyruvate dehydrogenase E1 alpha subunit
  misc_feature: Homolog of GI Number: 28465343 NR Desc: pyruvate dehydrogenase E1alpha subunit
  misc_feature: Homolog of GI Number: 68138987 NR Desc: pyruvate dehydrogenase
MAAAILRRLVPTAASQLVAPLPLLARGVSDSADAVTVDTSVPFKSHIVDPPPREATTSARELLSFFRDMSLMRRFEIAADSLYKAKLIRGFCHLYDGQEAVAVGMEAAATRADAIITAYRDHCAYLARGGDPVAAFAELMGRRDGCSRGKGGSMHFYKRDANFFGGHGIVGAQVPLGCGIAFAQRYRKEGTVTFDLYGDGAANQGQLFEALNMAALWKLPIILVCENNHYGMGTAEWRASKSPAYYKRGDYVPGLKVDGMDVLAVKQACKFAKEHALENGPIILEMDTYRYHGHSMSDPGSTYRTRDEIAGIRQERDPIERVRKLMLVHEFATAQELKDMEKEIRKQVDAAIAKAKECPLPDPSELFTNVYVNDCGLESFGVDRKEVRTVLP

SEQ ID NO: 4835 - DNA, 734 bp, Zea mays
  misc_feature: Ceres CLONE ID no. 994781
  misc_feature: Ceres CDNA ID no. 25446471
  CDS (64)..(426): REFERENCED BY SEQ ID NO: 4836
ctcttggttcgccgaaccccaaaccctagtttcgctcgttgcggcggctgcggcgagccggcgatggcgaagtctctgcgatccaaacgcgagaagcggcttcggacgttgcgccgggagatagcggagccgttctacgacaagaaggaggccgccaagctcgccgcgcaggccgcagccctagctgctgccccgctcccggtccgcggccccccgccgtcccaggatgccggctcctcccgcgcagctagctcggcctcggctatggctatggatgtggagatgtctggtgcagggaacagcaggtctaagaccttcctgaggccacttggcagcattagcaagaagaaggtgcagcttcatttgaagatcaagaaagacaagagaaaagctaggaagaagggaaagttttcttttaagaagtagacgagtgtatgatgaatcatgcagttttgttcccagtttgtaaaacaaacgcactgcagtcatgtcatgtggtgcacctacctaagtccattcatgggtgacctactaaatatgttgaaatgggtacgaaaaaaggatagtgctgacctatcagctgtttctgttctgcgggtataaatgtcaagtactcaaattgctgagattttatttcattttcacattgtatcgtggtgaaccatgtttggaaacaatgtcgagtacttagggagcatatgaactgtcattttgtgtcaaaaaaaaaaaaaaaa

SEQ ID NO: 4836 - protein, 120 aa, Zea mays
  misc_feature: Ceres CLONE ID no. 994781
  misc_feature: Ceres CDNA ID no. 25446471
  misc_feature: Homolog of GI Number: 50928655 NR Desc: OSJNBa0085I10.17
MAKSLRSKREKRLRTLRREIAEPFYDKKEAAKLAAQAAALAAAPLPVRGPPPSQDAGSSRAASSASAMAMDVEMSGAGNSRSKTFLRPLGSISKKKVQLHLKIKKDKRKARKKGKFSFKK

SEQ ID NO: 4837 - DNA, 1104 bp, Zea mays
  misc_feature: Ceres CLONE ID no. 994802
  misc_feature: Ceres CDNA ID no. 36587496
  CDS (95)..(988): REFERENCED BY SEQ ID NO: 4838
acatctagagcggaacaggcccaaagcccgcagctcgggctaaaaccctaacgacctggcctcgccaagacgccaacacaccggaacccccaaaatggcaccggcgccggaaccgaccgcagcggccgccggccgcaagcgcaagaaaccgcacgggccctccaaaatcatcgcgaagaaatccgcggatcccaaacgggcatacgcgaagaagaagaaagagaagcataagcaaaaggagaagaagtcgcggctaaaacccgccgagccggaccaaatcgccgccaccatcggagatggcgtcgcaggggcaacggtcctactgtcggcattgatgcagccgtcgcggcagctcgagtttctcctccgtagcttcgagcgcgcctctaagatgcgcctctctcctctcgaactcgattcctactcagagggctgcatggtgcagcttgcggagggagcagcccaggacgtcgagagcttcggtgatcatgtaaaaggggtgttcggctcttcgtggaaggaagagctctgtgagggaaatcacatcgatggtgagatcgccgtgggcagcccaacacttctggttatcagctcatctgctttgcgatctttagacctactgaggggtttgaagatgtttactaaagaatgccgaccagtaaagctctttgccaaacacttgaaagtggaggagcaggtggcgatgcttaatgctcgagtaaatattgcctgtggtacaccgagcaggatcaaaaaactaattgacatggaagctttgtccttgtcacgcttgaaactagtggtacttgacatgcagaaggatgcaaagtccttcaccttgtttacattaccacaagtcagcaatgagttctgggacctgtacaaaggttacctagatccaaagatccgagaaggcaacatgaagatatgtttttatggtgccgtgtccgagagagacatcaccaaaacattttcactagctgagtaaatgcctgtatgagttcattgtattctgcagattaatttaacctttttggagctgatttttgatgatgctgaaaaatgagaaattttcggtgcattcttttaaaaaaaaaaaaaaaa

SEQ ID NO: 4838 - protein, 297 aa, Zea mays
  misc_feature: Ceres CLONE ID no. 994802
  misc_feature: Ceres CDNA ID no. 36587496
  misc_feature: Homolog of GI Number: 50923303 NR Desc: OSJNBa0020I02.12
  misc_feature: Homolog of GI Number: 62858527 NR Desc: LOC549697
  misc_feature: Homolog of GI Number: 51261691 NR Desc: MGC84286 protein
  misc_feature: Homolog of GI Number: 50729648 NR Desc:  similar to RIKEN cDNA 2610528E23
  misc_feature: Homolog of GI Number: 32417762 NR Desc: predicted protein
MAPAPEPTAAAAGRKRKKPHGPSKIIAKKSADPKRAYAKKKKEKHKQKEKKSRLKPAEPDQIAATIGDGVAGATVLLSALMQPSRQLEFLLRSFERASKMRLSPLELDSYSEGCMVQLAEGAAQDVESFGDHVKGVFGSSWKEELCEGNHIDGEIAVGSPTLLVISSSALRSLDLLRGLKMFTKECRPVKLFAKHLKVEEQVAMLNARVNIACGTPSRIKKLIDMEALSLSRLKLVVLDMQKDAKSFTLFTLPQVSNEFWDLYKGYLDPKIREGNMKICFYGAVSERDITKTFSLAE

SEQ ID NO: 4839 - DNA, 813 bp, Zea mays
  misc_feature: Ceres CLONE ID no. 994935
  misc_feature: Ceres CDNA ID no. 40351527
  CDS (84)..(542): REFERENCED BY SEQ ID NO: 4840
gcctaacaaaaccttcaaggattcctggggcttgttcgcctcactctgatgttgttgcttcgtataacctgatcacataaacaatggtgaaggctgttgctgtgcttggtagcagcgatggtgtcaagggcaccatctttttcacccaagagggagatggccctaccgctgtcaccggaagtgtctctggcctcaagcctggcctccatgggttccatgtacatgcacttggtgacaccaccaatggatgcatgtcaactggaccacactacaatcctgcgagcaaggagcatggggcaccagaagatgagaaccgccatgctggtgatcttggaaacgtgacagctggagcagatggtgttgctaatatcaatgtcaccgacagccagatcccactgactgggccaaactcaatcattggcagagctgttgttgttcacgctgatcctgatgatcttggaaagggtgggcacgagctcagcaagagcactggaaacgccggtggccgtgttgcttgtgggatcattggactccagggctgaaaacgatcgccggacttgggggtgcctgagaggtccgtctcctgccgtccccagcagacgagcctgaacattcggagacatcgtgaaataagagcgtcgctgatctgtgatcatcgtatttgtcattatgcacctgtagcaaccgatggactgaactgtgctggattatgctgttggatcacctgagtatgtgttacatgtcggttttgatgtgacatcctatcgtttcgatgtgttttgtggaagtgttgttgcaaaaaaaaaaaaaaaa

SEQ ID NO: 4840 - protein, 152 aa, Zea mays
  misc_feature: Ceres CLONE ID no. 994935
  misc_feature: Ceres CDNA ID no. 40351527
  misc_feature (1)..(152): Pfam Name: Sod_Cu PFAM Desc: Copper/zinc superoxide dismutase
MVKAVAVLGSSDGVKGTIFFTQEGDGPTAVTGSVSGLKPGLHGFHVHALGDTTNGCMSTGPHYNPASKEHGAPEDENRHAGDLGNVTAGADGVANINVTDSQIPLTGPNSIIGRAVVVHADPDDLGKGGHELSKSTGNAGGRVACGIIGLQG

SEQ ID NO: 4841 - DNA, 853 bp, Zea mays
  misc_feature: Ceres CLONE ID no. 994989
  misc_feature: Ceres CDNA ID no. 36704590
  CDS (51)..(755): REFERENCED BY SEQ ID NO: 4842
atattattgagaccaactagcaacatagaaagcacaatagtgtaccaacaatggcagctaaaatattttgcctccttatgctccttggtctttctgcaagtgctgctacggcgaccattttcccacaatgctcacaagctcctatagcttcccttcttcccccgtacctctcaccaacggtgtcttcggtatgtgaaaacccaattcttcaaccctacaggatccaacaggcaatcgcagctggcatcttacctttatcacccttgttcctccaacaatcatcagccctattacagcagttacctttggtgcatttattggcacaaaacatcagggcacaacaactacaacaacttgtgctagcaaaccttgctgcctactctcagcaacagcagtttcttccattcaaccaactagctgcattgaactctgcttcttatttgcaacaacaacaactaccattcagccagctatctgctgcctacccccagcaatttcttccattcaaccaactgacagcattgaactctcctgcttatttacagcagcaacaactactaccattcagccagctagctggtgtgagccctgctaccttcttgacacaaccacagttgttgccgttctaccagcacgctgcgcctaacgctggcaccctcttacaactgcaacaattgctgccattcaaccaacttgctttgacaaacccagcagcattctaccaacaacccatcattggtggtgccctcttttagatttcttatgagttatagttcaataataaagttttttgtctgatgtttgtggcttcccagaaataagaaagtacatttctagaaaaaaaaaaaaaaaa

SEQ ID NO: 4842 - protein, 234 aa, Zea mays
  misc_feature: Ceres CLONE ID no. 994989
  misc_feature: Ceres CDNA ID no. 36704590
  misc_feature (1)..(234): Pfam Name: Zein PFAM Desc: Zein seed storage protein
  misc_feature: Homolog of GI Number: 16305125 NR Desc: 19kD alpha zein B1
  misc_feature: Homolog of GI Number: 72315 NR Desc: 19K zein precursor
  misc_feature: Homolog of GI Number: 224509 NR Desc: zein E19
  misc_feature: Homolog of GI Number: 168691 NR Desc: zein
  misc_feature: Homolog of GI Number: 22446 NR Desc: 19 kDa zein
  misc_feature: Homolog of GI Number: 22534 NR Desc: zein
  misc_feature: Homolog of GI Number: 535020 NR Desc: zein Zd1
  misc_feature: Homolog of GI Number: 535021 NR Desc: zein Zd1
  misc_feature: Homolog of GI Number: 100940 NR Desc: zein zA1
  misc_feature: Homolog of GI Number: 41745908 NR Desc: low molecular weight glutenin
MAAKIFCLLMLLGLSASAATATIFPQCSQAPIASLLPPYLSPTVSSVCENPILQPYRIQQAIAAGILPLSPLFLQQSSALLQQLPLVHLLAQNIRAQQLQQLVLANLAAYSQQQQFLPFNQLAALNSASYLQQQQLPFSQLSAAYPQQFLPFNQLTALNSPAYLQQQQLLPFSQLAGVSPATFLTQPQLLPFYQHAAPNAGTLLQLQQLLPFNQLALTNPAAFYQQPIIGGALF

SEQ ID NO: 4843 - DNA, 703 bp, Zea mays
  misc_feature: Ceres CLONE ID no. 995074
  misc_feature: Ceres CDNA ID no. 40351528
  CDS (94)..(486): REFERENCED BY SEQ ID NO: 4844
aaaaaaaaaccctaatcgcatctgcttccagagccccccgccgccgctgcgccctcctctcggtcctgccgtccgtcgaggtaaaaggacagcatggtgagggtcagcgtgctcaatgatgctctcaagtccatgtacaatgctgaaaagatagggaaacgtcaggtcatgatcaggccgtcatccaaggtgatcatcaagttcctgacggtcatgcagcgccatggctacattggcgagttcgagtacgtggatgaccacagagctgggaagatcgtggtggagctgaatggaagactgaataaatgtggtgttattagcccacgttttgatgtaggtgttaaggagatcgagggatggacggcgaggcttcttccatctcgccagtttggctacatcgtcctaacaacttctgctggaattatggaccatgaggaggcccgccgtaagaatgttggtggcaaggttctaggtttcttttattgaaaatgtgtttttttgagccacagatgcgtccaagaactcgtctgatgttttgaggtttgttaagactgggtgtccgagcctttgtggtttgttaagacagcgatgtgtcatgtatttcagaaattgggatttttatgagatgtacctgcgagagccctgtctgtttcgattttcagatattggttttgatttatgcgatacaaaaaaaaaaaaaaaa

SEQ ID NO: 4844 - protein, 130 aa, Zea mays; identical to SEQ ID NO: 1074
  misc_feature: Ceres CLONE ID no. 995074
  misc_feature: Ceres CDNA ID no. 40351528
  misc_feature (5)..(130): Pfam Name: Ribosomal_S8 PFAM Desc: Ribosomal protein S8

SEQ ID NO: 4845 - DNA, 1175 bp, Zea mays
  misc_feature: Ceres CLONE ID no. 995162
  misc_feature: Ceres CDNA ID no. 40351529
  CDS (189)..(896): REFERENCED BY SEQ ID NO: 4846
tcttcttgagaaacactccgctctctctttcctcctgcgattctccatctctttccctgctccgtctcgtcgttgtcttcccctttttttcctcagccacctctctccctcgctagagcaaaaaccttgccacgaatcgccgacactccaacccggaagaggcaacgaggtgactccgcgcctcggtcatgggtgacagccaatactccttctcgcttaccactttcagcccgtcgggaaagcttgtgcagatagagcacgcgctcacggctgtcggatccgggcagacctccctagggatcaaagctgccaacggtgtagtgattgccactgagaagaaactgccttctattttggtggatgaaacatctgtgcaaaagattcaggcactaacaccaaatattggagttgtctatagtgggatgggtccagattttcgtgttctggtgagaaaaagtcgaaagcaggcacagcagtattatcggttgtacaaggagcatatacctgtaacacagcttgtgcgagagactgctgctgtgatgcaggagttcacacagtcaggtggtgtaagaccatttggagtatcgctgttgattgctgggtatgatgacaatggcccacagttgtatcaggttgatccctcaggatcatacttctcctggaaggcatcagccatgggaaaaaatgtgtcaaatgcaaagacatttcttgaaaagagatacacagaggatatggagcttgatgatgccatccacactgcaattttgactttgaaagaaggatatgaggggcaaatttcctccaacaacattgaaatcggaattattcgagctgaccgtgagttcaaagttctaagcccatcagagatcaaggatttcttggaagaggtggagtaagttgtctgttgatgatttactgtttcaaacaagaatagcagcatcacttatgagcagccagcctgaagcttgtcttggttttatcactctgtaaactgatttgctccagcgacatgtcttggttttatcactctgtaaactgatttgctccagcgacatgtggttcttacatttgaaaccctcctgagcgcatactgtagacaaatgagatacgtaagatggatgttgtatttgacagtctctgcagtttgtttatgtgatccaaaaaaaaaaaaaaaa

SEQ ID NO: 4846 - protein, 235 aa, Zea mays
  misc_feature: Ceres CLONE ID no. 995162
  misc_feature: Ceres CDNA ID no. 40351529
  misc_feature (29)..(213): Pfam Name: Proteasome PFAM Desc: Proteasome A
MGDSQYSFSLTTFSPSGKLVQIEHALTAVGSGQTSLGIKAANGVVIATEKKLPSILVDETSVQKIQALTPNIGVVYSGMGPDFRVLVRKSRKQAQQYYRLYKEHIPVTQLVRETAAVMQEFTQSGGVRPFGVSLLIAGYDDNGPQLYQVDPSGSYFSWKASAMGKNVSNAKTFLEKRYTEDMELDDAIHTAILTLKEGYEGQISSNNIEIGIIRADREFKVLSPSEIKDFLEEVE

SEQ ID NO: 4847 - DNA, 820 bp, Zea mays
  misc_feature: Ceres CLONE ID no. 995205
  misc_feature: Ceres CDNA ID no. 36707070
  CDS (74)..(706): REFERENCED BY SEQ ID NO: 4848
ataaataggacctagacgatcaatcgcaatcgcatatccactattctctaggaagcaagggaatcacatcgccatggcagccaagatgtttgcattgtttgcgctcctagctctttgtgcaaccgccactagtgctacccatatcccagggcacttgtcaccactactgatgccattggctaccatgaacccatggatgcagtactgcatgaagcaacagggggttgccaacttgctagcgtggccgaccctgatgctgcagcaactgttggcctcaccgcttcagccgtgccagatgccaatgatgatgccaggtatgatgccaccgatgacaatgatgccgatgccgaatatgatgccatcgatgatggtgccgactatgatgtcaccaataacgatagctagtatgatgccaccgatgatgatgccaaacatggtttcaccaatgatgatgccgagtatgatgccttcgacgatgacgccgagtatgatgccaccgataatgatgccaagtatgataccaccgatgatgatgccgagcatggtgtcatcaatgataatgccaaacatgatgacagtgccacaatgttactctgattccatctcgcacattatacaacaacaattaccattcatgttcagccccacagccgtggcgatctcacccatgtttttacagcagccctttgttggtgctgcattctagatataagcatttgtgttgtacccaataatgaagtcggcatgccatcgcatgcgactcattgtttaggaataaaacaagctaataatgacttttctctcaaaaaaaaaaaaaaaa

SEQ ID NO: 4848 - protein, 210 aa, Zea mays
  misc_feature: Ceres CLONE ID no. 995205
  misc_feature: Ceres CDNA ID no. 36707070
  misc_feature (1)..(25): Pfam Name: Zein PFAM Desc: Zein seed storage protein
  misc_feature: Homolog of GI Number: 16305117 NR Desc: 18kD delta zein
  misc_feature: Homolog of GI Number: 15983739 NR Desc: modified zein precursor
  misc_feature: Homolog of GI Number: 984525 NR Desc: DZS18
  misc_feature: Homolog of GI Number: 18087509 NR Desc: 11 kDa methionine
  misc_feature: Homolog of GI Number: 511870 NR Desc: zein protein
  misc_feature: Homolog of GI Number: 57021071 NR Desc: delta kafirin
  misc_feature: Homolog of GI Number: 1084475 NR Desc: 10k zein protein
  misc_feature: Homolog of GI Number: 14906664 NR Desc: seed storage protein delta kafirin
  misc_feature: Homolog of GI Number: 847834 NR Desc: 10 kDa zein
  misc_feature: Homolog of GI Number: 75762993 NR Desc: SpoVID
MAAKMFALFALLALCATATSATHIPGHLSPLLMPLATMNPWMQYCMKQQGVANLLAWPTLMLQQLLASPLQPCQMPMMMPGMMPPMTMMPMPNMMPSMMVPTMMSPITIASMMPPMMMPNMVSPMMMPSMMPSTMTPSMMPPIMMPSMIPPMMMPSMVSSMIMPNMMTVPQCYSDSISHIIQQQLPFMFSPTAVAISPMFLQQPFVGAAF

SEQ ID NO: 4849 - DNA, 618 bp, Zea mays
  misc_feature: Ceres CLONE ID no. 995243
  misc_feature: Ceres CDNA ID no. 25446473
  CDS (96)..(281): REFERENCED BY SEQ ID NO: 4850
aaaacttagcaatccgtacattccgctcatattcctcaccggtgaccttcctcacctgcgtcagacagagaaagccgagattagcggcggcggcgatggcactcccggcgtcaagctccggcctcttccgcttcgtctccccccgcagccgtccccagtccactgacatcgtggccgctgcctcctggggagtcttcgccggcaccgccggcctttacctcgtccagccatttgactggattaagaagactttcttccagaaacctgaaccagaggcatgagtctccaggcagaaaaatgctgcaaatctgcaactttggtacaccacttttgtccgggatgattcctgatgataactcagcaaataatatgagaccccctcgtctttccttgtttgattttattcagatgtaggcattcctcttgcatgtaatattcacgaggggagtgtgatcatttgacttgtttttcatcacacagagaaactgcttggttcaaccgtgttatatggtcttgatggcatttctaaaatattggtccaagatgcatgtgtttaaaacctgtggcctgattattgtatttgttgcagtcactgtgtccgtaaaaaaaaaaaaaaaa

SEQ ID NO: 4850 - protein, 61 aa, Zea mays
  misc_feature: Ceres CLONE ID no. 995243
  misc_feature: Ceres CDNA ID no. 25446473
  misc_feature: Homolog of GI Number: 633683 NR Desc: cytochrome c reductase subunit
MALPASSSGLFRFVSPRSRPQSTDIVAAASWGVFAGTAGLYLVQPFDWIKKTFFQKPEPEA

SEQ ID NO: 4851 - DNA, 1061 bp, Zea mays
  misc_feature: Ceres CLONE ID no. 995288
  misc_feature: Ceres CDNA ID no. 40351530
  CDS (218)..(736): REFERENCED BY SEQ ID NO: 4852
acatccgtagtgtgtgcatgcatcacagtcacacacacaatcactcacacacacagagaagaaaccgaacgagagtttagctatagccaagccagcgtgcgtgcgtgcgtgcgtgcgtgtgtgttgctagtagtactagctagcaaaataaacagaagcaagcaagctagctagagctaaggatcgagatcgaccgaccgaccgacgatcagctagcatggcgcgcttcgtggatccgctggtggtggggcgggtgatcggcgaggtggtggacctgttcgtgccttccatctccatgaccgtcgcctatgatggccccaaggacatcagcaacggctgcctcctcaagccgtccgccaccgccgcgccgccgctcgtccgcatctccggccgccgcaacgacctctacacgctgatcatgacggaccccgatgcgcctagccccagcaacccgaccatgagagagtacctccactggatagtgattaacataccaggaggaacggatgctaccaaaggtgaggaggtggtggagtacatgggtccgcggccgccggtgggcattcaccgctacgtgctggtgctgttcgagcagaagacgcgcgtgcacgcggaggctcccggcgaccgcgccaacttcaagacgcacgcgttcgcggcggcgcacgagctcggcctccccaccgccgtcgtctacttcaacgcgcagaaggagcccgccaaccgccgccgctagctagcagctcctcctcgaggcacgccagatgcatgtgcgtgtgcgtgcaggtgcaaccaccacactgccggcggctacgtatgaccggtgaataaaaagttttactgcaccgtaagcatgctcgccctgttgttgttggtatatgttcgcagtgtggccgtctgtatgtagtagctattcgcttgcatctatgcactctatgttagtatgtgtacgtatggttccgggactttttgagtcctatctaaatactagaagtgcccgtgcgtttgtaacgggaacatataatattacgataacttatgcacgaaaaaaaaaaaaaaaa

SEQ ID NO: 4852 - protein, 172 aa, Zea mays
  misc_feature: Ceres CLONE ID no. 995288
  misc_feature: Ceres CDNA ID no. 40351530
  misc_feature (19)..(164): Pfam Name: PBP PFAM Desc: Phosphatidylethanolamine
MARFVDPLVVGRVIGEVVDLFVPSISMTVAYDGPKDISNGCLLKPSATAAPPLVRISGRRNDLYTLIMTDPDAPSPSNPTMREYLHWIVINIPGGTDATKGEEVVEYMGPRPPVGIHRYVLVLFEQKTRVHAEAPGDRANFKTHAFAAAHELGLPTAVVYFNAQKEPANRRR

SEQ ID NO: 4853 - DNA, 1223 bp, Zea mays
  misc_feature: Ceres CLONE ID no. 995301
  misc_feature: Ceres CDNA ID no. 40351531
  CDS (178)..(972): REFERENCED BY SEQ ID NO: 4854
ttaacgtggttgaagaaatatggttcactagtataagtaatccattacagaagctatggcttatgtagctaatgaaacagggagtttaaggagaagaacaaagtggacaagatagttgtgttgtggactgcaaacactgaaaggtatagcaatgtgtgcgctggtctcaacgacacgatggagaatctactggcatctgtggacaagaacgaggcggaggtatcaccatcaacactatatgccattgcctgtgtcatggagggggtgccgttcatcaatgggagcccccagaacacctttgtgcctgggctgattgatcttgctataaaaaacaactgcttgattggtggtgacgacttcaagagtggacagaccaagatgaaatctgtcttggtcgatttccttgttggtgctggaataaagcccacctcaatcgtgagctacaaccacttgggaaacaacgatggcatgaacctgtctgcccctcaaacattcaggtccaaggagatctccaagagcaacgtggtggatgacatggtctcgagcaatgccatcctctatgagcccggcgagcatcccgatcatgtcgttgtcatcaagtatgtgccgtacgtgggagacagcaagagggctatggacgagtacacctcagagatcttcatgggcggcaagaacaccatcgtgctgcacaacacctgtgaggactcgctcctcgccgcacctatcatccttgatctggtgctcttggctgagctcagcaccaggatccagctgaaagctgagggagaggacaaattccactccttccacccggtggccaccatcctgagctacctcaccaaggcacccctggttccccctggcacaccggtggtgaacgctctggccaagcagagggcgatgctggagaacatcatgagggcctgcgttgggctggccccagagaacaacatgatcctggagtacaagtgagccaagtggcgtgccctgcagcgcgaggttagctgctggaagggaactagaaaggcgagattagctgtgggattgtgttgggcttgtcgtgttttcttttgcgttctttcctagtcattgctgttgcgcttttgtatttgtcggacccgtaactaccagggctctgctattagcggcacggagcctgtaattgtattgtatgataatgtgatcgagggtgctacttcccctcggcaaaaaaaaaaaaaaaa

SEQ ID NO: 4854 - protein, 264 aa, Zea mays
  misc_feature: Ceres CLONE ID no. 995301
  misc_feature: Ceres CDNA ID no. 40351531
  misc_feature (64)..(177): Pfam Name: Inos PFAM Desc: Myo
MENLLASVDKNEAEVSPSTLYAIACVMEGVPFINGSPQNTFVPGLIDLAIKNNCLIGGDDFKSGQTKMKSVLVDFLVGAGIKPTSIVSYNHLGNNDGMNLSAPQTFRSKEISKSNVVDDMVSSNAILYEPGEHPDHVVVIKYVPYVGDSKRAMDEYTSEIFMGGKNTIVLHNTCEDSLLAAPIILDLVLLAELSTRIQLKAEGEDKFHSFHPVATILSYLTKAPLVPPGTPVVNALAKQRAMLENIMRACVGLAPENNMILEYK

SEQ ID NO: 4855 - DNA, 660 bp, Zea mays
  misc_feature: Ceres CLONE ID no. 995706
  misc_feature: Ceres CDNA ID no. 25446474
  CDS (92)..(454): REFERENCED BY SEQ ID NO: 4856
cagggctcaaagacgtcctttcgcagttggcacacatcagagtcctaccaagtggcaccaaagctcgttctcccgaccccgactgtccccaatgcgcagtccgcgaggcctcctcaccgcctccggctaccttgcgggccggcacgctccgtcggcctccgtgtccaccactggccacaactccctactcgctcgcaccttccaaatcctagcccagccggagtccgtccgtctgcagaagcacccggcacccaactccgggatcttagagctgaggctggagcggccggaagtcaagaacgccattaattgggatatgatgaggatgctgcggagcgccatagagaagattcaggccgacacgacggcgaaggtcgtccttgttgcgagctccgtgccgggggctttctctgcaggcgccgatctcaaggtctggactatgcagtttggttagatgggtttagccgtttggatgttgggacacaataaaatgaacatgacttcgatttcagttgaagacaaccaagagtggtttaggtgcatgtgcgtattccagattagttattgatgattaaagagcagttgtgcaatgctatcagcataattgactggtgaactttgagcaatgctgatattgatgttcgaaaaaaaaaaaaaaaa

SEQ ID NO: 4856 - protein, 120 aa, Zea mays
  misc_feature: Ceres CLONE ID no. 995706
  misc_feature: Ceres CDNA ID no. 25446474
  misc_feature (59)..(114): Pfam Name: ECH PFAM Desc: Enoyl
  misc_feature: Homolog of GI Number: 14140136 NR Desc: putative enoyl
  misc_feature: Homolog of GI Number: 50911385 NR Desc: putative enoyl
  misc_feature: Homolog of GI Number: 50911383 NR Desc: putative enoyl
  misc_feature: Homolog of GI Number: 14140135 NR Desc: putative enoyl
  misc_feature: Homolog of GI Number: 68437535 NR Desc:  similar to AU RNA binding protein/enoyl
  misc_feature: Homolog of GI Number: 50417177 NR Desc: Zgc:101057 protein
MRSPRGLLTASGYLAGRHAPSASVSTTGHNSLLARTFQILAQPESVRLQKHPAPNSGILELRLERPEVKNAINWDMMRMLRSAIEKIQADTTAKVVLVASSVPGAFSAGADLKVWTMQFG

SEQ ID NO: 4857 - DNA, 975 bp, Zea mays
  misc_feature: Ceres CLONE ID no. 995833
  misc_feature: Ceres CDNA ID no. 40351532
  CDS (359)..(508): REFERENCED BY SEQ ID NO: 4858
atgctatgcgcttcctccacatacaagaccaccgcggcgcagatcaacacacacatctcactcactcactcgcctcactccactggacatccatccatccatccatggagctcttcgcagcagcagcagcagccgaggatcagaagccgtgcagcagcaggctgttcagcaggaagaggagcggcggcaaggcgggcatgggcgtgcgcggcgccgacaagggccggtcgtccttctccgggcgttgcgcgcggctcgtcaaggagcagcgcgcgcggttctacatcatgcgccgctgcgtcacgatgctggtgtgctggcgcgagtacgcctgagccccctcgctgtccctgatgcaatggcgccggggagggctgcggagccgcatgcaggacacgctagctggacgcgagcagcaagccgtgtggggaggaggaggaggacgaggaggggaagcagacgccgccgagcaggtcaagagacgctcgatccgcctccgcggtcttaattagggaaccacgaacgaaccttgtgtaaagagaagattattattttttattattttctctcctgctttaatgctctcgtagtcttgttcctttagcacctcgatcgagccttatgttcttccttccgttcggggggcggagatttgcaggctagatcgatcgtcacggcgcttctgctgttccaatgtaacgtgagcatctctagtatacaggaactggagctgtagtttagctagttgctttgcttggcgccttggcggtgctgtgcgtctgcgccccttgtcttggcgcggtgcgtgagagccgtcctcatcgcgctcgcgcatcggagtgcgattcgactgctgctcctcttgctactatttctttacattttttccccctccactgtgtaatccgtaatcctgaaaaggcggccagaaagaaaaaaaaacaccgctagttctcgctaaaaaaaaaaaaaaaa

SEQ ID NO: 4858 - protein, 76 aa, Zea mays
  misc_feature: Ceres CLONE ID no. 995833
  misc_feature: Ceres CDNA ID no. 40351532
  misc_feature (53)..(71): Pfam Name: DVL PFAM Desc: DVL family
MELFAAAAAAEDQKPCSSRLFSRKRSGGKAGMGVRGADKGRSSFSGRCARLVKEQRARFYIMRRCVTMLVCWREYA

SEQ ID NO: 4859 - DNA, 733 bp, Zea mays
  misc_feature: Ceres CLONE ID no. 995917
  misc_feature: Ceres CDNA ID no. 25447522
  CDS (178)..(582): REFERENCED BY SEQ ID NO: 4860
atgcgttccttatcttccgttccgctcggaagtctctctaccaccttctccccattccgctgttccgccctctcgcgtcgcgtgcctccaggtccctcctctgcgtaactgggtggccgccgatccgccgccaccgccctgcgtcaggtgttccggtgacaagcgtccacctgcaagatgttggaataccaaaacgcaattggggggagactgaagctgaagggtaaagcgctggacgtaaaggatggtggggtgaagaaaaagaagaagaagtaccagcgtgaggagtcgtctcagattgcgcacgatgagctccacaaaggggggagatctgaatcaccaattgatcccaacaatgagcggattgaatctgacaagaccggagatgaagggaacccacatcctgactatggccatctcacaccagcagagcgacgctacatggaacagaagcagaagatcgacatgcagaagatggccaaagtcgccaacaagtcccatagagaccgcatccaagacttcaatcagtacctggcaaacctaagcgagcactacgacatccccaaagttggtcctggctaacatagccaaactggctgtgttacgcacaacaattgtgtgctgggtctatccatttatgttagcatgttatgtatcgtttaaaacgatttgttgccaccagaaattgatatttaatttcaaaagcatgttccaactaaaaaaaaaaaaaaaa

SEQ ID NO: 4860 - protein, 134 aa, Zea mays; identical to SEQ ID NO: 262
  misc_feature: Ceres CLONE ID no. 995917
  misc_feature: Ceres CDNA ID no. 25447522
  misc_feature: Homolog of GI Number: 50912351 NR Desc: CGI
  misc_feature: Homolog of GI Number: 20269115 NR Desc: CGI
  misc_feature: Homolog of GI Number: 50761174 NR Desc:  similar to family with sequence similarity 32
  misc_feature: Homolog of GI Number: 51762906 NR Desc: similar to RIKEN cDNA 2510049I19
  misc_feature: Homolog of GI Number: 61873558 NR Desc:  similar to family with sequence similarity 32
  misc_feature: Useful for making ornamental plants with modified leaves

SEQ ID NO: 4861 - DNA, 670 bp, Zea mays
  misc_feature: Ceres CLONE ID no. 996079
  misc_feature: Ceres CDNA ID no. 25446475
  CDS (158)..(421): REFERENCED BY SEQ ID NO: 4862
gtcatttcgggcgagaagctccaaacgaccacaccgcacacgccgataaaaccgctccacccactccgcccactccccctctgccgtcgcctgtccactttccccgtgcttctccgccgtcgaggccgcgtcccagtgcgaagagactccgactcagatggccagccgctgggtccggcccgaggtgtacccgctgttcgcggcgacgggcgtggccgtcggcatctgcgggtttcagctcttccggaacatcactggcaacccggaagtcagggtaaacaaggcagggagggcagctggtgtgcttgagaaccatgaggaggggagacgttacgccatgcatggcctaagaagctttgtgcacgacaagactcctgagatcatgcctgcagttaacaagttcttcactgaccctaagtgaagcatgttgattggcatactactactactacttgctactggggattttacactttgctggcaactcaatatgttggggacatccatgacctctaaaagtactttgagcgcttggtgatgacttggtatatgtatgatggtggatgagtttgatcgtccatgcttgatgttcatattcatctgtcatctggatttgccgcacttcagtgataaaattgtcatttggatactggtaaaaaaaaaaaaaaaa

SEQ ID NO: 4862 - protein, 87 aa, Zea mays
  misc_feature: Ceres CLONE ID no. 996079
  misc_feature: Ceres CDNA ID no. 25446475
  misc_feature (2)..(87): Pfam Name: B12D PFAM Desc: B12D protein
  misc_feature: Homolog of GI Number: 18644696 NR Desc: putative G
  misc_feature: Homolog of GI Number: 3445292 NR Desc: B12Dg1
  misc_feature: Homolog of GI Number: 4530585 NR Desc: B12D protein
  misc_feature: Homolog of GI Number: 50935787 NR Desc: putative B12D protein
  misc_feature: Homolog of GI Number: 50935781 NR Desc: putative B12D protein
  misc_feature: Homolog of GI Number: 16506646 NR Desc: B12D
  misc_feature: Homolog of GI Number: 38194922 NR Desc: B12D
MASRWVRPEVYPLFAATGVAVGICGFQLFRNITGNPEVRVNKAGRAAGVLENHEEGRRYAMHGLRSFVHDKTPEIMPAVNKFFTDPK

SEQ ID NO: 4863 - DNA, 1496 bp, Zea mays
  misc_feature: Ceres CLONE ID no. 996717
  misc_feature: Ceres CDNA ID no. 25446477
  CDS (93)..(1067): REFERENCED BY SEQ ID NO: 4864
cttcgagccgtccgccgctcccacccccaccagtgccaccactcgccacttcctcccgtctcctcccttgcagaggcggcgcgtaaaccccgatggccgcctctctcctccacgcctccgccgccgccgcctcgctcctgagctccacccagcacgcccgcgcgggtgccgccgcctttcaccccctcgcgtgtgccccatccctacgccttacgcgctcctcgttctcgaccaatcgccacctcgagatttcactccgggcgatctcggccagtcgccgtttcgcggggaggggggcaccccgggaccgccgcgttgtcgccgccctagcgggggagcaaaccgagggttcagaggtgggggatgacagaaacggggagataaagcccgaggaagctcaggaaatttggaaggtaatgctggagcagttcaaggctgaggccctgcggatgcaggccctgtcaatgcaggcttatgatgtctactccgagaggacgagggaggtcttgctggaagcatcagagaagctgaagatacaggcagacaaagcacagaaggacctgagcgtggtagctaccgaaattggtcaggagggacaggaatatctgatgatggcagctcggaactccccagactcgatcaaggatatcacaacaacgttcagggctcttggaaaattgaattggccatcagagtatgaggattatcatgtgggcattccgtttggtacctttcttaccgtagggggtttcctcaacttcatgttggccggaagtacctctgcccttcgttttggtatcattcttggccttgcactgttggctctgggaatctcaagtttgagatcacaaagagatggcggccgtcggcctcgtcttctggtgaaagggcaagctgcaatagccagtgtcatcttcttcagggagttttcagttcttctccagaatggctggtttccaaaaatcttcatggttctcctcagtggagtagtggcaggcttttacttctatcgcattgcagctggtagccccaaagagctgagcagcaacagtgattcagtgaactaatgcacttggatgaatcagatgatcatgggggaacgcagacccagaaggctatggcctgtttgctttcgatttccttcatcatccttcaattcaggcaaagctcggttgtaaggtgtccgcatgatgaccacatggattcagaagaattgcttgtttactcggccctcttcccgcactcctttgttcctttgctcatgtagtatagatgatagacttgaacaacatcaataaacgacattcaaaggccatgcagttagctcttcagtttgtctgctgtttgtttttcatggggacagcccgaaaggtcggtgaagcgttcaatgtttcgtgaagtgtccgaaaacagtcagtgttattactctgtagattccagctcgctcaaaactattcaaggccgatgacaagttgataacaaaaaaaaaaaaaaaa

SEQ ID NO: 4864 - protein, 324 aa, Zea mays
  misc_feature: Ceres CLONE ID no. 996717
  misc_feature: Ceres CDNA ID no. 25446477
  misc_feature: Homolog of GI Number: 56201987 NR Desc: putative non
  misc_feature: Homolog of GI Number: 34907806 NR Desc: P0703B11.24
  misc_feature: Homolog of GI Number: 21554522 NR Desc: putative non
  misc_feature: Homolog of GI Number: 22136954 NR Desc: putative non
  misc_feature: Homolog of GI Number: 7488560 NR Desc: inner envelope membrane protein precursor
  misc_feature: Homolog of GI Number: 50924968 NR Desc: OSJNBa0089K21.3
  misc_feature: Useful for increasing chlorophyll and photosynthetic capacity
  misc_feature: Useful for making ornamental plants with modified flowers
  misc_feature: Useful for making plants with increased biomass and foliage
  misc_feature: Useful for sterility
MAASLLHASAAAASLLSSTQHARAGAAAFHPLACAPSLRLTRSSFSTNRHLEISLRAISASRRFAGRGAPRDRRVVAALAGEQTEGSEVGDDRNGEIKPEEAQEIWKVMLEQFKAEALRMQALSMQAYDVYSERTREVLLEASEKLKIQADKAQKDLSVVATEIGQEGQEYLMMAARNSPDSIKDITTTFRALGKLNWPSEYEDYHVGIPFGTFLTVGGFLNFMLAGSTSALRFGIILGLALLALGISSLRSQRDGGRRPRLLVKGQAAIASVIFFREFSVLLQNGWFPKIFMVLLSGVVAGFYFYRIAAGSPKELSSNSDSVN

SEQ ID NO: 4865 - DNA, 726 bp, Zea mays
  misc_feature: Ceres CLONE ID no. 996760
  misc_feature: Ceres CDNA ID no. 40351533
  CDS (140)..(556): REFERENCED BY SEQ ID NO: 4866
aaaaaaaaaaaaaaaaaaaaaaaagtctcgtgtgcttcctaggtcattccacttccaccaatctccctcccaatcttccttgctgctccaatccgctcttttattactcggccagcggaaggggagagaggagggcgagatgacggtggagaaggtggacgcggggctttccgacttcgacgcccacttcgatcgcctcttcgcttccccggacgccgcctccgacggcaaggtgaagctgctgctcttcctggccgaccgcaagcctgactcctccctctcctggtgccccgactgcaacgtggcggagccggtgatctacgagcggctggaggcactggagggcaaggacgcggtgctcctgcgcgcctacgtcggggacaagcccacttggcgtgacccggcgcacccgtggagggtggaccccaggttcgggctcaagggcgtgccaacgctgatccgctgggaggatggcgccgccgccgcccgcctcggggacgacgaggcgcacctcaaggacaaggttgacgccctcctctgcgctggcggcaactgagtactgacagatccggtttcccgttcgggttccatctgcgtagagtggccataataaataacatgtactgtaattcagttcatctacatggcggaccagaagctggggaatcgtgtgaagcttaataattcagtttatctacatgccgaacctaaaaaaaaaaaaaaaaa

SEQ ID NO: 4866 - protein, 138 aa, Zea mays
  misc_feature: Ceres CLONE ID no. 996760
  misc_feature: Ceres CDNA ID no. 40351533
MTVEKVDAGLSDFDAHFDRLFASPDAASDGKVKLLLFLADRKPDSSLSWCPDCNVAEPVIYERLEALEGKDAVLLRAYVGDKPTWRDPAHPWRVDPRFGLKGVPTLIRWEDGAAAARLGDDEAHLKDKVDALLCAGGN

SEQ ID NO: 4867 - DNA, 618 bp, Zea mays
  misc_feature: Ceres CLONE ID no. 996784
  misc_feature: Ceres CDNA ID no. 40351534
  CDS (112)..(363): REFERENCED BY SEQ ID NO: 4868
agtctctctccccttcgcggctcccaccgcgtgccgccgccctacaccaggtgccccccacgtctgcatcgggcccgtctccggcgacgaacgcccagcagggggaggaggatgggcgagttcgacgactactgggcgcgggcgtacaggggcgaccccgcggtcccgcactccgacccgcagcggctcatctccacctggaccggcgcctttgccctcggcgcggccgcctgcgtccaccaccacgcctccgcgcttgcatcccgcctcaagtccctaccggcgacttggcaagacatgacattggcccttgatcaaaagcgatggaagaaagcttttgagaaaaagcggcagcaaccttaagctcattgttctttccaacttcttgggccagttggatgagcactgtttctggtcatcaattgtggcgcatgaagcttcaaagttctctctatatacacatgatgtattgactgaggttctacttttggttttcttgtttagcgttacaactttctcagtttatgcatttggtccatctcagatcatcagatgacattcagaatgatttgtctattctcaaaatctctattatctttttgaaaaaaaaaaaaaaaa

SEQ ID NO: 4868 - protein, 83 aa, Zea mays
  misc_feature: Ceres CLONE ID no. 996784
  misc_feature: Ceres CDNA ID no. 40351534
MGEFDDYWARAYRGDPAVPHSDPQRLISTWTGAFALGAAACVHHHASALASRLKSLPATWQDMTLALDQKRWKKAFEKKRQQP

SEQ ID NO: 4869 - DNA, 768 bp, Zea mays
  misc_feature: Ceres CLONE ID no. 996963
  misc_feature: Ceres CDNA ID no. 40351535
  CDS (529)..(768): REFERENCED BY SEQ ID NO: 4870
atcgtccgtccaatccatccattcatctacacacgcagttgcagcacatacagctagctagctcgttactgtttttgcagctgatctgatcgaccgacgcgacccaccgatcacgatcatgagctaccaagcgggctacccaccgccgggccaacaggcctacggcgcgcctccgccggcgtacgtcgcgccaccgccggcgtacccgccaacggcccaggacggcggcgcggcgtactacggccagcagcagacaaccaccaccagcagcagccgcggcggcgacggtttctggaaaggatggtgagggcttatataacttattaattgactccaaccacagaagctagatagatagagatgatgcgttctgatcacctgctgcatgcttggctttgctcatgcagctgcgccgccatctgctgctgctgcgtcctcgacatgtgcttctgaggacatatcgtcgatcgatcgacgacggccagggcatgctagctagctgatgaccggccggtacgtgcgtggttgatgatcaccatcatgtgctgctctagtagctgctgtgtcattatatattacacatcgtgtatacatatatacgtatacgtacgtactcgtacgtcttcgaattcattcctgtggttattgtattatacatatgcagcacactttgtactcgtacccgtgtctgtgtcgtgtattcaattgtcgagacattcttttacgattctaatgtatgtagtattaattacaaaaaaaaaaaaaaaa

SEQ ID NO: 4870 - protein, 62 aa, Zea mays
  misc_feature: Ceres CLONE ID no. 996963
  misc_feature: Ceres CDNA ID no. 40351535
MSYQAGYPPPGQQAYGAPPPAYVAPPPAYPPTAQDGGAAYYGQQQTTTTSSSRGGDGFWKGW

SEQ ID NO: 4871 - DNA, 979 bp, Zea mays
  misc_feature: Ceres CLONE ID no. 997006
  misc_feature: Ceres CDNA ID no. 29191516
  CDS (123)..(824): REFERENCED BY SEQ ID NO: 4872
aacacgctctctcgcgcggcaagagcttcccggcccgaaaccgaaagcaccaccaccaccaccaccaatctctgcgtttttcgtctgcggcggcggcggcagcagcggaggaggtagacgagatgctgtccgccgacatccccccaaaccagaccatctacctcaacaacctcaacgagaaggtcaagaaagaagagttgaagagatcgctttatgccctgtgctcgcagtatggaaggatactggatgtggtggctctgaaaacacagaaactgagagggcaggcatgggtggtgtttagcgagattacagctgctaccaatgctttccgtggattgcaagactttgatttctacggcaaaaaaatgcgagtacaatatgcaaaaacaaaatcagactgtattgcaaaagaagatggtacttatgcacctaaggagaaaaggaagaagcaagaggagaaagctgctgagaaaaaacgacgagcagaagaggcacagcaagctggccccaatgctgctgctgctcaaagcaatggaactggctatcaagcgtctcgtctgggcaaggcttcgcaggagccacctgctcctccgaacaacatcctcttcatccagaacttgccagaccagaccacgagcatgatgctccagatcctgttccagcagtatcccggcttccgggaagtccggatgatcgaagccaaaccaggcattgcctttgtggagttcgaggacgacggccagtccatggtggcgatgcaggctctccagggcttcaagatcaccccggagaaccccatggctatatcctatgccaaaaaatgagaaccctcgcggaatccctgtacccaatacccataatattttccgttccgccttccggaatcgagccacagtatctagtctactttccggccatgtatttttggaaagcacttgcttaatttagaagttagactcttgccaaaaaaaaaaaaaaa

SEQ ID NO: 4872 - protein, 233 aa, Zea mays
  misc_feature: Ceres CLONE ID no. 997006
  misc_feature: Ceres CDNA ID no. 29191516
  misc_feature (12)..(84): Pfam Name: RRM_1 PFAM Desc: RNA recognition motif.
  misc_feature: Homolog of GI Number: 421960 NR Desc: small nuclear ribonucleoprotein U2B''
  misc_feature: Homolog of GI Number: 2347192 NR Desc: putative small nuclear ribonucleoprotein U2B
  misc_feature: Homolog of GI Number: 23296313 NR Desc: putative spliceosomal protein
  misc_feature: Homolog of GI Number: 30679897 NR Desc: small nuclear ribonucleoprotein U2B
  misc_feature: Homolog of GI Number: 21593001 NR Desc: putative small nuclear ribonucleoprotein U2B
  misc_feature: Homolog of GI Number: 19347861 NR Desc: putative spliceosomal protein
  misc_feature: Homolog of GI Number: 1050840 NR Desc: U1snRNP
  misc_feature: Homolog of GI Number: 34897622 NR Desc: putative small nuclear ribonucleoprotein U1A
  misc_feature: Homolog of GI Number: 22655484 NR Desc: At2g47580/T30B22.12
  misc_feature: Homolog of GI Number: 57104050 NR Desc:  similar to U2 small nuclear ribonucleoprotein B
  misc_feature: Useful for making taller plants and plants with longer inflorescences
  misc_feature: Useful for sterility
MLSADIPPNQTIYLNNLNEKVKKEELKRSLYALCSQYGRILDVVALKTQKLRGQAWVVFSEITAATNAFRGLQDFDFYGKKMRVQYAKTKSDCIAKEDGTYAPKEKRKKQEEKAAEKKRRAEEAQQAGPNAAAAQSNGTGYQASRLGKASQEPPAPPNNILFIQNLPDQTTSMMLQILFQQYPGFREVRMIEAKPGIAFVEFEDDGQSMVAMQALQGFKITPENPMAISYAKK

SEQ ID NO: 4873 - DNA, 826 bp, Zea mays
  misc_feature: Ceres CLONE ID no. 997267
  misc_feature: Ceres CDNA ID no. 40351536
  CDS (99)..(467): REFERENCED BY SEQ ID NO: 4874
cggcccaaccccgtctaggtttaggcacccgaccgccgcagcgtccccgccgccacgaccacgagcgaaaggaggtcgccggaagagggggcgcggagatgagcgggagcgcgttcaacgcgttcaagtcgcgggtgccggtggcgtggagtccccggctgtacatcacgctggtgcggggcctccccgggacgcggcgcctccaccgccgcacgctcgaggccatgcgcctccgccgctgccaccgcaccgtcgagcaccgcaccacgccgtcgctcctcgggatgctcacccaggtgaagcgcctcgtcgccgtggagaccgaggagatgtacaacgcgcggaagcaggccgaggcggagaggcgcgcgcccagacccccgctcgtcgtctcccaccagccacagccgccggctccgaagccggcagccgccgccgcggtgggtgtcgctaccactgcgcagtagcctccgggcatcagaagcctttcatcacagttcagcggcataataattgatttgcctgtgtttgggtctgctggttttcagacgatcgctttgggtcttcttgctcaacgagatctagcaacggatttgatcgatcttctcaagatcgttgtgtggtgcaacctgcattgaccctgtattttagattgttttatatgaactaggcgcacggttttccaatgcttttgtctagaatcaagtccaatgatttggtttaaattactaaattctctgtaaatgctcttcaagatgtgtaggcggttaaggcttcttgcgtaattgaaccagaggattgctagcgtctaaaaaaaaaaaaaaaa

SEQ ID NO: 4874 - protein, 122 aa, Zea mays
  misc_feature: Ceres CLONE ID no. 997267
  misc_feature: Ceres CDNA ID no. 40351536
  misc_feature (19)..(71): Pfam Name: Ribosomal_L30 PFAM Desc: Ribosomal protein L30p/L7e
MSGSAFNAFKSRVPVAWSPRLYITLVRGLPGTRRLHRRTLEAMRLRRCHRTVEHRTTPSLLGMLTQVKRLVAVETEEMYNARKQAEAERRAPRPPLVVSHQPQPPAPKPAAAAAVGVATTAQ

SEQ ID NO: 4875 - DNA, 468 bp, Zea mays
  misc_feature: Ceres CLONE ID no. 997512
  misc_feature: Ceres CDNA ID no. 40351537
  CDS (85)..(294): REFERENCED BY SEQ ID NO: 4876
aatcttcgcatttccatctccccgtgggatcccagccgccgccgcaagaagaagagctcggggacttgcaggtctcgagagaagatgccgaaacagatacacgagatcaaggattttcttctcaccgcgaggaggaaggatgcccgatcagtgaagatcaagaggagcaaggatgttgtcaagttcaaggtccgctgctccaagtacttgtacaccctctgcgtattcgatgctgagaaggcaaacaagttgaagcaatctctccccccaggcttgagcgtccaggaggtttgattggatacatgacaacgtcgggtcgaacctctagagcatctttatcatcagcagagcatgctgtttatgtagttttggatcttaagctattagaagtgttggatttgtggatcttgaatttttggagaaataccaatttgcctcgttcaaggacgctaaaaaaaaaaaaaaaaa

SEQ ID NO: 4876 - protein, 69 aa, Zea mays
  misc_feature: Ceres CLONE ID no. 997512
  misc_feature: Ceres CDNA ID no. 40351537
  misc_feature (2)..(69): Pfam Name: Ribosomal_L38e PFAM Desc: Ribosomal L38e protein family
MPKQIHEIKDFLLTARRKDARSVKIKRSKDVVKFKVRCSKYLYTLCVFDAEKANKLKQSLPPGLSVQEV

SEQ ID NO: 4877 - DNA, 874 bp, Zea mays
  misc_feature: Ceres CLONE ID no. 997821
  misc_feature: Ceres CDNA ID no. 25446478
  CDS (107)..(733): REFERENCED BY SEQ ID NO: 4878
gatcccaataagcaccgaaccctatagcccaaaacttcctccacttcacgcccctccgccgccgccgcgtctcctctgcaggtaagaaggtaaggaagagggcgaaatggtgaagcacaacaacgttatccccaacgggcacttcaagaagcactggcagaactatgtcaagacatggttcaaccagcccgcccgcaagcagaggcgccgcatcgctcgtcaaaagaaggctgtgaagatattcccacgcccaactgctggccctcttcgccccattgtgcaatgccagactctcaagtacaacatgaagtcgagggctgggagaggatttacccttgaggagctgaaggctgccggcattccaaagaagcttgccccaaccattggcatttctgtggatcaccgccgcaagaacaaatctctcgagggactgcaggccaatgtccagaggcttaagacgtacaaggccaagctggttatcttcccaaggcgtgctcgcaaggccaatgccggcgactctactccggaggagcttgccacggccacccaggtccagggtgactacatgcctattactcgtggtgagaagcgctcagtcgaggttgtgaaggttactgatgagatgaagtcgtttgcggcctacggcaagctccgtcttgagcggatgaacaagaaacaccttggtgcccgccagaagaaggcggctgaggcagagaaggatgaaaagaagtgaagcaggtataccctgtttttgttttctatctttattccgatgcagccactagtggaattttactgtcaagtgtgtgctctaagttctgttttggtgctgaaaatagagaccagagttttggtgcccaaaaaaaaaaaaaaa

SEQ ID NO: 4878 - protein, 208 aa, Zea mays
  misc_feature: Ceres CLONE ID no. 997821
  misc_feature: Ceres CDNA ID no. 25446478
  misc_feature: null
  misc_feature: Useful for making plants with modulated nitrogen use efficiency
  misc_feature: Useful for making plants with modulated phosphate use efficiency
  misc_feature (6)..(185): Pfam Name: Ribosomal_L13e PFAM Desc: Ribosomal protein L13e
  misc_feature: Homolog of GI Number: 34897952 NR Desc: putative 60S ribosomal protein L13E
  misc_feature: Homolog of GI Number: 38093740 NR Desc: putative 60S ribosomal protein
  misc_feature: Homolog of GI Number: 12580867 NR Desc: 60S ribosomal protein L13E
  misc_feature: Homolog of GI Number: 21537149 NR Desc: 60S ribosomal protein L13
  misc_feature: Homolog of GI Number: 19310763 NR Desc: putative 60S ribosomal protein L13
  misc_feature: Homolog of GI Number: 398922 NR Desc: cold induced protein
  misc_feature: Homolog of GI Number: 7441103 NR Desc: ribosomal protein L13.B
  misc_feature: Homolog of GI Number: 398918 NR Desc: cold induced protein
  misc_feature: Homolog of GI Number: 7441102 NR Desc: ribosomal protein L13.A
  misc_feature: Useful for increasing chlorophyll and photosynthetic capacity
  misc_feature: Useful for making bigger plants
  misc_feature: Useful for making plants with increased biomass and foliage
  misc_feature: Utility: No N Useful for making plants tolerant to low nitrogen/low phosphate
MVKHNNVIPNGHFKKHWQNYVKTWFNQPARKQRRRIARQKKAVKIFPRPTAGPLRPIVQCQTLKYNMKSRAGRGFTLEELKAAGIPKKLAPTIGISVDHRRKNKSLEGLQANVQRLKTYKAKLVIFPRRARKANAGDSTPEELATATQVQGDYMPITRGEKRSVEVVKVTDEMKSFAAYGKLRLERMNKKHLGARQKKAAEAEKDEKK

SEQ ID NO: 4879 - DNA, 818 bp, Zea mays
  misc_feature: Ceres CLONE ID no. 997904
  misc_feature: Ceres CDNA ID no. 25446479
  CDS (158)..(634): REFERENCED BY SEQ ID NO: 4880
atccaatccctcgtcgcagcaaccgtcctcgctccctgcctccctcagttccgctcttcgtctttgggggccattgcccgtgcggccgtgcgtcacccgagcccgtgcccggaatctttgtagaagcgtctggaggactcccacccggctgccagccatggctgagaatctggcgcccgagaagcgccactccttcgtgcacaacgggcagaaggtgttcgagtgggaccagacgctggaggaggtcaacatgtacatcgagctcccgaagggtgtgccaaccaagctatttcactgcaacattcaggctagccacgtcgaggtcggcatccgcggcaacccgccatacctcaaccatgacctgacacacccagtgaagactgactcgtcgttctggacaatagaagatggtgagatgcatatcacactgcaaaaaagagagaaggggaaaacatggtcatctccaatacaagggcaagggattttggatccatatgctgcagatcaagagcaaaagcggcttatgctccaaaggtttcaggaagagaaccctgggttcgacttttcacaggctcagttcagtggaacctgccctgacccaagaaccttcatgggagggatacgctccgagtgaagcaccctacctgcctatgtacgtttctactatatcctcggcatcttgatagatgcagcaggcgtgcttattatgtctgtaaatcggttggtgtctgttatggagataattgtcatggaaataattgtgatgtgtgaccatttgtgtgcaagcacattttgcgtgcttaaaaaaaaaaaaaaaa

SEQ ID NO: 4880 - protein, 158 aa, Zea mays
  misc_feature: Ceres CLONE ID no. 997904
  misc_feature: Ceres CDNA ID no. 25446479
  misc_feature (14)..(157): Pfam Name: Nuclear_move PFAM Desc: Nuclear movement protein
  misc_feature: Homolog of GI Number: 34910948 NR Desc: OSJNBb0063G05.19
  misc_feature: Homolog of GI Number: 73954084 NR Desc:  similar to NudC domain containing protein 2
  misc_feature: Homolog of GI Number: 61822779 NR Desc:  similar to NudC domain containing 2
  misc_feature: Homolog of GI Number: 62858511 NR Desc: LOC549133
  misc_feature: Homolog of GI Number: 65302936 NR Desc: spliceosome
  misc_feature: Homolog of GI Number: 51535412 NR Desc: putative salt tolerance protein 5
  misc_feature: Homolog of GI Number: 30524691 NR Desc: salt tolerance protein 5
  misc_feature: Homolog of GI Number: 50912681 NR Desc: putative salt tolerance protein 5
MAENLAPEKRHSFVHNGQKVFEWDQTLEEVNMYIELPKGVPTKLFHCNIQASHVEVGIRGNPPYLNHDLTHPVKTDSSFWTIEDGEMHITLQKREKGKTWSSPIQGQGILDPYAADQEQKRLMLQRFQEENPGFDFSQAQFSGTCPDPRTFMGGIRSE

SEQ ID NO: 4881 - DNA, 791 bp, Zea mays
  misc_feature: Ceres CLONE ID no. 997947
  misc_feature: Ceres CDNA ID no. 36591299
  CDS (95)..(550): REFERENCED BY SEQ ID NO: 4882
acgcgcttcctctcgccctcgctcctccgccgccgccgccgccgcatcaagcccccgccccgccgtcgcctgaggtagacaccaatccgccgccatggggcgtatgcacagccgcgggaagggtatctcatcgtcggcgcttccctacaagaggacgcctcctacctggctcaagaccgctgcctccgacgtggaggagatgatcacaaaggcagcgaagaagggacagatgccgtcgcagatcggcgtcctgctccgtgaccagcacggtatcccccttgtcaagagcgtcaccggcagcaagatcctccgcatcctcaaggcccatgggctggcaccagaaatccccgaggacctgtacttcctcatcaagaaggcggtggcgataaggaagcaccttgagaggaacaggaaggacaaagactctaaattcaggctcattcttgtggagagcaggatccaccgccttgcccgctactacaagcgcacaaagaagcttccacccacctggaagtatgagtcaaccacagcgagcactctggtggcctaagtgtggtatcctccgacagcttgttctagatatgaatttgtgtaatgcttcttatgtctcgatccggttaaatggacaacggacctcatctttttttatgtttaccttgagaatcccgtaaaccattttggggttttgaattgtctgttaaacgtaacatgcatatgttttgaagcctagggtgagcttttacttcaccatcacttattattgttgcttgttcataaaaaaaaaaaaaaaa

SEQ ID NO: 4882 - protein, 151 aa, Zea mays
  misc_feature: Ceres CLONE ID no. 997947
  misc_feature: Ceres CDNA ID no. 36591299
  misc_feature (1)..(60): Pfam Name: Ribosomal_S13_N PFAM Desc: Ribosomal S13/S15 N
  misc_feature (65)..(151): Pfam Name: Ribosomal_S15 PFAM Desc: Ribosomal protein S15
  misc_feature: Homolog of GI Number: 288059 NR Desc: cytoplasmatic ribosomal protein S13
  misc_feature: Homolog of GI Number: 50940531 NR Desc: putative 40S RIBOSOMAL PROTEIN S13
  misc_feature: Homolog of GI Number: 52548254 NR Desc: cytoplasmatic ribosomal protein S13
  misc_feature: Homolog of GI Number: 50940529 NR Desc: putative 40S RIBOSOMAL PROTEIN S13
  misc_feature: Homolog of GI Number: 30102866 NR Desc: At4g00100
  misc_feature: Homolog of GI Number: 48209913 NR Desc: cytoplasmic ribosomal protein S13
  misc_feature: Homolog of GI Number: 19699318 NR Desc: AT3g60770/T4C21_180
  misc_feature: Homolog of GI Number: 44662862 NR Desc: ribosomal protein S13
  misc_feature: Homolog of GI Number: 68449762 NR Desc: cytoplasmic ribosomal protein S13
  misc_feature: Homolog of GI Number: 15450535 NR Desc: AT3g60770/T4C21_180
MGRMHSRGKGISSSALPYKRTPPTWLKTAASDVEEMITKAAKKGQMPSQIGVLLRDQHGIPLVKSVTGSKILRILKAHGLAPEIPEDLYFLIKKAVAIRKHLERNRKDKDSKFRLILVESRIHRLARYYKRTKKLPPTWKYESTTASTLVA

SEQ ID NO: 4883 - DNA, 782 bp, Zea mays
  misc_feature: Ceres CLONE ID no. 998204
  misc_feature: Ceres CDNA ID no. 29191517
  CDS (101)..(271): REFERENCED BY SEQ ID NO: 4884
aaagcaaggctaggcaagcagcgtcactgaagcggaaaacgcgtcgccttcacaagtctccagagagctttgatttgtggtggtctggtcggcggcggcgatggagcccctggaggtggccataacgatcatattcgacgcgctgctgctggtgttcatggtcaagctcttcttcgccatgttccagatgaagctcgtcgtcatcctcttctacctcgtcatcctcctcttcgccatggccttctccggccgggcgcccagcagcttctagctcgacgatcgtagcagcaggaaacaaaaaagaagaataagaagaagaagcgcgcatgatccgaggcgcaaattgcgtaagcgtgaagagagagaaattagtcagtctagagtttcgatctcccgcgtttcatgcttctatttccatgtaattcgtgctgtacctcttgcctttttgttacgggtttcgtggatcgcagagcagtggtgcatatgaaaagagatggacacgttttttcttccttggaaaaacttgttcatgggttcttttttggggtaagttgtaaaatggtgtttctcttgtttttttaggaacaattggatctataccattaaaagatccaaactttagatatataccatggacctcacatatcattgactcatgtggacccatatgtaagtgagatagtaatgatatggatccaaagtggtgatcttttaatggtatgatctaaatttccctttttttatagaatgggctccaacttctcgcaaaaaaaaaaaaaaaa

SEQ ID NO: 4884 - protein, 56 aa, Zea mays
  misc_feature: Ceres CLONE ID no. 998204
  misc_feature: Ceres CDNA ID no. 29191517
MEPLEVAITIIFDALLLVFMVKLFFAMFQMKLVVILFYLVILLFAMAFSGRAPSSF

SEQ ID NO: 4885 - DNA, 776 bp, Zea mays
  misc_feature: Ceres CLONE ID no. 998237
  misc_feature: Ceres CDNA ID no. 25446480
  CDS (195)..(437): REFERENCED BY SEQ ID NO: 4886
tgattagtttgctcttgtgaaatagcccagtcaccattgcattctggtaccttacaagtttctatctgtcagtctgtcaacatgtttcacctaccgttcattttccagtgtcctttctattcacttccgctgaacctgtaatttcctcgccttggcgcccccagggaatcgctcggagactagtgaaagccgcgatgcaagaagctgccaagaagagggagatgagatactcagacctcaagaagatcgaccgtggcgtgaggaggcatttccacgacgatataaccgtcgtcgtggtattcctcgactcggatgccatgagcaaagctagctggagcaagagcccctcggtttctctccgagggggcggcgtcacccttcccgccaagtccctcgcacccttctcggctccggcacagttgaacggcacccactgaagctgctactgctcttgaaaagaagggcacagtgcagatctgctagagatgatgagagaagcagcaatcaagtgcagcggttgctcgtacacctgctgtgctgttgctgtttgcaaagctgccgtcttgactccgcctggtaattagtgtactgatagcgaggtatagaaattaggttatttgttagcgacgcaaatcctttctttttttttcttctccctctgttcttatcccttttctcttcatcatggaggaaacaggtggctgtaaatttgtccagaacatgttttccctaatagcccatcatatcccgctctttttctaaaaaaaaaaaaaaaa

SEQ ID NO: 4886 - protein, 80 aa, Zea mays
  misc_feature: Ceres CLONE ID no. 998237
  misc_feature: Ceres CDNA ID no. 25446480
  misc_feature: Homolog of GI Number: 4206122 NR Desc: protein phosphatase 2C homolog
  misc_feature: Homolog of GI Number: 7768153 NR Desc: protein phosphatase 2C
  misc_feature: Homolog of GI Number: 56382009 NR Desc: At4g38520
  misc_feature: Homolog of GI Number: 10177123 NR Desc: protein phosphatase 2C
  misc_feature: Homolog of GI Number: 3608412 NR Desc: protein phosphatase
  misc_feature: Homolog of GI Number: 20340237 NR Desc: protein phosphatase 2c
  misc_feature: Homolog of GI Number: 42572631 NR Desc: protein phosphatase 2C
  misc_feature: Homolog of GI Number: 6572058 NR Desc: protein phosphatase 2C
  misc_feature: Homolog of GI Number: 28466963 NR Desc: At3g12620
  misc_feature: Homolog of GI Number: 12321955 NR Desc: protein phosphatase 2C
MQEAAKKREMRYSDLKKIDRGVRRHFHDDITVVVVFLDSDAMSKASWSKSPSVSLRGGGVTLPAKSLAPFSAPAQLNGTH

SEQ ID NO: 4887 - DNA, 1420 bp, Zea mays
  misc_feature: Ceres CLONE ID no. 998381
  misc_feature: Ceres CDNA ID no. 40351538
  CDS (132)..(1232): REFERENCED BY SEQ ID NO: 4888
attgtaccatcaccttcctcctgtttttcttgcctgtctccatactcaccagttgcttttgaggagctgatcgagctacaagcaatcgggcaaaggatatttccgaggtattattgcaaggaagaattaatatgcatccaggaggtggaccactgtcggtgccaccaggcttccgcttccacccgaccgacgaggagctcctctactactacctgaggaagaaggtttcctatgagcccatagatcttgatgtcataagggagattgatctcaaccagcttgagccatgggatctcaaagaaaggtgcaggataggcaccgggcatcagaacgagtggtacttcttcagccacaaggacaagaagtacccgacgggaacaaggacgaaccgcgccacgacggcggggttctggaaggcgactgggcgagacaaggccatcttcctcggcaacgcctccaggaggatcggcttgaggaagaccctggtgttctacatcggcagggcgccacacggcaagaagactgactggatcatgcacgagtaccgcctggaccaagagaacgttgagattcaggaagatggttgggtggtgtgtagggttttcaagaagaagagctatcaccagagaggcctcaatccggctgaaatggccgccgcactggacgacgacgagctccagcctttccctgttcctatccccggcagctccctgcagccaacagagcacaagaccaaccctactcacctcatgcaatatgactatccttccttcgacccttccatgcagctcccacagctgatgagcgatgaccaggaacaggaacagcccgtgcggccaaccctcctccccggccatcccggcgttgctatggcctccatgagctcactcaacattgagtgctcgcagaacctgacgaagctcacatctaacggcagcgacgagatgctccacgtcggccacggcggtggggctggaggtggtgtagtcgtcgaccgcttcgctggcacgacgacagattggtcgatcctagacaagctcctcgcctcgcaccagaacctcgaccggctcttccacggcaaggtcgtcaccacggcatctgcctccccaatggcggtaccggtataccatcagcagctcatggaactcggtggctcgtcgtcgtccttgcagaggcttccactgcagtacctcggcggcgagacggccgatctcctcaggtaccccaagtaattggatcgacctcaagtttagctacctctctcttgttgagcagtgaccagatcagggtttttggttgactactagatcgatcgactgcttaattaattcggtctactttgtatggagagtttagtgctcctaaatgtatatatatggtgcaactgttttgggcaaaaaaaagaaaaaaaaaaaaaaaa

SEQ ID NO: 4888 - protein, 366 aa, Zea mays
  misc_feature: Ceres CLONE ID no. 998381
  misc_feature: Ceres CDNA ID no. 40351538
  misc_feature: The plant produces a reduced number of seeds.
  misc_feature: Useful for making plants with modulated growth and phenotype characteristics
  misc_feature: null
  misc_feature: The sequence is a functional homolog of  SEQ ID NO 1520 in the  10/666,642 US patent application
  misc_feature: The sequence is a functional homolog of  SEQ ID NO 2624 in the  10/374,780 US patent application
  misc_feature: The sequence is a functional homolog of  SEQ ID NO 72 in the  10/225,066 US patent application
  misc_feature: The sequence is a functional homolog of  SEQ ID NO 970 in the  11/435,388 US patent application
  misc_feature: Useful for biocontainment applications
  misc_feature: Useful for making plants with altered cell wall content and/or composition
  misc_feature (10)..(141): Pfam Name: NAM PFAM Desc: No apical meristem
MHPGGGPLSVPPGFRFHPTDEELLYYYLRKKVSYEPIDLDVIREIDLNQLEPWDLKERCRIGTGHQNEWYFFSHKDKKYPTGTRTNRATTAGFWKATGRDKAIFLGNASRRIGLRKTLVFYIGRAPHGKKTDWIMHEYRLDQENVEIQEDGWVVCRVFKKKSYHQRGLNPAEMAAALDDDELQPFPVPIPGSSLQPTEHKTNPTHLMQYDYPSFDPSMQLPQLMSDDQEQEQPVRPTLLPGHPGVAMASMSSLNIECSQNLTKLTSNGSDEMLHVGHGGGAGGGVVVDRFAGTTTDWSILDKLLASHQNLDRLFHGKVVTTASASPMAVPVYHQQLMELGGSSSSLQRLPLQYLGGETADLLRYPK

SEQ ID NO: 4889 - DNA, 871 bp, Zea mays
  misc_feature: Ceres CLONE ID no. 998454
  misc_feature: Ceres CDNA ID no. 25446869
  CDS (396)..(680): REFERENCED BY SEQ ID NO: 4890
atcccatcccatcccatcccagccgccacagctgctgctcgccctctccctgtctcctctctctttccagccacggtttccccttcccccatccgcgcgctagggcacgaggcaaatctgtggccctctcctagtctcctgaagtccgactcagccgtctcccagctcccgctcgctcgaactcgggttggggaggcacggagtcactgaccccttcgcgttaggcggtgcccttaccggctcttcgtctaaggtgtagtcaagctgccggccacgcccggcacccccctatccagtacaaggccttctccgagatccagtacaaggtcgtcgtctccaagatctgaccccgacgctagtgaggagggaagagtgggtggacgaagtgggggaggatgagcgaggagaggccggtgccgcggcgggagagcccgtggggtctgcctgagggcgacacgcggcagcccaaggctcaccgctgcaacgaccgcgccgaggacgtcgtccaggcttgctttgaagggaacccattcaagacagttccaggcccatttaagctcttctggcaatgcatgcgctcaaaacctggggaggaaccaaccgagccctatacctacctgcagctagatcctccgagaagggtggaagtgaatctggagcaaacaggaagtgaaccttgaacgagcatgcctagtttagcatctcgtgcctatttgtcttcacctttcgagcagactttttcctcctagggatcacatcatgtgagcacaaagctgcatatgtttggatgtttatataatctacctaataaaccgtgatccccagagctgcctgtccaggctgccaaaaaaaaataaaaaaaaaaaaaaaa

SEQ ID NO: 4890 - protein, 94 aa, Zea mays
  misc_feature: Ceres CLONE ID no. 998454
  misc_feature: Ceres CDNA ID no. 25446869
MSEERPVPRRESPWGLPEGDTRQPKAHRCNDRAEDVVQACFEGNPFKTVPGPFKLFWQCMRSKPGEEPTEPYTYLQLDPPRRVEVNLEQTGSEP

SEQ ID NO: 4891 - DNA, 654 bp, Zea mays
  misc_feature: Ceres CLONE ID no. 998745
  misc_feature: Ceres CDNA ID no. 36702464
  CDS (105)..(401): REFERENCED BY SEQ ID NO: 4892
cccagtccgtccgtccagcgtccactcgcccaccgtttccgctccatccccggcccccacttccccgttcgagagacgaaaaccgaccattcattccttcttccatggcgaggagggcgacggtgatggtgctcgcggcggcgctcgcggtcctcctgctggcgtcgtcgtcgtcgaagacggcccccgtggccagcgccgcccgggacgacccctcggcagcggcggcggcggccgtcacttcttctcgtgacctgcagaaggatggatcggcggcggcggcggaagggaaggggaaggagaaggagtgcgagggcgccaacgacgaggacgagtgcatgatgaggcgcacgctggccgcgcacaccgactacatctacacccagcagcaccacggctgatccaatagaatccgtcctaggttacatgcgttgctctcgtacgtgtgttcgtgtccgtccgtgctcgtgtcgtgtactcgtgtgtgtgtgtgtgtgtgtgtgtgtgaaacgccagcgcgtgctgcttctgctgcgtcgttattacctgcgtgtcaaataaattcttttttttgtcccaagtcacaccgttgaacgacacacagcgcatgtgtgtaataaagagaagagtctccggccaaaaaaaaaaaaaaaa

SEQ ID NO: 4892 - protein, 98 aa, Zea mays
  misc_feature: Ceres CLONE ID no. 998745
  misc_feature: Ceres CDNA ID no. 36702464
  misc_feature (16)..(98): Pfam Name: PSK PFAM Desc: Phytosulfokine precursor protein
  misc_feature: Homolog of GI Number: 23466413 NR Desc: TPA: putative phytosulfokine peptide precursor
  misc_feature: Homolog of GI Number: 61378777 NR Desc: phytosulfokine peptide precursor
  misc_feature: Homolog of GI Number: 23466411 NR Desc: TPA: putative phytosulfokine peptide precursor
  misc_feature: Homolog of GI Number: 50933839 NR Desc: Phytosulfokines 4 precursor
  misc_feature: Homolog of GI Number: 50920519 NR Desc: Putative Phytosulfokines precursor
  misc_feature: Homolog of GI Number: 23466375 NR Desc: TPA: putative phytosulfokine peptide precursor
  misc_feature: Homolog of GI Number: 23466417 NR Desc: TPA: putative phytosulfokine peptide precursor
  misc_feature: Homolog of GI Number: 28971931 NR Desc: phytosulfokine peptide precursor
MARRATVMVLAAALAVLLLASSSSKTAPVASAARDDPSAAAAAAVTSSRDLQKDGSAAAAEGKGKEKECEGANDEDECMMRRTLAAHTDYIYTQQHHG

SEQ ID NO: 4893 - DNA, 740 bp, Zea mays
  misc_feature: Ceres CLONE ID no. 998803
  misc_feature: Ceres CDNA ID no. 36706328
  CDS (1)..(531): REFERENCED BY SEQ ID NO: 4894
cttgtctcccacgggccacgacagacccttcctgaagcccaatcggcccgcacgcaaaaaaccctcacgcgtattaagtcatccccctcaccacctagggttccctttacagccgccgccgccgacgacgacgacgacaccgacgcatctctcagcctccccgcactcgcttccgtcgccgcagccgccgccgccgccgccgcttcgcagccatgggtaaggtgcacggatcgctggcccgcgccgggaaggtccgcaggcagacgcccaaggtggcgaagcaggacaagaagaagaagccccgcggccgcgcgtacaagaggatgcagtacaaccgccgcttcgtcaccgccgtcgtcggcttcggcaagaagcgcgggcccaactcgtccgagaagtaggcgcccgaccgaggcgcgacgccgttgggctcgcatgcctatgcctatgctcttgctcttcctggtagtagttttcgtttgtgcaagcagaagaagatcttttttgttgttccagtctcagtttcgatgagagcttgagattatatgtcaacctccttattaattaaggatgaatttttgagatatgatgatacgtggcaatgacttcttgccccttttgcgttctttgcgaatgtaatgcaaataggtaggttaaatcattcgtcgatctcatggctacttgatattgactagttttgcctaatttgtttattaggtccggcaaaaaaaaaaaaaaaa

SEQ ID NO: 4894 - protein, 62 aa, Zea mays
  misc_feature: Ceres CLONE ID no. 998803
  misc_feature: Ceres CDNA ID no. 36706328
  misc_feature (3)..(61): Pfam Name: Ribosomal_S30 PFAM Desc: Ribosomal protein S30
  misc_feature: Homolog of GI Number: 55773694 NR Desc: 40S ribosomal protein S30
  misc_feature: Homolog of GI Number: 30102786 NR Desc: At5g56670
  misc_feature: Homolog of GI Number: 25295582 NR Desc: 40S ribosomal protein S30
  misc_feature: Homolog of GI Number: 6679753 NR Desc: Finkel
  misc_feature: Homolog of GI Number: 15822932 NR Desc: Finkel
  misc_feature: Homolog of GI Number: 36968262 NR Desc: Finkel
  misc_feature: Homolog of GI Number: 60678256 NR Desc: Finkel
  misc_feature: Homolog of GI Number: 47682823 NR Desc: MGC80045 protein
  misc_feature: Homolog of GI Number: 50603825 NR Desc: MGC89853 protein
  misc_feature: Homolog of GI Number: 63694872 NR Desc:  similar to Finkel
MGKVHGSLARAGKVRRQTPKVAKQDKKKKPRGRAYKRMQYNRRFVTAVVGFGKKRGPNSSEK

SEQ ID NO: 4895 - DNA, 860 bp, Zea mays
  misc_feature: Ceres CLONE ID no. 998962
  misc_feature: Ceres CDNA ID no. 25446256
  CDS (3)..(365): REFERENCED BY SEQ ID NO: 4896
gcaggagcagtccaggactcgttttttttcttgctagaaccttgcgagttccgactccctcactcatctccgtccgtccgccgcaccgtcgccgagcgccgctccgcgccggagacgtcctgtttttttgccgcctacgagcgctgtccctcttttctttccgcggctctgccccaacttctgcatccgaatctcccacgaagttgtcacggcgatggcagcgaccggcggcgtttcaactgacgatatcccgatcctgcaggcagagaacctcaccagcaacgtcaagtccgtccactacagtcgaacattcttgtcgatcattggtggagttgttgctggaatctggggattcacaggcttgacgggatttgtcttctactttctgataatgatggttgcatctatcgggctcttagcaaagtcaaagttttcagtgcagacatacttcgatagttggaccaggatttcaattgaaggagtttttggtggccttatgtcattcgtgctgttctggacatttgcttatgacattgttcatatcttctgatggacgtagaaagagctaccctccaaggaaaatatggaatttcatctgatgtcgaacattcccaatgggctctttgtacactcagtttttattttggtaattgttgatataatattttgtgatactatatcgttggacctaagcagagctcataaactgatgtagcaactccttcgcttggatgatctgtagcagttgtgatttgtcatttccagtaatgaatgtaaactttgattgatggacactcggatttttttgcattatcacttgaaatgtgaatggccggtctggtgcaaaaaaaaaaaaaaaa

SEQ ID NO: 4896 - protein, 111 aa, Zea mays
  misc_feature: Ceres CLONE ID no. 998962
  misc_feature: Ceres CDNA ID no. 25446256
  misc_feature: Homolog of GI Number: 34911218 NR Desc: P0445E10.7
  misc_feature: Homolog of GI Number: 54638214 NR Desc: GA11196
  misc_feature: Homolog of GI Number: 50758288 NR Desc:  similar to RIKEN cDNA 0610009E20
  misc_feature: Homolog of GI Number: 76643732 NR Desc:  similar to CG11781
  misc_feature: Homolog of GI Number: 57091959 NR Desc:  similar to RIKEN cDNA 0610009E20
  misc_feature: Homolog of GI Number: 49250344 NR Desc: MGC69232 protein
  misc_feature: Homolog of GI Number: 51258475 NR Desc: MGC84380 protein
MAATGGVSTDDIPILQAENLTSNVKSVHYSRTFLSIIGGVVAGIWGFTGLTGFVFYFLIMMVASIGLLAKSKFSVQTYFDSWTRISIEGVFGGLMSFVLFWTFAYDIVHIF

SEQ ID NO: 4897 - DNA, 851 bp, Zea mays
  misc_feature: Ceres CLONE ID no. 998966
  misc_feature: Ceres CDNA ID no. 29191518
  CDS (214)..(621): REFERENCED BY SEQ ID NO: 4898
ctccaaaaatgttcttcttccgctgcaagatagcaacagaggcgaggatcccaagacccgagccgtgtaggctgctacagtctcttcctcctcggcaagccccgccggtcgttgccccggcccctcatatataatatactcgccgcctccttgtcaccgccgattcgattaggttgatacagccatacagggaggagccgcgaggggacgtagatgccgacgctgacaaagctgtacagcatggaggaggctgccctccacaacacgcccgacgactgctgggtcgtcgtcgacggcaagatttatgatgtgaccaagtatttggaggaccatcctgggggcgccgatgttctgctcgaagcaaccggtaaggatgctacagaagaatttgacgatgcagggcacagcaagagtgccaaggagctaatgcaggactacttcattggggagttggactcggacccaactcctgagattcctgagatggaggttttcaggaaggaacaggacacgggatttgccaggaagcttatggacgacgtggtgcaatattggtcgatcccagccgctgtaatcgggatatcagctgttgttgccatattgtatgcgcgaaggaagtgaaagctgatgtccatgtgccgagcttgggcagatgaccccttttagagggatcagcccatggtgcatggatatatcatatatcatatctcctgtccagaaccaaattacattatgatgttcgattcttaaacacttaacggcaaacatttgccagattgatgacattattttgtcgacacgacaatcaattgatggatttattactcttggaaccaaaaaaaaaaaaaaaa

SEQ ID NO: 4898 - protein, 135 aa, Zea mays
  misc_feature: Ceres CLONE ID no. 998966
  misc_feature: Ceres CDNA ID no. 29191518
  misc_feature (7)..(81): Pfam Name: Cyt PFAM Desc: Cytochrome b5
  misc_feature: Homolog of GI Number: 30090027 NR Desc: cytochrome b5
  misc_feature: Homolog of GI Number: 30090033 NR Desc: cytochrome B5
  misc_feature: Homolog of GI Number: 12083238 NR Desc: putative cytochrome b5 protein
  misc_feature: Homolog of GI Number: 50844679 NR Desc: cytochrome b5 isoform Cb5
  misc_feature: Homolog of GI Number: 12229735 NR Desc: Cytochrome b5
  misc_feature: Homolog of GI Number: 23197754 NR Desc: putative cytochrome b5
  misc_feature: Homolog of GI Number: 50844677 NR Desc: cytochrome b5 isoform Cb5
  misc_feature: Homolog of GI Number: 52353573 NR Desc: cytochrome b5
  misc_feature: Homolog of GI Number: 414705 NR Desc: cytochrome b5
  misc_feature: Homolog of GI Number: 50844675 NR Desc: cytochrome b5 isoform Cb5
MPTLTKLYSMEEAALHNTPDDCWVVVDGKIYDVTKYLEDHPGGADVLLEATGKDATEEFDDAGHSKSAKELMQDYFIGELDSDPTPEIPEMEVFRKEQDTGFARKLMDDVVQYWSIPAAVIGISAVVAILYARRK

SEQ ID NO: 4899 - DNA, 905 bp, Zea mays
  misc_feature: Ceres CLONE ID no. 999205
  misc_feature: Ceres CDNA ID no. 25445723
  CDS (415)..(777): REFERENCED BY SEQ ID NO: 4900
ctcctccttttccttccttttttctttttttcccagcccacctcgctcgctcccttcccttcccagtggaagtggattggttgattgatcgcacagagctcgcctcacatccacacagcccgagctgctgcccgcccacccgcctgtagctcccctcctcacggagcaggcaggcaggcaggctgggattcccgtcgaagcagggcaggtacggcacggcccgcccggttgaatccctcggcctccctccgcgggggctaatttgtctcgctcgttcccgtctctactgctgctgcaggagctagggcgggtggaggagcctttgcccgggaacgaggagaggaggtggcagtggcaccccgcggctagggcagcgagagaggggcgaagaggaaggcggcgggcgcgtccgccatggctagcgaggaagtactccacaaggtccagaatcttatagagcgctgccttcagatgtacatgaacaagaaagaagtggttgatgccctctcccaccactccaggatagagccttgtatcactgaacttgtttggcaacaacttgagcaacagaatcctctgtttttcaaagcatacgatatgaggctaatgcttaagaatcaaataatggtcttcaacaggcttctccaggatcagttcgagattatgaataaagagttttcttcagggatcccttctatgtctcttcctaatgactctaattccaacctatgtaagacctttctttccagccttatcatgggcagggattgctcataattatttaacttagtgttctgatttgccttccggagtgaagtgctgtaacaatctgatggaatataaggcgtacatgttactttgcaaagtgatttaaccattgtataagtccaaaaaaaaaaaaaaaa

SEQ ID NO: 4900 - protein, 120 aa, Zea mays
  misc_feature: Ceres CLONE ID no. 999205
  misc_feature: Ceres CDNA ID no. 25445723
  misc_feature: Homolog of GI Number: 34904068 NR Desc: P0489G09.23
MASEEVLHKVQNLIERCLQMYMNKKEVVDALSHHSRIEPCITELVWQQLEQQNPLFFKAYDMRLMLKNQIMVFNRLLQDQFEIMNKEFSSGIPSMSLPNDSNSNLCKTFLSSLIMGRDCS

SEQ ID NO: 4901 - DNA, 705 bp, Zea mays
  misc_feature: Ceres CLONE ID no. 999716
  misc_feature: Ceres CDNA ID no. 36696028
  CDS (80)..(517): REFERENCED BY SEQ ID NO: 4902
agagtttcctcctccactccctcccccccgcctccactaccccactcccaggagccgcccaggtacgtcgccggcggcgatgacgacgcgcttcaagaagaaccgcaagaagcgcggccacgtgtccgccgggcacggccgcatcggcaagcaccggaagcatcccggaggtcgcggtaacgccggtggcatgcaccaccaccgcatcctcttcgacaagtaccatcccggctacttcggtaaggtcggcatgcgctacttccacaagctccgcaacaagttctactgccccgcggtcaacatcgagcgcctctggtcgatggtgcccgccgaaaaggcggcggaagccggcggcgacaaggccccgcagatcgacgtcacgcagttcggcttcttcaaggtgctcgggaagggggtgctgccgcccaagcccatcgtcgtcaaggccaagctcatctccaaggtcgccgagaagaagatcaaggccgccggcggcgccgtcgtgctcaccgcctagttttcagtccttattcgcctcttggttttgagatctatatctgaactagcagtctttcttgtctcacctatttgtgttaagaagacgtagtttttaaatccatggctccttcctgtttggacagtgctttcatatcaaatatttcaggtatattagagctaactgcgctatcaaaaaaaaaaaaaaaa

SEQ ID NO: 4902 - protein, 145 aa, Zea mays
  misc_feature: Ceres CLONE ID no. 999716
  misc_feature: Ceres CDNA ID no. 36696028
  misc_feature (107)..(139): Pfam Name: L15 PFAM Desc: Ribosomal protein L15
  misc_feature: Homolog of GI Number: 50916422 NR Desc: putative ribosomal protein L27a
  misc_feature: Homolog of GI Number: 50939233 NR Desc: putative 60S ribosomal protein L27a
  misc_feature: Homolog of GI Number: 50251205 NR Desc: putative 60S ribosomal protein L27a
  misc_feature: Homolog of GI Number: 20147177 NR Desc: At1g70600/F5A18_22
  misc_feature: Homolog of GI Number: 76160998 NR Desc: ribosomal protein L27a
  misc_feature: Homolog of GI Number: 3608481 NR Desc: ribosomal protein L27a
  misc_feature: Homolog of GI Number: 21553702 NR Desc: 60S ribosomal protein L27A
  misc_feature: Homolog of GI Number: 7959355 NR Desc: 60S ribosomal protein L27a
  misc_feature: Homolog of GI Number: 23308283 NR Desc: At1g23290/F26F24_23
  misc_feature: Homolog of GI Number: 65302563 NR Desc: 60S ribosomal protein L27a
MTTRFKKNRKKRGHVSAGHGRIGKHRKHPGGRGNAGGMHHHRILFDKYHPGYFGKVGMRYFHKLRNKFYCPAVNIERLWSMVPAEKAAEAGGDKAPQIDVTQFGFFKVLGKGVLPPKPIVVKAKLISKVAEKKIKAAGGAVVLTA

SEQ ID NO: 4903 - DNA, 770 bp, Zea mays
  misc_feature: Ceres CLONE ID no. 999848
  misc_feature: Ceres CDNA ID no. 40351539
  CDS (99)..(401): REFERENCED BY SEQ ID NO: 4904
agagtcaccaacaagagtagtagtcggagccgtccgtagtagctagcgtacgtacgtgtgaccgattcagcgaggtcgccgtttgtgtgtcgatatatatggcgaggtcgccgtttgttccgatggatcaggggaaagagcaaggcgccggacgaggagcggccggcaataataaggagcggcagcagcaggagcaggagcaggaggaggtgctgctggtgcacagccaggtgcggcggatcaagaaggaggacgaggaggccttcagggagcgcctcctgaagctgcgcctgctggagacccggcccagcgccggcggcgtggcctggcgagccccgcgctccctgtcgccgctccgccgtgccggcagcgccatcatcccggtcccggtgagcgagtgactagtagcgagcatccgtcgacacgcggttctctcggctgcccgcgcgcccgccgccggttgtagatatcgctaggcgcgtacgtagcgagcgtgaccagtgtcttgttggggggtgcgctagtgagtgagcctgcccgtgctctgcgcctgcgcgcgcggagatatgggatcggagcttggtagacggcgacggtgtatagtaggcagcagcatcgccatgtgtgcgtggttcgtggtacagtagcatagcatgctctgtttctgtatcctgctgtgctcttcttcttggtggtggtggtgtgtatgtatatataaatatatgtttacgatgagttatgagagggagtttataaaaaaaaaaaaaaaa

SEQ ID NO: 4904 - protein, 100 aa, Zea mays
  misc_feature: Ceres CLONE ID no. 999848
  misc_feature: Ceres CDNA ID no. 40351539
MARSPFVPMDQGKEQGAGRGAAGNNKERQQQEQEQEEVLLVHSQVRRIKKEDEEAFRERLLKLRLLETRPSAGGVAWRAPRSLSPLRRAGSAIIPVPVSE

SEQ ID NO: 4905 - DNA, 752 bp, Zea mays
  misc_feature: Ceres CLONE ID no. 999900
  misc_feature: Ceres CDNA ID no. 29191519
  CDS (150)..(509): REFERENCED BY SEQ ID NO: 4906
aagccaatgaatctagccgtccgctccctgttgccccccaagccaaccatatccactctcggcggcgccgcgcatctctcctctcttcttgcccttccttcccccaacccacacagcctcactaggggtctaccggcggcggcaacgagatggtgcagcgcctcacctaccgaaagcgtcacagctacgcgacaaaatccaatcagacccgggtcgtgaagaccccaggtgggaagcttgtgtaccaatacaccaagaagagggcgagcggtcccaagtgccccgtcaccgggaagaagatccaggggatcccccacttgagacctgccgagtacaagaggtccaggttgtctaggaaccacaggactgttaaccgtccttatggtggagtactctctggaattgctgttagggagagaattatccgtgctttcttggttgaggagcagaagattgtcaagaaggtcctgaaaatacagaaaaccaaggacaagacagctgcaaagtagagctccaggaatggaagcctagacactgcgagaagtaattttggtggatggaaaatatgtttgccttgtgtcgagcatttagcatgtgagacatgcctgttgaagtgtttgagtttagagaccggaatccctttcacctttgaattgttgctatgtcgggacatctgctcccctagttgctttgttatgaattgagatcatatctgggtaagataatcttgtctaacaaaaaaaaaaaaaaaa

SEQ ID NO: 4906 - protein, 119 aa, Zea mays
  misc_feature: Ceres CLONE ID no. 999900
  misc_feature: Ceres CDNA ID no. 29191519
  misc_feature (5)..(103): Pfam Name: Ribosomal_L34e PFAM Desc: Ribosomal protein L34e
  misc_feature: Homolog of GI Number: 50946109 NR Desc: putative ribosomal protein
  misc_feature: Homolog of GI Number: 50941301 NR Desc: putative ribosomal protein L34
  misc_feature: Homolog of GI Number: 57471712 NR Desc: ribosomal protein l34
  misc_feature: Homolog of GI Number: 2119150 NR Desc: ribosomal protein L34
  misc_feature: Homolog of GI Number: 1076636 NR Desc: ribosomal protein L34
  misc_feature: Homolog of GI Number: 47824936 NR Desc: Ribosomal protein L34e
  misc_feature: Homolog of GI Number: 20259165 NR Desc: putative 60S ribosomal protein L34
  misc_feature: Homolog of GI Number: 21436403 NR Desc: putative 60S ribosomal protein L34
  misc_feature: Homolog of GI Number: 21594659 NR Desc: 60s ribosomal protein L34
  misc_feature: Homolog of GI Number: 13194822 NR Desc: putative 60S ribosomal protein L34
MVQRLTYRKRHSYATKSNQTRVVKTPGGKLVYQYTKKRASGPKCPVTGKKIQGIPHLRPAEYKRSRLSRNHRTVNRPYGGVLSGIAVRERIIRAFLVEEQKIVKKVLKIQKTKDKTAAK

SEQ ID NO: 4907 - DNA, 736 bp, Zea mays
  misc_feature: Ceres CLONE ID no. 1000356
  misc_feature: Ceres CDNA ID no. 36589999
  CDS (85)..(564): REFERENCED BY SEQ ID NO: 4908
atcaactcgcaatttcgcattcgtccaaactcttgagcactttctcctcgtccccgacaagccactcgaagccgagatacggccatggactccaccggcaccggagcagcggggaagggaaagaagggagcggccgggcgcaaggtcggcgggccaaggaagaagtcggtgtcgaggtccgtgaaggctgggctccagttctccgtcggccgcatcgggcgctacttgaagaagggccgctacgcgcagcgtgtcggcaccggcgcccccgtctacctcgccgctgtcctcgaatacctcgccgctgaggttctggagctcgccggtaatgctgccagggacaacaagaagactcgcattattccgcgccacgtgcttctggcgatccggaacgacgaggagctcgggaagctgctgggcggcgtgaccatcgctcacggaggtgtgctccccaatatcaaccctgttctgctgcccaagaagacggcggagaaggcgtccagtggcgggagcaaggaggcaaagtcgcccaagaaggccgccaagtcccctaagaaggcatagactgactgtccggagtgatctgatgtttagcagtaccttgttaccagtatgcggtgatgcgtaggctgcagatgggacgaatgtgcttgtatgtgtatgtgtcctgctgcaagttgtcctttgctatttagaatggaagaagaaatgccttgtttcaaaaaaaaaaaaaaaa

SEQ ID NO: 4908 - protein, 159 aa, Zea mays
  misc_feature: Ceres CLONE ID no. 1000356
  misc_feature: Ceres CDNA ID no. 36589999
  misc_feature (31)..(106): Pfam Name: Histone PFAM Desc: Core histone H2A/H2B/H3/H4
  misc_feature: Homolog of GI Number: 729671 NR Desc: Histone H2A
  misc_feature: Homolog of GI Number: 34914498 NR Desc: putative histone H2A
  misc_feature: Homolog of GI Number: 47026912 NR Desc: histone H2A
  misc_feature: Homolog of GI Number: 47026919 NR Desc: histone H2A
  misc_feature: Homolog of GI Number: 7649159 NR Desc: histone H2A
  misc_feature: Homolog of GI Number: 121982 NR Desc: Histone H2A.2.2
  misc_feature: Homolog of GI Number: 121974 NR Desc: Histone H2A.2.1
  misc_feature: Homolog of GI Number: 122006 NR Desc: Histone H2A
  misc_feature: Homolog of GI Number: 73955042 NR Desc:  similar to Histone H2A.x
  misc_feature: Homolog of GI Number: 62653580 NR Desc:  similar to Histone H2A.x
MDSTGTGAAGKGKKGAAGRKVGGPRKKSVSRSVKAGLQFSVGRIGRYLKKGRYAQRVGTGAPVYLAAVLEYLAAEVLELAGNAARDNKKTRIIPRHVLLAIRNDEELGKLLGGVTIAHGGVLPNINPVLLPKKTAEKASSGGSKEAKSPKKAAKSPKKA

SEQ ID NO: 4909 - DNA, 754 bp, Zea mays
  misc_feature: Ceres CLONE ID no. 1000556
  misc_feature: Ceres CDNA ID no. 36696044
  CDS (145)..(495): REFERENCED BY SEQ ID NO: 4910
aacacatccatcctcgctagctcgctcgctctccttgcaactccagtgctgctcactgccactgccagcagatcgagctgctccgtctcacaaaccctcttgctttgctgctgcacctgcaagtctgcaaccgcgcacacagagatgtcgacgacggtgagccgtgcgtccctcgaccagaagctcgccctcgccaagcgttgctcccgagaggcgaccctcgccggagccaaggcggcagcggtggcgactatcgcctccgcgatccccaccctggccagcgtgcggatgctgccatgggccaaggccaacatcaaccccaccggccaggcgctcatcgtctccacggtggctgggatggcctacttcatcgccgccgacaagaagatcctgtcgctggcgaggcgccactcgttcgagcaagcccctgagcacctcaagaacacctccttccagggcaccggccgtccccacccagccttcttcaggccgtgagacgagacctccgtccagagctagctacctacctctttttccagtttgccaatgcaagcaccaaatgcccaccgatgcatgcctgaataaactactgtaattgcgaggctgctgaacgtcgatgcgctagtataactactactactacgaggctagctgcgcgctgaacacagcgctgtaaagtagtgttggtgtgctaaattcagaatgtgtaagtttaatttatgttattaccagttaaccaaaaaaaaaaaaaaaa

SEQ ID NO: 4910 - protein, 116 aa, Zea mays
  misc_feature: Ceres CLONE ID no. 1000556
  misc_feature: Ceres CDNA ID no. 36696044
  misc_feature (12)..(90): Pfam Name: ENOD93 PFAM Desc: Early nodulin 93 ENOD93 protein
  misc_feature: Homolog of GI Number: 50948753 NR Desc: putative early nodulin
  misc_feature: Homolog of GI Number: 50948737 NR Desc: putative early nodulin
  misc_feature: Homolog of GI Number: 50948739 NR Desc: putative early nodulin
  misc_feature: Homolog of GI Number: 50948751 NR Desc: putative early nodulin
  misc_feature: Homolog of GI Number: 50948749 NR Desc: putative early nodulin
  misc_feature: Homolog of GI Number: 50948755 NR Desc: putative early nodulin
  misc_feature: Homolog of GI Number: 4809191 NR Desc: early nodulin
  misc_feature: Homolog of GI Number: 218262 NR Desc: early nodulin
  misc_feature: Homolog of GI Number: 4731119 NR Desc: root
  misc_feature: Homolog of GI Number: 50948733 NR Desc: Similar to OsENOD93a gene for early nodulin
MSTTVSRASLDQKLALAKRCSREATLAGAKAAAVATIASAIPTLASVRMLPWAKANINPTGQALIVSTVAGMAYFIAADKKILSLARRHSFEQAPEHLKNTSFQGTGRPHPAFFRP

SEQ ID NO: 4911 - DNA, 1833 bp, Triticum aestivum
  misc_feature: Ceres CLONE ID no. 1001149
  misc_feature: Ceres CDNA ID no. 24766058
  CDS (221)..(1540): REFERENCED BY SEQ ID NO: 4912
tcctccccccgagcccccttccctcctgatcacagacagccatttcttgccacttgcatcacatagcagccagcagaacccacctcacctattttccacgcgggacagtgaaacaaattggcggcgcgcggaaaggaaacggagccacacgcctgacctgaggtttgcagagggaggtttccagaggcagagggggataaggcaggcaggcaggcaggggatgagtacaaccaaggtgaagaggcgtgtgggcaagtatgagctagggcggaccatcggcgagggcaccttcgccaaggtcaggttcgccaggaacaccgagaccggggaccccgttgccatcaagatcttggacaaggagaagcttctcaagcacaagatggtcgagcagatcaagcgggaaattgcaacgatgaagttgattaagcatcccaatgttgtctgcatacacgaggtgatgggaagcaaaaccaagatctacattgttctggaatacgtcaccggcggcgagctctttgacacaattgttaaccatggcagaatgagggaagatgaggcaaggagatacttccaacagttgattaatgcggttgattattgccatagcaggggggtgtaccaccgtgatttaaaaccagaaaatctattacttgattcatgtggaaatctgaaggtgtctgattttgggctgagcgcgctatctcagcagctcaaggatgatggattactgcacacgacctgcggcactccaaattatgttgcaccggaggtcctcgaagatcaaggctatgatggcgcaatggcagatttgtggtcatgtggagtaattctgtttgttctgctagcagggtatttgccttttgaggactctaatcttatggccttgtataagaaaatatcagatgcagagtttacgtttccgccttggacgtcttttcctgccaagaggttgttaacaagaatccttgatccaaatccgatgacgagaataacagttcaagaaatgttagaggatgagtggttcaagaaaggttacaagcgtgcggagtttgatgagaagtatgacacaacactggacgatgtggatgctgtcttcaatgattcagaagagcaccatgtaacagaaaagaaagaagaagaaccagtagctctgaatgcatttgaactgatttcaatgtcagcaggccttaatcttggaaatttattcgactctgagcaagaatttaaaagagaaacaaggtttacatctaaaagctcgcctaaagaaattctccgcaagatcgaagaagctgcaaagcctctaggatttgatattcacaagaaaaattacaagctgagactagagaaggtaaaagcaggaaggaaggggaaactcaatgttgctaccgagatactgcgagtcgggccttctcttcatatggttgaagttcgcaaagcaaaaggcgacactctagaatttcacaagttctacaagaacctttcaaacaccttgaaggacgttgtatggaaatccgacgatcttcagatccaaccttcctagcagcagcttgggagaaggggggatgggtaaactattagcatcccattcttcctgagttgatccattctcaggagctggatcaagataaattgttcaccgcattttgtaagtacaggtggatagccctgttgtcagccgtgcctgtcctccactggtgttgtatatgctgcattttgagagacttgttggaacagtttaagtcaagcacattcaagtaggttttgctgtatattaggcatgtgggttttcacaagccgtatcaagttcactttggaacaaaaaaaaaaaaaaaa

SEQ ID NO: 4912 - protein, 439 aa, Triticum aestivum
  misc_feature: Ceres CLONE ID no. 1001149
  misc_feature: Ceres CDNA ID no. 24766058
  misc_feature (13)..(268): Pfam Name: Pkinase PFAM Desc: Protein kinase domain
  misc_feature (307)..(367): Pfam Name: NAF PFAM Desc: NAF domain
  misc_feature: Homolog of GI Number: 19699234 NR Desc: At1g30270/F12P21_6
  misc_feature: Homolog of GI Number: 15223317 NR Desc: CBL
  misc_feature: Homolog of GI Number: 32442211 NR Desc: CIPK
  misc_feature: Homolog of GI Number: 29294047 NR Desc: NAF specific protein kinase family
  misc_feature: Homolog of GI Number: 34902248 NR Desc: Putative serine/threonine kinase
  misc_feature: Homolog of GI Number: 62857008 NR Desc: Ser/Thr protein kinase
  misc_feature: Homolog of GI Number: 42570534 NR Desc: protein kinase family protein / NAF domain
  misc_feature: Homolog of GI Number: 50940145 NR Desc: putative serine/threonine kinase
  misc_feature: Homolog of GI Number: 2632252 NR Desc: serine/threonine kinase
  misc_feature: Homolog of GI Number: 2632254 NR Desc: serine/threonine kinase
  misc_feature: Useful for making ornamental plants with modified flowers
  misc_feature: Useful for making ornamental plants with modified flowers
  misc_feature: Useful for making ornamental plants with modified leaves
  misc_feature: Useful for making ornamental plants with modified leaves
  misc_feature: Useful for making plants that grow better in shade
  misc_feature: Useful for making plants with  enhanced chemical composition
  misc_feature: Useful for making plants with increased biomass
  misc_feature: Useful for making taller plants
  misc_feature: Useful for sterility
  misc_feature: Useful for sterility
MSTTKVKRRVGKYELGRTIGEGTFAKVRFARNTETGDPVAIKILDKEKLLKHKMVEQIKREIATMKLIKHPNVVCIHEVMGSKTKIYIVLEYVTGGELFDTIVNHGRMREDEARRYFQQLINAVDYCHSRGVYHRDLKPENLLLDSCGNLKVSDFGLSALSQQLKDDGLLHTTCGTPNYVAPEVLEDQGYDGAMADLWSCGVILFVLLAGYLPFEDSNLMALYKKISDAEFTFPPWTSFPAKRLLTRILDPNPMTRITVQEMLEDEWFKKGYKRAEFDEKYDTTLDDVDAVFNDSEEHHVTEKKEEEPVALNAFELISMSAGLNLGNLFDSEQEFKRETRFTSKSSPKEILRKIEEAAKPLGFDIHKKNYKLRLEKVKAGRKGKLNVATEILRVGPSLHMVEVRKAKGDTLEFHKFYKNLSNTLKDVVWKSDDLQIQPS

SEQ ID NO: 4913 - DNA, 757 bp, Triticum aestivum
  misc_feature: Ceres CLONE ID no. 1002657
  misc_feature: Ceres CDNA ID no. 40351540
  CDS (232)..(576): REFERENCED BY SEQ ID NO: 4914
aaaccacaactcgccaacgcctaatccgtctccgccaccggccagccagagagcgagcgagcgattcgccaccgccgtcaccgctgccgccggcgtcgagcctgcagggagcgagcccctgtcgccacccaacagcctcaccctcgcggcccccgcgtctcccgcgagaatcgcgcccgcccgcctagggtttccgccgccgccggagaggaggggaaccagagcgacgagatggcagggcggctcctcgggcaactcctcgtcatgggcggcgccgtcgtcggcagggccgtggtgcaggcctaccgccaggccatcgtcaatgcacagagaaccggagctgcccaggaagctgtgaatggtattcgaagggctagcaaggctatgaccgagcaagaagcccggcaaatattaggtatcagtgaaaagacgagttgggaagagattgtcaagaagtatgatacgatgtttgagaagaatgccaagagcggaagcttctatctccagtcgaaagtacaccgggccaaagaatgtctggagtccatataccatgataagcccgacataatgaactgaactgagatgggcagcgtttcgtctaatcgatcgattttgtcagtcgatgttctgtctgagctatgctgggctgctgcatcaggtcaaatttggttgtaacaggaagtttgttccacttgactcgaataatatattcaacaaaaggaacaccgtttgatttgttttaaaaaaaaaaaaaaaa

SEQ ID NO: 4914 - protein, 114 aa, Triticum aestivum
  misc_feature: Ceres CLONE ID no. 1002657
  misc_feature: Ceres CDNA ID no. 40351540
  misc_feature (1)..(112): Pfam Name: Pam16 PFAM Desc: Pam16
MAGRLLGQLLVMGGAVVGRAVVQAYRQAIVNAQRTGAAQEAVNGIRRASKAMTEQEARQILGISEKTSWEEIVKKYDTMFEKNAKSGSFYLQSKVHRAKECLESIYHDKPDIMN

SEQ ID NO: 4915 - DNA, 719 bp, Triticum aestivum
  misc_feature: Ceres CLONE ID no. 1002665
  misc_feature: Ceres CDNA ID no. 35383317
  CDS (259)..(507): REFERENCED BY SEQ ID NO: 4916
aaagaggagagaagcacccaagccccagtcagttctcagccctgtagctgctccacagagagaggcgagaggaagccaggtaggaggctctgctgcaaagggagatggccgggaaaggaggcaaggggctgcttgcggcgaagacgacggcggccaagggcgccgccgcaccagcttctcttcctcctcccgcagcgcctcctcgaatccaagagatcaagtcgctgttgttgtgccactccccctccagccgccgtcatgcagaacgaggtgggtgacatggtggacctctacgtccccaggaagtgctcggccaccaacaggatcatcacggccaaggaccacgcctctgtccagatcaacattggtcacgttgatgagaatggcctctatgatggccgcttcaccacctttgctctctctgggttcgtccgtgctcagggtgatgctgatggctccctggacaggctgtggcagaagaggaaggctgagatcaagcagctctagatgttgctagtagttttacctggaacttgtgtccttcccatgtctacctagctcttggatgtctgtggttggtttcagttgctgctatggaagctaagacttgatgtcacttggcctggtttattgtgaacatgttttgagtttaatctgtgttgaatgcttgatatatgtcccttatctcgttgcttattgttagaaaaaaaaaaaaaaaa

SEQ ID NO: 4916 - protein, 82 aa, Triticum aestivum
  misc_feature: Ceres CLONE ID no. 1002665
  misc_feature: Ceres CDNA ID no. 35383317
  misc_feature (1)..(81): Pfam Name: Ribosomal_S21e PFAM Desc: Ribosomal protein S21e
  misc_feature: Homolog of GI Number: 303839 NR Desc: 40S subunit ribosomal protein
  misc_feature: Homolog of GI Number: 50917601 NR Desc: 40S subunit ribosomal protein
  misc_feature: Homolog of GI Number: 53370646 NR Desc: 40S ribosomal protein S21
  misc_feature: Homolog of GI Number: 1419372 NR Desc: ribosomal protein S21
  misc_feature: Homolog of GI Number: 1707868 NR Desc: 40S ribosomal subunit protein S21
  misc_feature: Homolog of GI Number: 15241026 NR Desc: 40S ribosomal protein S21
  misc_feature: Homolog of GI Number: 20148437 NR Desc: 40S ribosomal protein S21 homolog
  misc_feature: Homolog of GI Number: 21554974 NR Desc: 40S ribosomal protein S21 homolog
  misc_feature: Homolog of GI Number: 6012958 NR Desc: 40S ribosomal protein S21
  misc_feature: Homolog of GI Number: 55653172 NR Desc:  similar to ribosomal protein S21
MQNEVGDMVDLYVPRKCSATNRIITAKDHASVQINIGHVDENGLYDGRFTTFALSGFVRAQGDADGSLDRLWQKRKAEIKQL

SEQ ID NO: 4917 - DNA, 577 bp, Zea mays
  misc_feature: Ceres CLONE ID no. 1004177
  misc_feature: Ceres CDNA ID no. 25445736
  CDS (143)..(361): REFERENCED BY SEQ ID NO: 4918
gaccgatataccgaaccctagcccagttgttccgccgagcgaacgatccagaagcagaagccaccgatcggcgtgccgcgtgcgtgaggcgatcggagcatcccgtcccgaggaggaagacaaccggcgacgcggggggaacatggggaagacgccggtgcggatgaaggcggtcgtgtacgcgctgtcgcccttccagcagaaggtaatgccggggctgtggaaggacatcaccaccaagatccaccacaaggtcaccgagaactggatctccgccacgctcctcctcacccccgtcgtcggcacctaccaatacgccatgtggtacaaggagcaggagaagctttcccacagatattaaatgcgctgcccttcacagacagcacttggatttaacatttgtttgatcaatttcagttcaacgccttttcatcgttccatatgcatgtatggtatccgtgtctggcaaacttattttgaggcttgttaaatatgtaccttttgtctctcaagatgttaaataaagcaaattaacttccagttaaaaaaaaaaaaaaaaaaaaaaaaaaaaaaaaaa

SEQ ID NO: 4918 - protein, 72 aa, Zea mays
  misc_feature: Ceres CLONE ID no. 1004177
  misc_feature: Ceres CDNA ID no. 25445736
  misc_feature: Homolog of GI Number: 34898476 NR Desc: EST AU082567
  misc_feature: Homolog of GI Number: 32400883 NR Desc: cytochrome reductase
  misc_feature: Homolog of GI Number: 6630544 NR Desc: putative ubiquinol
  misc_feature: Homolog of GI Number: 34365575 NR Desc: At5g05370
  misc_feature: Homolog of GI Number: 633687 NR Desc: ubiquinol
MGKTPVRMKAVVYALSPFQQKVMPGLWKDITTKIHHKVTENWISATLLLTPVVGTYQYAMWYKEQEKLSHRY

SEQ ID NO: 4919 - DNA, 1324 bp, Triticum aestivum
  misc_feature: Ceres CLONE ID no. 1004792
  misc_feature: Ceres CDNA ID no. 25447337
  CDS (358)..(1206): REFERENCED BY SEQ ID NO: 4920
atccgtcagtccgtcgctccacccttccgccgccgtcgcctcctcctcctcccctgctctcctcgggctcggaccagagcgcgctagggcccactcggcgagggagcagcggccttccccatcccttcttcccctccggagagagtggcgccgccaccaggagaccacgaccccgaggccggccatggcgactagttccggcagccggtaaacctggggtcgggtcgggacgatgacaagcatctcaggggaatggattggtgacgctgttgtttgaacggtaggcgtggagctctgttgcgcgtgcaattggaatatcaagcaaggcggtacttgtaactttgagttctcgtggcgatggatggtgctacctctagcaagagacgagtagaagccccgggacaggaggagagcagctgcaagaggcagaatgtcaccatggggatggacgccctcgactgccccgtctgctttcatcccctccgacctccgatataccagtgttctgtggggcatttcatatgctcttcttgccgtcccaagctcgtgcgcaacaattgtcacttatgctctgctgaaactaccttcaagcgctgtttagggatggaacgtctcatggaatcagtcatggtcccttgctccaatgcaaaatatggatgcgcagagaagctcacctactaccaggaagaagagcacgagaaggcatgcccgagcgccccatgtttctgcccggcgtccagctgcagctttgcagggccaacagacgccctccttgaacatttcgcctcccagcacaagtggccgtgtacaaccatcaaatactccgaagatgttaacttcagcctagaaccaggtctacattttcttcgtatcaaagacagggaaattttcctgctcaacgtggcactagaggcattcgggcatgccatctctgtcgtctgcatccaacctaaagctacaaactccaagttcaagtgtaggatgtcctatggttcctttttgacagactattatcagatatcagtttacaagatacgaagctcatcgttgtctgatgggctaccgaagggatacaacttaattctgcctaaagatgagatagctgatgatggaaagggtaccttgcttacgttctccattgatgatcctaatcctaaagtaaaggcgcgtgagcccatatgtctgaaaccaatacgcggtgtatgattgatgtggtaaggttcagcgtggacgttcgcggccttcattgtttggttttcatgacttgtactccctccgttcctaaatataagtctttttagagattccaaaaaaaaaaaaaaaa

SEQ ID NO: 4920 - protein, 282 aa, Triticum aestivum
  misc_feature: Ceres CLONE ID no. 1004792
  misc_feature: Ceres CDNA ID no. 25447337
  misc_feature (78)..(260): Pfam Name: Sina PFAM Desc: Seven in absentia protein family
  misc_feature: Homolog of GI Number: 55769991 NR Desc: SIAH1 protein
  misc_feature: Homolog of GI Number: 54291093 NR Desc: SIAH1 protein
  misc_feature: Homolog of GI Number: 34895396 NR Desc: P0445D12.5
  misc_feature: Homolog of GI Number: 34895400 NR Desc: P0445D12.7
  misc_feature: Homolog of GI Number: 7657876 NR Desc: SIAH1 protein
  misc_feature: Homolog of GI Number: 15864565 NR Desc: SIAH1 protein
  misc_feature: Homolog of GI Number: 15241972 NR Desc: seven in absentia
  misc_feature: Homolog of GI Number: 27374387 NR Desc: sina
  misc_feature: Homolog of GI Number: 24665579 NR Desc: CG9949
  misc_feature: Homolog of GI Number: 57231802 NR Desc: seven in absentia
MDGATSSKRRVEAPGQEESSCKRQNVTMGMDALDCPVCFHPLRPPIYQCSVGHFICSSCRPKLVRNNCHLCSAETTFKRCLGMERLMESVMVPCSNAKYGCAEKLTYYQEEEHEKACPSAPCFCPASSCSFAGPTDALLEHFASQHKWPCTTIKYSEDVNFSLEPGLHFLRIKDREIFLLNVALEAFGHAISVVCIQPKATNSKFKCRMSYGSFLTDYYQISVYKIRSSSLSDGLPKGYNLILPKDEIADDGKGTLLTFSIDDPNPKVKAREPICLKPIRGV

SEQ ID NO: 4921 - DNA, 1978 bp, Triticum aestivum
  misc_feature: Ceres CLONE ID no. 1005179
  misc_feature: Ceres CDNA ID no. 25446482
  CDS (250)..(1842): REFERENCED BY SEQ ID NO: 4922
ataggcatggagtaaacaatccgaacccagcaaagcagcatccccccgccgccgaaggcgcggcgcagcatcctctctccccccgccgagcgaccgacggtaccaccaacctccgccgtcagcctaggctcgaagaaccgattcactccgcagggcatcgaccacggggatccccccgcacggcagggaagaagttgatgtgaaagagaatctaatcagcagggctagtcctggctcgcatgctccaacatgctccatgctaaggagacactgaggaagatgtactcagtcgccaagggctactactgcggggggctagccgctcccaatccttttccagcagcatgggatcttaggcattctctcaatccctcaaggaaagcgccgggttttgttaacccatgcagggcccgttcatatgcgcacatcgcggaaagctctgccggccaagagattgtgattgctcttggaagcaatgtgggggacaggatcagttcgttcgacagggcgctgcggctgatgaaagactcgggcataaagatcaccaggcacgcctgtctgtacgagaccgcccccgagtatgtgaccgaccagccgcggttcctcaactccgctgttcggggcacgaccaagctggggcctcatgatttgctcaagaagctgaaggagatcgagagggatataggccggaccgcggggataaggtacggcccaaggccgatcgatctcgatattctcctgtatggcgactcccagatcagtaccgagaccctgactgtgccacatgagcgcatccatgagagacaattcgttttagcgcctcttgttgaccttctggggtcctcggctgacgatcatatggagaaaagctggcactccctctcgaagtgcagcggtgggttctttgatgtgtggaacgagcttggtggtgaatctttaattgggacacaaggtatcaagagggttatggctgttggaaatcgtctgttggattggagtgagaggacccttatcatgggggtgcttaacttgacgccggacagctttagtgacggaggtaagttccaagaagtggaggctgctattgctcaggccaagttgttgatatcagaaggcgcagacataattgatattggtgctcaatccaccaggccctctgcaacaagactatctgcaaatgaagaacttgagaggctggtccctgttctggatgcaatcgtcaaaatccctgagatggaagggaagctgatctcagtagacacattctacggacaagtcgctgctgaagctgtaaagagaggagccaccatgatcaatgatgtatctggtggacagcttgacccaagtattcttgaagttgtagctgaacttggagttccatatgttaccatgcacatgagaggtgatccatcaactatgcagagtgaacagaatttacagtatgatgatgtctgcaaagaagttgcttccgagttatacacacggttaagagaagctgagctgtctggaattcctttgtggaggatagttcttgatcccggcattgggttttccaagaaatccagacataatcttgaaataatcaacggcttgagatccattagagaagagatgggtaaagtgagtttaggtgcttcacatgtgccagtattacttggactctcaaggaaaagattcttaggtgaaatatgcaaccgtgccgatccagttgagagagatgccgctactgttgctgctaatgcagctgggattatgaatggtgctaatatattaagggtccataatgttcgttgtggcgtggatactgcaaaggtctctgatgcattgcgcatggtcaaatgaaaaagtgcaccgccagaaaagaattgagaccagtctccagttttgtacaagagaatggtgatgtagatttgtagagtagttactgtcacatcattggcttctcagttcatacctcataccaaaaaaaaaaaaaaaa

SEQ ID NO: 4922 - protein, 530 aa, Triticum aestivum
  misc_feature: Ceres CLONE ID no. 1005179
  misc_feature: Ceres CDNA ID no. 25446482
  misc_feature (258)..(481): Pfam Name: Pterin_bind PFAM Desc: Pterin binding enzyme
  misc_feature (70)..(196): Pfam Name: HPPK PFAM Desc: 7
  misc_feature: Homolog of GI Number: 51963554 NR Desc: PREDICTED B1056G08.147 gene product
  misc_feature: Homolog of GI Number: 1934972 NR Desc: dihydropterin pyrophosphokinase /dihydropteroate synthase
  misc_feature: Homolog of GI Number: 7269900 NR Desc: dihydropteroate synthase
  misc_feature: Homolog of GI Number: 50939293 NR Desc: putative dihydropterin pyrophosphokinase / dihydropteroate synthase
  misc_feature: Homolog of GI Number: 12325095 NR Desc: putative dihydropterin pyrophosphokinase/dihydropteroate synthase
  misc_feature: Homolog of GI Number: 66852955 NR Desc: folic acid synthesis protein
  misc_feature: Homolog of GI Number: 32418400 NR Desc: probable multifunctional folic acid synthesis protein
  misc_feature: Homolog of GI Number: 16945416 NR Desc: probable multifunctional folic acid synthesis protein
  misc_feature: Homolog of GI Number: 46435754 NR Desc: likely multifunctional folic acid biosynthesis enzyme
  misc_feature: Homolog of GI Number: 46435705 NR Desc: likely multifunctional folic acid biosynthesis enzyme
MLHAKETLRKMYSVAKGYYCGGLAAPNPFPAAWDLRHSLNPSRKAPGFVNPCRARSYAHIAESSAGQEIVIALGSNVGDRISSFDRALRLMKDSGIKITRHACLYETAPEYVTDQPRFLNSAVRGTTKLGPHDLLKKLKEIERDIGRTAGIRYGPRPIDLDILLYGDSQISTETLTVPHERIHERQFVLAPLVDLLGSSADDHMEKSWHSLSKCSGGFFDVWNELGGESLIGTQGIKRVMAVGNRLLDWSERTLIMGVLNLTPDSFSDGGKFQEVEAAIAQAKLLISEGADIIDIGAQSTRPSATRLSANEELERLVPVLDAIVKIPEMEGKLISVDTFYGQVAAEAVKRGATMINDVSGGQLDPSILEVVAELGVPYVTMHMRGDPSTMQSEQNLQYDDVCKEVASELYTRLREAELSGIPLWRIVLDPGIGFSKKSRHNLEIINGLRSIREEMGKVSLGASHVPVLLGLSRKRFLGEICNRADPVERDAATVAANAAGIMNGANILRVHNVRCGVDTAKVSDALRMVK

SEQ ID NO: 4923 - DNA, 1611 bp, Triticum aestivum
  misc_feature: Ceres CLONE ID no. 1005447
  misc_feature: Ceres CDNA ID no. 24766515
  CDS (184)..(1314): REFERENCED BY SEQ ID NO: 4924
tcgcctccgctcgctcccatcctcattccccagtcgccgcccaagtcaaaaagagggggaagcttctccaccagagtccccaagcccatgaacgactagtcgctgcgaagcaccaaccctagaacccaaccctactctctcccctcctcggctcctcccctcgcgagcggcgacgaagaggccatggatacctccggcggcggcaccgccgcgggcggggccgcgcagatccaggggatggcgacacacggcggccgctacgtgctctacaacgtctacggcaacctcttcgaggtcgcctccaagtacgcccctcccatccgccccatcggccgaggcgcctacggcattgtctgcgcggcggttagttcggatacaggagaggaggttgcgatcaagaagattggaaatgcgtttgacaaccacatcgatgccaagcggacgctgagagaaataaagcttcttcgccacatggaccatgagaatattcttgccataaaggatttaatacgccccccaagaagagatgattttaaggatgtgtacattgttactgagttgatggacaccgacctccatcagatcattcgctcaaatcaatcattgactgatgaccattgccagtacttcttgtatcagttgcttcgagggctaaaatatgtgcactcagcaaatgtcttgcaccgtgatctgaagccaagcaatttgttcctaaacgcaaattgcgatctcaagattgcagactttgggcttgcaaggaccacttcagaaaccgatctcatgacagagtatgtggtcactcgttggtaccgagcaccagagttgctgttgaactgttcacaatatactgctgctattgatgtctggtcagttgggtgtatacttggtgaaattattactcgtcaacccctatttcctggaagagattacatccaacagttaaaattgatcactgagctgataggatcaccagatgattcgagcctgggatttcttcggagtgacaatgcacgaagatacatgaagcaattaccacagtacccaaggcaggacttccgcctgcgcttccgcaacatgtctgatggtgcagttgatctgttagaaagaatgctggtgtttgacccaagcagacgcatcactgttgacgaggctctgcaccacccatacttggcttctcttcatgacatcaatgaagaacccacttgcccggcacctttcagctttgattttgagcaaccatcttttacagaagaacatatgaaagagctcatctggagggaaactttagcatttaaccctgatcctccctactaagagccaagaccaaattaccagctgagggcattgaagatctacctctagctctagtgaagccgatatttccatgtcttgtgcatctatttattttatgctcgcttattgggcgaatgggcatggattatttgttgctgtaactatttcttttggggcctttctgaagaaacgacatttgtatgagatggcttgcgcctgggcttgtattataccggttgattgaataaattcttcttgtgtatctaaggcttgtaattttgtgtacacttatttaaacatccaaaaaaaaaaaaaaaa

SEQ ID NO: 4924 - protein, 376 aa, Triticum aestivum
  misc_feature: Ceres CLONE ID no. 1005447
  misc_feature: Ceres CDNA ID no. 24766515
  misc_feature (46)..(329): Pfam Name: Pkinase_Tyr PFAM Desc: Protein tyrosine kinase
  misc_feature: Homolog of GI Number: 457400 NR Desc: MAP kinase
  misc_feature: Homolog of GI Number: 25052804 NR Desc: mitogen
  misc_feature: Homolog of GI Number: 2129855 NR Desc: mitogen
  misc_feature: Homolog of GI Number: 27312014 NR Desc: mitogen
  misc_feature: Homolog of GI Number: 21165527 NR Desc: mitogen
  misc_feature: Homolog of GI Number: 1204129 NR Desc: protein kinase
  misc_feature: Homolog of GI Number: 50941307 NR Desc: putative mitogen
  misc_feature: Homolog of GI Number: 38122752 NR Desc: salt
  misc_feature: Homolog of GI Number: 11275338 NR Desc: mitogen
  misc_feature: Homolog of GI Number: 60466138 NR Desc: extracellular signal
  misc_feature: Useful for delaying flowering time
  misc_feature: Useful for increasing chlorophyll and photosynthetic capacity
  misc_feature: Useful for making bigger plants
  misc_feature: Useful for making ornamental plants with modified leaves
  misc_feature: Useful for making plants with increased biomass and foliage
  misc_feature: Useful for making plants with increased biomass and foliage
  misc_feature: Useful for making shorter plants
MDTSGGGTAAGGAAQIQGMATHGGRYVLYNVYGNLFEVASKYAPPIRPIGRGAYGIVCAAVSSDTGEEVAIKKIGNAFDNHIDAKRTLREIKLLRHMDHENILAIKDLIRPPRRDDFKDVYIVTELMDTDLHQIIRSNQSLTDDHCQYFLYQLLRGLKYVHSANVLHRDLKPSNLFLNANCDLKIADFGLARTTSETDLMTEYVVTRWYRAPELLLNCSQYTAAIDVWSVGCILGEIITRQPLFPGRDYIQQLKLITELIGSPDDSSLGFLRSDNARRYMKQLPQYPRQDFRLRFRNMSDGAVDLLERMLVFDPSRRITVDEALHHPYLASLHDINEEPTCPAPFSFDFEQPSFTEEHMKELIWRETLAFNPDPPY

SEQ ID NO: 4925 - DNA, 1132 bp, Glycine max
  misc_feature: Ceres CLONE ID no. 1016625
  misc_feature: Ceres CDNA ID no. 24766516
  CDS (45)..(977): REFERENCED BY SEQ ID NO: 4926
acagggtaaggccggaacattttgttatcatcgccgtcgtcaagatgccgccggccggagaactccaacatcaatccccatcaaaagacaaacaacccaccgatactcaatctgccgaagcagctgcggcagcgattgccgcggctgcggcggatgcggaagctgcgggattatggacacagatcaaggcggaggctcgccgtgacgctgaggcggagccggcgctagctagctacctttactcgacgattctttctcactcgtctctcgagcgatccatctcgtttcatttgggaaacaagctctgctcatcgacgcttctctccacgcttctatacgatctgttcttgaacacgttcacctccgatccttctctccgcaacgccaccgtcgcggatctccgtgctgctcgtgttcgtgatccggcgtgtatctccttctcccattgccttctcaattacaaaggcttcttagcgattcaggcacatcgtatctcgcacaagctatggactcaaacaagaaagccactagccttagctctcaactcgcgtatctccgaagtgttcgccgtcgatatccatccagcagcgaagatcggaaaaggtatacttctcgatcacgcaaccggagttgtcatcggagaaacagctgtgatagggaacaacgtttcgatcctccaccacgtgacgctcggtggaacaggtaaagcttgcggagacaggcatcccaagatcggtgacggttgcttgatcggagctggagcgactattctcgggaatgtcaagatcggttgtggagctaaagtaggtgctggatctgtggttctgatcgacatccctccacgagctacggcggttgggaatccggcgagacttgtcggaggaaaagagaaaccgacgattcatgatgaggagtgtccgggagaatcgatggatcatacttcgtttatctcggaatggtcagactacatcatttgaaattattaccgagttttgttgtgttatcgagctactcgagattataaggtaaacgtgatggactgtctttactgagctctgtcggatttatagactactggcatgttcagtgcaataataatgagtttagtttggtcttaaaaaaaaaaaaaaaa

SEQ ID NO: 4926 - protein, 310 aa, Glycine max
  misc_feature: Ceres CLONE ID no. 1016625
  misc_feature: Ceres CDNA ID no. 24766516
  misc_feature (201)..(218): Pfam Name: Hexapep PFAM Desc: Bacterial transferase hexapeptide
  misc_feature (43)..(147): Pfam Name: SATase_N PFAM Desc: Serine acetyltransferase
  misc_feature: Homolog of GI Number: 22137318 NR Desc: AT5g56760/MIK19_23
  misc_feature: Homolog of GI Number: 47779328 NR Desc: cytosolic serine acetyltransferase
  misc_feature: Homolog of GI Number: 21537083 NR Desc: serine O
  misc_feature: Homolog of GI Number: 23343585 NR Desc: serine acetyltransferase 7
  misc_feature: Homolog of GI Number: 1841312 NR Desc: serine acetyltransferase.
  misc_feature: Homolog of GI Number: 28460066 NR Desc: serine O
  misc_feature: Homolog of GI Number: 1657235 NR Desc: serine acetyltransferase
  misc_feature: Homolog of GI Number: 7384806 NR Desc: serine acetyltransferase
  misc_feature: Homolog of GI Number: 6601494 NR Desc: serine acetyltransferase
  misc_feature: Homolog of GI Number: 18252508 NR Desc: serine acetyltransferase
MPPAGELQHQSPSKDKQPTDTQSAEAAAAAIAAAAADAEAAGLWTQIKAEARRDAEAEPALASYLYSTILSHSSLERSISFHLGNKLCSSTLLSTLLYDLFLNTFTSDPSLRNATVADLRAARVRDPACISFSHCLLNYKGFLAIQAHRISHKLWTQTRKPLALALNSRISEVFAVDIHPAAKIGKGILLDHATGVVIGETAVIGNNVSILHHVTLGGTGKACGDRHPKIGDGCLIGAGATILGNVKIGCGAKVGAGSVVLIDIPPRATAVGNPARLVGGKEKPTIHDEECPGESMDHTSFISEWSDYII

SEQ ID NO: 4927 - DNA, 630 bp, Glycine max
  misc_feature: Ceres CLONE ID no. 1016638
  misc_feature: Ceres CDNA ID no. 24766729
  CDS (1)..(480): REFERENCED BY SEQ ID NO: 4928
cttgtaaccctagccgcctgcgcgccgccacacgaaccccccacccaacccgagcgagcaccggccgaggaggaagaggaaggtgagatggctcgcggcacggcggcgacggcggcggcggctgccaagggcaagaagaaggggtccgtctccttcgtgatcgactgcaccaagcccgtggaggacaagatcatggagatcgcgtcgctggagaagttcctccaggagcgcatcaaggtcgccggcggcaaggccgggaatctcggcgactccgtcaccgtcacgcgcgacaagagcaaggtcaccgtcacctccgacggcgccttctccaagaggtacctcaagtacttgacaaagaagtacttgaagaagcacaacgtgcgggactggcttcgtgtgatcgcagccaacaaggagcgcaacgtgtacgagctccggtacttcaacatcgctgagaacgagggcgaggaggaggattagagtgcattgttatattgtagtgcttgttgagttttgatacttgatctgagtacctcctagttatccacctatcttatgttgtgctctgttgaacatgaatggtttaatttgaagaatccttatattttgcctccaaaaaaaaaaaaaaaa

SEQ ID NO: 4928 - protein, 130 aa, Glycine max
  misc_feature: Ceres CLONE ID no. 1016638
  misc_feature: Ceres CDNA ID no. 24766729
  misc_feature (14)..(130): Pfam Name: Ribosomal_L22e PFAM Desc: Ribosomal L22e protein family
  misc_feature: Homolog of GI Number: 50939919 NR Desc: putative 60S ribosomal protein L22
  misc_feature: Homolog of GI Number: 42733478 NR Desc: BRI1
  misc_feature: Homolog of GI Number: 6714454 NR Desc: putative 60S ribosomal protein  L22
  misc_feature: Homolog of GI Number: 6056419 NR Desc: 60S ribosomal protein  L22
  misc_feature: Homolog of GI Number: 13592059 NR Desc: ribosomal protein L22
  misc_feature: Homolog of GI Number: 33150766 NR Desc: heparin
  misc_feature: Homolog of GI Number: 45383834 NR Desc: ribosomal protein L22
  misc_feature: Homolog of GI Number: 6677775 NR Desc: ribosomal protein L22
  misc_feature: Homolog of GI Number: 73956651 NR Desc:  similar to 60S ribosomal protein L22
  misc_feature: Homolog of GI Number: 15293911 NR Desc: ribosomal protein L22
MARGTAATAAAAAKGKKKGSVSFVIDCTKPVEDKIMEIASLEKFLQERIKVAGGKAGNLGDSVTVTRDKSKVTVTSDGAFSKRYLKYLTKKYLKKHNVRDWLRVIAANKERNVYELRYFNIAENEGEEED

SEQ ID NO: 4929 - DNA, 1024 bp, Glycine max
  misc_feature: Ceres CLONE ID no. 1016657
  misc_feature: Ceres CDNA ID no. 29191464
  CDS (30)..(797): REFERENCED BY SEQ ID NO: 4930
aacattttcgaaataaagatattagagcaatgaaggttcatgagttttccaatgggttttcgtcctgggaacaacatgattcgccatcatcccttagcctaagctgcaaacgcctccgtcctctcggccctaagctctccggcagcccttgctctccttcttcttcctccggcgtcacttccgctactttcgacctcaagagcttcattaaacccgatcaaaccggtccaagaaaatttgaatactctattgaacaccaacgagaccttcctcatgtggggacgcaccagggagggacaaggtggaacccaactcaagaacagatagggatacttgagatgttatacaaaggtggaatgcgcactcctaacgcgcaacagatcgagaacatcacttctcaactcggtaaatacggaaaaattgaaggaaagaatgtattttactggtttcagaaccacaaagcccgcgagaggcagaagcagaagaggaacaacttcatcagcttaagttgcctaagcagcttcaagaccactaatatcaataacgcaagtgtaacaacgaagacaacaacatcgtcaaatgacgtgatcaggagagactcaatggttgagaagggggagttagtggaagaagctgagtacaagaggacatgtaggagctggggatttgagaacttggagatagatagcagacgaaacataaatagtagtaaaaatgctacaatggcaactactttcaacaaaatcattgaaaatgtaacgctcgagcttttcccattgcaccctgaaggtaggtgaagaagatgaggaagagaatgtggaattcttatgtagatctggtttaggttcagactaagtatttggtatctagaaattcaatattaatataattaaatattagaaaataacagaatctacttaagaattcccttgtactctgcgaatctgatgtacactatgtacatttttattgctatgtattcttaattatgaatttttagtttagcacaaaaaaaaaaaaaaaa

SEQ ID NO: 4930 - protein, 255 aa, Glycine max
  misc_feature: Ceres CLONE ID no. 1016657
  misc_feature: Ceres CDNA ID no. 29191464
  misc_feature: Useful for making plants with modulated growth and phenotype characteristics
  misc_feature: The sequence is a functional homolog of  SEQ ID NO 614 in the  10/666,642 US patent application
  misc_feature (88)..(149): Pfam Name: Homeobox PFAM Desc: Homeobox domain
  misc_feature: Homolog of GI Number: 38604018 NR Desc: At1g46480
  misc_feature: Homolog of GI Number: 50929195 NR Desc: OSJNBa0010D21.16
  misc_feature: Homolog of GI Number: 10241438 NR Desc: putative homeodomain transcripition factor
  misc_feature: Homolog of GI Number: 46408855 NR Desc: Homeobox protein HB3
  misc_feature: Homolog of GI Number: 37909316 NR Desc: WOX1 protein
  misc_feature: Homolog of GI Number: 9294502 NR Desc: homeodomain transcription factor
  misc_feature: Homolog of GI Number: 15237863 NR Desc: homeobox
  misc_feature: Homolog of GI Number: 34908148 NR Desc: P0408C03.16
  misc_feature: Homolog of GI Number: 37909278 NR Desc: WOX2 protein
  misc_feature: Homolog of GI Number: 37909289 NR Desc: WOX2 protein
MKVHEFSNGFSSWEQHDSPSSLSLSCKRLRPLGPKLSGSPCSPSSSSGVTSATFDLKSFIKPDQTGPRKFEYSIEHQRDLPHVGTHQGGTRWNPTQEQIGILEMLYKGGMRTPNAQQIENITSQLGKYGKIEGKNVFYWFQNHKARERQKQKRNNFISLSCLSSFKTTNINNASVTTKTTTSSNDVIRRDSMVEKGELVEEAEYKRTCRSWGFENLEIDSRRNINSSKNATMATTFNKIIENVTLELFPLHPEGR

SEQ ID NO: 4931 - DNA, 792 bp, Glycine max
  misc_feature: Ceres CLONE ID no. 1016687
  misc_feature: Ceres CDNA ID no. 29191650
  CDS (1)..(561): REFERENCED BY SEQ ID NO: 4932
cttggctacgccttctctcgtctctcgccgcctagcgcgtgccgccgtcggccccatcgccttcgagcatcagccatggcagaacagactgagaaggctttcctgaagcagcctaaggtgttcctctgctcaaagaagaccacaaaggggaataataagcctggcaaggagggcagcaggttctggaagagtgttggccttggtttcaagactcccaaggaagccattgagggaacctacattgataagaagtgcccattcactggcactgtgtcagttagaggtcgcatcattgctggaacatgtcatagtgctaaaatgaacaggaccatcattgttcgtaggaactaccttcactatgtcaaaaaataccagaggtatgagaagaggcactccaacatccctgcccacatttccccttgcttccgtgtgagagaaggagatcacgtgatcattggccagtgcaggccgctgtccaagacggtgcggttcaatgtgttgaaggtggtcccagcagggtcaaagagtggtgcggtgaagaaggcgttcaccggtgcgtgagcaagtcatagcagaatccaaaacttttttaccattaaattttgacagttacatctatattgtgccatctgtttgtactagggttttatctcaagagttctccaaacttcaagctaagagtgagtggtttagtgaagttatgttcagagtgcttcgtgaagattattgatgcggttacctggttacccgttaatatacatcactcgttttttgccaaaaaaaaaaaaaaaa

SEQ ID NO: 4932 - protein, 161 aa, Glycine max
  misc_feature: Ceres CLONE ID no. 1016687
  misc_feature: Ceres CDNA ID no. 29191650
  misc_feature (75)..(144): Pfam Name: Ribosomal_S17 PFAM Desc: Ribosomal protein S17
  misc_feature: Homolog of GI Number: 6984142 NR Desc: 40S ribosomal protein S11
  misc_feature: Homolog of GI Number: 50938417 NR Desc: putative 40S ribosomal protein S11
  misc_feature: Homolog of GI Number: 22470 NR Desc: ribosomal protein S11
  misc_feature: Homolog of GI Number: 454848 NR Desc: ribosomal protein S11
  misc_feature: Homolog of GI Number: 166867 NR Desc: ribosomal protein S11
  misc_feature: Homolog of GI Number: 50928689 NR Desc: OSJNBa0070C17.20
  misc_feature: Homolog of GI Number: 21593611 NR Desc: cytosolic ribosomal protein S11
  misc_feature: Homolog of GI Number: 34899760 NR Desc: putative 40S ribosomal protein S11
  misc_feature: Homolog of GI Number: 17065614 NR Desc: putative 40S ribosomal protein S11
  misc_feature: Homolog of GI Number: 20258899 NR Desc: putative ribosomal protein S11
MAEQTEKAFLKQPKVFLCSKKTTKGNNKPGKEGSRFWKSVGLGFKTPKEAIEGTYIDKKCPFTGTVSVRGRIIAGTCHSAKMNRTIIVRRNYLHYVKKYQRYEKRHSNIPAHISPCFRVREGDHVIIGQCRPLSKTVRFNVLKVVPAGSKSGAVKKAFTGA

SEQ ID NO: 4933 - DNA, 746 bp, Glycine max
  misc_feature: Ceres CLONE ID no. 1016703
  misc_feature: Ceres CDNA ID no. 29191651
  CDS (79)..(618): REFERENCED BY SEQ ID NO: 4934
agttttcttgtgccgtagctttgtgacaaaagaagtagctgtttgcctctttgcagtgaaagcactaccaacaagaagatgattatcacagagaccaaccgcagagagatctgcaaataccttttcaaagaaggagtattgttcgccaagaaggacttcaatctcccaaagcatccgttgattgagtcagtgcccaacctgcaagtgatcaagctcatgcagagtttcaaatccaaggagtacgttagggagaccttcgcttggatgcactactattggtttctcaccaacgaagggattgagttcttgagaacttatcttaaccttccctcggatgttgttcccgcgaccttgaagaagtctgctaagcccattggtcgtccctttggtggccctcctggtgatcgccctagaggtcctcgctttgagggagaccgtcctaggtttggtgaccgtgatgggtaccgagggccacgtggcggtgatgcagcaggtgaaaagggtggagctccagctgattaccagccgtctttccaaggaggtggtggtaggcctggatttggccgcggtgcaggcggtttcaacgcagcagcaccatctggttcgggtttaccctgaaagaattgttgttatcgttagactattggaagacgagttttgtttttgtttctggctttagttttgtttgtgtgactgcaaatctggaatctatgatctatctatttctctgaaaaaaaaaaaaaaaa

SEQ ID NO: 4934 - protein, 179 aa, Glycine max
  misc_feature: Ceres CLONE ID no. 1016703
  misc_feature: Ceres CDNA ID no. 29191651
  misc_feature (3)..(99): Pfam Name: S10_plectin PFAM Desc: Plectin/S10 domain
  misc_feature: Homolog of GI Number: 21281207 NR Desc: putative ribosomal protein S10
  misc_feature: Homolog of GI Number: 81074037 NR Desc: 40S ribosomal protein S10
  misc_feature: Homolog of GI Number: 81076822 NR Desc: 40S ribosomal protein S10
  misc_feature: Homolog of GI Number: 50909311 NR Desc: 40S ribosomal protein S10
  misc_feature: Homolog of GI Number: 20140213 NR Desc: 40S ribosomal protein S10
  misc_feature: Homolog of GI Number: 34905824 NR Desc: putative ribosomal protein S10
  misc_feature: Homolog of GI Number: 79325265 NR Desc: structural constituent of ribosome
  misc_feature: Homolog of GI Number: 61654720 NR Desc: S10
  misc_feature: Homolog of GI Number: 50344474 NR Desc: S10e ribosomal protein
  misc_feature: Homolog of GI Number: 40642980 NR Desc: ribosomal protein S10
MIITETNRREICKYLFKEGVLFAKKDFNLPKHPLIESVPNLQVIKLMQSFKSKEYVRETFAWMHYYWFLTNEGIEFLRTYLNLPSDVVPATLKKSAKPIGRPFGGPPGDRPRGPRFEGDRPRFGDRDGYRGPRGGDAAGEKGGAPADYQPSFQGGGGRPGFGRGAGGFNAAAPSGSGLP

SEQ ID NO: 4935 - DNA, 955 bp, Glycine max
  misc_feature: Ceres CLONE ID no. 1016739
  misc_feature: Ceres CDNA ID no. 40351541
  CDS (112)..(768): REFERENCED BY SEQ ID NO: 4936
attttaatttatctttccttggatcatcgtcttcctccaggttctcagatcctcaaatcgagaagaacaattcagtgaggttgttgttggagaaggaggagtaaggctaagatggtgaagatgacattgatagctcgtgtcactgacgggttgcctctagctgagggacttgacgatgggcgtgacttgccagattccgacatgtataagcaacaggtcaaggctctctttaagaatctctccagaggtcataacgaagcttcgagaatgtctgttgagactggcccctatattttccattacataatagaaggacgtgtttgctacttgacaatgtgtgaccgctcttaccctaagaaactggcgttccagtacctggaagaccttaaaaatgagtttgaacgtgtcaatggacctaacattgaaacagctgctcgaccttatgcctttattaagtttgatactttcattcagaaaacgaagaaactgtaccaagacactcgtacgcaacggaatattgctaagctgaatgacgaactctatgaggtccatcaaataatgacgaggaatgtgcaggaagtcctaggtgttggtgaaaagctagaccaggtgagcgaaatgtcgagccggctaacatctgaatctcgtatatatgctgacaaggctaaagatttgaaccgtcaggctttgatcaggaagtgggcaccagttgccatcgtgcttggggtcgtgttccttcttttctgggtcaagaacaagctatggtaagaaagtggctagacttctccggacatattccttctttcaaagcgaaactatgacacacattttgtacttctgtagtatgcaaattttatgaaactatcacttttgaaaccttgattttcaattcatcatgtccttcaaatcaaaaactaaactcaaaactgttttggtttcaaaaaaaaaaaaaaaa

SEQ ID NO: 4936 - protein, 218 aa, Glycine max
  misc_feature: Ceres CLONE ID no. 1016739
  misc_feature: Ceres CDNA ID no. 40351541
  misc_feature (133)..(218): Pfam Name: Synaptobrevin PFAM Desc: Synaptobrevin
MVKMTLIARVTDGLPLAEGLDDGRDLPDSDMYKQQVKALFKNLSRGHNEASRMSVETGPYIFHYIIEGRVCYLTMCDRSYPKKLAFQYLEDLKNEFERVNGPNIETAARPYAFIKFDTFIQKTKKLYQDTRTQRNIAKLNDELYEVHQIMTRNVQEVLGVGEKLDQVSEMSSRLTSESRIYADKAKDLNRQALIRKWAPVAIVLGVVFLLFWVKNKLW

SEQ ID NO: 4937 - DNA, 472 bp, Glycine max
  misc_feature: Ceres CLONE ID no. 1016815
  misc_feature: Ceres CDNA ID no. 40351542
  CDS (112)..(342): REFERENCED BY SEQ ID NO: 4938
gagggcttttaagtttgattttgaaaaggttgtgctgcttctctctctgtctcctcgttcgcttctttctctctctagggttttgggggttctgagtaaacgttgtaaaacatgcagctgacacttgaattcggagggggattggaacttctttgtgactccaagaagattcataatgtcaatattgagcaacacaatggagaagacaagttaatcatgaaagatttgctttcttgggtacagaccaacttgattaaggagaggcctgaaatgtttatgaaaggagatactgtgagacctggagttcttgtccttgtgaatgattgtggttgggaagcataggtttactgcatgagaagtaggattttacaaggttgtgtttttctttctttattgtcttagtgttagtcaaacaataacaatattagtcatgtgagacttgccaataaaacattattcttgcaaaaaaaaa

SEQ ID NO: 4938 - protein, 76 aa, Glycine max
  misc_feature: Ceres CLONE ID no. 1016815
  misc_feature: Ceres CDNA ID no. 40351542
MQLTLEFGGGLELLCDSKKIHNVNIEQHNGEDKLIMKDLLSWVQTNLIKERPEMFMKGDTVRPGVLVLVNDCGWEA

SEQ ID NO: 4939 - DNA, 683 bp, Glycine max
  misc_feature: Ceres CLONE ID no. 1016818
  misc_feature: Ceres CDNA ID no. 29191465
  CDS (148)..(489): REFERENCED BY SEQ ID NO: 4940
accagaaacagaagttgcagactttatccgaatctagggtttcctttacctctctcgcttcttcgattaccagatcctcgaaaccctaattctagaatcaggtctcagcttctctgtcctatttgcccatcagatcaacaaagtttcatgtctgaacttgattcccaggtccctactgccttcgacccgtttgctgatgcgaatgctgaggactcaggtgcgggaacaaaagagtacgtccacattcgtgtgcagcagcgtaatggtaggaaaagcttgactactgtccaggggctgaagaaagagtacagctacaccaagatacttaaggatctcaagaaagagttctgttgcaacggaactgtcgttcaagactccgaactgggacaggttattcagcttcaaggcgaccagaggaagaacgtctccacgttcctagtccaggctgggcttgtgaagaaggacaacatcaagatccatggtttctgagctgcttgtgttgcattgtccctagtctgttttctttactgttatcccccccgttccaaaaacataagtacctgtttgatgatctcttgttactggtttcttccgaatcattatcgtatgttacattgcgttacactttcttcttgtgtaatatgagattgctaaaaaagcttagttgaaaaaaaaaaaaaaaa

SEQ ID NO: 4940 - protein, 113 aa, Glycine max
  misc_feature: Ceres CLONE ID no. 1016818
  misc_feature: Ceres CDNA ID no. 29191465
  misc_feature: The plant flowers significantly earllier than wild-type.
  misc_feature: The plant is abnormally small.
  misc_feature: null
  misc_feature: Useful for making plants with modulated biomass
  misc_feature: Useful for making plants with modulated flowering time
  misc_feature (25)..(106): Pfam Name: SUI1 PFAM Desc: Translation initiation factor SUI1
  misc_feature: Homolog of GI Number: 21593860 NR Desc: translation initiation factor
  misc_feature: Homolog of GI Number: 29028784 NR Desc: At5g54760
  misc_feature: Homolog of GI Number: 6165638 NR Desc: translation initiation factor nps45
  misc_feature: Homolog of GI Number: 4585973 NR Desc: translation initiation factor
  misc_feature: Homolog of GI Number: 3334346 NR Desc: Protein translation factor SUI1 homolog
  misc_feature: Homolog of GI Number: 20218809 NR Desc: putative translation factor
  misc_feature: Homolog of GI Number: 53791638 NR Desc: putative translation initiation factor
  misc_feature: Homolog of GI Number: 2668740 NR Desc: translation initiation factor
  misc_feature: Homolog of GI Number: 21070377 NR Desc: translation initiation factor
  misc_feature: Homolog of GI Number: 34873704 NR Desc: similar to Protein translation factor SUI1 homolog
  misc_feature: Useful for accelerating flowering time
  misc_feature: Useful for increasing chlorophyll and photosynthetic capacity
MSELDSQVPTAFDPFADANAEDSGAGTKEYVHIRVQQRNGRKSLTTVQGLKKEYSYTKILKDLKKEFCCNGTVVQDSELGQVIQLQGDQRKNVSTFLVQAGLVKKDNIKIHGF

SEQ ID NO: 4941 - DNA, 729 bp, Glycine max
  misc_feature: Ceres CLONE ID no. 1016889
  misc_feature: Ceres CDNA ID no. 29191744
  CDS (82)..(537): REFERENCED BY SEQ ID NO: 4942
agctcatctctcgtccactccaaaccctagcctcctcctcctctcgccgccgccgccgacgccgacgccgccgcagccgccatgtcagggaggaagaagacccgcgagcccaaggaggagaacgtgacgctcggccccgccgtccgcgagggggagcacgtcttcggcgtcgcgcacatcttcgcctccttcaacgacaccttcatccatgtcacggatctgtccgggagggagacgctcgtccgcatcaccggtggcatgaaggtcaaagctgatcgtgatgaatcatccccttatgcagctatgcttgcatctcaggatgttgctgtaagatgcaaggagcttggaattactgctctgcacattaagctccgtgctactggtggaaacaagacaaaaactccaggtcctggtgctcaagctgcgcttagagctcttgcacgttctggcatgaagattggacgtattgaggatgttaccccggtcccaactgacagcacccgccggaagggtggtagaagaggaaggaggctgtaattccatgctcgttcaaggatggaacaataccaagctatcgatatcctgtgtcttgcaacttgttctgtactactccgtttatgatgttaagtcagatcttgtggatttatagattttgagagatattgtgttgcatgtttagaaaatgaccctttcccggctttgaatcaagtggttgccatcataaaaaaa

SEQ ID NO: 4942 - protein, 151 aa, Glycine max
  misc_feature: Ceres CLONE ID no. 1016889
  misc_feature: Ceres CDNA ID no. 29191744
  misc_feature: The plant is abnormally large.
  misc_feature: Useful for making plants with modulated biomass
  misc_feature (29)..(147): Pfam Name: Ribosomal_S11 PFAM Desc: Ribosomal protein S11
  misc_feature: Homolog of GI Number: 50924099 NR Desc: OJ000126_13.9
  misc_feature: Homolog of GI Number: 131773 NR Desc: 40S ribosomal protein S14
  misc_feature: Homolog of GI Number: 50905421 NR Desc: putative ribosomal protein S14
  misc_feature: Homolog of GI Number: 28436071 NR Desc: cytoplasmic ribosomal protein S14
  misc_feature: Homolog of GI Number: 131772 NR Desc: 40S ribosomal protein S14
  misc_feature: Homolog of GI Number: 21618105 NR Desc: putative ribosomal protein S14
  misc_feature: Homolog of GI Number: 77745450 NR Desc: ribosomal protein S14
  misc_feature: Homolog of GI Number: 21595448 NR Desc: putative 40S ribosomal protein S14
  misc_feature: Homolog of GI Number: 21593698 NR Desc: 40S ribosomal protein S14
  misc_feature: Homolog of GI Number: 2565340 NR Desc: ribosomal protein S14
  misc_feature: Useful for decreasing plant size
  misc_feature: Useful for making larger plants
  misc_feature: Useful for making ornamental plants with modified flowers
  misc_feature: Useful for making plants with altered leaf shape eg curled leaves
  misc_feature: Useful for sterility
MSGRKKTREPKEENVTLGPAVREGEHVFGVAHIFASFNDTFIHVTDLSGRETLVRITGGMKVKADRDESSPYAAMLASQDVAVRCKELGITALHIKLRATGGNKTKTPGPGAQAALRALARSGMKIGRIEDVTPVPTDSTRRKGGRRGRRL

SEQ ID NO: 4943 - DNA, 815 bp, Triticum aestivum
  misc_feature: Ceres CLONE ID no. 1016994
  misc_feature: Ceres CDNA ID no. 25445640
  CDS (75)..(602): REFERENCED BY SEQ ID NO: 4944
acaagaagcaagtgaaaagaaagaagaaacaacacaacaagccaccacgtacgtaagctttatcaccttcaaaaatgtcgggttggttcggggggaagacggacgccaaggacgaggaggccgccaagacggggccgtccgtccaggaccgcgccatcgaggcgaaggaccagaccatcagcttcatcggcgagaaaagcgaggccgtcaccaaggcggcctcggacaccgccgacgcggccatgaagatgggcggcgacgccatggggaaggcctccgagacggggcaggccatcacggaccgcgccatcgagagcaaggaccagacgttcggcttcttcggagagaagacggaggctgccaagaagatggccgtcgacaccggcgacgctgccaagcagaagtccgccgaggccgcaaagtgtgtcgaggagaccgcggcgaagttcaccggggaacccgccgcccccaaggagcccaccggcaacatgttccagcaggccggcgggcaggtgatgggtgccgctactggcgccagggacgccgtcatgaacacgctcgggatgggaggagacaaagccgacaccggcaccgccaaatgaagaccgcaaagcgcaaaggacggctagcccacttttcgtttcgttattccctccgtgttgctttattttccgttccaagaaactgatttctacgcatgcgtcggtgtaacttcgtccggtgtattcaaagatgctttgaatatacagatttgctaaaaaaaaaaaaaaaaaaaaaaaaaaaaaaaaaaaaaaaaaataaaaaaaaaaaaaaaa

SEQ ID NO: 4944 - protein, 175 aa, Triticum aestivum
  misc_feature: Ceres CLONE ID no. 1016994
  misc_feature: Ceres CDNA ID no. 25445640
  misc_feature (16)..(72): Pfam Name: LEA_4 PFAM Desc: Late embryogenesis abundant protein
  misc_feature: Homolog of GI Number: 1657857 NR Desc: cold acclimation protein WCOR615
  misc_feature: Homolog of GI Number: 7716956 NR Desc: cold
  misc_feature: Homolog of GI Number: 2370234 NR Desc: cold
  misc_feature: Homolog of GI Number: 4929080 NR Desc: ABA
  misc_feature: Homolog of GI Number: 25989709 NR Desc: LEA2 protein
  misc_feature: Homolog of GI Number: 33342178 NR Desc: ABA inducible protein
  misc_feature: Homolog of GI Number: 25989705 NR Desc: LEA1 protein
  misc_feature: Homolog of GI Number: 25989707 NR Desc: LEA3 protein
  misc_feature: Homolog of GI Number: 34872074 NR Desc: similar to Ser/Arg
MSGWFGGKTDAKDEEAAKTGPSVQDRAIEAKDQTISFIGEKSEAVTKAASDTADAAMKMGGDAMGKASETGQAITDRAIESKDQTFGFFGEKTEAAKKMAVDTGDAAKQKSAEAAKCVEETAAKFTGEPAAPKEPTGNMFQQAGGQVMGAATGARDAVMNTLGMGGDKADTGTAK

SEQ ID NO: 4945 - DNA, 1132 bp, Triticum aestivum
  misc_feature: Ceres CLONE ID no. 1017071
  misc_feature: Ceres CDNA ID no. 25400912
  CDS (357)..(890): REFERENCED BY SEQ ID NO: 4946
caaagaaaaaacccgtaccctggaggagtccggattttggatgaggcgcgcagcgtgcggtggccgacggcgagacggcgcaagcagcgacacgccctcctgacggtggcctcgcggcggcggattcgtcgacagcatagcgggacaggagctcgcggcgaggcggcgacttcggacctcgcggcggccggcaggctgcggcatccgccacccggcgctgcagcaggacgggagctctgacgcagcgaccaacaaaggtgtgaatcctgtggccaccggctagcgggactgggccgtggcacctcgcgcgcgacctgttcgacaaattgccgtggccgagctggtctcctcctgctatggcgatggcattgctaggcgccaccctctgccggccactattgccgtgtccctccacctccggctccctggtgttcaggcctaattgctttgagttccctcgtccgtgccacacaggcgtggtggcacaccggcgcggagcgtacctgaggatggaggctacggcgaggcacggcgcacggaaggagaacgccaaggtcaggaaccgccggctgcagaaaaagtacaatggcacggcggccaagcccaggctgtcggtcttctgctccaacaggcagctctatgccatgctcgtcgacgaccatggcaagaagatccttttctatgccagcaccctgcaggaggaaatctgtggcgatccgcgatgcagcaccgtggaggccgctcggagggtcggggaagagctggtgaaggcgtgcatggagctggacatctccgaggtctcgtgctacgaccgcaacgggttcgctcgaggggagaagatgatggcgttcgaggacccggtcgcgcagcacgggttcctgcccagatagctaacttatgagatccttgggaggcttgcaccagctgctcaacgtagcagactatttggtgaagagcaggagtgtagcctgtaggaagttgtttactctgtgaattgcttcacgtatgattcacatagctcatagtacttgatatttcacatcatatgttattatggcagaaatcactggcaacgataaaatgttctccactgtcatgtgaaataaagaactctacaaaaaaaaaaaaaaaa

SEQ ID NO: 4946 - protein, 177 aa, Triticum aestivum
  misc_feature: Ceres CLONE ID no. 1017071
  misc_feature: Ceres CDNA ID no. 25400912
  misc_feature (60)..(136): Pfam Name: Ribosomal_L18p PFAM Desc: Ribosomal L18p/L5e family
  misc_feature: Homolog of GI Number: 51091395 NR Desc: ribosomal protein
  misc_feature: Homolog of GI Number: 50919875 NR Desc: putative ribosomal protein
  misc_feature: Homolog of GI Number: 22329550 NR Desc: ribosomal protein L18 family protein
  misc_feature: Homolog of GI Number: 34897318 NR Desc: putative ribosomal protein L18
  misc_feature: Homolog of GI Number: 12484209 NR Desc: putative ribosomal protein L18
  misc_feature: Homolog of GI Number: 41152769 NR Desc: ribosomal protein L18
  misc_feature: Homolog of GI Number: 56418657 NR Desc: 50S ribosomal protein L18
  misc_feature: Homolog of GI Number: 39997933 NR Desc: ribosomal protein L18
  misc_feature: Homolog of GI Number: 46015056 NR Desc: Chain A
  misc_feature: Homolog of GI Number: 143423 NR Desc: ribosomal protein L18
MAMALLGATLCRPLLPCPSTSGSLVFRPNCFEFPRPCHTGVVAHRRGAYLRMEATARHGARKENAKVRNRRLQKKYNGTAAKPRLSVFCSNRQLYAMLVDDHGKKILFYASTLQEEICGDPRCSTVEAARRVGEELVKACMELDISEVSCYDRNGFARGEKMMAFEDPVAQHGFLPR

SEQ ID NO: 4947 - DNA, 965 bp, Triticum aestivum
  misc_feature: Ceres CLONE ID no. 1017094
  misc_feature: Ceres CDNA ID no. 25892796
  CDS (229)..(756): REFERENCED BY SEQ ID NO: 4948
ggcaacaatcgcactcagactcactcaccgcccctcctcttccgggcaaggcaaaccccaagaaaccccaacccaaccggccaccaccacctccccgtcccggccccgagacaaacacctcccactcgcgggcatgcccccctgccgccgccgctgctgagtgctgaccacccagccgtccgcgccgcgaccgctcaacatctatctcgccggaacatctgaggcaagatggacccggcccaggaggagctcgagcgccgcagccgctacctcagctcgctcgtccgccgcaccaggctcgacgacccgccccagccggagccggagccggagccagagctcaaggtggagcgtaaaccggcggcggagaccagcggcggggagggcaaggccggtaaggcggaggccaaggacagcagggaggcggcgaaggtcaaaggggacgccgcgagcggggaggggaggaaggtggcggtgcgggtgcgcgcggcggacatgccgctggcgctgcagcggcgcgcgatctggatcgcccgggaggtcgtcctctccacgccgcgcctcgagagcaagcgcctcgcgctcgcgctcaagaaggaattcgacacgacatacgggcctgcttggcactgcatcgtcggcacaagctttggctcctacgtcactcactccctaggaggcttcctgtacttctcggtcgacaaggcgtacattcttctcttcagaaccgctgtcgagccactgagtaaaccgtgatgaggcctggaacctatcttctcacacacaagtgtagatttagcgcgaatgtgtaatttaaactgctgttttaggtgctcgacggcagcaagtgtaagcagtggagaaggatcacctctccgcatacagaaatgtagcaaacatgcctctatgacctttaagtatctacgtaagctgctgctgagtactgcttaaaaaaaaaaaaaaaa

SEQ ID NO: 4948 - protein, 175 aa, Triticum aestivum
  misc_feature: Ceres CLONE ID no. 1017094
  misc_feature: Ceres CDNA ID no. 25892796
  misc_feature (77)..(168): Pfam Name: Dynein_light PFAM Desc: Dynein light chain type 1
  misc_feature: Homolog of GI Number: 50924836 NR Desc: B1358B12.13
  misc_feature: Homolog of GI Number: 50253310 NR Desc: putative dynein light chain 2
  misc_feature: Homolog of GI Number: 20465367 NR Desc: putative dynein light subunit lc6
  misc_feature: Homolog of GI Number: 45752676 NR Desc: At5g20110
  misc_feature: Homolog of GI Number: 66796189 NR Desc: dynein light chain
  misc_feature: Homolog of GI Number: 34913978 NR Desc: dynein light chain
  misc_feature: Homolog of GI Number: 53769716 NR Desc: COG0454: Histone acetyltransferase HPA2 and related acetyltransferases
  misc_feature: Homolog of GI Number: 28829295 NR Desc: similar to Anthocidaris crassispina
  misc_feature: Homolog of GI Number: 54026037 NR Desc: putative translation initiation factor IF
  misc_feature: Homolog of GI Number: 72132998 NR Desc:  similar to dynein light chain
MDPAQEELERRSRYLSSLVRRTRLDDPPQPEPEPEPELKVERKPAAETSGGEGKAGKAEAKDSREAAKVKGDAASGEGRKVAVRVRAADMPLALQRRAIWIAREVVLSTPRLESKRLALALKKEFDTTYGPAWHCIVGTSFGSYVTHSLGGFLYFSVDKAYILLFRTAVEPLSKP

SEQ ID NO: 4949 - DNA, 629 bp, Triticum aestivum
  misc_feature: Ceres CLONE ID no. 1017141
  misc_feature: Ceres CDNA ID no. 40351543
  CDS (126)..(398): REFERENCED BY SEQ ID NO: 4950
accccaccccacctcgcccccttcccctcccccttcgccgccgcccgtctccgacgctccatcagcgccgacagccgccccctctccgctccgagagcctcgatcgagaagcggcgccggcggacatgggccagatccagtactccgagaagtacttcgacgacaccttcgagtacaggcacgtggtcctcccgccggaagtcgccaagctgctccccaagaaccgcctcctcgccgagaacgagtggcgcgcgctgggcgtgcagcagagccgcgggtgggtgcactacgccgtccaccggccggagccgcacatcatgctgttccgccgcccactcaactaccagcagcagcaggacgcggcggccgccgccgcggcgcagatgatgcccaagtgatcggccccggcgagggcagtggcgaccggggttggaactcctgaaaaccccaggcccttttcatctctaaaagggcggtcgcactggtttgtctgatcaggatctagttgtgttggtggtgtccaccatgtgttcgtggaaatgcctgggaggaacttgcagtgtgttagtctgtgttattatcctggataatcttgaatgctacctgttatgttaaaaaaaaaaaaaaaa

SEQ ID NO: 4950 - protein, 90 aa, Triticum aestivum
  misc_feature: Ceres CLONE ID no. 1017141
  misc_feature: Ceres CDNA ID no. 40351543
  misc_feature: null
  misc_feature: Useful for making plants with altered oil content
  misc_feature (1)..(72): Pfam Name: CKS PFAM Desc: Cyclin
MGQIQYSEKYFDDTFEYRHVVLPPEVAKLLPKNRLLAENEWRALGVQQSRGWVHYAVHRPEPHIMLFRRPLNYQQQQDAAAAAAAQMMPK

SEQ ID NO: 4951 - DNA, 1124 bp, Triticum aestivum
  misc_feature: Ceres CLONE ID no. 1017205
  misc_feature: Ceres CDNA ID no. 25402636
  CDS (82)..(753): REFERENCED BY SEQ ID NO: 4952
ctcacaacctccattgccgctccctccttgttccaaccaagcacctcctccttcttcctcctcttcgaggtggcgtgctagatggtcgctgaggcggtgggcttcatgatgtcccgcgcggcggacggcgggaccatcgcgccggagctcgtcacccgggacttcctcggcggctgccaggcgcccgcccccgccgccgacggccccaggcacgacgccgccgccctgcagcccggcaagccgccgctgcagaagcaccggagcccgccgccgtcggcgaggggggacctcaacctcttccccgcctccggcgccgccatggcgccgttgccgacgatggcgccggctgcggactgcgccgccaccaccacgtaccacagcgtgtgcaccatcgagaaggtcaagacggcgctggagcggttcgagcgcgggaagcaggggcaggggcaccaccaccagcagcagcagagcggcgcgggcgcgggcgcgggcgcctccccgtcgtcgtcctcggtcaccacctccgtcaagcgccgcggcgacgttgccgtggagcagggcgacggctgcgactctccgtctgccagcgggggcatggtggccgccgcctgcccgcgctgcttcctctacgtgctcatcgcccggagcgacccgcgctgcccgcgctgcgagtcgcacgtgccgccgcccccggccccggcgcccaagaagaagccgaggatcgacctcaacgtcggcttcctcggcacctagccgggccaccagctactccaaccacgtagccaagccaagccaagccaagccaagaagaagtaggtcctccgtcaagatggctgtcgtccgtcctcgtcctcggcgcggtaggtaggcactaggcaggcctccggtgcccggattggccacggcggcgccattgcttttctgatgccaccgacggactccggtacataggggacgtggaggtgctccgatcaagattttttgcttgtccatttccgagtatggccggccggccgtccgtccgtccgtccccgattctgtcatgtcatgtcagatcaatcaaacactcgatagaacatgaatgaatgaaactactattcctactggtaaaaaaaaaaaaaaaa

SEQ ID NO: 4952 - protein, 223 aa, Triticum aestivum
  misc_feature: Ceres CLONE ID no. 1017205
  misc_feature: Ceres CDNA ID no. 25402636
  misc_feature: Homolog of GI Number: 50928749 NR Desc: OSJNBa0093O08.10
  misc_feature: Homolog of GI Number: 5852085 NR Desc: zwh0008.1
  misc_feature: Homolog of GI Number: 71367849 NR Desc: similar to Methylase involved in ubiquinone/menaquinone biosynthesis
  misc_feature: Homolog of GI Number: 58381251 NR Desc: ENSANGP00000017440
  misc_feature: Homolog of GI Number: 55243066 NR Desc: ENSANGP00000028029
  misc_feature: Homolog of GI Number: 77820010 NR Desc: phenylalanine ammonia lyase
  misc_feature: Homolog of GI Number: 5821145 NR Desc: RNA binding protein
  misc_feature: Homolog of GI Number: 73950193 NR Desc:  similar to serine/arginine repetitive matrix 1 isoform 2
  misc_feature: Homolog of GI Number: 73950203 NR Desc:  similar to serine/arginine repetitive matrix 1 isoform 1
  misc_feature: Homolog of GI Number: 47124032 NR Desc: SRRM2 protein
MVAEAVGFMMSRAADGGTIAPELVTRDFLGGCQAPAPAADGPRHDAAALQPGKPPLQKHRSPPPSARGDLNLFPASGAAMAPLPTMAPAADCAATTTYHSVCTIEKVKTALERFERGKQGQGHHHQQQQSGAGAGAGASPSSSSVTTSVKRRGDVAVEQGDGCDSPSASGGMVAAACPRCFLYVLIARSDPRCPRCESHVPPPPAPAPKKKPRIDLNVGFLGT

SEQ ID NO: 4953 - DNA, 665 bp, Triticum aestivum
  misc_feature: Ceres CLONE ID no. 1017213
  misc_feature: Ceres CDNA ID no. 40351544
  CDS (81)..(392): REFERENCED BY SEQ ID NO: 4954
acccatctcttccacccaccaatccccgctcaaaaacccccaaatccccttttctctcaagctactcggagcaggcagccatgtcggggcggggcaagggcggcaaggggctcggcaagggcggcgcgaagcgccaccgcaaggtcctgcgcgacaacatccagggcatcaccaagccggcgatccggaggctggcccggaggggcggcgtgaagcgcatctcggggctcatctacgaggagacccgcggcgtgctcaagatcttcctcgagaacgtcatccgcgacgccgtcacctacaccgagcacgcccgccgcaagaccgtcaccgccatggacgtcgtctacgcgctcaagcgccagggccgcaccctgtacggcttcggcggctgaagagccgcggcgctggctggccctggcgcaccagccatggctcgcggtcaagaaagtggagaagaggagaaatctgtagttgatctgggttctgtgccttctatgcttagtagtagtatcctatgcttagtagtttgcttccgtgttctgaacctgatgggcaaatactgtgtttgccgagttatatggttcgagagttaacaaaactgttctccagttatgaattatgctaatgacgatgctgttctgctttatgtaaaaaaaaaaaaaaaa

SEQ ID NO: 4954 - protein, 103 aa, Triticum aestivum; identical to SEQ ID NO: 8
  misc_feature: Ceres CLONE ID no. 1017213
  misc_feature: Ceres CDNA ID no. 40351544
  misc_feature (66)..(92): Pfam Name: TAF PFAM Desc: TATA box binding protein associated factor

SEQ ID NO: 4955 - DNA, 756 bp, Triticum aestivum
  misc_feature: Ceres CLONE ID no. 1017281
  misc_feature: Ceres CDNA ID no. 25892797
  CDS (95)..(544): REFERENCED BY SEQ ID NO: 4956
tttttttactagtagagccaagcggaggaggaagaaacctctcatatcaaaaccctacgccgccgccgcgctctcaccaggcaccaccgcaagcatggctgccgtcctcacccgcccgacgccgggcacggtccagtgcttcgggcgcaagaagacggcggtggccgtcgcgtacaccaagccagggcgcgggctcatcaaggtgaacggcgcccccatcgagctaatccgcccagagatgctccgcctcaaggccttcgagcccatcatgctcgccggccgctcccgcttcaaggacatcgacatgaggatccgcgtccgcggcggcgggaagacctcccagatctacgccatccgccaggccgtcgccaaggcgctcgtggcctactaccagaagtatgtcgacgaggccgccaagaaggaggtcaaggacatcttcgcccgctacgaccgtaccctcctcgtcgccgacccccgtcgctgcgagcccaagaagttcggtggtcgcggcgcccgcgcgaggttccagaagtcttaccgttgatcggcctgcaggatcgtcgtctattgggtggttttctctgctttacctccccagttttagactccgtatgattagttccggaccttggcaagatattgtggtatgatgtgctgtgagatgttttaagactactactgggtagttgctcgatttgtgttttttactgttatgttaaggaattttgatatggttgcgtaaaaaaaaaaaaaaaa

SEQ ID NO: 4956 - protein, 149 aa, Triticum aestivum
  misc_feature: Ceres CLONE ID no. 1017281
  misc_feature: Ceres CDNA ID no. 25892797
  misc_feature (17)..(149): Pfam Name: Ribosomal_S9 PFAM Desc: Ribosomal protein S9/S16
  misc_feature: Homolog of GI Number: 77552917 NR Desc: ribosomal protein S9
  misc_feature: Homolog of GI Number: 7440266 NR Desc: probable ribosomal protein S16
  misc_feature: Homolog of GI Number: 2641209 NR Desc: ribosomal protein S16
  misc_feature: Homolog of GI Number: 6984222 NR Desc: 40S ribosomal protein S16
  misc_feature: Homolog of GI Number: 439654 NR Desc: RS16 protein
  misc_feature: Homolog of GI Number: 21555842 NR Desc: 40S ribosomal protein S16
  misc_feature: Homolog of GI Number: 16323500 NR Desc: putative 40S ribosomal protein S16
  misc_feature: Homolog of GI Number: 4574242 NR Desc: ribosomal protein S16
  misc_feature: Homolog of GI Number: 6721162 NR Desc: putative 40S ribosomal protein S16
  misc_feature: Homolog of GI Number: 60334810 NR Desc: Rps16 protein
MAAVLTRPTPGTVQCFGRKKTAVAVAYTKPGRGLIKVNGAPIELIRPEMLRLKAFEPIMLAGRSRFKDIDMRIRVRGGGKTSQIYAIRQAVAKALVAYYQKYVDEAAKKEVKDIFARYDRTLLVADPRRCEPKKFGGRGARARFQKSYR

SEQ ID NO: 4957 - DNA, 1316 bp, Triticum aestivum
  misc_feature: Ceres CLONE ID no. 1017304
  misc_feature: Ceres CDNA ID no. 40041382
  CDS (293)..(967): REFERENCED BY SEQ ID NO: 4958
gggtcctcggcgtcttcttcttctccacgcctcggcatcctcctgacctcctccgcctcccaccgtctcccccacctttcccaaattagcaccgcccccgcctccaatcccaccaccgccaccctccctcaaaccaagccgagccgcccgaatccggcaccgcccgcccgcttatagcccggcctgaccgccccgcaccgaccccgcgccccgctcgcccccctcctcgtccgcctcctccgcccacgcgcccctgtctcctccggtcgacgcctcgcgcgggggggaggagatggccgcagcggccgccgcggcgtgcaggcgaggcatgctcctgcacaaccaccaccaccagtggccgacgcggtgggccggccccgccgccgcccgcagcatctcgcagctcgtcaagaccaacggccgccgcgccttcctcgtcgacaccctcgccctggtgaggaagctggagtcgcagggcgtcccgaccaagcaggcggaggccatcacatccgccatcacggaggtcctcaacgacagcctcgagagcatctccgagtccttcgtctccaaggccgagatgcagaagagtgagatgctgcaggaggccaatatctccaagttcaagtcacaagtgcagagctcgcaggaaaaccatttctctttgttacagcgggagactgaaaaactccgtggagacattgataagatgaggagtgaactgaagtatgagattgacaaggtcactgcagggcagcggttggatctgaaccttgaaagagggcgcatacgtgatgagctcgccaagcagaatgaagaaaccacagatctcaccacaaagcttgacaaggaaattcattcactgaaggcccagctggaggcagcaaagtatgatgtcatcaaatactgcataggtaccatcgtttcgatatcagccgttggactcgccgttctccgcatcgtgatgtgaacccgacgacatgttctttcgtttacccatttatccatggaggccacaaagaggatagttccgattctgttcctagttttttcaatgggggcaaaacttggtcaggggaatgctgtaacatctgttagagtgaaaaagttcctcaagacctgtaagatagatcgacctgcagaaggaatatacaaccgaaatgattctttacctgtgcttgagcttcgtggtattgtcgcttaactagcatgcttccccaatctctgccgacgcggaagtcactgttgtgttgcaattaacacgctgtggacatctaatcctagcaatgaaggaagacctgacaaaaaaaaaaaaaaaa

SEQ ID NO: 4958 - protein, 224 aa, Triticum aestivum
  misc_feature: Ceres CLONE ID no. 1017304
  misc_feature: Ceres CDNA ID no. 40041382
  misc_feature: Homolog of GI Number: 46443357 NR Desc: potential mitochondrial protein Fmp32
  misc_feature: Homolog of GI Number: 79356325 NR Desc: DNA binding / DNA
  misc_feature: Homolog of GI Number: 5668598 NR Desc: Wiskott
  misc_feature: Homolog of GI Number: 69929938 NR Desc: OmpA/MotB
  misc_feature: Homolog of GI Number: 41400381 NR Desc: minus agglutinin
  misc_feature: Homolog of GI Number: 67987177 NR Desc: 4Fe FAD linked oxidase
  misc_feature: Homolog of GI Number: 60416429 NR Desc: Wiskott (WASP interacting protein) (PRPL
  misc_feature: Homolog of GI Number: 6523547 NR Desc: hydroxyproline
MAAAAAAACRRGMLLHNHHHQWPTRWAGPAAARSISQLVKTNGRRAFLVDTLALVRKLESQGVPTKQAEAITSAITEVLNDSLESISESFVSKAEMQKSEMLQEANISKFKSQVQSSQENHFSLLQRETEKLRGDIDKMRSELKYEIDKVTAGQRLDLNLERGRIRDELAKQNEETTDLTTKLDKEIHSLKAQLEAAKYDVIKYCIGTIVSISAVGLAVLRIVM

SEQ ID NO: 4959 - DNA, 626 bp, Triticum aestivum
  misc_feature: Ceres CLONE ID no. 1017309
  misc_feature: Ceres CDNA ID no. 40351545
  CDS (129)..(398): REFERENCED BY SEQ ID NO: 4960
agttagcctttctctctcgctgctcctcccttccgcctccatcctccagccgcgacagcgcgcgtcggcgtctctcgttccagcgcgatacagcgggggcgctcggcgaggcgaggccgtggcggaggatggcgaaggccggcgggggcctgatctgggcgacggcggaggacctggcgcggaaccggccggtggtgctgtccatgtaccggcagatcctgcgggcgctcaactcgccggcgctgccgctgggccacgcggcgcggctggccaagaaggccgagtgccgcgccatcttcatcttcggcgccgaggagaggtcgctgcacaacatccaggacctcctcgacgccgcgcgccataccctcggcctcctcaaccgcggccgcctcccctagagagcaaggaaggcgcctagccctaacctcgcgggtacctcgcctcttccctgttccctttagcctatgcttgagtcgattgtaatgtagtacgggattaatctggtgccatttagttcaattgaaacaatctgttgcctagtcgttcctctatgtatgcactgcaaatcataaatatgttgtgaagccaataagaaacgaagaatgtcgccaaaaaaaaaaaaaaaa

SEQ ID NO: 4960 - protein, 89 aa, Triticum aestivum
  misc_feature: Ceres CLONE ID no. 1017309
  misc_feature: Ceres CDNA ID no. 40351545
MAKAGGGLIWATAEDLARNRPVVLSMYRQILRALNSPALPLGHAARLAKKAECRAIFIFGAEERSLHNIQDLLDAARHTLGLLNRGRLP

SEQ ID NO: 4961 - DNA, 1283 bp, Triticum aestivum
  misc_feature: Ceres CLONE ID no. 1017817
  misc_feature: Ceres CDNA ID no. 25892798
  CDS (79)..(963): REFERENCED BY SEQ ID NO: 4962
acggaaccgtccattctaaccctaaacccccggcgcagccagaccggtggaggaagccgccagcccaccacagcagccatgttgcgccgcgcctcccagctcctccgcaccgtccccaccgccgccgtgttcccccgccgcctcccgcaaccgcaccggcacccgcttccagccccacccgcctatctcctccccgcccccaggcaaccatcgtacttctacgccaccgagtcagcggcggcgcggccaccaaaggtgccgcggccactgaggacggtggggagcctgctgaggctgaacgacatccgcgacaaccccggcgcgacgcagcagaagacgcgcaagggccgcgggatcggctccgggaagggcaagacggcggggcgcgggcacaagggccagaaggcgcgcggcaccgctcgcttcggcttcgagggcggccagaccccgctgcgccgccgtctcccccgccgcggcttcaagaaccgcttctcgctcacgttccagccctgtggactgggaaaaattgcgaagctcatcaatgctggaaaaattgattcctctgaattgatcacaatgaagacactgaaggatacaagtgccattggaaaacaaataaaggatgggattcggttaatgggccgtggtgcagaagaaatcaaatggccaattcacctcgaggtatcaagggcgaccgcaagggcgaaagctgcagttgaagcagcaggtggaactgtaagattggtgtactacaacaagcttgggttcagggcactactcaaacctgaatggtttgcaaagaagggccgccttataccaaaagcggcgaggcctccacccaagcaacgagacaaggttgatagcattggccgactacctgctcccacaaagccacttcccttcacaccggaggaattagagtttactgccaagcgtgaagctgctaaagtgatcgctgcataggagggagtacaaatcactgaagaagcccatccaaacttttattacttacataagtcttgcaccgggcatgtataacaatcacttgctctttcctataggtgtattccttgtgggatccttgtgtttccttgtcatttgtgctacgcgggaatgacattttcttcttcaggtggcagtagtacctcctggtaagcaccagggctggccagtaaaatatcctgtaacagtcttttgagagatcagttcattgttttttgagagatcagttcattgttttcattaatagaaactttttctctaggacaaaaaaaaaaaaaaaa

SEQ ID NO: 4962 - protein, 294 aa, Triticum aestivum
  misc_feature: Ceres CLONE ID no. 1017817
  misc_feature: Ceres CDNA ID no. 25892798
  misc_feature (185)..(218): Pfam Name: L15 PFAM Desc: Ribosomal protein L15
  misc_feature (71)..(170): Pfam Name: Ribosomal_L15 PFAM Desc: Ribosomal protein L15 amino terminal region
  misc_feature: Homolog of GI Number: 50508079 NR Desc: putative LSU ribosomal protein L15P
  misc_feature: Homolog of GI Number: 45190529 NR Desc: AEL078Cp
  misc_feature: Homolog of GI Number: 78698541 NR Desc: Ribosomal protein L15
  misc_feature: Homolog of GI Number: 48765725 NR Desc: COG0200: Ribosomal protein L15
  misc_feature: Homolog of GI Number: 78496096 NR Desc: Ribosomal protein L15
  misc_feature: Homolog of GI Number: 58038836 NR Desc: LSU ribosomal protein L15P
  misc_feature: Homolog of GI Number: 15965128 NR Desc: PROBABLE 50S RIBOSOMAL PROTEIN L15
  misc_feature: Homolog of GI Number: 46436555 NR Desc: likely mitochondrial ribosomal protein
  misc_feature: Homolog of GI Number: 66850195 NR Desc: mitochondrial large ribosomal subunit protein L15
  misc_feature: Homolog of GI Number: 41581269 NR Desc: ribosomal protein l15 homologue
MLRRASQLLRTVPTAAVFPRRLPQPHRHPLPAPPAYLLPAPRQPSYFYATESAAARPPKVPRPLRTVGSLLRLNDIRDNPGATQQKTRKGRGIGSGKGKTAGRGHKGQKARGTARFGFEGGQTPLRRRLPRRGFKNRFSLTFQPCGLGKIAKLINAGKIDSSELITMKTLKDTSAIGKQIKDGIRLMGRGAEEIKWPIHLEVSRATARAKAAVEAAGGTVRLVYYNKLGFRALLKPEWFAKKGRLIPKAARPPPKQRDKVDSIGRLPAPTKPLPFTPEELEFTAKREAAKVIAA

SEQ ID NO: 4963 - DNA, 804 bp, Triticum aestivum
  misc_feature: Ceres CLONE ID no. 1017832
  misc_feature: Ceres CDNA ID no. 40351546
  CDS (135)..(584): REFERENCED BY SEQ ID NO: 4964
gccacgccacagaacgctcccggcctctctctgtttgctctcgcgtccgccgcgcccatcctcgtccgcgcctgcgccccgaccgtgctcgccgcctcccgcccgatccaccggtccaccaccgcgccggcggcatggcggatcagctcaccgacgaccagatcgccgagttcaaggaggccttcagcctcttcgacaaggacggagatggttgcatcaccaccaaggagctgggaacagtcatgcgttcgctggggcagaacccaacggaggctgagctccaggacatgatcaatgaagtcgacgctgatggcaatggcaccattgacttcccagagttcctcaacctgatggcccgcaagatgaaggacaccgactcagaggaggagctcaaggaggccttcagggtgttcgacaaggaccaaaacggcttcatctctgctgctgagctccgccacgtcatgacgaacctcggcgagaagctcaccgacgaggaggtggacgagatgatccgtgaagccgacgtcgacggtgatggccagatcaactatgaggagtttgtcaaggtcatgatggccaaatgagcacccaaccgtgctcccaagacaggaggagaattgtgcattgcatattagtttaagatgcaactcttatttgatcgatttccagttaagcatcctacctagctgtagctgctaaaacggatcggacgacgcaattcctgctatgttctccagtgtgtttccagacctcttgtgttttatgtgaacttgtgtcctccctggtgtaaaaaaaaaaaaaaaa

SEQ ID NO: 4964 - protein, 149 aa, Triticum aestivum; identical to SEQ ID NO: 208
  misc_feature: Ceres CLONE ID no. 1017832
  misc_feature: Ceres CDNA ID no. 40351546
  misc_feature (12)..(40): Pfam Name: efhand PFAM Desc: EF hand

SEQ ID NO: 4965 - DNA, 674 bp, Triticum aestivum
  misc_feature: Ceres CLONE ID no. 1018005
  misc_feature: Ceres CDNA ID no. 40351547
  CDS (371)..(538): REFERENCED BY SEQ ID NO: 4966
acacgacctcgcatcctcacatcccgattcatagaaaccaccagcagccaatctctcgttctcccactgctaaccctagccgccgcctgctgcttgcctcgatgcgcgctgcgcccccctgaatgaagatcggcgcccgagcggcggccctagccggtgaagaccggcgcccgagcggcaggcctggcaggtgaagacgggcacctcgagcggcggccctgagcccctgaccgtgaagactgtcgccctgcgccgccgccaaccccaacctcccgtcggtcgctccaccgcctacgacgcggccgtccgctgccggtgctccacctcccgacgacctgcccacttttggttctcaacatcgcagctgaagatgttttctgaacatgatgacaaactgaatgagaatcaagatgcatttatgagtgtagaggcaaaggcagatgcagaagcagcagctgcagaagcaggagacgaatcttcttactttctttcaaatagaaatgattatgcatgcatgaatcttgttgctggaccatgaatcatgaatgttcttactttgtgtcatatgaatcttgttacttgctctcaaatgtaaacatgtactggtactttgctacttgctgttgcatataaacatgtattggtactttctgctcgcaaaaaaaaaaaaaaaa

SEQ ID NO: 4966 - protein, 55 aa, Triticum aestivum
  misc_feature: Ceres CLONE ID no. 1018005
  misc_feature: Ceres CDNA ID no. 40351547
MFSEHDDKLNENQDAFMSVEAKADAEAAAAEAGDESSYFLSNRNDYACMNLVAGP

SEQ ID NO: 4967 - DNA, 1108 bp, Triticum aestivum
  misc_feature: Ceres CLONE ID no. 1018043
  misc_feature: Ceres CDNA ID no. 25891595
  CDS (83)..(811): REFERENCED BY SEQ ID NO: 4968
accaaagccctctccctcgtcctcgccgccgcagcctgcacggagctcgaagcaggagtggagagggcgaaacagtccggcgatggagtacgtcaaccctctcaccggcttccgcgtcgacggccgccgccccaacgagatgcggcagctcaagggcgaggtcggcgtcgtctccagggccgacggctcggcgctcttcgagatgggcaacaccagggtcatcgccgccgtctacggacctcgagagatccaaaacaggagtcagcaacaaaacggtaaagaggctttggtgcgttgtgagtatagaatggcagaatttagcactggggatcgaaggagaaagccaaaaggtgacaggcgatcaacagaaatttctcttgttattcggcaaacaatggaggcaagcatattaacacatttaatgccacactcacagattgacatatttgtccaagttcttcaagctgatggtggaaccaggtccgcatgcatcaatgctgcaacactagcacttgcagatgctgggattccaatgcgagacatagtcacttcttgcagtgctgggtatctgtgttctactcctttgcttgatctgaattatatagaagacagcgctggaggcgcggatgtaaccgttggcattcttgcaaagatggacaaagtgactcttctgcagatggacgcgaaactaccaatggacacatttgagactgtgatggaccttgcaactgaagggtgcaaagcgatcgcgacctacatccgagaggtgctattggagaacacgaagcagctggagtgtcagcgaggctagttaaacctagcaggcggatgccattaaacgagagcctgtagcacttgaaggcgggtctgttgtgtaacgctgattgatggcttatctgcctagcagagctagcattgagagaaaaaaatggcactgaacctgtcaaagatagccggaccatcattttccctcctaacgtaaatgctgtagcgcacaggagatgacatcttggttatgtgaaactttgatgttgaacttggtatccatgttgtacttttgaaaatgttttaacacggtgcaaatttaacttcaaaaaaaaaaaaaaaa

SEQ ID NO: 4968 - protein, 242 aa, Triticum aestivum
  misc_feature: Ceres CLONE ID no. 1018043
  misc_feature: Ceres CDNA ID no. 25891595
  misc_feature (153)..(218): Pfam Name: RNase_PH_C PFAM Desc: 3' exoribonuclease family
  misc_feature (19)..(150): Pfam Name: RNase_PH PFAM Desc: 3' exoribonuclease family
  misc_feature: Homolog of GI Number: 28973161 NR Desc: putative exonuclease RRP41
  misc_feature: Homolog of GI Number: 50899014 NR Desc: putative ribonuclease PH
  misc_feature: Homolog of GI Number: 62858329 NR Desc: LOC549190
  misc_feature: Homolog of GI Number: 57095694 NR Desc:  similar to putative exosome complex exonuclease RRP41
  misc_feature: Homolog of GI Number: 29611663 NR Desc: exosome complex exonuclease RRP41
  misc_feature: Homolog of GI Number: 33411774 NR Desc: putative exosome complex exonuclease RRP41
  misc_feature: Homolog of GI Number: 34866849 NR Desc: similar to putative exosome complex exonuclease RRP41
  misc_feature: Homolog of GI Number: 41152247 NR Desc: putative exosome complex exonuclease RRP41
  misc_feature: Homolog of GI Number: 46142152 NR Desc: COG0689: RNase PH
MEYVNPLTGFRVDGRRPNEMRQLKGEVGVVSRADGSALFEMGNTRVIAAVYGPREIQNRSQQQNGKEALVRCEYRMAEFSTGDRRRKPKGDRRSTEISLVIRQTMEASILTHLMPHSQIDIFVQVLQADGGTRSACINAATLALADAGIPMRDIVTSCSAGYLCSTPLLDLNYIEDSAGGADVTVGILAKMDKVTLLQMDAKLPMDTFETVMDLATEGCKAIATYIREVLLENTKQLECQRG

SEQ ID NO: 4969 - DNA, 736 bp, Triticum aestivum
  misc_feature: Ceres CLONE ID no. 1018217
  misc_feature: Ceres CDNA ID no. 24766256
  CDS (113)..(592): REFERENCED BY SEQ ID NO: 4970
acaacagcaaaccaaatcccccaagaccaaaaaaggccccagcaacccaagcgcgtcgaccccatccacagttgaatctctgagtttactttcagagaagattttagtcgagatggcgcaggcgatcgaggctcagagggagggcgcggaggtgtaccacggcgcggcgctgtgcgcggagaaggcggtggagctgctggccgagaccaacatgccgctgggcctgctgccgctggcagacatcgaggaggtgggctacaaccgcgccaccggcttcgtctggctgcgccagaagaaggcgctcacgcacaccttcaagcagatcgggcggcaggtctcgtacggcaccgaggtgacggccttcgtcgaggaccgcaagatgaagcgcatgaccggggtcaagagcaaggagctcctcatctggatcaccctctgcgacatgtacatcgagaaggacgatccctccaagatcaccttcaagacgcccacagggctggggaggaccttccccgtctccgccttcgagaagcaggacgacggcaaggccaaggccgcggctgccgacggcaaggaggccgtcgtggccaagtaggtgaggacggccggcatactctacaaagtttggatgaagagtcctcgagtccaatattaactatatacaaagtttggatgaagagtactatttgcttttatctttataataaactacggattatatacaaaaaaaaaaaaaaaa

SEQ ID NO: 4970 - protein, 159 aa, Triticum aestivum
  misc_feature: Ceres CLONE ID no. 1018217
  misc_feature: Ceres CDNA ID no. 24766256
  misc_feature: Homolog of GI Number: 28972153 NR Desc: mKIAA0324 protein
  misc_feature: Homolog of GI Number: 66778277 NR Desc: Major facilitator superfamily
  misc_feature: Homolog of GI Number: 66780099 NR Desc: PE
MAQAIEAQREGAEVYHGAALCAEKAVELLAETNMPLGLLPLADIEEVGYNRATGFVWLRQKKALTHTFKQIGRQVSYGTEVTAFVEDRKMKRMTGVKSKELLIWITLCDMYIEKDDPSKITFKTPTGLGRTFPVSAFEKQDDGKAKAAAADGKEAVVAK

SEQ ID NO: 4971 - DNA, 822 bp, Triticum aestivum
  misc_feature: Ceres CLONE ID no. 1018233
  misc_feature: Ceres CDNA ID no. 25892799
  CDS (85)..(726): REFERENCED BY SEQ ID NO: 4972
aggggtcagtagaagcaagtcgagcgagcgagcaggcagcaggaaggaaggaaggaaggaaggaagcaaggaagggaggtggagatggcgcccatcaagctgtacgggatgatgctgtcgcccaacgtgacccgcgtggccacgctgctcaacgagctcggcctcgacttcgacttcgtcgacgtcgacctccgcaccggcgcccacaagcagcccgacttcctcaagctcaaccctttcgggcagatcccggcgctccaggacggggacgaagttgtcttcgagtcgcgcgccatcaaccggtacatcgcgaccaagtacggggcggccctgcttccgacgccgtcggccaagctggaggcgtggctggaggtggagtcgcaccacttctacccgccggcgcggacgctggtgtacgagctgctcatcaagcccatgctgggcgccccaaccgacgcggccgaggtggacaagaacgccgccgacctcgccaagctgctcgacgtctacgaggcccacctcgccgccggcaacaagtacctggccggcgacgccttcacgctcgccgacgccaaccacatgtcctacctcttcatgctcaccaagagccccaaggcggacctggtggcctcccgcccgcacgtcaaggcctggtgggatgagatctccgcccgccccgcctgggccaagaccgtcgcctccatccccctcccgcccggcgtctgagcctctgaggtggttgcttgcctagctgcggcgagaatggaataaaatcgcgatgatggaataaactactttttagagataaaaaaaaaaaaaaaa

SEQ ID NO: 4972 - protein, 213 aa, Triticum aestivum
  misc_feature: Ceres CLONE ID no. 1018233
  misc_feature: Ceres CDNA ID no. 25892799
  misc_feature (4)..(77): Pfam Name: GST_N PFAM Desc: Glutathione S
  misc_feature (89)..(198): Pfam Name: GST_C PFAM Desc: Glutathione S
  misc_feature: Homolog of GI Number: 23504745 NR Desc: glutathione transferase F5
  misc_feature: Homolog of GI Number: 4468792 NR Desc: Glutathione transferase III
  misc_feature: Homolog of GI Number: 4468794 NR Desc: Glutathione transferase III
  misc_feature: Homolog of GI Number: 3891593 NR Desc: Structure Of Glutathione S
  misc_feature: Homolog of GI Number: 34907162 NR Desc: putative glutathione S
  misc_feature: Homolog of GI Number: 11177843 NR Desc: putative glutathione S
  misc_feature: Homolog of GI Number: 18150415 NR Desc: glutathione S
  misc_feature: Homolog of GI Number: 5923877 NR Desc: glutathione S
  misc_feature: Homolog of GI Number: 11128454 NR Desc: glutathione S
  misc_feature: Homolog of GI Number: 21790 NR Desc: glutathione transferase
  misc_feature: Useful for making larger plants
MAPIKLYGMMLSPNVTRVATLLNELGLDFDFVDVDLRTGAHKQPDFLKLNPFGQIPALQDGDEVVFESRAINRYIATKYGAALLPTPSAKLEAWLEVESHHFYPPARTLVYELLIKPMLGAPTDAAEVDKNAADLAKLLDVYEAHLAAGNKYLAGDAFTLADANHMSYLFMLTKSPKADLVASRPHVKAWWDEISARPAWAKTVASIPLPPGV

SEQ ID NO: 4973 - DNA, 557 bp, Triticum aestivum
  misc_feature: Ceres CLONE ID no. 1018265
  misc_feature: Ceres CDNA ID no. 24727411
  CDS (1)..(411): REFERENCED BY SEQ ID NO: 4974
atcacaaactcgagagcagagagcacctgccaaggtacagcaatcgccactgcactagttctgccgtcttgcgtttctctgtgcgatctcgaccgcggcgtcgaccatgagctacccgccaccgggcaccgcgtacccgccgccggggcaggaggcctacccgcctccagtctacggcgctccgccgcctgtcgccgccagctaccagcagcagcaggccccgccgccggaaccggaggacagcggcgacggcttctggaaaggatgttgtgctgcgatttgctgctgctgtctgctcgacacgtgctgctgatcacaagagttcgtaccgccaacaccaggatatcctacgatgatcgatctacatctactaggagctgctcatatacagtttgtttctatcgtacgtagtatttgtgctgttcggatcgagatttgtatgacggtgttcggtgtagatcactgcatcgaattgtactattacctccgttcggaaataagtggcgctgttttagtttataaaaaaaaaaaaaaaaaaaacaaaaaaaaaaaaaaaa

SEQ ID NO: 4974 - protein, 68 aa, Triticum aestivum
  misc_feature: Ceres CLONE ID no. 1018265
  misc_feature: Ceres CDNA ID no. 24727411
  misc_feature: Homolog of GI Number: 32420017 NR Desc: predicted protein
  misc_feature: Homolog of GI Number: 50948019 NR Desc: proline
  misc_feature: Homolog of GI Number: 50938779 NR Desc: adhesive/proline
  misc_feature: Homolog of GI Number: 50919167 NR Desc: unknow protein
  misc_feature: Homolog of GI Number: 42565788 NR Desc: proline
MSYPPPGTAYPPPGQEAYPPPVYGAPPPVAASYQQQQAPPPEPEDSGDGFWKGCCAAICCCCLLDTCC

SEQ ID NO: 4975 - DNA, 571 bp, Triticum aestivum
  misc_feature: Ceres CLONE ID no. 1018886
  misc_feature: Ceres CDNA ID no. 40351548
  CDS (94)..(357): REFERENCED BY SEQ ID NO: 4976
ctctcacccgcaaccgccgtcgcctctccactttcgtctctctcactcactctccccctccgccgccggcgcagcgtcctccccgcgactccgatggccagcaagtgggtcaggcccgaggtgtacccgctgttcgcggcgacgggcgtcgccatcggcatctgcgccttcagcctcctccgcaacatcaccggcaacccagaagtcagggtcaacaagatggggagggcagcgggagtgcttgagaaccatgaggagggcaggcgctacgccgagcatggcctcagagcctatgtgcaggacaagacccccgagatcatgccaggaatcaacaagttcttcaccagcccgaaatgaagcactttagcctgtcagtggctcgctattagtaactgttgtggtcaagtgcaaacctatttcaagcattcagtaatgttgtcgcgtccataattcagaggatatcatcaagtgcctcttattgaaagaaccatgtgatgtttgatggcttgctatatatgtgatagttgatggcttctaaatatctgtttcattgacaaaaaaaaaaaaaaaa

SEQ ID NO: 4976 - protein, 87 aa, Triticum aestivum
  misc_feature: Ceres CLONE ID no. 1018886
  misc_feature: Ceres CDNA ID no. 40351548
  misc_feature (2)..(87): Pfam Name: B12D PFAM Desc: B12D protein
MASKWVRPEVYPLFAATGVAIGICAFSLLRNITGNPEVRVNKMGRAAGVLENHEEGRRYAEHGLRAYVQDKTPEIMPGINKFFTSPK

SEQ ID NO: 4977 - DNA, 1009 bp, Triticum aestivum
  misc_feature: Ceres CLONE ID no. 1019298
  misc_feature: Ceres CDNA ID no. 36707674
  CDS (126)..(647): REFERENCED BY SEQ ID NO: 4978
atcgctctcggggttggcttctcctccccttccggttcgggttctggttcggttcgggttcggttcgagagagaggccgagtagctagcctagtctagggtttcggtagagaggaagtgagatccatggcggagacggagtaccgctgcttcgtgggcggcctcgcctgggccaccgacgacaacaacctccagcaggccttcagccagtacggcgagatcctcgacgccaagatcatcaacgaccgcgagacggggaggtcccgtgggttcggcttcgtcacgttcggcagcgaggagtcgatgcgccaggccatcgaggagatgaacggcaaggagctcgacgggcgcaacatcaccgtcaacgaggcccagtcccgccgctccggcggtgggggcggccgcggcggctacggcggccagcgcggcggtggcggaggctacggcggcggcggtggcggctacggcggccagggcggcggcggctacggccagggcggcggtggcggctacggccagggcggcggtggctacggcggccagcgtggtggcggcggctacggcggcggcggcggtggctacggcggcggcggtggcggctacggcggccagcgcggcggcgactccggcggccagtggaggaactgagcggcggggccctccagttatcgatctatctaccatctcgtcgtcttcgtcagcaagttatcttcagtgtcgtcgtcgtcgtgttcctgtgtcagtcagtcttgagtcgtgtgtgtcgttcggtcctgtggtgtttttgatcgcgagctcgagtgtcgctctgtccggggttaattagagctggttacgcgaggaagaaacaacatgtgttatctttcagtcggtcgtgttcgtcggtgatgcagcaatcccttctgtcatggattgggatgtgatgttggaatcctatgtttgaagtcagtttaaatggatgaagaaaatgcaagtgatagctgcgaaatatccgaaaaaaaaaaaaaaaa

SEQ ID NO: 4978 - protein, 173 aa, Triticum aestivum
  misc_feature: Ceres CLONE ID no. 1019298
  misc_feature: Ceres CDNA ID no. 36707674
  misc_feature: The plant is abnormally small.
  misc_feature: Useful for making plants with modulated growth and phenotype characteristics
  misc_feature: null
  misc_feature: The sequence is a functional homolog of  SEQ ID NO 1016 in the  11/435,388 US patent application
  misc_feature: Useful for making plants with altered Lignin content
  misc_feature: Useful for making plants with altered alkaloid content
  misc_feature: Useful for making plants with modulated biomass
  misc_feature: Useful for making plants with modulated nitrogen use efficiency
  misc_feature (8)..(79): Pfam Name: RRM_1 PFAM Desc: RNA recognition motif.
  misc_feature: Homolog of GI Number: 728594 NR Desc: glycine rich protein
  misc_feature: Homolog of GI Number: 974605 NR Desc: single
  misc_feature: Homolog of GI Number: 50881454 NR Desc: glycine
  misc_feature: Homolog of GI Number: 77557139 NR Desc: glycine
  misc_feature: Homolog of GI Number: 2267593 NR Desc: glycine
  misc_feature: Homolog of GI Number: 21625 NR Desc: glycine
  misc_feature: Homolog of GI Number: 17819 NR Desc: glycine
  misc_feature: Homolog of GI Number: 10799202 NR Desc: glycine
  misc_feature: Homolog of GI Number: 2331131 NR Desc: glycine
  misc_feature: Homolog of GI Number: 2331133 NR Desc: glycine
MAETEYRCFVGGLAWATDDNNLQQAFSQYGEILDAKIINDRETGRSRGFGFVTFGSEESMRQAIEEMNGKELDGRNITVNEAQSRRSGGGGGRGGYGGQRGGGGGYGGGGGGYGGQGGGGYGQGGGGGYGQGGGGYGGQRGGGGYGGGGGGYGGGGGGYGGQRGGDSGGQWRN

SEQ ID NO: 4979 - DNA, 790 bp, Triticum aestivum
  misc_feature: Ceres CLONE ID no. 1019402
  misc_feature: Ceres CDNA ID no. 24766257
  CDS (134)..(619): REFERENCED BY SEQ ID NO: 4980
cctagcagaggaggcggcggaggcagagaaggagagcggcagctcgcgcgcgcgcgcccccattgccgccgcagcaggagcccgccgattccaatccaaggaggagctttgaaggtttgtcagggcggggaagatggttctcaagacagagctctgccgtttcagtggtgccaagatatacccagggaaggggatcagattcatccgctcagactctcaagtcttccttttctccaactcaaagtgcaagagctacttccacaaccgtctcaagccagctaagcttgcatggacggccatgtacaggaagcagcacaagaaggatattcatgctgaggctgcaaagaagaggcgccgcaccaccaagaggccgtattccaggtcaattgtaggtgcttcccttgaagttatccagaagaagagagctgagaagccggaggtccgtgatgcagccagggaagcagctctgcgtgagatcaaggagcgcattaagaagaccaaggatgagaagaaagctaagaaggtggaggtgacgaaatcccagaagaccgccggcagaggcaatgcccccaaacccgggaaggcccccaagcttggcggtggtggtgggaagcgctaggtggcgtccctgccgatcaatgcgaaattttgaactagttacatgatgtcctaccctgtatcttttaggaagtttttggctcaaacctgctgttgccgtcggtatgcagcatctgggtgcataaaccgtcgtcaatgtgagattgttttatgctcaaaaaaaaaaaaaaaa

SEQ ID NO: 4980 - protein, 161 aa, Triticum aestivum
  misc_feature: Ceres CLONE ID no. 1019402
  misc_feature: Ceres CDNA ID no. 24766257
  misc_feature (3)..(73): Pfam Name: Ribosomal_L24e PFAM Desc: Ribosomal protein L24e
  misc_feature: Homolog of GI Number: 34900364 NR Desc: putative 60S ribosomal protein L24
  misc_feature: Homolog of GI Number: 50931851 NR Desc: putative 60S ribosomal protein L24
  misc_feature: Homolog of GI Number: 1154859 NR Desc: L24 ribosomal protein
  misc_feature: Homolog of GI Number: 56785063 NR Desc: putative 60S ribosomal protein L24
  misc_feature: Homolog of GI Number: 10180025 NR Desc: 60S ribosomal protein L24
  misc_feature: Homolog of GI Number: 2961300 NR Desc: ribosomal protein L24
  misc_feature: Homolog of GI Number: 21553461 NR Desc: 60S ribosomal protein L24
  misc_feature: Homolog of GI Number: 30102870 NR Desc: At3g53020
  misc_feature: Homolog of GI Number: 25295112 NR Desc: 60S ribosomal protein L24
  misc_feature: Homolog of GI Number: 82400154 NR Desc: ribosomal protein L24
MVLKTELCRFSGAKIYPGKGIRFIRSDSQVFLFSNSKCKSYFHNRLKPAKLAWTAMYRKQHKKDIHAEAAKKRRRTTKRPYSRSIVGASLEVIQKKRAEKPEVRDAAREAALREIKERIKKTKDEKKAKKVEVTKSQKTAGRGNAPKPGKAPKLGGGGGKR

SEQ ID NO: 4981 - DNA, 1060 bp, Triticum aestivum
  misc_feature: Ceres CLONE ID no. 1019415
  misc_feature: Ceres CDNA ID no. 25892061
  CDS (114)..(773): REFERENCED BY SEQ ID NO: 4982
aaaccctcctctccccgccgactagtcaatagtaagtagatctgcgatccgatccgatccgatccggccggcgatcccgcgcggcgcggcggagggcgggatcgatctcagccatggactcttcttcctcgtcgacggcgtcgtcttcccaggcgcaggcgcagccggacttcgactacctgttcaagctcctcctcatcggcgactccggcgtggggaagagcagcctgctcctccgattcacatcggactccttcgaggacctatccccgaccatcggcgtcgacttcaaggtgaagatggtcaacattgccggcaagaagctcaagctcgccgtctgggacaccgctggacaggaacgatttaggaccttgaccagctcttactacagaggggcacaagggatcatcatggtgtacgatgttactcgccgagaaacattcacgaatctctctgacatatgggccaaggaaattgacctgtattcgacaaaccaggactgtatcaagatgcttgtcggaaacaaagtggacaaggaaagtgagagggctgtcaccaagaaggaaggcattgactttgccagggagtatgggtgtttatttctggaatgcagtgcgaaaaccaaagtgaacgtggagcagtgctttgaggagctcgtgctgaagatattggacactccgagcctgctggcggatgcgtcgtcgggggcgaagaagaacatcttcaagcagaaggcgccggaggctgatgctgcggcgagcggctgctgttgatttcattcacgcacgctaatcccggacatctatctatgatctatctttatctttgtggaggatggatgaaaacgtttgttgtttgacgaagtgacatctaagcagctcgtttgtgtcgttttcttttgcttgtgttgctgtatatgatatgaatcagtgggtcagttgatgctcctcatgttgaatcatcacaaaacaaaacagagtaccttggcagctatataatgtacgtattattaagctctataaatttactcacgaggaatcaatcaaaaaaaaaaaaaaaa

SEQ ID NO: 4982 - protein, 219 aa, Triticum aestivum; identical to SEQ ID NO: 3852
  misc_feature: Ceres CLONE ID no. 1019415
  misc_feature: Ceres CDNA ID no. 25892061
  misc_feature: null
  misc_feature: Useful for making plants with altered Lignin content
  misc_feature (35)..(108): Pfam Name: Arf PFAM Desc: ADP
  misc_feature: Homolog of GI Number: 1370174 NR Desc: RAB1Y
  misc_feature: Homolog of GI Number: 17104731 NR Desc: putative GTP
  misc_feature: Homolog of GI Number: 8778652 NR Desc: F9C16.3
  misc_feature: Homolog of GI Number: 1370172 NR Desc: RAB1X
  misc_feature: Homolog of GI Number: 50919703 NR Desc: Putative GTP
  misc_feature: Homolog of GI Number: 31432458 NR Desc: putative GTP
  misc_feature: Homolog of GI Number: 6681328 NR Desc: putative Ras
  misc_feature: Homolog of GI Number: 549810 NR Desc: GTP
  misc_feature: Homolog of GI Number: 62859745 NR Desc: RAB18
  misc_feature: Homolog of GI Number: 37360618 NR Desc: mKIAA3012 protein
  misc_feature: Useful for increasing chlorophyll and photosynthetic capacity

SEQ ID NO: 4983 - DNA, 611 bp, Triticum aestivum
  misc_feature: Ceres CLONE ID no. 1019565
  misc_feature: Ceres CDNA ID no. 25445555
  CDS (87)..(449): REFERENCED BY SEQ ID NO: 4984
gccagtcttgctcagccactcttaatttctactaccagccaagttttgtgacagcagagaccgatcgagccgagccgagcagcgcgatggagaagctgacgccgagcaacgcgaagaaggcgatggaggacagggaggagaagcccaaggtgccgtcgaccgacccggacgacaacctcgacgacctcgccgccgggcagcggcagccgcagctgcagagggagcaccaggcgcccaacatctcggagatgaagccgatgacgcgggaggcatacggcggcgggatgtacgcggcggaggagggccggagggagcccgggaagccgcgggccagcgccacgcagagcgccgacgggccggaggagcccgtggccaagcccaggcacccgccgccgccgtccaccggcgaccgcgacctcgacatcaccggcatgtcctacatccagtaggcggtagtagctagcttctcttcctccttttgcgtgcccgtgtgtttggggcgtgtgctagagcctagagcggccgttcgttgtgttctccctttttgtgcatggactgatttctgaataagatgtgagcgcgagttttcttcgacaaaaaaaaaaaaaaaa

SEQ ID NO: 4984 - protein, 120 aa, Triticum aestivum
  misc_feature: Ceres CLONE ID no. 1019565
  misc_feature: Ceres CDNA ID no. 25445555
MEKLTPSNAKKAMEDREEKPKVPSTDPDDNLDDLAAGQRQPQLQREHQAPNISEMKPMTREAYGGGMYAAEEGRREPGKPRASATQSADGPEEPVAKPRHPPPPSTGDRDLDITGMSYIQ

SEQ ID NO: 4985 - DNA, 996 bp, Triticum aestivum
  misc_feature: Ceres CLONE ID no. 1019604
  misc_feature: Ceres CDNA ID no. 40351549
  CDS (213)..(728): REFERENCED BY SEQ ID NO: 4986
aaaaatcccaacaccaaagtccacttccccccgttccgttccgttccgtttctcaggttctctttcctcacaccatcgacacgaatcgaatccccgcgtgtcccgagtcgaaccgaatcccttccatccccgtcgatcgcccacgcccaacattcggggaggaggaatagcggaggaggaggaggaggaggccaaggaccgccgccgccgccatggccgcgctgccggtgatgaagctggggacgctgctgctccggacgctgtccaagcctatcgccaaccgcctcaagagccaggccgccgtccaccccaagtttcgcgacttcatcatcagcatcgcccagacaaaccatcgtatcactacaaggatacaaaggcgcatttatgggcatgctactaatgtggctatcagacctttagatgaggagaaggcagtacaagctgctacagatctcattggagaaggcttcatcttttcggttgctgtcgctgctttaattttcgaggtgcaaagaagtgctaggtcagaggctagaaaggaggaagctcgtaaacaggaacttgaggaactgagacaaaaggaagagattttagctaaagatttagaagatctcaaggtgaagctggctgaacttgagcgcctcgccaaaggccggggcctttctggcatattgaacttcaaaggtgtcaatgcagcagatagcagcaaggaagcaacacctgcttgatttgtcgattcaactttggtcaggagaaggggcatgttgtgttgttgagcttatgcacaaagcaccttgaaatcggctaattggtttattctgtcacagttctttgatattatagccatgcccattcgttgggtgaatggatcaaattttatggtggttgatccattagacatcctgaaataatagtgtgattgtgtgaggaaaaagcccaggtacttctgggtaagtgaccacagaacaagatataaagacaaaaaaaaaaaaaaaa

SEQ ID NO: 4986 - protein, 171 aa, Triticum aestivum
  misc_feature: Ceres CLONE ID no. 1019604
  misc_feature: Ceres CDNA ID no. 40351549
  misc_feature (5)..(137): Pfam Name: OPA3 PFAM Desc: Optic atrophy 3 protein
MAALPVMKLGTLLLRTLSKPIANRLKSQAAVHPKFRDFIISIAQTNHRITTRIQRRIYGHATNVAIRPLDEEKAVQAATDLIGEGFIFSVAVAALIFEVQRSARSEARKEEARKQELEELRQKEEILAKDLEDLKVKLAELERLAKGRGLSGILNFKGVNAADSSKEATPA

SEQ ID NO: 4987 - DNA, 1242 bp, Triticum aestivum
  misc_feature: Ceres CLONE ID no. 1019663
  misc_feature: Ceres CDNA ID no. 25892239
  CDS (11)..(991): REFERENCED BY SEQ ID NO: 4988
aactaaaaacatgggactccaccctgtctcagaggccaacgattcaagccccttcggctctctctccgccgccgaattctactcccgccattccgtcgcccactcctccgcctacatcaccaacccaaccgggctcaaactcttcacccaatggtggacccctctccaccgtccaccactaggcctcatcgccgtcgtccacggtttcaccggcgagtccagctggttcctccaactaacctccgtcctcttcgccaaatcagggttcctcacatgcgccatcgaccaccaaggccacggcctctcagacgggctaaccgctcacatcccaaacatcaacctcatcgtcgacgactgcatctcattcttcgacgacttccgtagccgtcactcctcctcactaccttccttcctctactccgagtccctcggcggcgcgatcgctctctacatcaccctccgccagaaatcgcaatggaacggtctcatcctcagcggcgccatgtgctccatcagccacaagttcaaacccccgtggccgttacaacacctcttaaccctcgccgctactctcatccccacctggcgcgtcgtaccaactcgcggcaccatcgctggagtctctttcaaggagccctggaaacggaagctagccttcgctaaccctaacagaacagtcggtaaaccacgcgccgcaacagcctacgagctagtaagagtctgcgaggatcttcaaagcaggttcgaagaagttgaagttccgttgatgatagtacacggcggagacgacgtcgtttgcgatccttcctcggtcgaggagctttacatgagatgtaagagtagagacaagacgataaagatctacccagggatgtggcatcagcttattggtgagtctgaggagaacgtcgacttagtgttcggtgatgttttaaaatggatcacgaaccggtctcaaaacgacgccgttaacaacggtagcaaagcttaataaacgttttagctttcatatatataaataaaacgctccgagaacgttgtattcagagatcctcgagaataggtcaaactatgttccgtgactctcaagaaacattgttaacaatagaaaaaaatgagaaagtagataatttttattaagtttaatttgttgaaggaaaaaaaaaatgaaagatataatgaaggaagtggaagggaaagtgaaattttcaatggctgattcgacgaaaaaaaaaaaaaaaa

SEQ ID NO: 4988 - protein, 326 aa, Triticum aestivum
  misc_feature: Ceres CLONE ID no. 1019663
  misc_feature: Ceres CDNA ID no. 25892239
  misc_feature (86)..(309): Pfam Name: Abhydrolase_1 PFAM Desc: alpha/beta hydrolase fold
  misc_feature: Homolog of GI Number: 9755665 NR Desc: lysophospholipase
  misc_feature: Homolog of GI Number: 23397199 NR Desc: putative phospholipase
  misc_feature: Homolog of GI Number: 34894634 NR Desc: P0028G04.16
  misc_feature: Homolog of GI Number: 31711728 NR Desc: At1g11090
  misc_feature: Homolog of GI Number: 34899776 NR Desc: putative lysophospholipase homolog
  misc_feature: Homolog of GI Number: 20197113 NR Desc: putative phospholipase
  misc_feature: Homolog of GI Number: 7487947 NR Desc: lysophospholipase homolog F12L6.7
  misc_feature: Homolog of GI Number: 77554558 NR Desc: phospholipase
  misc_feature: Homolog of GI Number: 3355471 NR Desc: putative phospholipase
  misc_feature: Homolog of GI Number: 21689759 NR Desc: putative phospholipase
MGLHPVSEANDSSPFGSLSAAEFYSRHSVAHSSAYITNPTGLKLFTQWWTPLHRPPLGLIAVVHGFTGESSWFLQLTSVLFAKSGFLTCAIDHQGHGLSDGLTAHIPNINLIVDDCISFFDDFRSRHSSSLPSFLYSESLGGAIALYITLRQKSQWNGLILSGAMCSISHKFKPPWPLQHLLTLAATLIPTWRVVPTRGTIAGVSFKEPWKRKLAFANPNRTVGKPRAATAYELVRVCEDLQSRFEEVEVPLMIVHGGDDVVCDPSSVEELYMRCKSRDKTIKIYPGMWHQLIGESEENVDLVFGDVLKWITNRSQNDAVNNGSKA

SEQ ID NO: 4989 - DNA, 611 bp, Triticum aestivum
  misc_feature: Ceres CLONE ID no. 1019738
  misc_feature: Ceres CDNA ID no. 29191745
  CDS (120)..(485): REFERENCED BY SEQ ID NO: 4990
atccctcagttcctcaaatctcgccatgaaaccagccaagcagtcaagctcaagcacctctgcaaattagcaagaagctccgctgctctgctcggtagatctgttgctccgggccggcgatggagggcatcttccccttcttctgcgaggccatcaggaggcggaggcccaggccgccggaccgctacgagcgcctcgccgtccccgccggtgcggcgggtgggcttggacgggagcacgagagcttggccggcggcgggcactaccagtaccagtactctcagagctgcaggttccccgtccgacgtcccggggcggacgacctcggcctcggcctcggccacgacgacgaccggccgccaccggaggacctctccggcgatctgtctccggcgtccggcggccgggacggcgggcgcgggctgtccaggtcccggaggttcggtagcatgcgcatgttggcgtcgtgtatcggcggcccgtgagatcaacgcactgctgctgtctgtactctatactctagtatagtctagcgtgtgtgtaccaaggaagaaattaatgcttaccgcgcattcggcagtatttttttcttttcaaaaaaaaaaaaaaaa

SEQ ID NO: 4990 - protein, 121 aa, Triticum aestivum
  misc_feature: Ceres CLONE ID no. 1019738
  misc_feature: Ceres CDNA ID no. 29191745
MEGIFPFFCEAIRRRRPRPPDRYERLAVPAGAAGGLGREHESLAGGGHYQYQYSQSCRFPVRRPGADDLGLGLGHDDDRPPPEDLSGDLSPASGGRDGGRGLSRSRRFGSMRMLASCIGGP

SEQ ID NO: 4991 - DNA, 1422 bp, Glycine max
  misc_feature: Ceres CLONE ID no. 1020542
  misc_feature: Ceres CDNA ID no. 25891883
  CDS (12)..(1271): REFERENCED BY SEQ ID NO: 4992
gaacgttcaccatgagagaattgctgaacggattgaaaaacgattccgaaccggagagagaagatggcaactccccctacagcccagaacaacagcaacagcaggcagaccagaacaacgctgcaatggatttgataaacagcgttgtaggtgtcgacgaggaaggccggtcccgacagaggattcttacattcgctgccaggagatatgctactgcaattgagaggaaccctgaagattatgatgcattgtacaattgggcattggtactccaggaaagtgcagataatgttagcccagattccacttcaccctctaaagatgctttgcttgaggaggcttgtaagaagtatgatgaggccactcgtctttgtcccacactgcatgatgctttctacaattgggctatagcaatttctgatcgggcaaagatgcgtggccgcacaaaggaagctgaagagctatggaagctggcaacacggaactatgaaaaagcagttcaacttaactggaacagtcctcaggcgctcaataactggggacttgctcttcaggaactcagtggcattgttccagctcgagaaaagcaaaagattgtgagaactgctatcagcaagtttcgtgcagccatacagttgcaatttgatttccatcgggcaatttacaatcttggaactgttctgtatggattagcagaggacactttaagaactgggggatcagtgagtgctcaagaagtttcaccaaatgaattatacagccagtctgcaatatacattgctgctgctcatgcattgaaaccaaattattcagtttatagcagtgccttgcggttggtgcgttctatgctaccattaccacaccttaaagttggatatttaactgcacctcctgtgggggcatcgattgcacctcataatgactggaaacgatcagaattccttttggatcatgaaaagcttcagcagatacccagaggagaatataaacaagtaccacctcaaaatctctcaggcagattggtagatgcagtgagtggagataagaagactatcaaagtagatatagcagatattatttctgtatcagcatgtgctgatcttaccttaccacctggtgcaggcctctgcatagatacaagttatggatcagtttacttggttgctgactcttgggaatcattggatggctggctggatgcacttcgtctagtttacacaatttatgtgcgaggcaaaagtgatgtactggctggtataataacaggatgaatataaattttaattgtacccaccaatttgatttgatatgccactttttgtaagaactcattatccagtgtttttcacttcgcaaacttgtgtataatattgagtaatgtatgaaataattacaataccattgaaaaaaaaaaaaaaaaaa

SEQ ID NO: 4992 - protein, 419 aa, Glycine max
  misc_feature: Ceres CLONE ID no. 1020542
  misc_feature: Ceres CDNA ID no. 25891883
  misc_feature: Homolog of GI Number: 78689042 NR Desc: TPR repeat
MRELLNGLKNDSEPEREDGNSPYSPEQQQQQADQNNAAMDLINSVVGVDEEGRSRQRILTFAARRYATAIERNPEDYDALYNWALVLQESADNVSPDSTSPSKDALLEEACKKYDEATRLCPTLHDAFYNWAIAISDRAKMRGRTKEAEELWKLATRNYEKAVQLNWNSPQALNNWGLALQELSGIVPAREKQKIVRTAISKFRAAIQLQFDFHRAIYNLGTVLYGLAEDTLRTGGSVSAQEVSPNELYSQSAIYIAAAHALKPNYSVYSSALRLVRSMLPLPHLKVGYLTAPPVGASIAPHNDWKRSEFLLDHEKLQQIPRGEYKQVPPQNLSGRLVDAVSGDKKTIKVDIADIISVSACADLTLPPGAGLCIDTSYGSVYLVADSWESLDGWLDALRLVYTIYVRGKSDVLAGIITG

SEQ ID NO: 4993 - DNA, 762 bp, Glycine max
  misc_feature: Ceres CLONE ID no. 1020577
  misc_feature: Ceres CDNA ID no. 29191652
  CDS (103)..(558): REFERENCED BY SEQ ID NO: 4994
aactcaagccagtgtcaaccaaaagcagacagcaaccccaacctacctacgatccaatacagaattttcctagcgcaagagtcaaagcaagcaacaccggcaatgtcgatcgtgcggcggagcaacgtgttcgaccccttcgccgacctctgggcggaccccttcgacaccttccgctccatcgtcccggcgatctcaggcggcagcagcgagacggccgcgttcgccaatgctcgcgtggactggaaggagacgcctgaggcgcacgtcttcaaggccgacctcccaggcgtgaagaaagaggaggtcaaggtggaggtggaggacggcaacgtgctcgtcgtcagcggcgagcgcacaaaggaggaggaggacaagaacgacaagtggcaccgcgtggagcgcagcagcggcaagttcgtcaggcggttccggctgccggaggacgccaaggtgggggaggtgaaggccgggctggagaacggcgtgctcaccgtcaccgtgcccaaggccgaggtcaagaagcccgaggtgaaggccatcgagatctccgtctgagtgaatgcgtctctgcgaatgatcatcggggttggagccagtttcgttatgcaacctgaaagtatctttgttcttgccgagtctagtgagacatctctgtattgagtttctttccccaagccgtttctgtacttgtgtaatcgccaacagagggataaatgagaaataaagtgtgctgattttgggtgcaaaaaaaaaaaaaaa

SEQ ID NO: 4994 - protein, 151 aa, Glycine max
  misc_feature: Ceres CLONE ID no. 1020577
  misc_feature: Ceres CDNA ID no. 29191652
  misc_feature (47)..(150): Pfam Name: HSP20 PFAM Desc: Hsp20/alpha crystallin family
  misc_feature: Homolog of GI Number: 445136 NR Desc: heat shock protein 16.9
  misc_feature: Homolog of GI Number: 17942919 NR Desc: Chain D
  misc_feature: Homolog of GI Number: 21805 NR Desc: heat shock protein 16.9B
  misc_feature: Homolog of GI Number: 1536911 NR Desc: 17 kDa class I small heat shock protein
  misc_feature: Homolog of GI Number: 22335 NR Desc: heat shock protein 17.2
  misc_feature: Homolog of GI Number: 509176 NR Desc: 17 Kd heat shock protein
  misc_feature: Homolog of GI Number: 50900608 NR Desc: putative heat shock protein
  misc_feature: Homolog of GI Number: 50900610 NR Desc: putative heat shock protein
  misc_feature: Homolog of GI Number: 50900606 NR Desc: putative heat shock protein
  misc_feature: Homolog of GI Number: 18073562 NR Desc: 17.6 kDa heat
  misc_feature: Useful for delaying flowering time
  misc_feature: Useful for increasing chlorophyll and photosynthetic capacity
  misc_feature: Useful for making ornamental plants with modified flowers
  misc_feature: Useful for making ornamental plants with modified leaves
  misc_feature: Useful for making plants with increased biomass
  misc_feature: Useful for making plants with increased biomass and foliage
  misc_feature: Useful for making plants with increased biomass and foliage
  misc_feature: Useful for making plants with increased biomass and foliage
  misc_feature: Useful for making shorter plants
  misc_feature: Useful for making stronger plants
MSIVRRSNVFDPFADLWADPFDTFRSIVPAISGGSSETAAFANARVDWKETPEAHVFKADLPGVKKEEVKVEVEDGNVLVVSGERTKEEEDKNDKWHRVERSSGKFVRRFRLPEDAKVGEVKAGLENGVLTVTVPKAEVKKPEVKAIEISV

SEQ ID NO: 4995 - DNA, 760 bp, Glycine max
  misc_feature: Ceres CLONE ID no. 1020578
  misc_feature: Ceres CDNA ID no. 29191653
  CDS (92)..(511): REFERENCED BY SEQ ID NO: 4996
ccgaagaggagagaagcacccaagccccagtcagttctaagaccgagagaggcgagaggaagccaggtagggggctctgctgcgaagggagatggccgggaagggaggcaaggggctgcttgcggcgaagacgacggcggccaagggcgccgccgacaaggacaaggacaagaagaaggcgcctgtgtcccgctcgtcccgtgccgggattcagttcccggtgggccgtatacacaggcagctcaagcagagggtctcggctaatggccgtgtgggtgccactgccgctgtgtactctgcagcaatccttgagtacctcactgccgaggtccttgagctggccggcaacgccagcaaggatctcaaggtgaagcgtatcacccctcgccacctgcagctcgcgatccgtggagacgaggagctggacaccctcatcaagggcaccatcgctggtggtggtgtcatccctcacatccacaagtccctcatcaacaagacctccaaggagtgaatgaaacgcaataacgggtagttgtgctttgtatcttcgtgatcccttgttatgttgtgctatctgtgatgtgttgctattatcacaacctgaataggttgtctgaatttgtgatggggctagctttcggtaacttgttattagggaaagacttggcaaatgtaatcgtgatatggaaccacttatatttggtttcctgaagaccagacaatccttactattcgtcttcatggaaaaaaaaaaaaaaaa

SEQ ID NO: 4996 - protein, 139 aa, Glycine max
  misc_feature: Ceres CLONE ID no. 1020578
  misc_feature: Ceres CDNA ID no. 29191653
  misc_feature (34)..(110): Pfam Name: Histone PFAM Desc: Core histone H2A/H2B/H3/H4
  misc_feature: Homolog of GI Number: 31432099 NR Desc: putative histone H2A
  misc_feature: Homolog of GI Number: 34902610 NR Desc: Putative histone H2A
  misc_feature: Homolog of GI Number: 6319146 NR Desc: H2A protein
  misc_feature: Homolog of GI Number: 50918585 NR Desc: putative histone H2A protein
  misc_feature: Homolog of GI Number: 21592838 NR Desc: histone H2A.F/Z
  misc_feature: Homolog of GI Number: 62319094 NR Desc: histone H2A
  misc_feature: Homolog of GI Number: 30024110 NR Desc: putative histone H2A
  misc_feature: Homolog of GI Number: 21536635 NR Desc: putative histone H2A
  misc_feature: Homolog of GI Number: 62087582 NR Desc: H2A histone family
  misc_feature: Homolog of GI Number: 62650864 NR Desc:  similar to cDNA sequence BC023488
  misc_feature: Useful for making ornamental plants with modified flowers
MAGKGGKGLLAAKTTAAKGAADKDKDKKKAPVSRSSRAGIQFPVGRIHRQLKQRVSANGRVGATAAVYSAAILEYLTAEVLELAGNASKDLKVKRITPRHLQLAIRGDEELDTLIKGTIAGGGVIPHIHKSLINKTSKE

SEQ ID NO: 4997 - DNA, 637 bp, Glycine max
  misc_feature: Ceres CLONE ID no. 1020592
  misc_feature: Ceres CDNA ID no. 29191654
  CDS (61)..(492): REFERENCED BY SEQ ID NO: 4998
actcctttgcgagagactcagctgcgtttgagcaaaactcctgttgtggaacaattagccatggcgacaggtaaaactgtgaaagacgtctcgcctcatgacttcgtcaaggcttacgcttctcatctcaagcgatctggcaagatcgagcttcccccatggacagacattgtgaagaccggtaagttgaaggagcttgccccatatgatcctgattggtactacatcagagctgcatctatggcaaggaaagtgtacctgaggggaggtcttggcgttggtgctttccgtagaatctatggtggaagcaagagaaacggcagtcgcccaccacacttctgcaaaagcagcggtggtattgcccgtcacatcctccagcagttggagactatgaacattgttgaaattgacaccaaaggaggaagaagaatcacttccagtgggcaacgggatttggaccaggttgctggacgtattgcagctgaaatttgaagatctgaatcttgtttttagttctactacttttgaaaccaatgttctgtttttagtcctttgtcttttactctcaagaaccattatcaatatcattgctgaagacttgctctcataatgttcaaaactaaaaaaaaaaaaaaaa

SEQ ID NO: 4998 - protein, 143 aa, Glycine max
  misc_feature: Ceres CLONE ID no. 1020592
  misc_feature: Ceres CDNA ID no. 29191654
  misc_feature (6)..(143): Pfam Name: Ribosomal_S19e PFAM Desc: Ribosomal protein S19e
  misc_feature: Homolog of GI Number: 6513924 NR Desc: putative 40S ribosomal protein S19
  misc_feature: Homolog of GI Number: 21554401 NR Desc: 40S ribosomal protein S19
  misc_feature: Homolog of GI Number: 34365671 NR Desc: At5g61170
  misc_feature: Homolog of GI Number: 82623403 NR Desc: 40S ribosomal protein S19
  misc_feature: Homolog of GI Number: 50916719 NR Desc: putative ribosomal protein S19
  misc_feature: Homolog of GI Number: 57164477 NR Desc: putative ribosomal protein S19
  misc_feature: Homolog of GI Number: 74231114 NR Desc: 40S ribosomal protein S19
  misc_feature: Homolog of GI Number: 74231106 NR Desc: 40S ribosomal protein S19
  misc_feature: Homolog of GI Number: 74231018 NR Desc: 40S ribosomal protein S19
  misc_feature: Homolog of GI Number: 57164480 NR Desc: putative ribosomal protein S19
MATGKTVKDVSPHDFVKAYASHLKRSGKIELPPWTDIVKTGKLKELAPYDPDWYYIRAASMARKVYLRGGLGVGAFRRIYGGSKRNGSRPPHFCKSSGGIARHILQQLETMNIVEIDTKGGRRITSSGQRDLDQVAGRIAAEI

SEQ ID NO: 4999 - DNA, 614 bp, Glycine max
  misc_feature: Ceres CLONE ID no. 1020602
  misc_feature: Ceres CDNA ID no. 29191655
  CDS (38)..(448): REFERENCED BY SEQ ID NO: 5000
aacaaacattcgatcccatcatctccgattcaaagccatggctcgtacgaagcagactgcgaggaaatcgacaggaggaaaagctccgagtaagcaactcgccaccaaggctgcgaggaaatctgcaccgaccaccggaggagtcaagaagcctcaccgttaccgtcccggaaccgtcgctctccgtgagattcgtaagtaccagaagagcactgagttgctgatccgtaaacttcccttccagcgtcttgttcgtgaaatcgctcaggatttcaagacggatctgagattccagagccacgcagtgttggctctccaggaagctgcggaggcgtatttggtgggtttgttcgaagacacgaatctctgtgccattcacgccaagagagtcaccatcatgcccaaagacattcaattggctaggcgcattcgtggagagcgtgcttagattcccatcttatcactataattccattagggttgtggtgttttctgcttttgatttcttgcttgcttctttcttcatgtcattgtctagtggtgcttgttgttaaacgctctttgaatcaagaacatatttgaacttagcagaagctaaaaaaaaaaaaaaaaaa

SEQ ID NO: 5000 - protein, 136 aa, Glycine max
  misc_feature: Ceres CLONE ID no. 1020602
  misc_feature: Ceres CDNA ID no. 29191655
  misc_feature (58)..(134): Pfam Name: Histone PFAM Desc: Core histone H2A/H2B/H3/H4
  misc_feature: Homolog of GI Number: 37991915 NR Desc: histone H3.2 protein
  misc_feature: Homolog of GI Number: 18698662 NR Desc: disease
  misc_feature: Homolog of GI Number: 62642119 NR Desc: histone 3
  misc_feature: Homolog of GI Number: 73808026 NR Desc: histone H3
  misc_feature: Homolog of GI Number: 50729226 NR Desc:  similar to histone protein Hist2h3c1
  misc_feature: Homolog of GI Number: 57110477 NR Desc:  similar to HIST1H3I protein
  misc_feature: Homolog of GI Number: 68362812 NR Desc:  similar to CG31613
  misc_feature: Homolog of GI Number: 57098927 NR Desc:  similar to histone protein Hist2h3c1
  misc_feature: Homolog of GI Number: 68441481 NR Desc:  similar to CG31613
  misc_feature: Homolog of GI Number: 50960584 NR Desc: HIST2H3C protein
MARTKQTARKSTGGKAPSKQLATKAARKSAPTTGGVKKPHRYRPGTVALREIRKYQKSTELLIRKLPFQRLVREIAQDFKTDLRFQSHAVLALQEAAEAYLVGLFEDTNLCAIHAKRVTIMPKDIQLARRIRGERA

SEQ ID NO: 5001 - DNA, 715 bp, Glycine max
  misc_feature: Ceres CLONE ID no. 1020648
  misc_feature: Ceres CDNA ID no. 29191656
  CDS (19)..(504): REFERENCED BY SEQ ID NO: 5002
attctctctttctccgccatgaccagctcttccgctccctcacgcaaggccttaagcaagatcgcgtgcaataggttgcagaaagagcttaccgagtggcaattaaatcctcccactggatttaggcacaaagttaccgacaatcttcaaaaatggacaatcgatgtgaccggagctccggggacgctctacgcgaacgagacttaccagcttcaggttgaatttcccgttaattaccctatggaagcgccccaggttatttttgttcctccggcaccgtcacacccacatatttacagcaatggacatatttgtttggatattctatatgactcgtggtcacctgcaatgactgtgagttccgtctgcatcagcattctctccatgctatcaagttcacctgcaaaggaacgccccgcagataatgatcgttacgtgaagaattgtaagaacgggaggtctcccaaggagacgaggtggtggttccatgacgacaaggcttgatgcaacgaacaagagaagccctttattgtaatatgaagatgacaatcctcacacatttaaatgttttcaacttattgtctccatctttttcacttttacctatggaatgtcaagctcacacttcccaataactcaaagaggagaaaaacattgccggaatctgaaatcccatatacactttttgattttaaatttaaaaaaaaaaaaaaaa

SEQ ID NO: 5002 - protein, 161 aa, Glycine max
  misc_feature: Ceres CLONE ID no. 1020648
  misc_feature: Ceres CDNA ID no. 29191656
  misc_feature (19)..(158): Pfam Name: UQ_con PFAM Desc: Ubiquitin
  misc_feature: Homolog of GI Number: 66354440 NR Desc: ubiquitinating enzyme
  misc_feature: Homolog of GI Number: 22658 NR Desc: ubiquitin
  misc_feature: Homolog of GI Number: 66354446 NR Desc: ubiquitinating enzyme
  misc_feature: Homolog of GI Number: 57164486 NR Desc: putative ubiquitin
  misc_feature: Homolog of GI Number: 66354442 NR Desc: ubiquitinating enzyme
  misc_feature: Homolog of GI Number: 4090259 NR Desc: ubiquitin
  misc_feature: Homolog of GI Number: 2801444 NR Desc: ubiquitin
  misc_feature: Homolog of GI Number: 66354444 NR Desc: ubiquitinating enzyme
  misc_feature: Homolog of GI Number: 34897008 NR Desc: putative ubiquitin
  misc_feature: Homolog of GI Number: 2801448 NR Desc: ubiquitin
  misc_feature: Useful for making shorter plants
  misc_feature: Useful for modifying plant structure
MTSSSAPSRKALSKIACNRLQKELTEWQLNPPTGFRHKVTDNLQKWTIDVTGAPGTLYANETYQLQVEFPVNYPMEAPQVIFVPPAPSHPHIYSNGHICLDILYDSWSPAMTVSSVCISILSMLSSSPAKERPADNDRYVKNCKNGRSPKETRWWFHDDKA

SEQ ID NO: 5003 - DNA, 714 bp, Glycine max
  misc_feature: Ceres CLONE ID no. 1020654
  misc_feature: Ceres CDNA ID no. 29191657
  CDS (65)..(475): REFERENCED BY SEQ ID NO: 5004
atcattcacattctcgcacaaagcaaatcacaaaagagtaagattcgttctctatcagcagcaaatggctcgtaccaagcaaaccgcgagaaaatccaccggaggaaaggctccgaggaagcagctggcgacgaaagcggcgaggaaatcggctccggccaccggaggagtgaagaagccgcacagattccgtcccggaacggtggcgttgagggagatcaggaagtaccagaagagcaccgagcttctgatccgcaagcttcctttccagcgccttgtccgtgagatcgctcaggatttcaagacggatctgaggttccagagcagcgccgtcgcggctcttcaggaagcggcggaggcttaccttgtcgggctgttcgaggacacgaatctgtgtgcgattcacgccaagagggtcaccatcatgcctaaggacatccagcttgcaagaagaatcaggggtgagagggcttaagaagagataaagaagaacagtggtttttaagtaatgctttggttgtttagttggttgtgtaaatctcttttaaaaatgttcgcttgtgttagtgttggtttcaagtcttttgatttgatgaatatgtctacttaatatcaatctagtgttatttctccactttcatttttgtctgttgatttcaatccgagaaaagtgaaaacaaaaacaacaccgttctttcaaaaaaaaaaaaaaaa

SEQ ID NO: 5004 - protein, 136 aa, Glycine max; identical to SEQ ID NO: 358
  misc_feature: Ceres CLONE ID no. 1020654
  misc_feature: Ceres CDNA ID no. 29191657
  misc_feature (58)..(134): Pfam Name: Histone PFAM Desc: Core histone H2A/H2B/H3/H4
  misc_feature: Homolog of GI Number: 62286642 NR Desc: Histone H3
  misc_feature: Homolog of GI Number: 50728592 NR Desc:  similar to histone protein Hist2h3c1
  misc_feature: Homolog of GI Number: 1362108 NR Desc: histone H3 homolog
  misc_feature: Homolog of GI Number: 55775689 NR Desc: histone 3
  misc_feature: Homolog of GI Number: 166384 NR Desc: histone H3
  misc_feature: Homolog of GI Number: 122083 NR Desc: Histone H3
  misc_feature: Homolog of GI Number: 70753 NR Desc: histone H3
  misc_feature: Homolog of GI Number: 57110477 NR Desc:  similar to HIST1H3I protein
  misc_feature: Homolog of GI Number: 73808028 NR Desc: histone H3
  misc_feature: Homolog of GI Number: 122070 NR Desc: Histone H3
  misc_feature: Useful for delaying flowering time
  misc_feature: Useful for increasing chlorophyll and photosynthetic capacity
  misc_feature: Useful for making shorter plants

SEQ ID NO: 5005 - DNA, 554 bp, Glycine max
  misc_feature: Ceres CLONE ID no. 1020659
  misc_feature: Ceres CDNA ID no. 29191466
  CDS (2)..(424): REFERENCED BY SEQ ID NO: 5006
atcagacatcaaatccccaatccccaatccccaatcccctccaatcccaccttcgggacagcagccagcaagcgtcgccagccatgtcaggccgaggcaagggaggcaagggcctgggaaagggcggcgcgaagcggcacaggaaggtgctgcgcgacaacatccaggggatcacgaagccggcgatccggcggctggcgcggcggggcggcgtgaagcgcatctccgggctgatctacgaggagacccgtggcgtgctcaagatcttcctcgagaacgtcatccgcgacgccgtcacctacacggagcacgcccgccgcaagaccgtcaccgccatggacgtcgtctacgcgctcaagcgccagggccgcaccctctacggctttggcggctgagccagggtcgtgcctcgcgtgggatttagatgtggttaggcgggtcgtcgttctgtggtgtgtgcttgtcctgtgtgtgcgtgtgcagctgcgtgctggtggttgtaatgagttccagattataatatgggtgttcatctcgcaaaaaaaaaaaaaaaa

SEQ ID NO: 5006 - protein, 103 aa, Glycine max; identical to SEQ ID NO: 8
  misc_feature: Ceres CLONE ID no. 1020659
  misc_feature: Ceres CDNA ID no. 29191466
  misc_feature (66)..(92): Pfam Name: TAF PFAM Desc: TATA box binding protein associated factor
  misc_feature: Homolog of GI Number: 74004178 NR Desc:  similar to germinal histone H4 gene
  misc_feature: Homolog of GI Number: 68441405 NR Desc:  similar to histone H2A
  misc_feature: Homolog of GI Number: 62663604 NR Desc:  similar to Histone H2B 291B
  misc_feature: Homolog of GI Number: 57098917 NR Desc:  similar to germinal histone H4 gene
  misc_feature: Homolog of GI Number: 57110415 NR Desc:  similar to germinal histone H4 gene
  misc_feature: Homolog of GI Number: 56798269 NR Desc: histone H4
  misc_feature: Homolog of GI Number: 74004256 NR Desc:  similar to germinal histone H4 gene
  misc_feature: Homolog of GI Number: 76651053 NR Desc:  similar to germinal histone H4 gene
  misc_feature: Homolog of GI Number: 61820747 NR Desc:  similar to germinal histone H4 gene
  misc_feature: Homolog of GI Number: 55667113 NR Desc:  similar to germinal histone H4 gene

SEQ ID NO: 5007 - DNA, 1263 bp, Glycine max
  misc_feature: Ceres CLONE ID no. 1020667
  misc_feature: Ceres CDNA ID no. 35383318
  CDS (81)..(953): REFERENCED BY SEQ ID NO: 5008
accaccacagagagctaagcgcattcgcatcttgagcacagacacccaccctagcttgtcgatcagtcgaggcagcgacgatggccaaggacatcgaggcggcgccccccggaggggagtacggagccaaggactactctgacccgccgccggcgccgctcttcgacgccgaggagctgactaaatggtccctgtaccgcgcggtcatcgccgagttcgtggccacgctgctcttcctctacatcaccgtggccactgtcatcgggtacaagcaccaggcggaccccgccggccccaatgctgccgacgcggcctgcagcggcgtcggcatcctcggcatcgcctgggcgttcggcggcatgatcttcgtgctcgtctactgcactgccggggtttccggtggccacatcaacccggcggtgacgttcgggctgttcctggcgcggaaggtgtcgctggtgcgcgcgctgctctacatcatcgcgcagtgcctgggcgccatctgcggcgtcgggctcgtcaaggggttccagagcgccttctacgtgcgctacggcggcggcgccaacgagctcagctccggcttctccaagggcaccggcctcgccgccgagatcatcggcaccttcgtgctcgtctacaccgtcttctccgccaccgaccccaagcgcagcgcccgtgactcccacgtcccggtgctggctcctctgccaatcggcttcgcggtgttcatggtgcacctggccactatcccgatcaccggcaccggcatcaacccggcaaggagctttggagctgccgtgatctacaacaacgagaaggcctgggatgaccactggatcttctgggtggggccattcatcggggccgccatcgccgccgcctaccaccagtacgtcctgagggccagcgccaccaagctcggctcgtctgcctccttcggcaggaactagatcggccgactgcagtatggatgatcggaagcacggacagtagatatatcagtgtgatactgttcgggtgatgtattgtgcacgcgtctgtattttcttagacgcgtttgggtgtcttcaaaatttctctacaattgcactaaattcgaaggactcgtcaccatgtgttttttttgaacaaacaaagggtacggaaggacctagaagttgcattaactaggaagaagtggatcacattgttttacaacaggacactaaaagaaaaatgaaacaacaaactagtgcctagttactaaaaaaaaaaaaaaaa

SEQ ID NO: 5008 - protein, 290 aa, Glycine max
  misc_feature: Ceres CLONE ID no. 1020667
  misc_feature: Ceres CDNA ID no. 35383318
  misc_feature (32)..(270): Pfam Name: MIP PFAM Desc: Major intrinsic protein
  misc_feature: Homolog of GI Number: 2662310 NR Desc: HvPIP2
  misc_feature: Homolog of GI Number: 50926544 NR Desc: OSJNBa0019D11.16
  misc_feature: Homolog of GI Number: 68299599 NR Desc: PIP aquaporin
  misc_feature: Homolog of GI Number: 68533200 NR Desc: PIP aquaporin isoform
  misc_feature: Homolog of GI Number: 13447805 NR Desc: plasma membrane integral protein ZmPIP2
  misc_feature: Homolog of GI Number: 13447807 NR Desc: plasma membrane integral protein ZmPIP2
  misc_feature: Homolog of GI Number: 4741931 NR Desc: plasma membrane intrinsic protein
  misc_feature: Homolog of GI Number: 50910761 NR Desc: putative plasma membrane integral protein
  misc_feature: Homolog of GI Number: 7649310 NR Desc: aquaporin 1
  misc_feature: Homolog of GI Number: 13447801 NR Desc: plasma membrane integral protein ZmPIP2
  misc_feature: Useful for delaying flowering time
  misc_feature: Useful for increasing chlorophyll and photosynthetic capacity
  misc_feature: Useful for making larger plants
  misc_feature: Useful for making ornamental plants with modified leaves
  misc_feature: Useful for making plants with increased biomass and foliage
  misc_feature: Useful for making smaller plants
  misc_feature: Useful for making stronger plants
MAKDIEAAPPGGEYGAKDYSDPPPAPLFDAEELTKWSLYRAVIAEFVATLLFLYITVATVIGYKHQADPAGPNAADAACSGVGILGIAWAFGGMIFVLVYCTAGVSGGHINPAVTFGLFLARKVSLVRALLYIIAQCLGAICGVGLVKGFQSAFYVRYGGGANELSSGFSKGTGLAAEIIGTFVLVYTVFSATDPKRSARDSHVPVLAPLPIGFAVFMVHLATIPITGTGINPARSFGAAVIYNNEKAWDDHWIFWVGPFIGAAIAAAYHQYVLRASATKLGSSASFGRN

SEQ ID NO: 5009 - DNA, 677 bp, Glycine max
  misc_feature: Ceres CLONE ID no. 1020775
  misc_feature: Ceres CDNA ID no. 29191658
  CDS (192)..(464): REFERENCED BY SEQ ID NO: 5010
ccgtcccctcctcgcccccctcgcgcgtagagatccttcgggccagggcaggcgttgaaggttaggtaaggatggtgagggttagcgtcctgaacgatgctctcaagagcatgtacaacgctgagaagcgtggcaagaggcaggtcatgatcaggccctcctcaaaggtgatcatcaagttcctcatcgtcatgcagaagcacggttacattggtgagtttgagtatgttgatgaccacagatctggcaagattgttgtggagttgaacgggagactgaacaagtgtggagtcatcagtccccgctttgatgttggtgtcaaggagattgaggggtggaccgccaggctgcttccatctcgtcagtttggctacatcgtcctgacaacctctgctggcatcatggatcacgaggaagccaggaggaagaacgttggtggcaaagtgctaggctttttctactgagcggaaattttgtgaaagttgtatttcagaccggtgtgataggatgttatctcaggacatcaaggttgtctactttttgcctgcatagctgctatgcctttgttatgttatgttggattcggttaattatgagatgcactttcgaatttcgggtcttgcctgcgatgaattatgactttgaagatgccatttgtgccccaaaaaaaaaaaaaa

SEQ ID NO: 5010 - protein, 130 aa, Glycine max; identical to SEQ ID NO: 2516
  misc_feature: Ceres CLONE ID no. 1020775
  misc_feature: Ceres CDNA ID no. 29191658
  misc_feature (5)..(130): Pfam Name: Ribosomal_S8 PFAM Desc: Ribosomal protein S8
  misc_feature: Homolog of GI Number: 23397065 NR Desc: putative cytoplasmic ribosomal protein S15a
  misc_feature: Homolog of GI Number: 17863 NR Desc: r
  misc_feature: Homolog of GI Number: 20259193 NR Desc: putative cytoplasmic ribosomal protein S15a
  misc_feature: Homolog of GI Number: 6683481 NR Desc: wrp15a
  misc_feature: Homolog of GI Number: 50908303 NR Desc: putative ribosomal protein S15
  misc_feature: Homolog of GI Number: 13560779 NR Desc: cytoplasmic ribosomal protein S15a
  misc_feature: Homolog of GI Number: 50935123 NR Desc: ribosomal protein S15
  misc_feature: Homolog of GI Number: 2130985 NR Desc: r
  misc_feature: Homolog of GI Number: 3355488 NR Desc: 40S ribosomal protein S15A
  misc_feature: Utility: Cold Growth Useful for making plants with increased tolerance to cold stress

SEQ ID NO: 5011 - DNA, 789 bp, Glycine max
  misc_feature: Ceres CLONE ID no. 1020854
  misc_feature: Ceres CDNA ID no. 29191659
  CDS (88)..(570): REFERENCED BY SEQ ID NO: 5012
aacaatcgacccacttataaagaaaaattagggatctcctccacttcatcccttctctcaaatctcctctcgcgttttctcacaaacatgtcgacgaagaagatcgtgttgaagagctccgatggcgagtctttcgaggtcgacgaggcggtggctctcgagtctcagaccatagcccacatggttgaagacgactgcgtcgacaacggagtccctcttcccaacgtcacgagcaagatcctcgccaaggtgattgagtactgcaagaagcacgtcgacgctgctgcttccaagagcgaggccgtcgatggcggtggctcctccgacgatgacctcaaggcttgggatgctgagtttatgaagatcgatcaagctaccctcttcgaactcatcctggctgctaattatctgaacatcaagaacctgctcgaccttacatgccagacagtggctgacatgatcaagggcaagactccggaagagattcgcacgaccttcaacatcaagaacgacttttcaccagaggaagaagaggaggtgcgcagggagaaccaatgggcttttgaatgatgcgtgagagagtgggagagatcgttgaagcaaaccaaccagtttcttgctttatgttgttgcctttttatttctgtggatgatcagtgtggatgatgactttgtgtcttctctgttattttccttttgaatttcatgactattaagaaccaaatgttggatttatgcttttcatgtcttaaaagagtgaggttggtttgcctaaaaaaaaaaaaaaaa

SEQ ID NO: 5012 - protein, 160 aa, Glycine max
  misc_feature: Ceres CLONE ID no. 1020854
  misc_feature: Ceres CDNA ID no. 29191659
  misc_feature (4)..(64): Pfam Name: Skp1_POZ PFAM Desc: Skp1 family
  misc_feature (83)..(160): Pfam Name: Skp1 PFAM Desc: Skp1 family
  misc_feature: Homolog of GI Number: 18958259 NR Desc: kinetochore protein
  misc_feature: Homolog of GI Number: 18958253 NR Desc: kinetochore protein
  misc_feature: Homolog of GI Number: 18958257 NR Desc: kinetochore protein
  misc_feature: Homolog of GI Number: 21281127 NR Desc: putative SKP1/ASK1 protein At1
  misc_feature: Homolog of GI Number: 18958255 NR Desc: kinetochore protein
  misc_feature: Homolog of GI Number: 81248477 NR Desc: SKP1
  misc_feature: Homolog of GI Number: 18958249 NR Desc: kinetochore protein
  misc_feature: Homolog of GI Number: 18958251 NR Desc: kinetochore protein
  misc_feature: Homolog of GI Number: 4959710 NR Desc: Skp1
  misc_feature: Homolog of GI Number: 28466911 NR Desc: At5g42190
MSTKKIVLKSSDGESFEVDEAVALESQTIAHMVEDDCVDNGVPLPNVTSKILAKVIEYCKKHVDAAASKSEAVDGGGSSDDDLKAWDAEFMKIDQATLFELILAANYLNIKNLLDLTCQTVADMIKGKTPEEIRTTFNIKNDFSPEEEEEVRRENQWAFE

SEQ ID NO: 5013 - DNA, 617 bp, Glycine max
  misc_feature: Ceres CLONE ID no. 1020863
  misc_feature: Ceres CDNA ID no. 29191660
  CDS (57)..(479): REFERENCED BY SEQ ID NO: 5014
aacttatataccgcctcctcactgccgtcgagctcttcccaacgagagctgcaaccatgtcgaagcgaggaagaggaggaacctctggaaacaagttcaggatgtcactgggtcttccagtggcagccaccgtgaactgtgctgacaacaccggagccaagaatctctacatcatctccgtcaaaggtatcaagggtcgtctcaaccgtctcccatccgcctgtgttggtgacatggtcatggctaccgtgaagaaaggtaaacctgatctacgtaagaaggtgctgccagctgtcattgttaggcagaggaagccatggcgccgaaaggacggtgtcttcatgtacttcgaggataatgctggtgtcattgtcaatcccaagggtgaaatgaaaggatctgctatcactggaccaatcgggaaggagtgtgccgacctgtggccaaggatcgctagtgctgctaacgccatcgtttaagttctatctctcttttgtgttgcttgaacgttttatcaaacctctgttgaggatgttttgtttttgtcttagacttgtgttatgccttaatcgtgattctagtaattatggttttgttcaacaaaaaaaaaaaaaaaa

SEQ ID NO: 5014 - protein, 140 aa, Glycine max [sequence omitted]

SEQ ID NO: 5015 - DNA, 1293 bp, Glycine max
  misc_feature: Ceres CLONE ID no. 1020927
  misc_feature: Ceres CDNA ID no. 29191467
  CDS (79)..(1218): REFERENCED BY SEQ ID NO: 5016
accaaaatctagcaacgaaccgcaaagcagaagcagcgacaaagatccatctttgtgtctcttcttctggcgacagggatggcgaccgccgggaaggtgatcaagtgcaaagcggcggtggcatgggaggccgggaagccgctgtcgatcgaggaggtggaggtggcgccgccgcaggccatggaggtgcgcgtcaagatcctctacaccgccctctgccacaccgacgtctacttctgggaagccaagggtcaaactccggttttccctaggatcttaggccatgaagctggaggcatcgtcgagagcgtcggagagggcgtgactgagcttgtgcctggtgaccatgtcctcccggtgttcaccggcgagtgcaaggactgtgcccactgcaagtcagaggaaagcaacctttgtgatctcctcaggatcaacgtggatcgtggcgtgatgatcggcgatgggcagtctcgcttcaccatcaacgggaagccgattttccacttcgtcgggacctccaccttcagcgagtacaccgtcatccatgtcggttgcctcgccaagatcaaccccgaggcgcccctcgacaaagtttgtgttctcagctgtggcatctcaactggacttggcgccacgctcaatgtcgcaaaaccaaaaaagggttccacggtggcgattttcggtcttggagctgtaggacttgctgccatggaaggggccaggatggctggggcatcaaggatcattggtgtggatttgaaccctgcaaaatacgaacaagctaagaaatttggatgcacagactttgtgaacccaaaggaccacagtaagcccgtgcaagaggtgcttgtcgagatgaccaatggcggagtcgaccgggcggttgagtgcactggccacatcgatgccatgattgccgccttcgaatgtgtccatgatgggtggggcgtggctgtgctggtgggcgtgccgcacaaggaggcggtgttcaagacctacccaatgaacttcctcaacgagaggaccctcaaaggcaccttcttcggcaactacaagccgcgcaccgacctcccggaagtcgtggagatgtacatgaggaaggagctggagctggagaagttcatcacgcatagcgtgcccttctcgcagatcaacacggcattcgacctcatgctcaagggggagggcctgcgctgcatcatgaggatggaccagtagatcgccacctcccatcattcatcaatgtgtctcgctgttttcagatttggtgcttgagaagcaaaaaaaaaaaaa

SEQ ID NO: 5016 - protein, 379 aa, Glycine max
  misc_feature: Ceres CLONE ID no. 1020927
  misc_feature: Ceres CDNA ID no. 29191467
  misc_feature (194)..(336): Pfam Name: ADH_zinc_N PFAM Desc: Zinc
  misc_feature: Homolog of GI Number: 539057 NR Desc: alcohol dehydrogenase
  misc_feature: Homolog of GI Number: 71793966 NR Desc: alcohol dehydrogenase
  misc_feature: Homolog of GI Number: 68138959 NR Desc: alcohol dehydrogenase
  misc_feature: Homolog of GI Number: 18886 NR Desc: alcohol dehydrogenase
  misc_feature: Homolog of GI Number: 67845945 NR Desc: alcohol dehydrogenase
  misc_feature: Homolog of GI Number: 67845949 NR Desc: alcohol dehydrogenase
  misc_feature: Homolog of GI Number: 67845901 NR Desc: alcohol dehydrogenase
  misc_feature: Homolog of GI Number: 67845921 NR Desc: alcohol dehydrogenase
  misc_feature: Homolog of GI Number: 67845933 NR Desc: alcohol dehydrogenase
  misc_feature: Homolog of GI Number: 67845939 NR Desc: alcohol dehydrogenase
  misc_feature: Useful for sterility
MATAGKVIKCKAAVAWEAGKPLSIEEVEVAPPQAMEVRVKILYTALCHTDVYFWEAKGQTPVFPRILGHEAGGIVESVGEGVTELVPGDHVLPVFTGECKDCAHCKSEESNLCDLLRINVDRGVMIGDGQSRFTINGKPIFHFVGTSTFSEYTVIHVGCLAKINPEAPLDKVCVLSCGISTGLGATLNVAKPKKGSTVAIFGLGAVGLAAMEGARMAGASRIIGVDLNPAKYEQAKKFGCTDFVNPKDHSKPVQEVLVEMTNGGVDRAVECTGHIDAMIAAFECVHDGWGVAVLVGVPHKEAVFKTYPMNFLNERTLKGTFFGNYKPRTDLPEVVEMYMRKELELEKFITHSVPFSQINTAFDLMLKGEGLRCIMRMDQ

SEQ ID NO: 5017 - DNA, 803 bp, Glycine max
  misc_feature: Ceres CLONE ID no. 1021015
  misc_feature: Ceres CDNA ID no. 40351550
  CDS (53)..(664): REFERENCED BY SEQ ID NO: 5018
aagtagtcttattcacccaacaacgttgcttattcacgcaactaaataagaaatgaagagtactatcttctttgctctctttctagtttgtgccttcaccatctcatacctgccttcagccaccgctcagttcgtgctcgacactgatgatgatcctcttcaaaacggtggcacatactatatgttgccagttatgagaggaaagggcggtggaatagaagtagattcaactggaaaagaaatatgccctctcactgttgtgcaatcacccaatgagctcgataaggggattggactagtctttacatctccattacatgccctttttatcgccgaaggctatcctttgagcattaagtttggttcatttgcagttataacgctgtgtgccggcatgcctactgagtgggctattgtggagagagagggtctacaagctgttaaacttgctgcacgcgatacagtagatggttggtttaatattgagagagtttcccgtgaatacaatgactataagcttgtgttctgtccacagcaagctgaagataacaaatgcgaggatattgggattcagatcgacgatgatggaatcaggcgtttagtgctgtctaagaacaaaccattagtggttcagtttcagaaatttagatcatcaactgcatgaagcgtgaaaaatcacgtgctttcttgttaagagagacaagtgtacgtaagactaaataaatgctttggctaataataaattggttacagactaaataaaataatcaaagcttatgccttcccccaaaaaaaaaaaaaaa

SEQ ID NO: 5018 - protein, 203 aa, Glycine max
  misc_feature: Ceres CLONE ID no. 1021015
  misc_feature: Ceres CDNA ID no. 40351550
  misc_feature (27)..(197): Pfam Name: Kunitz_legume PFAM Desc: Trypsin and protease inhibitor
MKSTIFFALFLVCAFTISYLPSATAQFVLDTDDDPLQNGGTYYMLPVMRGKGGGIEVDSTGKEICPLTVVQSPNELDKGIGLVFTSPLHALFIAEGYPLSIKFGSFAVITLCAGMPTEWAIVEREGLQAVKLAARDTVDGWFNIERVSREYNDYKLVFCPQQAEDNKCEDIGIQIDDDGIRRLVLSKNKPLVVQFQKFRSSTA

SEQ ID NO: 5019 - DNA, 1071 bp, Glycine max
  misc_feature: Ceres CLONE ID no. 1021031
  misc_feature: Ceres CDNA ID no. 29191661
  CDS (217)..(861): REFERENCED BY SEQ ID NO: 5020
gatcgatgaaacccaacccaacccagcccagccccccctctcctccctccctccctcccctcctctccggcctcgcccacgcgccgcttctcgcgcggggagagagagagagagacggacgacgcggagatcgatcgggcgaaggccgccgccgcatcggagcacgcgcgtgcgcgacgacgtccccgcctcgctcggcccgggagttagggcgcgatggcggcgccgccggccagggctcgggccgactacgactacctcatcaagctcctcctcatcggcgacagcggtgttggaaaaagttgtctgctcctacggttctcagatggctccttcaccactagcttcatcacaactattggtatcgacttcaagataaggactgttgagttggatggcaaacggatcaagttgcagatctgggatactgctggccaagagcgctttcggactataactactgcctactacaggggggcgatgggcattttacttgtttatgatgtcacggatgaggcgtcattcaataacataagaaattggatcaaaaacattgaacagcatgcttcagataacgtgagcaaaattttggtggggaacaaagcggatatggatgaaagcaaaagggctgttcccacttcaaagggccaggccctggccgatgaatatggcattcagttctttgaagcgagtgcaaagacaaacatgaatgtcgagcaggttttcttctctatagcaagagacatcaaacagagactctcggaggctgattccaaggctgagggggggactatcaagatcaacacggagggtgatgccagtgcagcagcaggacagaagtcggcttgctgtgggtcttgaaccgtcgtcgtcgctacggggaaaaaagatggttgcgacacggtgcttgtaattcttgtcattccattctttgcctgctggtttcgttgtgttaatttaagttatcgctgttgttaggatttgggcaaatttggtgttgagtcagagcaattactttgcagtatcggtggaatttttttgtttttcttgagatgaaaaaaaaaaaaaaaa

SEQ ID NO: 5020 - protein, 214 aa, Glycine max
  misc_feature: Ceres CLONE ID no. 1021031
  misc_feature: Ceres CDNA ID no. 29191661
  misc_feature: null
  misc_feature: Useful for making plants with altered Lignin content
  misc_feature (17)..(179): Pfam Name: Ras PFAM Desc: Ras family
  misc_feature: Homolog of GI Number: 50919469 NR Desc: ethylene
  misc_feature: Homolog of GI Number: 46326983 NR Desc: ethylene
  misc_feature: Homolog of GI Number: 50935375 NR Desc: putative ethylene
  misc_feature: Homolog of GI Number: 2808638 NR Desc: small GTP
  misc_feature: Homolog of GI Number: 18447917 NR Desc: ras
  misc_feature: Homolog of GI Number: 18447913 NR Desc: ras
  misc_feature: Homolog of GI Number: 871510 NR Desc: small GTP
  misc_feature: Homolog of GI Number: 18447919 NR Desc: ras
  misc_feature: Homolog of GI Number: 18447921 NR Desc: ras
  misc_feature: Homolog of GI Number: 50931689 NR Desc: putative GTP
MAAPPARARADYDYLIKLLLIGDSGVGKSCLLLRFSDGSFTTSFITTIGIDFKIRTVELDGKRIKLQIWDTAGQERFRTITTAYYRGAMGILLVYDVTDEASFNNIRNWIKNIEQHASDNVSKILVGNKADMDESKRAVPTSKGQALADEYGIQFFEASAKTNMNVEQVFFSIARDIKQRLSEADSKAEGGTIKINTEGDASAAAGQKSACCGS

SEQ ID NO: 5021 - DNA, 1304 bp, Triticum aestivum
  misc_feature: Ceres CLONE ID no. 1021104
  misc_feature: Ceres CDNA ID no. 25892800
  CDS (93)..(947): REFERENCED BY SEQ ID NO: 5022
cccaaatcccccaaatttgacccgtttctccgccgattcgcgtcacccccctttctgctcgggtcggtgagtggcctcggcccccggcggggatggggtacctgagcaccgtcatcggccaccccacggacggatcgcccgtcagcggcggcggcctcagccagaatggtaggtttagctatggttatgcgagctccctgggtaaaagggcttccatggaagacttttatgagacaagaattgaaagtgttgatggacagcttattggtttattcggagtttttgatggtcatggtggtgctaaagtagctgagtatgtcaaacacaacctcttcagccatcttcttaggtatccaaagttcatgagtgacacaaaagtggctatagatgattcttataaaagtaccgacagtgagttcttggaatctgacagtactcaaaaccagtgtgggtcaacagcatcaactgctgtacttgttggtgatcgtctctttgtcgcaaatgttggagactccagggctatcatatgcagggcaggaaatgctgtacctgtttcgaaagatcacaagcctgatcagacagatgagcggcaacgtattgaagaagctggaggttttgttatgtgggcagggacatggcgtgttggtggtgtacttgctgtttctcgcgcttttggtgacaagctcttaaagcagtatgtagttgtggatccagagatccaggaggaaatcgttgacgagtccctggagtttctcatccttgcaagcgatgggctgtgggatgtggtctctaacgaggaggctgtcgatatgacccggtcaatacaagacccagaggaagctgctaagaggctcttgcaggaggcctacaagcgggagagcagcgacaacataacctgcgtcgtcgtgcgcttctttcacgggcaagggagtagtgggcctgcttaaagcaggtgcgaagagttactctcaacttctcaagtggatgttgtactgtgatgacacacgtacatgccttgattgattcttaaggtttaaacgaagagaaactggaagtaggaaaagtgtactctgatatgagaacaaaagtttaggaacgaagtgtgccctaggccttagatttaacaataaatttgctggtgatgaactgatgatcgttcatcgtggtttagtcgtggacggtgttgggtctgatgagtgtgttgtatcttgttgtggattgccaaaccatgtgtgagtgtgatgtaatatccataactctctcaaggtaagcgattattgttgtactgaaaaaaaaaaaaaaaa

SEQ ID NO: 5022 - protein, 284 aa, Triticum aestivum
  misc_feature: Ceres CLONE ID no. 1021104
  misc_feature: Ceres CDNA ID no. 25892800
  misc_feature (18)..(267): Pfam Name: PP2C PFAM Desc: Protein phosphatase 2C
  misc_feature: Homolog of GI Number: 50929353 NR Desc: OSJNBa0011F23.20
  misc_feature: Homolog of GI Number: 20146110 NR Desc: protein phosphatase 2C
  misc_feature: Homolog of GI Number: 15238651 NR Desc: protein phosphatase 2C
  misc_feature: Homolog of GI Number: 48094258 NR Desc: protein phosphatase 2C
  misc_feature: Homolog of GI Number: 8979708 NR Desc: protein phosphatase 2C
  misc_feature: Homolog of GI Number: 50932911 NR Desc: protein phosphatase 2C
  misc_feature: Homolog of GI Number: 22137282 NR Desc: AT5g53140/MFH8_8
  misc_feature: Homolog of GI Number: 8778653 NR Desc: F9C16.6
  misc_feature: Homolog of GI Number: 9757995 NR Desc: protein phosphatase 2C
  misc_feature: Homolog of GI Number: 30013681 NR Desc: Avr9/Cf
MGYLSTVIGHPTDGSPVSGGGLSQNGRFSYGYASSLGKRASMEDFYETRIESVDGQLIGLFGVFDGHGGAKVAEYVKHNLFSHLLRYPKFMSDTKVAIDDSYKSTDSEFLESDSTQNQCGSTASTAVLVGDRLFVANVGDSRAIICRAGNAVPVSKDHKPDQTDERQRIEEAGGFVMWAGTWRVGGVLAVSRAFGDKLLKQYVVVDPEIQEEIVDESLEFLILASDGLWDVVSNEEAVDMTRSIQDPEEAAKRLLQEAYKRESSDNITCVVVRFFHGQGSSGPA

SEQ ID NO: 5023 - DNA, 863 bp, Glycine max
  misc_feature: Ceres CLONE ID no. 1022974
  misc_feature: Ceres CDNA ID no. 40351551
  CDS (88)..(633): REFERENCED BY SEQ ID NO: 5024
tccgttcaacattacggaggcgtcgcggatctctatctctctctctccctctctcgattccgaaactattccgcagagtgaagaaggatggggttgtctttcgggaagcttttcagcaggctttttgccaagaaggagatgaggattctgatggttggtcttgatgctgctggtaagaccaccatcttgtacaagctcaagctcggagagattgtcaccaccattcccactattgggttcaatgttgaaactgtggagtacaagaacatcagcttcacagtgtgggatgtcgggggtcaagacaagattcgtccgttgtggaggcactacttccagaacactcaaggtctcatctttgtggtggacagcaatgacagagaccgtgttgttgaggctagagatgaattgcacagaatgctcaatgaggatgagctgcgtgatgctgttctgctcgtgtttgctaacaagcaggatcttccaaatgccatgaacgcagctgagatcaccgataagcttggtctccactctctccgtcagcgtcactggtacatccagagcacatgtgccacttcaggagaggggctttacgaaggtcttgactggttgtccaacaacatcgccggcaaggcgtagagggaaagattgtggttgagctgattttgctgggcaaatctggatgcaggggcaaacattatctgattttttctttattgttctgtttcttttttggtttcgggtatttggatttgattttgtgatcgttgttctgattgtgcaaggaggagtctattgcacgtagaacatagaaactgcctttttatatagtttgtaatcgaagatttactctaaaaaaaaaaaaaaaa

SEQ ID NO: 5024 - protein, 181 aa, Glycine max
  misc_feature: Ceres CLONE ID no. 1022974
  misc_feature: Ceres CDNA ID no. 40351551
  misc_feature: null
  misc_feature: Useful for making plants with altered Lignin content
  misc_feature: Useful for making plants with altered alkaloid content
  misc_feature (19)..(179): Pfam Name: Ras PFAM Desc: Ras family
MGLSFGKLFSRLFAKKEMRILMVGLDAAGKTTILYKLKLGEIVTTIPTIGFNVETVEYKNISFTVWDVGGQDKIRPLWRHYFQNTQGLIFVVDSNDRDRVVEARDELHRMLNEDELRDAVLLVFANKQDLPNAMNAAEITDKLGLHSLRQRHWYIQSTCATSGEGLYEGLDWLSNNIAGKA

SEQ ID NO: 5025 - DNA, 655 bp, Glycine max
  misc_feature: Ceres CLONE ID no. 1022981
  misc_feature: Ceres CDNA ID no. 25445654
  CDS (120)..(338): REFERENCED BY SEQ ID NO: 5026
ataaacgaaactcaaagctccgtttaagcctcttcgccgccttatttccagaaacatcttcaatcagtctcctctcctataacaatctctaaatcaagtttgaagccgagaaaataatcatggccggtggtgcaaatttcgtgcaaagggttctctcttacgtggtgaatgaagtggttatcaatggtcttgccaacagccctgcatttcagaggtttgcagtgaggacatcaaaaagaattgaagatatttctaacaaagctgttcagaagaggcaggagctagctgagcagatcaaggacatctcgaaaaatatggagtcattcaagaacaagtaattttggtatttttgctacattgttgaaggtccatagtcacgattttctttagccaaagatgctgctggagacaaaggccgggtgtttgtaaatttcttttttaacaatatattttggttcttaactcgtgatctcaagttgggatgcaagggtttttcagtttgcttggtgaactgaaaacaggattaggatattattgctagtttatgacactgtcactttgtcaccaatattagtttgcctttaatttgaaactatcgaggagtgattattacagaataaaaatgatacttcttacgaaaaaaaaaaaaaaaaaa

SEQ ID NO: 5026 - protein, 72 aa, Glycine max
  misc_feature: Ceres CLONE ID no. 1022981
  misc_feature: Ceres CDNA ID no. 25445654
  misc_feature: Homolog of GI Number: 14030733 NR Desc: AT5g01350/T10O8_60
  misc_feature: Homolog of GI Number: 50926338 NR Desc: OSJNBa0043L24.15
MAGGANFVQRVLSYVVNEVVINGLANSPAFQRFAVRTSKRIEDISNKAVQKRQELAEQIKDISKNMESFKNK

SEQ ID NO: 5027 - DNA, 866 bp, Glycine max
  misc_feature: Ceres CLONE ID no. 1023040
  misc_feature: Ceres CDNA ID no. 29191662
  CDS (122)..(583): REFERENCED BY SEQ ID NO: 5028
ataccccgaagatcattgttcgctgacgccgcctccttggtctttcctctcctcccttcccctccgccgcgatcgaccccaagagcacgaaaccctagccctagcccaacccatcttctccatggccaacagcaacctcccccgccgcatcatcaaggagacgcagcggctgctcagcgagccagctcctggcatcagtgcttcaccatcagaggagaacatgcgctacttcaatgtcatgatccttggcccaactcagtcgccatatgaaggaggagtattcaaacttgagttgtttttacctgaagaatatccaatggctccgccaaaggttcgctttctcacaaaaatttaccatccaaacattgacaagcttgggaggatatgccttgatatcttaaaggacaagtggagtcctgcccttcagatccgaacagttcttttgagcattcaagcactcctcagcgctccaaatcctgacgatccgcttgctgacaatgtggcaaagcactggaaggccaacgagacagaagctgtggaaacagccaaagagtggacccgtgtctacgctaatgatgcatgagctctgcatgctatgactgattgctcagtagtcttggcaaggtgaggtgaaatagactatcaagtggtttaaaatggaggtccagctgatgaactagtgaaatgtgaagtttcctccttgcatcgcgtgtaccgggtgtgatgcatattattaccctagttgggatgcgaaggacccatgtgcgtgtatatttcgttgagtgttgtaccgtaataaacatcctgaagtcatgtgtgccttttcttgctctacattaacttcttggtcaaaaaaaaaaaaaaaa

SEQ ID NO: 5028 - protein, 153 aa, Glycine max
  misc_feature: Ceres CLONE ID no. 1023040
  misc_feature: Ceres CDNA ID no. 29191662
  misc_feature (9)..(146): Pfam Name: UQ_con PFAM Desc: Ubiquitin
  misc_feature: Homolog of GI Number: 34911052 NR Desc: ubiquitin
  misc_feature: Homolog of GI Number: 66354480 NR Desc: ubiquitinating enzyme
  misc_feature: Homolog of GI Number: 71040675 NR Desc: ubiquitin
  misc_feature: Homolog of GI Number: 66354478 NR Desc: ubiquitinating enzyme
  misc_feature: Homolog of GI Number: 5381319 NR Desc: ubiquitin
  misc_feature: Homolog of GI Number: 79590480 NR Desc: ubiquitin conjugating enzyme/ ubiquitin
  misc_feature: Homolog of GI Number: 3834310 NR Desc: Similar to Ubiquitin
  misc_feature: Homolog of GI Number: 16758810 NR Desc: ubiquitin
  misc_feature: Homolog of GI Number: 83754522 NR Desc: Chain K
  misc_feature: Homolog of GI Number: 30583959 NR Desc: Homo sapiens ubiquitin
MANSNLPRRIIKETQRLLSEPAPGISASPSEENMRYFNVMILGPTQSPYEGGVFKLELFLPEEYPMAPPKVRFLTKIYHPNIDKLGRICLDILKDKWSPALQIRTVLLSIQALLSAPNPDDPLADNVAKHWKANETEAVETAKEWTRVYANDA

SEQ ID NO: 5029 - DNA, 1135 bp, Glycine max
  misc_feature: Ceres CLONE ID no. 1023211
  misc_feature: Ceres CDNA ID no. 40351552
  CDS (46)..(906): REFERENCED BY SEQ ID NO: 5030
attattactacccactcatctagagagagaagaagaaacccagatatggaaggcaaggaagaagatgttagagtcggagccaacaagtttcctgagagacagccgatcggaacatctgctcagagcgacaaggactacaaggagccacctcctgctcccttgttcgagcccggcgagcttgcttcgtggtccttctggagagcagggatcgccgagttcatcgccacgtttctgttcctttacatcactgttttgaccgtcatgggtgtcaagaggtcgccgaacatgtgtgcttctgtcggaatccaaggcatcgcttgggctttcggtggtatgatcttcgctctcgtctactgcaccgctggtatctccggtggacacatcaacccagcagtcacgttcggtctgttcttggcgcggaagctttcgcttacacgagctgtgtactacatagtgatgcagtgcttaggagctatctgtggagctggtgtggtgaaggggttccaaccaaagcagtaccaagctctaggaggtggagccaacactgtagctcctggttacaccaaaggaagtggtctcggagctgagattattggaacctttgtccttgtttacaccgtcttctccgctactgatgctaagagaaacgctcgtgactctcatgttcccattcttgcaccgcttcctattggattcgctgtgttcttggtccacttggcaaccatccccatcactggaactggaatcaacccagcaagaagtcttggagctgcaatcatcttcaacaaggacaacgcttgggacgaccattgggtcttctgggttggaccattcatcggtgctgcactcgctgctctataccacgtgatcgtcatcagagccatcccattcaagtccagaagctgattgagttactctttataaacttggctttttgttctcttagtttggttttccttttgtgaatgtactactactactacttgtgtgaaacatcgtgtgtttgtgttggttcctcttcttttgcctaatgcagactctatttataaaacagagtcagagataattgcgatccctcttctacaatttctatcaaacattcagggcagacatttttcttctaaaaaaaaaaaaa

SEQ ID NO: 5030 - protein, 286 aa, Glycine max
  misc_feature: Ceres CLONE ID no. 1023211
  misc_feature: Ceres CDNA ID no. 40351552
  misc_feature (44)..(273): Pfam Name: MIP PFAM Desc: Major intrinsic protein
MEGKEEDVRVGANKFPERQPIGTSAQSDKDYKEPPPAPLFEPGELASWSFWRAGIAEFIATFLFLYITVLTVMGVKRSPNMCASVGIQGIAWAFGGMIFALVYCTAGISGGHINPAVTFGLFLARKLSLTRAVYYIVMQCLGAICGAGVVKGFQPKQYQALGGGANTVAPGYTKGSGLGAEIIGTFVLVYTVFSATDAKRNARDSHVPILAPLPIGFAVFLVHLATIPITGTGINPARSLGAAIIFNKDNAWDDHWVFWVGPFIGAALAALYHVIVIRAIPFKSRS

SEQ ID NO: 5031 - DNA, 783 bp, Glycine max
  misc_feature: Ceres CLONE ID no. 1023262
  misc_feature: Ceres CDNA ID no. 29191663
  CDS (51)..(569): REFERENCED BY SEQ ID NO: 5032
acgactgatccaaaaccattcctcaaagctctcatactaaacaaccaacaatggcgtttcctaaagttttcttcgacatgaccgtcgacggcaagcccgcgggaaggatcgtgatggagctgtacaccgacaagactcccaagactgctgagaatttcagagctctctgcacgggtgagaagggagtcgggagcaaaggcaagcctcttcacttcaaggggtcttccttccaccgcgtgatccctaacttcatgtgtcagggaggagatttcacggccgggaacgggacgggaggcgagtccatctacggggagaagttcgccgacgagaatttcgagaggaagcacaccggtcctgggatcctctccatggccaacgctggtcccaacaccaacgggtcgcagttctttatctgcactgttaagaccgattggcttgatggtaagcatgtggtgttcgggcaggtggtggaagggttagacgtggtgaaggcgatcgagaaggtggggtcggcttctggaaagccgtcgaagccggtggtcgtggccgactgtggtcagctctcttagatcacatgagatctaaaattagcgtcttcgttgccctctagtgagtggtgttcggtcctcatcgtgtgtctctgcttttgcttttgtgttcttttcatttggtgcaagtcataaaagcttggtgtgtgttcgttctcatgtcaccctaattagtagctagtaccataaataatgaatgagcttgtgtttacccttttcaaaaaaaaaaaaaaaa

SEQ ID NO: 5032 - protein, 172 aa, Glycine max
  misc_feature: Ceres CLONE ID no. 1023262
  misc_feature: Ceres CDNA ID no. 29191663
  misc_feature (5)..(171): Pfam Name: Pro_isomerase PFAM Desc: Cyclophilin type peptidyl
  misc_feature: Homolog of GI Number: 21593682 NR Desc: peptidylprolyl isomerase ROC1
  misc_feature: Homolog of GI Number: 2443757 NR Desc: cyclophilin
  misc_feature: Homolog of GI Number: 21593051 NR Desc: cyclophilin CYP2
  misc_feature: Homolog of GI Number: 62728587 NR Desc: cyclophilin
  misc_feature: Homolog of GI Number: 18076088 NR Desc: cyclophilin
  misc_feature: Homolog of GI Number: 829119 NR Desc: cyclophilin
  misc_feature: Homolog of GI Number: 1563719 NR Desc: cyclophylin
  misc_feature: Homolog of GI Number: 18146786 NR Desc: CYP1
  misc_feature: Homolog of GI Number: 21886603 NR Desc: peptidylprolyl isomerase
  misc_feature: Homolog of GI Number: 1561575 NR Desc: cyclophilin
MAFPKVFFDMTVDGKPAGRIVMELYTDKTPKTAENFRALCTGEKGVGSKGKPLHFKGSSFHRVIPNFMCQGGDFTAGNGTGGESIYGEKFADENFERKHTGPGILSMANAGPNTNGSQFFICTVKTDWLDGKHVVFGQVVEGLDVVKAIEKVGSASGKPSKPVVVADCGQLS

SEQ ID NO: 5033 - DNA, 662 bp, Glycine max
  misc_feature: Ceres CLONE ID no. 1027530
  misc_feature: Ceres CDNA ID no. 29191746
  CDS (2)..(628): REFERENCED BY SEQ ID NO: 5034
gaaagctctgttccggtctcccgtctcgcctagcctcctcctgccctccgctcgcctagggttcgctcgcgatggaccagggcgacgtcgccgtggccgtgccccccgccgccccctcctcctcctgcgccggcgccggctgcaagaagggcaagcgcttcgagatcaaaaagtggaacgccgtcgcgctctgggcctgggacatcgtggtcgacaactgcgccatctgccggaaccacatcatggacctctgcatcgagtgccaggcgaaccaggccagcgccaccagcgaggagtgcaccgtcgcttggggagtttgcaaccatgcattccacttccactgcatcagccgttggctcaagacccgtcaagtgtgccctctagacaacagcgagtgggagttccagaagtatggtcactaagacagtcatggccggggggcgaagttatttcatggttatcgtactttagtgctattagtgataactcctggttaagaatagtggatgggtggttgatgttccttgagcttggatttttgttaaaccacatgtatccttgtcgactactgttcagcaaatcgtccctgggagctactgatggatctctctgtttttctggaatttaagtgtgaatttggtgggtcaaaaaaaaaaaaaaaa

SEQ ID NO: 5034 - protein, 116 aa, Glycine max; identical to SEQ ID NO: 4490
  misc_feature: Ceres CLONE ID no. 1027530
  misc_feature: Ceres CDNA ID no. 29191746
  misc_feature (83)..(104): Pfam Name: zf PFAM Desc: Zinc finger
  misc_feature: Homolog of GI Number: 50911983 NR Desc: putative RING box protein 1
  misc_feature: Homolog of GI Number: 83701143 NR Desc: RING
  misc_feature: Homolog of GI Number: 55769719 NR Desc: putative ring
  misc_feature: Homolog of GI Number: 21592528 NR Desc: ring
  misc_feature: Homolog of GI Number: 31747517 NR Desc: ring box protein
  misc_feature: Homolog of GI Number: 50728692 NR Desc:  similar to RBX1 protein
  misc_feature: Homolog of GI Number: 55661268 NR Desc:  similar to RBX1 protein
  misc_feature: Homolog of GI Number: 62652791 NR Desc:  similar to RBX1 protein
  misc_feature: Homolog of GI Number: 32425477 NR Desc: RBX1 protein
  misc_feature: Homolog of GI Number: 56078688 NR Desc: Ring

SEQ ID NO: 5035 - DNA, 804 bp, Glycine max
  misc_feature: Ceres CLONE ID no. 1027534
  misc_feature: Ceres CDNA ID no. 24766259
  CDS (159)..(587): REFERENCED BY SEQ ID NO: 5036
accgattgcgactcgagaacctttcgttcatctccaaaatatcttcctcctctgttctgcgcctccagccctccactatcccttgcgtggttttagtctgtgaactcgagagaccgagcgaggaaagttgccgtgtgagacctgaaagttagggagatatggctgggattggtcctatcaggcaggactgggagccgatagtggcgcggaagaaggcgcagaacgccgccgacaagaaggacgaaaaggccgtcaacgctgcccgccgctccggcgccgagatcgacaccaccaagaagtacaacgctggaacgaacaaggctgcatctagcggaacttccctcaacaccaagcggctcgacgacgacacggagaacctttcccatgagcgtgtttcaagtgacctgaagaaaaaccttatgcaagcaagactggataagaagatgacccaggcacaacttgctcagatgatcaatgagaagccacaggtgatccaggagtacgagtcgggcaaggcgattccgaacaatcagataattggaaagctcgagagggcacttggagctaagctgcgtagcaagaagtaatgccttgaaggccaagccctgtctatttgccttacactgcatttgctaggtcctaaaagctcttacaggctgtttctgttggttgatactgaataactatgccacagaacgactttatgtatcattatattcccgtgttctaaaatgtgtcgtcatatgacccagtgtaagagctgcattgagcatgcagattgacatggcaaaaaaaaaaaaaaaa

SEQ ID NO: 5036 - protein, 142 aa, Glycine max
  misc_feature: Ceres CLONE ID no. 1027534
  misc_feature: Ceres CDNA ID no. 24766259
  misc_feature: null
  misc_feature: Useful for making plants with altered Lignin content
  misc_feature: Useful for making plants with modulated heat sensitivity
  misc_feature (87)..(141): Pfam Name: HTH_3 PFAM Desc: Helix
  misc_feature: Homolog of GI Number: 50944921 NR Desc: putative ethylene
  misc_feature: Homolog of GI Number: 12642936 NR Desc: putative transcriptional coactivator protein
  misc_feature: Homolog of GI Number: 8895787 NR Desc: multiprotein bridging factor 1
  misc_feature: Homolog of GI Number: 20086364 NR Desc: putative multiprotein bridging factor 1
  misc_feature: Homolog of GI Number: 21553721 NR Desc: ethylene
  misc_feature: Homolog of GI Number: 5669634 NR Desc: ethylene
  misc_feature: Homolog of GI Number: 19225065 NR Desc: ethylene
  misc_feature: Homolog of GI Number: 2285788 NR Desc: Multiprotein bridging factor 1
  misc_feature: Homolog of GI Number: 57091993 NR Desc:  similar to endothelial differentiation
  misc_feature: Homolog of GI Number: 50757542 NR Desc:  similar to endothelial differentiation
  misc_feature: Useful for making ornamental plants with modified flowers
  misc_feature: Useful for making plants with increased biomass and foliage
  misc_feature: Useful for sterility
MAGIGPIRQDWEPIVARKKAQNAADKKDEKAVNAARRSGAEIDTTKKYNAGTNKAASSGTSLNTKRLDDDTENLSHERVSSDLKKNLMQARLDKKMTQAQLAQMINEKPQVIQEYESGKAIPNNQIIGKLERALGAKLRSKK

SEQ ID NO: 5037 - DNA, 705 bp, Triticum aestivum
  misc_feature: Ceres CLONE ID no. 1030356
  misc_feature: Ceres CDNA ID no. 40351553
  CDS (85)..(573): REFERENCED BY SEQ ID NO: 5038
atccaccactcgcccattgtttgtagtaccaaccagccaagccaagaagtaacagagaaggaggaagagaggccggccggcgaaatgaaggcgaccgcgggggccctcctcgccgtggtggcggcggtgctgctacgcggcgtggcggcagcgccgccccggaagccggtggacgtgccgttcgacaagaactacgtgccgacgtgggcgcaggaccacatccactacgtgaacggcgggcgggaggtgcagctgtccctggacaagaccaccggcacgggcttccagacccggggctcctacctcttcggccacttcagcatgcacatcaagctcgtcggcggcgactccgccggcaccgtcaccgccttctacctgtcgtcacagaactcggagcacgacgagatcgacttcgagttcttggggaacaggacggggcagccgtacatcctgcagaccaacgtgttctccggcggcaagggcgaccgggagcagaggatctacctctggttcgacccaaccaaggactaccactcctactccgtcctctggaacctctacatgatcgcgtagctcttccatccccctttcgtattcctgcttactaagttattttccccctttctttaaaaaaaaagttattttcccccttattggtgacaaatgagaagacgatctttagttagtcgaaaaaaaaaaaaaaaa

SEQ ID NO: 5038 - protein, 162 aa, Triticum aestivum
  misc_feature: Ceres CLONE ID no. 1030356
  misc_feature: Ceres CDNA ID no. 40351553
  misc_feature: null
  misc_feature: Useful for making plants with altered cell wall content and/or composition
  misc_feature (33)..(157): Pfam Name: Glyco_hydro_16 PFAM Desc: Glycosyl hydrolases family 16
MKATAGALLAVVAAVLLRGVAAAPPRKPVDVPFDKNYVPTWAQDHIHYVNGGREVQLSLDKTTGTGFQTRGSYLFGHFSMHIKLVGGDSAGTVTAFYLSSQNSEHDEIDFEFLGNRTGQPYILQTNVFSGGKGDREQRIYLWFDPTKDYHSYSVLWNLYMIA

SEQ ID NO: 5039 - DNA, 903 bp, Triticum aestivum
  misc_feature: Ceres CLONE ID no. 1030569
  misc_feature: Ceres CDNA ID no. 25401484
  CDS (27)..(653): REFERENCED BY SEQ ID NO: 5040
agcaacggtggaattactcggcaaccatggcgcctgcagccttgtccgcccccgtccttcgcgtctctccacagtcggctggaagggccgccgccgccgcgcccgccggcggtctccgcttcggccagacggcttgcctgcactccggccattctggccaaaccgtgctgcgatcgaaggtgctgctgcagaggcccgtggggcagaggaggcgctcggcgctgagaagcagcgtgcatgactccaaagccacggatgacaaggtggagttcgggtactcgaggaaagacgtgctgctgatcggcgtcggcgtcaccctcctcggctacggcctcaagtccggcctcgagttcgtcggcgtggaccccctgcaagccggcaacgtggtccagctgttcatcgtgctcgggatgacggtggggtggatctcctcctacatgatccgggtggccaacaaggacatgacctacgccacgcagctcaggaactacgagaagcaagtcatggagaaacggctggagagcctgtcggaggcggagctgcaggtgctgctggagcaggtggaggaggagaaggaacgcctgccgccgatgaggagggatcagggaatcaccatcaacaggaagacggaggatcagaccactgccaactaatagctcctagaagacctcgatcatgatactagcccagtacattgttaggatagcttgcatcgattgattatggcttttcctttgttataagaatctgtagcacaatactagtagtgctcttagcagcaacactgagttatactccgaagaatagttaccaagattcacatggatagaagccatacataaattatctacggaggaacgtgacaataaaagtcaggcattgtctacaaaaaaaaaaaaaaaa

SEQ ID NO: 5040 - protein, 208 aa, Triticum aestivum
  misc_feature: Ceres CLONE ID no. 1030569
  misc_feature: Ceres CDNA ID no. 25401484
MAPAALSAPVLRVSPQSAGRAAAAAPAGGLRFGQTACLHSGHSGQTVLRSKVLLQRPVGQRRRSALRSSVHDSKATDDKVEFGYSRKDVLLIGVGVTLLGYGLKSGLEFVGVDPLQAGNVVQLFIVLGMTVGWISSYMIRVANKDMTYATQLRNYEKQVMEKRLESLSEAELQVLLEQVEEEKERLPPMRRDQGITINRKTEDQTTAN

SEQ ID NO: 5041 - DNA, 634 bp, Triticum aestivum
  misc_feature: Ceres CLONE ID no. 1030639
  misc_feature: Ceres CDNA ID no. 40351554
  CDS (80)..(373): REFERENCED BY SEQ ID NO: 5042
gtgtttcacaagctctcgaaatttggtcgcctcattcacagctagctagccccgcgctcgtgctgcctgccggccggtcatgtcgacgacgacgcagagcgcggccctgtcggcgaaatgcgcggcgtgggcgcaggagcggcggccgttcacgcacccgatcgagatcccggcggcctccggcgcgccggacgagcggaggggccgcggcgaggaggaggacggcggggaggtggagccgccgcacgtgctgatggcgcggcgcagggcggcctcctcggtgtgctccggccaggggcggacgctcaagggccgggacctcacgcgcacgcgcgactccgtcctccgcatgaccggcttcatcgagagctagcccgtcctccgcccgtctcgttcgtcgccaacggcgcgcggccgggctcaaggtcttcttgggtcgatccagtttgtgtagagtaaataagatagctacggagcctaggggcgaatgccgctgaattttcttcaatcggtcccatttgtgaattggttggaattggaagagcgagatgaaattaaatccgttggtgtaaaacttattctgtttgtacgcgcgcgcgcgcgtgtgtgacatatacgaaaaaaaaaaaaaaaa

SEQ ID NO: 5042 - protein, 97 aa, Triticum aestivum
  misc_feature: Ceres CLONE ID no. 1030639
  misc_feature: Ceres CDNA ID no. 40351554
MSTTTQSAALSAKCAAWAQERRPFTHPIEIPAASGAPDERRGRGEEEDGGEVEPPHVLMARRRAASSVCSGQGRTLKGRDLTRTRDSVLRMTGFIES

SEQ ID NO: 5043 - DNA, 952 bp, Triticum aestivum
  misc_feature: Ceres CLONE ID no. 1030642
  misc_feature: Ceres CDNA ID no. 24766260
  CDS (102)..(593): REFERENCED BY SEQ ID NO: 5044
aaaaaaaacaaacaatcggcagggttcgcgaaaaaaaggaaactcctccctccctcctcccccgcgccgacccgccgccgtcgacagcgcgccccgacgcgatggcccgcaccaagcacccggccgtcaggaagaccaaggcgccgcccaagaagcagctcgggccccgccccgcgcagcggcggcaggagacagatggcgcgggcacgtcggcgacaccgaggcgagccgggcgggcggcggccccagggggggctcaaggggcaactgggcaacccaagcagaggaaaccacaccggttcaggccaggcacggtggcactgcgggagatcaggaggtatcagaagtcggtcgactttctcatcccgtttgcaccatttgtccgtctgatcaaggaggtcaccgacttcttctgtcctgaaatcagccgctggactccccaagcgctcgtcgcgattcaagaggctgcagagtatcacctcgtcgacgtatttgaaagggcaaatcactgtgccatccatgcaaagcgtgttaccgtcatgcaaaaggacatacagcttgcaaggcgtatcggcgggaggaggctttggtgatacttctggaagacgttttctgcatcataggggggaaagactctggtgatactaatgggagatgttttatgtattgggggtgcaaaggcagtgttcatagtggtccaatatgtttgactgtatcgttagaaagtattgtaggtgtatcttcatttagttagctttgtcttcgaagttgatctgattcgttacatgtttgggatcattcgacttcttcattcaggcattgttccatttgaattgattgtggatatgggattttaaatgacttggaatcggttgtggattttccacattattgaaggagcgaaccagaattgcgcgcaagcgttttcatgcaaataaaaaaaaaaaaaaaa

SEQ ID NO: 5044 - protein, 163 aa, Triticum aestivum
  misc_feature: Ceres CLONE ID no. 1030642
  misc_feature: Ceres CDNA ID no. 24766260
  misc_feature (83)..(160): Pfam Name: Histone PFAM Desc: Core histone H2A/H2B/H3/H4
  misc_feature: Homolog of GI Number: 50511368 NR Desc: histone H3
  misc_feature: Homolog of GI Number: 21668094 NR Desc: centromeric histone h3
  misc_feature: Homolog of GI Number: 51103313 NR Desc: centromeric histone
  misc_feature: Homolog of GI Number: 33146144 NR Desc: histone H3 like protein
  misc_feature: Homolog of GI Number: 33146138 NR Desc: histone H3 like protein
  misc_feature: Homolog of GI Number: 51103317 NR Desc: centromeric histone
  misc_feature: Homolog of GI Number: 19338704 NR Desc: centromeric histone H3 HTR12
  misc_feature: Homolog of GI Number: 33146140 NR Desc: histone H3 like protein
  misc_feature: Homolog of GI Number: 19338706 NR Desc: centromeric histone H3 HTR12
  misc_feature: Homolog of GI Number: 33146142 NR Desc: histone H3 like protein
MARTKHPAVRKTKAPPKKQLGPRPAQRRQETDGAGTSATPRRAGRAAAPGGAQGATGQPKQRKPHRFRPGTVALREIRRYQKSVDFLIPFAPFVRLIKEVTDFFCPEISRWTPQALVAIQEAAEYHLVDVFERANHCAIHAKRVTVMQKDIQLARRIGGRRLW

SEQ ID NO: 5045 - DNA, 565 bp, Triticum aestivum
  misc_feature: Ceres CLONE ID no. 1030678
  misc_feature: Ceres CDNA ID no. 24727412
  CDS (82)..(423): REFERENCED BY SEQ ID NO: 5046
acctcgcagacatccccgagcagaagcgcagccgacgccgctgaccctcgcgacgccgccacttctcctcggggcgcaaccatggtgacctccacgaagaagacgaagaagtccggggacaacatcaacaacaagctgcagcttgtcatgaagagcggcaagtacacgctcggctacaagaccgtcctcaggaccctcaggaactccaaggcaaagcttgtgatccttgctaacaactgccctccgctccgcaagtctgagattgagtactatgctatgttggcgaagatcactgtccaccactaccatggaaacaatgttgatttgggaactgcgtgtggtaaatacttccgagtctgctgcctgagtatcatcgaccctggcgattccgacatcatcaacgcaacaccagctggccagtaaacctgtgtatgccattttcagtgtctcgtctgatgtgtcatctgaggtgttctagagtgtagttcttgctggacttgatttggtcttgtgtacatcatttatcagtcaatcaagtttgatggaactaaaaaaaaaaaaaaaa

SEQ ID NO: 5046 - protein, 113 aa, Triticum aestivum
  misc_feature: Ceres CLONE ID no. 1030678
  misc_feature: Ceres CDNA ID no. 24727412
  misc_feature (13)..(107): Pfam Name: Ribosomal_L7Ae PFAM Desc: Ribosomal protein L7Ae/L30e/S12e/Gadd45 family
  misc_feature: Homolog of GI Number: 2668750 NR Desc: ribosomal protein L30
  misc_feature: Homolog of GI Number: 50511371 NR Desc: putative 60S ribosomal protein L30
  misc_feature: Homolog of GI Number: 57471710 NR Desc: ribosomal protein L30
  misc_feature: Homolog of GI Number: 71042078 NR Desc: Chain C
  misc_feature: Homolog of GI Number: 2879811 NR Desc: ribosomal protein L30
  misc_feature: Homolog of GI Number: 55297497 NR Desc: putative ribosomal protein L30
  misc_feature: Homolog of GI Number: 34909198 NR Desc: putative 60S ribosomal protein L30
  misc_feature: Homolog of GI Number: 6984132 NR Desc: 60S ribosomal protein L30
  misc_feature: Homolog of GI Number: 12322482 NR Desc: 60S ribosomal protein L30
  misc_feature: Homolog of GI Number: 21593857 NR Desc: 60S ribosomal protein
MVTSTKKTKKSGDNINNKLQLVMKSGKYTLGYKTVLRTLRNSKAKLVILANNCPPLRKSEIEYYAMLAKITVHHYHGNNVDLGTACGKYFRVCCLSIIDPGDSDIINATPAGQ

SEQ ID NO: 5047 - DNA, 1118 bp, Triticum aestivum
  misc_feature: Ceres CLONE ID no. 1030722
  misc_feature: Ceres CDNA ID no. 25088173
  CDS (160)..(918): REFERENCED BY SEQ ID NO: 5048
agacacgttcaagtccagttcgtcggttggtggtggtggtggcgtgcgtgcctgggcgactctgcctcaaaccctcatcaggtccctcgatcgccacgctcgagttgattacagaactggagaagggtaaggtgagtataagcatcagaggtatatagcatgagtaataccagtggcgcacggcgtgccgcgaggaggcaatcgctggatggatctgctgataaagttgttgtggacttggatgcaagctcgccggtggcggggaaccatcatgggctctcggtcttccctggtgcacgcacatcgcctattgatgtggaggctctcgatgatgaagtgcaggcgctatcgccttcacaagtgcctcccccggggttgaacaggagaactagagggcaacctgtgacgccatttgctctggatgaagatgctgttctggaagagaattggagaattataaggcaatgtgcgacaccattttatctcaatgaagatgctgccatggaagagaatcggagaactagaagtcaatttttgacaccactttatctggatgaagatgctgccctggaagataatgcagctatgccttctcataacatgtggaacaaacgccaaagggttgcgcctttgatatgtctctccccggaaagggaagaagggtccagcctgcagtcgaacaatgcggtgcaaattagccaagagcctgctaaggtggtggttccaaaggaaccgaatttcacttgcccggtgtgccttaacaagctggtggagccttcgacaacaaaatgtggccatatcttctgcgccgagtgcatcaagcaagccatccagtttcagaagaaatgccccacttgccgcaaggccctgaggaagaacaacttccatcgtatttaccttccgaactcggatggttaaggtcagcagcggatcaatcgacaaagagtataatcacatagattatggttgctgaggaacctgtagcaggtgctcagatgaacaattgattaagttgactggtgtacgtatcattagatggttggtctatgtaactgagtttaagcttgaagctgagataaaacagtggatagcatcttcagtgaaaaaaaaaaaaaaaa

SEQ ID NO: 5048 - protein, 252 aa, Triticum aestivum
  misc_feature: Ceres CLONE ID no. 1030722
  misc_feature: Ceres CDNA ID no. 25088173
  misc_feature (196)..(233): Pfam Name: zf PFAM Desc: Zinc finger
  misc_feature: Homolog of GI Number: 6642645 NR Desc: putative RING zinc finger protein
  misc_feature: Homolog of GI Number: 28372918 NR Desc: At3g07200
  misc_feature: Homolog of GI Number: 50902376 NR Desc: P0678F11.16
  misc_feature: Homolog of GI Number: 54638303 NR Desc: GA10686
  misc_feature: Homolog of GI Number: 68372732 NR Desc:  similar to RING finger protein 4
  misc_feature: Homolog of GI Number: 68372735 NR Desc:  similar to RING finger protein 4
  misc_feature: Homolog of GI Number: 24644441 NR Desc: CG10981
  misc_feature: Homolog of GI Number: 16768306 NR Desc: GM01182p
  misc_feature: Homolog of GI Number: 50747306 NR Desc:  similar to RING finger protein 4
MSNTSGARRAARRQSLDGSADKVVVDLDASSPVAGNHHGLSVFPGARTSPIDVEALDDEVQALSPSQVPPPGLNRRTRGQPVTPFALDEDAVLEENWRIIRQCATPFYLNEDAAMEENRRTRSQFLTPLYLDEDAALEDNAAMPSHNMWNKRQRVAPLICLSPEREEGSSLQSNNAVQISQEPAKVVVPKEPNFTCPVCLNKLVEPSTTKCGHIFCAECIKQAIQFQKKCPTCRKALRKNNFHRIYLPNSDG

SEQ ID NO: 5049 - DNA, 605 bp, Triticum aestivum
  misc_feature: Ceres CLONE ID no. 1030933
  misc_feature: Ceres CDNA ID no. 25891604
  CDS (71)..(541): REFERENCED BY SEQ ID NO: 5050
aagcaggcagacagccaccacacgccgacgccaaacttgccaaccaatcgaaggctcgggaggagcgacgatggtccgccgctgcggctgctccggtgccatgctcctcgccctctcccttgccgtcctcctcgccgcctcggccgtccccggggccgccgggttccacctcggcggcgacgagagcggcctcgtgcggggcatgctcgccgccgtccgcgagcgggctgaggccgaggacgccgcgcgcttcgccgtcgccgagcataacaggaagcagggttctgcattggagtttacacgggttgtgaacgcgaaaaggcaagtggttgctgggaccttgcatgacctgatggtggaggtagtggattctggaaagaaaagtatgtacaaggcaaaggtctgggtgaagccgtggcaaaatttcaaggcggttgtcgagttccgtcatgcaggggacttccagtctgagtcttccgttgcttctgatggtagcactgggcaaggtattcttggtctcactagctttcttaacatctaaggtgatagtgttgaatgttatcaagtagtactatctagttctggaagcaaaaaaaaaaaaaaaa

SEQ ID NO: 5050 - protein, 156 aa, Triticum aestivum
  misc_feature: Ceres CLONE ID no. 1030933
  misc_feature: Ceres CDNA ID no. 25891604
  misc_feature (44)..(129): Pfam Name: Cystatin PFAM Desc: Cystatin domain
  misc_feature: Homolog of GI Number: 71061122 NR Desc: TPA: putative cystatin
  misc_feature: Homolog of GI Number: 18874516 NR Desc: cystatin
  misc_feature: Homolog of GI Number: 70907503 NR Desc: Fa
  misc_feature: Homolog of GI Number: 27752377 NR Desc: cysteine protease inhibitor cystatin
  misc_feature: Homolog of GI Number: 71794639 NR Desc: putative cystatin
  misc_feature: Homolog of GI Number: 65306458 NR Desc: cysteine proteinase inhibitor
  misc_feature: Homolog of GI Number: 15795168 NR Desc: cysteine proteinase inhibitor
  misc_feature: Homolog of GI Number: 71061120 NR Desc: TPA: putative cystatin
  misc_feature: Homolog of GI Number: 18158608 NR Desc: cysteine protease inhibitor CPI
  misc_feature: Homolog of GI Number: 11139270 NR Desc: PRLI
MVRRCGCSGAMLLALSLAVLLAASAVPGAAGFHLGGDESGLVRGMLAAVRERAEAEDAARFAVAEHNRKQGSALEFTRVVNAKRQVVAGTLHDLMVEVVDSGKKSMYKAKVWVKPWQNFKAVVEFRHAGDFQSESSVASDGSTGQGILGLTSFLNI

SEQ ID NO: 5051 - DNA, 554 bp, Triticum aestivum
  misc_feature: Ceres CLONE ID no. 1031052
  misc_feature: Ceres CDNA ID no. 25446483
  CDS (3)..(389): REFERENCED BY SEQ ID NO: 5052
atccggttggtcggtctccttccctccctccctatcgtctgtttccttcggccgaaaagctcccctgttccctgcgcctcctccgcctctcctcgtccccggcctccgctccgtctgctctcggtaattggatggcctcgcctaagacgccgacacagtccaccggcgcccaggaggaggccgcggcccgccagtcgctcatcgggatctcccagtccaccccggcggcgggagaagccctgagcgtcaagtcaccgaacggacgcatggaacacgggcaggacgacagcggggcggccgacaagtccaggtcgatgctcatgtccatctccaaccagtcgccggaggcgcgccaagccacgccgtgcccgcacagcaacgccgcttgagcttgagcttagccctgtaatagtactgattagccttgcagctgcagctgtcgatatgttgcggacccttgtgtggcgcccataataatcgccatgttgctgggttttcggtgatgaaatgatatgcagtgtggaatactactaattacaaaaaaaaaaaaaaaa

SEQ ID NO: 5052 - protein, 85 aa, Triticum aestivum
  misc_feature: Ceres CLONE ID no. 1031052
  misc_feature: Ceres CDNA ID no. 25446483
  misc_feature: Homolog of GI Number: 50928363 NR Desc: OSJNBa0086O06.9
  misc_feature: Homolog of GI Number: 72086012 NR Desc:  similar to Ser/Arg
  misc_feature: Homolog of GI Number: 23308459 NR Desc: At2g29210/F16P2.41
  misc_feature: Homolog of GI Number: 9843651 NR Desc: SRM102
  misc_feature: Homolog of GI Number: 3980411 NR Desc: putative proline
MASPKTPTQSTGAQEEAAARQSLIGISQSTPAAGEALSVKSPNGRMEHGQDDSGAADKSRSMLMSISNQSPEARQATPCPHSNAA

SEQ ID NO: 5053 - DNA, 1258 bp, Triticum aestivum
  misc_feature: Ceres CLONE ID no. 1031121
  misc_feature: Ceres CDNA ID no. 35383319
  CDS (26)..(1027): REFERENCED BY SEQ ID NO: 5054
ctcttcttgctcagcctcggacgcaatggccgccgttggtcttctcggcgtgtgtccagctccggcgcccggcggcccggcgagacaggcgggggcttcaccggccgcgggtagctggggctggcgcgcccgcccgcgctcccttcggtccgttccgccgcccggaggagcggggaggggcggggcaagggcggcgaggcccccgcgcgccgcgatgggcggcggcgacctgtacgccctcgacttcgacggcgtcttctgcgacagctgcggggagagctccctctccgccgtcaaggccgccaaggtgaggtggccgtgggtgtttgagcaggtcgacgccgccttggaggagtggattgtggagcagatgcacacccttcgtccagtgatagaaacaggatatgagaacctgttgcttgcaaggttgcttgttgagatcaagataccctctgttcgaaaatcatcagttgcagatgggcttagcatccaagatatattggagaactggtcaaaactgttgcccactctcatggatgagtggcaagaagatagggaatctcttgtagatctctttggccgtgtaagggatgactggcttgaaaatgatttgtctggctggataggtgctaacaggttttatcctgggacggctgatgcattaaagctttcaagctctgaactttacatagtcacaacaaaacagagtagatttactggagcgctactcaaagaattggctggagtagattttccctctgaaaggatatatggccttggcactggtccaaaggtaaaagttctccagcagttgcaggaaatgccacagcaccaaggtctaacacttcatttcatcgaggaccgactagcgactctgaagaacgtgatgaaagaaccagcgctggacaaatggaacctctacctggtgaaatggggatacaacacacagaaagagagggaagaagcaggggccataccaaggatccaactcattgatctcccagatttcagtaagcagctgaaataatcgactggcagtgacactcggacattgacgtgaccttcggtacattgtttttgttcgatgtacttgcaaacagcatgagatatacttgatgttttttccgattgtttgcatatttgtgatctggtttacttccagcacatagcacaactcaaacctggagcagagttgctgtcaaacatggcctaattatttttgcattatcagtgtccaaatgtaaaaaaaaaaaaaaaa

SEQ ID NO: 5054 - protein, 270 aa, Triticum aestivum
  misc_feature: Ceres CLONE ID no. 1031121
  misc_feature: Ceres CDNA ID no. 35383319
  misc_feature: Homolog of GI Number: 45507433 NR Desc: COG1201: Lhr
  misc_feature: Homolog of GI Number: 23124072 NR Desc: COG0546: Predicted phosphatases
MGGGDLYALDFDGVFCDSCGESSLSAVKAAKVRWPWVFEQVDAALEEWIVEQMHTLRPVIETGYENLLLARLLVEIKIPSVRKSSVADGLSIQDILENWSKLLPTLMDEWQEDRESLVDLFGRVRDDWLENDLSGWIGANRFYPGTADALKLSSSELYIVTTKQSRFTGALLKELAGVDFPSERIYGLGTGPKVKVLQQLQEMPQHQGLTLHFIEDRLATLKNVMKEPALDKWNLYLVKWGYNTQKEREEAGAIPRIQLIDLPDFSKQLK

SEQ ID NO: 5055 - DNA, 831 bp, Triticum aestivum
  misc_feature: Ceres CLONE ID no. 1031152
  misc_feature: Ceres CDNA ID no. 40351555
  CDS (139)..(585): REFERENCED BY SEQ ID NO: 5056
aaatcctccgactccttctcgccccctcttgccccgtggtccccaaccgccgtccgccgccgcagaggggagaggcggccgccgcccaccgccgcagcaccgccggccccgtcgcccccgccggtcgggtttgatcccatggcgtccaagaggatcctcaaggagctcaaggacctgcagaaggaccctcccacctcatgcagcgcaggtcctgtaggtgaggacatgttccactggcaggccactatcatgggaccctcggacagcccgttcaccggtggcctatttttggtgaacattcatttcccaccggattaccccttcaagcccccgaaggtctctttccgcaccaaggtgttccacccaaacatcaacagcaacggcagcatttgccttgacattctcaaggaacagtggagcccggctttgaccatatcaaaggtcctgctgtcaatctgttcgttgctgacggacccgaaccccgatgatcctctggtgcccgagatcgctcacatgtacaagactgatagggccaagtatgagtccacggcgcgctcctggacacagaagtacgccatgggctagagcttgacggccagctggtgaccatggatgcgccgagccagaaccgttatcacctaaataaccagccaaaagtatcaccccaccccgtgacgaagtgaatggacttttgaggccgtcgtgcccctgttgaactcgtatgaatgtactcttgccatgtcaagtccgttgggtctgggtagtctgttctacctgacgtttcgttatccgttaagttaaatctctgtcgtatcaaaaaaaaaaaaaaaa

SEQ ID NO: 5056 - protein, 148 aa, Triticum aestivum
  misc_feature: Ceres CLONE ID no. 1031152
  misc_feature: Ceres CDNA ID no. 40351555
  misc_feature: The plant produces a reduced number of seeds.
  misc_feature: Useful for biocontainment applications
  misc_feature (5)..(142): Pfam Name: UQ_con PFAM Desc: Ubiquitin
MASKRILKELKDLQKDPPTSCSAGPVGEDMFHWQATIMGPSDSPFTGGLFLVNIHFPPDYPFKPPKVSFRTKVFHPNINSNGSICLDILKEQWSPALTISKVLLSICSLLTDPNPDDPLVPEIAHMYKTDRAKYESTARSWTQKYAMG

SEQ ID NO: 5057 - DNA, 943 bp, Triticum aestivum
  misc_feature: Ceres CLONE ID no. 1031177
  misc_feature: Ceres CDNA ID no. 25446670
  CDS (94)..(738): REFERENCED BY SEQ ID NO: 5058
tcctcctagtagctcccaaagacgcaagaagagctgagctgagcaaagcaaagcagagcagagcgctcccctccggccggctgacacgctgccatggcgatgagtgacactggctcgagcttcgccaactggaccaacgacctctaccgctacgacacgcccagcctgggcggcgccgcggcggactcgacgatcgtcgccgcctccgcgacgccgacgagcccggcgtcggcggggtccggcgacgggagcccgtcccgggcggcgggcggggccctgggcccgcgggtggcgggcaagccggcggcgaggaagcgggcccgggcgtcgcgccgggcgcccgtgacgctgctcaacacggacgccagcaacttccgcgccatggtgcagcagttcaccggcatcccctccgcccccgccggcccgttctccggcacgccggtcatcagcttcggcggggcatccggctacggcttcgcgccgccgccgccgcagcagcagcagcagccggcggccgccctgtccttcgaccaccaccacctccaccagcggcagcagtacaccggcgcggcattcggctacggcggcagccacctgcagcactccctctccggcggcgacgcgttcgcgcacgggctcggcgccgcggaggaccggatgctcctccagagcatgcaggcggcgcagatgcccggggcgcgcgccgctcacaacagcgccaatggctactttgcttgatcgatcaagtgattattaactaagttgcatgcacggagtgaaagattttagaaacgcggagaagaattggcgtccgatcgagcttctgtttgaatttcttggcttgtttgttcactgttcagggtagttcatccatcacatggagcgctatatgtaaatatttgaacggatatttggattttgcctgtcaaaaaaaaaaaaaaaa

SEQ ID NO: 5058 - protein, 214 aa, Triticum aestivum
  misc_feature: Ceres CLONE ID no. 1031177
  misc_feature: Ceres CDNA ID no. 25446670
  misc_feature (80)..(110): Pfam Name: VQ PFAM Desc: VQ motif
  misc_feature: Homolog of GI Number: 58381251 NR Desc: ENSANGP00000017440
  misc_feature: Homolog of GI Number: 2078483 NR Desc: antifreeze glycopeptide AFGP polyprotein precursor
  misc_feature: Homolog of GI Number: 29250446 NR Desc: GLP_39_87477_88058
  misc_feature: Homolog of GI Number: 13592175 NR Desc: ppg3
  misc_feature: Homolog of GI Number: 7248459 NR Desc: arabinogalactan protein
  misc_feature: Homolog of GI Number: 28972153 NR Desc: mKIAA0324 protein
  misc_feature: Homolog of GI Number: 11359723 NR Desc: proteophosphoglycan
  misc_feature: Homolog of GI Number: 55770203 NR Desc: putative proteophosphoglycan
MAMSDTGSSFANWTNDLYRYDTPSLGGAAADSTIVAASATPTSPASAGSGDGSPSRAAGGALGPRVAGKPAARKRARASRRAPVTLLNTDASNFRAMVQQFTGIPSAPAGPFSGTPVISFGGASGYGFAPPPPQQQQQPAAALSFDHHHLHQRQQYTGAAFGYGGSHLQHSLSGGDAFAHGLGAAEDRMLLQSMQAAQMPGARAAHNSANGYFA

SEQ ID NO: 5059 - DNA, 604 bp, Triticum aestivum
  misc_feature: Ceres CLONE ID no. 1031204
  misc_feature: Ceres CDNA ID no. 40351556
  CDS (248)..(400): REFERENCED BY SEQ ID NO: 5060
caagaatgatgtaagaaatgcctctttcagctcagaaaacttcaaggaaaaatacgggctccacaatatcgatctctctccaagagttgctactaccaactttcagggtgtaaaggaagaaacggctaaaacctcggaacctctggatctaaatactaagccacaacttccagaatgccatggtaaagctggagctgccaagccaaacttatccccaacaacttgtttggaggataaaagtgagccaatggcatcaggtcaaactgaaaacaacaatgtggttaaggcacaaaacctcaagagccctaagcatgcgcatgaagcatcgaagggggcaaatctgtggggcagcctgaaatcctttgctggtggactcaggatcttttggaacagtctgtaaattcatatggtctggcttgctagatgtgattacatataggattcacattgttttattattcttttcatgacctgaaacacaattgtacagtactccaggaggaccattccttccatttttcagatgatactcctgtcagttctacaagtcacagtagaagttggagtactctgtttatcgacccccccaaaaaaaaaaaaaaaa

SEQ ID NO: 5060 - protein, 50 aa, Triticum aestivum
  misc_feature: Ceres CLONE ID no. 1031204
  misc_feature: Ceres CDNA ID no. 40351556
MASGQTENNNVVKAQNLKSPKHAHEASKGANLWGSLKSFAGGLRIFWNSL

SEQ ID NO: 5061 - DNA, 698 bp, Triticum aestivum
  misc_feature: Ceres CLONE ID no. 1031231
  misc_feature: Ceres CDNA ID no. 40351557
  CDS (69)..(389): REFERENCED BY SEQ ID NO: 5062
agatcccagtcagatagaactagaaggaggggcggcggcggagccaaagaaggctttgctcgcagaccatggagcctagaaagacgaatggcaaaaaggagttcatgatagagtatcatcccatatccgtcgtcgagaaaggcactccgtcggtggatgaggcgcgcttcatcagaaaatatatcttggcggcttttatagagcacaccttcaaccttttatttgtggcgactcttgccggctatatctatctgatgtttggtgccctcatgtactgcaaactgttgtatgcggtctttgcaattcttcttatgtcgccatactttatagtgatgctccatgcgttacccttattgaaggggttttacaaagagaggtatgccacgtaggcagctgatgctgacttgtggcgtgtgccagctacgaagactataatgccaagcatgaataataggcgcaataccaggtagttccgaggtgaccaggtgcccttcattgattatgttctaaggtttttgtgcaccatagaacatggaactggtggtgatttttattgtttttatggtgctacctctgagaaacggaaccttattatttgagttcgtcggttgaaaacttcccttgtaaatactgaatcctatttgcctatggtaatgtcattgaacactagcctattgtgagcaaaaaaaaaaaaaaaa

SEQ ID NO: 5062 - protein, 106 aa, Triticum aestivum
  misc_feature: Ceres CLONE ID no. 1031231
  misc_feature: Ceres CDNA ID no. 40351557
MEPRKTNGKKEFMIEYHPISVVEKGTPSVDEARFIRKYILAAFIEHTFNLLFVATLAGYIYLMFGALMYCKLLYAVFAILLMSPYFIVMLHALPLLKGFYKERYAT

SEQ ID NO: 5063 - DNA, 752 bp, Triticum aestivum
  misc_feature: Ceres CLONE ID no. 1031250
  misc_feature: Ceres CDNA ID no. 25892351
  CDS (68)..(589): REFERENCED BY SEQ ID NO: 5064
atacatagcagacctgccgaccaagaacctcttacatcagtttcgttccttgcactgtctgctggcaatggcggaggccaaggctgcacctgcgatggtgaaggaggccgagggcagcggtaggaggaagacggtggtgctggtcgccgtggacgacagcgaccacggctaccgcgcgctggagtgggccgtgcgtcacgtggcgacggccggcgtggctgccgagctcgtcgtcgtccacgccaagccccccgcgtcctccgtcgtcaccttcggcagccccgccgccgccggggacgtggtgagggtcgtggacgcggacctgcgcaagagggccgaggacgtcgtcgacagggcgcgccgcctatgcgtcgccaacacggtgcatggtctgatagaggtgatggaaggagaggcgaggtacgtgctctgcgacgccgtcgacaagcaccacgccgatctgctcgtcgtcggcagccatggctacggcgccatcaagagggcatttctcgggagcgtgagcgactactgcgcccatcacgcgcactgctccgtcatgatagtcaagcagcccaagtccaagaaatgaccgcgtcattaaggcgccgagcctgttgtatctcttcgtaaaatcctgagtcctgtgtgcgtgcaagtgatgtcaaacagatatatgtaaacagtgtcgcgaaaactgaaccaatacctcaaatccaggttatatttccagcattgcaaaaaaaaaaaaaaaa

SEQ ID NO: 5064 - protein, 164 aa, Triticum aestivum
  misc_feature: Ceres CLONE ID no. 1031250
  misc_feature: Ceres CDNA ID no. 25892351
  misc_feature (12)..(158): Pfam Name: Usp PFAM Desc: Universal stress protein family
  misc_feature: Homolog of GI Number: 55792398 NR Desc: universal stress protein
  misc_feature: Homolog of GI Number: 20067187 NR Desc: putative universal stress protein USP1
  misc_feature: Homolog of GI Number: 50939901 NR Desc: universal stress protein USP1
  misc_feature: Homolog of GI Number: 77556730 NR Desc: universal stress protein family
  misc_feature: Homolog of GI Number: 38016525 NR Desc: fiber protein Fb19
  misc_feature: Homolog of GI Number: 46949192 NR Desc: putative universal stress protein
  misc_feature: Homolog of GI Number: 18399413 NR Desc: universal stress protein
  misc_feature: Homolog of GI Number: 52077479 NR Desc: putative ER6 protein
MVKEAEGSGRRKTVVLVAVDDSDHGYRALEWAVRHVATAGVAAELVVVHAKPPASSVVTFGSPAAAGDVVRVVDADLRKRAEDVVDRARRLCVANTVHGLIEVMEGEARYVLCDAVDKHHADLLVVGSHGYGAIKRAFLGSVSDYCAHHAHCSVMIVKQPKSKK

SEQ ID NO: 5065 - DNA, 834 bp, Triticum aestivum
  misc_feature: Ceres CLONE ID no. 1031310
  misc_feature: Ceres CDNA ID no. 40351558
  CDS (3)..(464): REFERENCED BY SEQ ID NO: 5066
gacaaatcgcacgggcggcgcgcggcctagctgtattgcactgtccaccaccgccagcgtcaaatatctccggcgagagcttcagcgatatttatttccggagagcttgccgggaagggggaggaggaggagcggcggcggcggcggcatggtgttcttctgcttcctggtggaccagcggcggaaggtgcggagcagcaagccggcggcggggatctgctcgcgctgcggcggctgcgccagcgtggcggacatggagacggccacgcggctctgctacctcctcaccgtgcaccgcgtcacctggcgcgccatcatctgcaccttctgcggcgccatgctcaagtcctaccgccactaccgcctctactaggccggcggccaccgtctccacccgcgtcccgtttcctgacggccggtgcagcgtgcatgtgccagctagttttgtttgctctgcttattaatttgtgtttaaggcgtgctctctagctagcttggagattgttgcactggatggattcttgttatcttatgtacatatgttatgcaaggttggattaccttctcttctaaattggtatctccgtccgtggaggccaataggattactatttagtagtactacgatctcatgcaagagagaagggagaagtgtgaggatctttgttatccatccctaattagctcctcttgtaatagtagtatggatgttcatacatttcccctctcctctccacggcattaacgtgtgatttgattcctcacacttttcatcttcttcttttttgttgttgagaaaatcacacctttcatctgagaaaaaaaaaaaaaaaa

SEQ ID NO: 5066 - protein, 74 aa, Triticum aestivum
  misc_feature: Ceres CLONE ID no. 1031310
  misc_feature: Ceres CDNA ID no. 40351558
MVFFCFLVDQRRKVRSSKPAAGICSRCGGCASVADMETATRLCYLLTVHRVTWRAIICTFCGAMLKSYRHYRLY

SEQ ID NO: 5067 - DNA, 641 bp, Triticum aestivum
  misc_feature: Ceres CLONE ID no. 1031347
  misc_feature: Ceres CDNA ID no. 25891886
  CDS (65)..(481): REFERENCED BY SEQ ID NO: 5068
aatcacagacgcatctttccattaaacaatttaccctctcttcaccaaactcaatcaatcgataatggcacccaaggcggcagagaagaaaccggcggagaagaagccagccgagaaatcaccggcggagaagcgtccaaaggcggagaagaagatctcgaaggaaggaggaagcgacaagaagaagaagaaatcgaagaagagcgtggagacgtacaagatctacatcttcaaggtcctgaagcaggttcatcccgatatcggaatctcgggtaaagcgatggggatcatgaacagtttcatcaacgacatattcgagaaactggcgcaggaatcatcgaagctcgctaggtacaacaagaagccgacgattacgtcgagggagatccagacggcggttaggcttgtgttgcccggagagctcgcgaaacacgccgtctctgaggggactaaggcggttaccaaattcacaagcacttagggattgaaatgtttaggttttaattgttctttggttgatgaatcgattgtattcgattagtgagatcatttgaatgaacagctttctttttaatgaataacgattctctatcaatatgattcagatttaattctacagttaaacaaaaaaaaaaaaaaaa

SEQ ID NO: 5068 - protein, 138 aa, Triticum aestivum
  misc_feature: Ceres CLONE ID no. 1031347
  misc_feature: Ceres CDNA ID no. 25891886
  misc_feature: No seed is being produced by the plant
  misc_feature: The plant flowers significantly late compared to wild-type.
  misc_feature: Useful for biocontainment applications
  misc_feature: Useful for making plants with modulated flowering time
  misc_feature (45)..(117): Pfam Name: Histone PFAM Desc: Core histone H2A/H2B/H3/H4
  misc_feature: Homolog of GI Number: 6729516 NR Desc: histone H2B
  misc_feature: Homolog of GI Number: 21592734 NR Desc: putative histone H2B
  misc_feature: Homolog of GI Number: 7635498 NR Desc: histone H2B
  misc_feature: Homolog of GI Number: 30024116 NR Desc: putative histone H4
  misc_feature: Homolog of GI Number: 3021489 NR Desc: histone H2B
  misc_feature: Homolog of GI Number: 2558962 NR Desc: histone H2B1
  misc_feature: Homolog of GI Number: 21536602 NR Desc: histone H2B
  misc_feature: Homolog of GI Number: 3021483 NR Desc: histone H2B
  misc_feature: Homolog of GI Number: 82400146 NR Desc: histone H2B
  misc_feature: Homolog of GI Number: 2746719 NR Desc: histone H2B
MAPKAAEKKPAEKKPAEKSPAEKRPKAEKKISKEGGSDKKKKKSKKSVETYKIYIFKVLKQVHPDIGISGKAMGIMNSFINDIFEKLAQESSKLARYNKKPTITSREIQTAVRLVLPGELAKHAVSEGTKAVTKFTST

SEQ ID NO: 5069 - DNA, 1187 bp, Triticum aestivum
  misc_feature: Ceres CLONE ID no. 1031352
  misc_feature: Ceres CDNA ID no. 25446871
  CDS (2)..(997): REFERENCED BY SEQ ID NO: 5070
atccacccatctctttacgcggccggcccgcctaactctcaccttgccgctgcgggacgcttgctccgccccgaagcttcccttccccgatcccccgccgcggctgtttccgtcgccggtcaagatgatgtccggcggtggctactccgccctcgacgatcccaaagcctccggatccgtcccggcggcgacggggccagatccgcagaccatcaagttcaccgagtccaacctccagaccttcccaccctcagaagccaagggcaagatctctggcgcctaccgcccgcccactgactccgacgacaccttctcgtccaaggttggagggggaggcggaggcaggggtagcgatggtgggtcggacgatgccgcgcagggcggctggttccggatgttctcggtagcggcctacaagccctacttcgacgttgacacgtccgatgtcgtggagaggatctgggagtcggtcttccccttccgcggcaacttcacagagaagacttccgacaaacccgacctgtatgggccattctggacgtgcaccaccctgatttttgttgctgcttccattgccacgtttgtcacctacctttcccacaaatggcacaagaaagagtggacctatgatattaacctggttacatggtctgctggcttattctatggctatgtgacatttgttccccttgggttatatgtcattcttaagtacttctcagcacctgctggactcgtgcaattgtggtgcctgtatgggtactctttgttcatcttcattccagcctcgcttctgtcaattgtgccaatagaaatattcagatgggttattgctggtgtcgctgggtttatgtctgctaccttcgtcgctgtcaatctccgtgcccacatcttaaactctggggagcggtggtttctgatcgttgcagggatattcttgttgcagttgggattggctgttttgctgaaactttatttctttacgataactgtatagggagatggggctgcttcttgtattagtcagaaatgagcatgcaggagtcgattcattgatgtaattttccaggtatacatcccaccttacatgtgacactcaggaacgaacacataccacttcgttagcctctgaaatcacagaaatggcaaaatgtcctttggttaaaaaaaaaaaaaaaaaaaaaaaa

SEQ ID NO: 5070 - protein, 290 aa, Triticum aestivum
  misc_feature: Ceres CLONE ID no. 1031352
  misc_feature: Ceres CDNA ID no. 25446871
  misc_feature (101)..(266): Pfam Name: Yip1 PFAM Desc: Yip1 domain
  misc_feature: Homolog of GI Number: 34912560 NR Desc: P0410E03.18
  misc_feature: Homolog of GI Number: 30690667 NR Desc: integral membrane Yip1 family protein
  misc_feature: Homolog of GI Number: 38604050 NR Desc: At5g27490
  misc_feature: Homolog of GI Number: 53749357 NR Desc: unknow protein
  misc_feature: Homolog of GI Number: 54642745 NR Desc: GA18325
  misc_feature: Homolog of GI Number: 18859855 NR Desc: CG4645
  misc_feature: Homolog of GI Number: 51571929 NR Desc: zgc:91977
  misc_feature: Homolog of GI Number: 40786465 NR Desc: similar to RIKEN cDNA C030002N13
  misc_feature: Homolog of GI Number: 17148479 NR Desc: AK000823
MMSGGGYSALDDPKASGSVPAATGPDPQTIKFTESNLQTFPPSEAKGKISGAYRPPTDSDDTFSSKVGGGGGGRGSDGGSDDAAQGGWFRMFSVAAYKPYFDVDTSDVVERIWESVFPFRGNFTEKTSDKPDLYGPFWTCTTLIFVAASIATFVTYLSHKWHKKEWTYDINLVTWSAGLFYGYVTFVPLGLYVILKYFSAPAGLVQLWCLYGYSLFIFIPASLLSIVPIEIFRWVIAGVAGFMSATFVAVNLRAHILNSGERWFLIVAGIFLLQLGLAVLLKLYFFTITV

SEQ ID NO: 5071 - DNA, 1134 bp, Triticum aestivum
  misc_feature: Ceres CLONE ID no. 1031520
  misc_feature: Ceres CDNA ID no. 35389312
  CDS (65)..(1003): REFERENCED BY SEQ ID NO: 5072
atccattcttcctccacctccttcaggcttcgaccagatcacagctctccagttactaccagccatggctgccaagaccacctcatgcttcaccttcctcaaggaagcgctggtcctccccacgcgaaaccccaagctcttcgcccccatcctcatctttgtggccgccatcgccttcctcatccccgcggtcaacgtggtcttcatccagccgctcaccgccgagatgctgcaccacgtcgccgagatgcagaccaccgacccctcgagcgccgagtacgccaggctcctggaggagatacgtcaggaggccagggagctcgtcctcatcgccgtcgccctcacggtcgtcaccctgccgctcgtcttcgccaagcagatcctcgccttctccgcggcctccacgacgtactccggcgaccgctactccctcgcggagctcctccgcagggtgaccaagtgggccaacctgaggggccctctcgtcaccgtgggcgtggtcaccgcgctccagctcacgttcatggcgctcctgggcgtctacctctccgccgtcatgcgccacgcgggggtgctctccgtgcaaggcgcggtcttcgtcctcgcctttctcgccttcatgtacttcggggtcgtggccgtggtgggcgtcgccgtgtcggtggccgacgaggggtgccgcggcgtgcgcgcgctcgggcgggcgtggcggctcatgacgcgggtgaggcggaaggagggcgccctgctggcggcggtgatggtcctcctgccgaccgttgtgagctcggtgtacgcgctcgcgctcacgtacgccaggaagagcatggcggtggggctgtacctgctgtttgggtacgctcttctgtctgctgcggtgcaggtgttctacatcgcggcggctacggtgtactactatgaggccatggagagcaaagaggtggtggtgacttttcatggctatgccaagataccttccggtgagggtgaggcaaatgtctgattgatcggccggccccgtataatgagtcatgtacttgtggtgcttcctagctgtgtgataatagtctttgtactacgtatacatacataagagtaaaaatataagtgtaggtcaacaaaaaaaaaaaaaaa

SEQ ID NO: 5072 - protein, 312 aa, Triticum aestivum
  misc_feature: Ceres CLONE ID no. 1031520
  misc_feature: Ceres CDNA ID no. 35389312
  misc_feature: Homolog of GI Number: 67987177 NR Desc: 4Fe
  misc_feature: Homolog of GI Number: 11359723 NR Desc: proteophosphoglycan
  misc_feature: Homolog of GI Number: 72547041 NR Desc: proteophosphoglycan ppg1
  misc_feature: Homolog of GI Number: 72547018 NR Desc: proteophosphoglycan ppg3
  misc_feature: Homolog of GI Number: 72547036 NR Desc: proteophosphoglycan 5
  misc_feature: Homolog of GI Number: 72547023 NR Desc: proteophosphoglycan ppg4
  misc_feature: Homolog of GI Number: 5420387 NR Desc: proteophosphoglycan
  misc_feature: Homolog of GI Number: 66776103 NR Desc: LigA
  misc_feature: Homolog of GI Number: 50933659 NR Desc: putative high
  misc_feature: Homolog of GI Number: 53793516 NR Desc: putative beta
MAAKTTSCFTFLKEALVLPTRNPKLFAPILIFVAAIAFLIPAVNVVFIQPLTAEMLHHVAEMQTTDPSSAEYARLLEEIRQEARELVLIAVALTVVTLPLVFAKQILAFSAASTTYSGDRYSLAELLRRVTKWANLRGPLVTVGVVTALQLTFMALLGVYLSAVMRHAGVLSVQGAVFVLAFLAFMYFGVVAVVGVAVSVADEGCRGVRALGRAWRLMTRVRRKEGALLAAVMVLLPTVVSSVYALALTYARKSMAVGLYLLFGYALLSAAVQVFYIAAATVYYYEAMESKEVVVTFHGYAKIPSGEGEANV

SEQ ID NO: 5073 - DNA, 857 bp, Triticum aestivum
  misc_feature: Ceres CLONE ID no. 1031564
  misc_feature: Ceres CDNA ID no. 25892801
  CDS (82)..(597): REFERENCED BY SEQ ID NO: 5074
aaaacttcatctttcaaagccgttctctctctctctctctctagaactggatagaaagattgactctttatattcttgacgatggatttgacgtggttgagtgctctaatcgttggagctgcacttggattctgcattggcactcgtcgttccaagcctcctcctgttgaggctgctgttgatggagatagcaccaaactgattccaaagagtcctctcgagattgagaaactcgctgatatcctcgatgatttcaaaatggttttggttgtgaggaatgatcttaaaatgggtaaaggcaagattgctgcacaatgcagtcatgcaactttaggtttgtacaaaaagctcgttcgtcgtgctccaaaagcattggactgctgggaggagtgtgcacaaccaaaagttgttgtgaaaatcgagaccgaggatgagatgctagaattgcaagaaagagccaaatcccttaaactgcctacccatatcaccatcgatgctggaaggactcaaatcgctccaaattcaaggacagttatggctattcttggaccagtccaagttgttgatgaagtaacaggtggactgaagcttctttaacagcttcaaatttctatgttaaatctcttctatcggatctctcaaatggatcaaaaagaagggagagacttgaactcaaccttctctccagatagaatctgtgagaaatttgaagttgttctgtttatctcattcctgatgatgacgaaaaatcccattttaaagcaattttcccaacttttcatgaacatatacaatttgtctctctgggatcagattttgattaaccaatggtggtttaaataaaaaaaaaaaaaaaa

SEQ ID NO: 5074 - protein, 171 aa, Triticum aestivum
  misc_feature: Ceres CLONE ID no. 1031564
  misc_feature: Ceres CDNA ID no. 25892801
  misc_feature: Homolog of GI Number: 50929249 NR Desc: OSJNBa0060D06.11
  misc_feature: Homolog of GI Number: 62078455 NR Desc: Bcl
  misc_feature: Homolog of GI Number: 62860262 NR Desc: LOC549411
  misc_feature: Homolog of GI Number: 56205527 NR Desc: peptidyl
  misc_feature: Homolog of GI Number: 24644665 NR Desc: CG1307
  misc_feature: Homolog of GI Number: 21483470 NR Desc: LD46144p
  misc_feature: Homolog of GI Number: 66849417 NR Desc: UPF0099 domain protein
  misc_feature: Homolog of GI Number: 46440071 NR Desc: potential peptidyl
  misc_feature: Homolog of GI Number: 28828265 NR Desc: similar to Hypothetical ORF
MDLTWLSALIVGAALGFCIGTRRSKPPPVEAAVDGDSTKLIPKSPLEIEKLADILDDFKMVLVVRNDLKMGKGKIAAQCSHATLGLYKKLVRRAPKALDCWEECAQPKVVVKIETEDEMLELQERAKSLKLPTHITIDAGRTQIAPNSRTVMAILGPVQVVDEVTGGLKLL

SEQ ID NO: 5075 - DNA, 716 bp, Triticum aestivum
  misc_feature: Ceres CLONE ID no. 1031662
  misc_feature: Ceres CDNA ID no. 40351559
  CDS (66)..(518): REFERENCED BY SEQ ID NO: 5076
tccctcaccctccctcgcagtccaaacccaatcagaaatctcaagcttagcacagaagcaaaacaatggcggagcagaccttcatcatgatcaagcccgacggcgtccagaggggcctcatcggcgaggtcatcagccgcttcgagaagaagggcttctacctcaaaggtttgaagctccagaacgtggagaagtcgttcgccgagcagcactacgccgatctgtcctccaagcccttcttcgctgggctcgtggagtacatcgtctccggcccggtcgtcgctatggtctgggagggcaagagcgtcgtctccactggacgcaagatcattggcgccaccaaccccctggcctctgagcccggcaccatccgtggtgacttcgccgtcgacatcggcaggaacgtcatccatggaagcgactcagttgagagtgccaggaaggagatcgccctgtggttccctgagggcattgccgagtggaggagcagccagcacaactggatctacgaggcctaagatgtgtcatgagtggttgagtgcaggtttcgcaaagcatctaccaaactagtctttggttgtttacagttttgagatttgtatctcgggaaccttgtttgtgtgaactgaagttatctccttgtgcttgagcatgcaagcggtatctgctgctctatatttactatatggtattgagttgcaaaaaaaaaaaaaaaa

SEQ ID NO: 5076 - protein, 150 aa, Triticum aestivum
  misc_feature: Ceres CLONE ID no. 1031662
  misc_feature: Ceres CDNA ID no. 40351559
  misc_feature (3)..(136): Pfam Name: NDK PFAM Desc: Nucleoside diphosphate kinase
MAEQTFIMIKPDGVQRGLIGEVISRFEKKGFYLKGLKLQNVEKSFAEQHYADLSSKPFFAGLVEYIVSGPVVAMVWEGKSVVSTGRKIIGATNPLASEPGTIRGDFAVDIGRNVIHGSDSVESARKEIALWFPEGIAEWRSSQHNWIYEA

SEQ ID NO: 5077 - DNA, 445 bp, Triticum aestivum
  misc_feature: Ceres CLONE ID no. 1031666
  misc_feature: Ceres CDNA ID no. 25446484
  CDS (78)..(260): REFERENCED BY SEQ ID NO: 5078
ccgaaaccctagcccttcttccgccgccgccgaaccccagcgcaccgcaggaggagccgcagcagaagggatcggagatggccaagtcgaagaaccacacggcgcacaaccagtcgtacaaggcgcacaggaacggcattaagaagcccaagcgccagcgccaggcctccaccaaggggatggacccgaagttcctgaggaacctgaggtactcgaggaagcacaacgtcaaggctggtgagggagaggttgagaagtaagatggatgagtttctggtggtcgatatgtctcgtgtatcgctaggatctactgttttgaacttaatccagtgttctgtatgaccaaagaatatctatgtcgttacctaagttttgtcatgctgctggattggaaatgatatttgcagctttatgagaacttctttatctataaaaaaaaaaaaaa

SEQ ID NO: 5078 - protein, 60 aa, Triticum aestivum; identical to SEQ ID NO: 3622
  misc_feature: Ceres CLONE ID no. 1031666
  misc_feature: Ceres CDNA ID no. 25446484
  misc_feature (4)..(42): Pfam Name: Ribosomal_L29e PFAM Desc: Ribosomal L29e protein family
  misc_feature: Homolog of GI Number: 34905656 NR Desc: P0475H04.11
  misc_feature: Homolog of GI Number: 30679956 NR Desc: 60S ribosomal protein L29
  misc_feature: Homolog of GI Number: 7959366 NR Desc: ribosomal protein L29
  misc_feature: Homolog of GI Number: 7549643 NR Desc: ribosomal protein L29
  misc_feature: Homolog of GI Number: 7549645 NR Desc: ribosomal protein L29
  misc_feature: Homolog of GI Number: 12231298 NR Desc: ripening regulated protein DDTFR19
  misc_feature: Homolog of GI Number: 27764982 NR Desc: At3g06680
  misc_feature: Homolog of GI Number: 55622000 NR Desc:  similar to 60S ribosomal protein L29
  misc_feature: Homolog of GI Number: 55959755 NR Desc: OTTHUMP00000017090
  misc_feature: Homolog of GI Number: 73954560 NR Desc:  similar to 60S ribosomal protein L29

SEQ ID NO: 5079 - DNA, 1006 bp, Triticum aestivum
  misc_feature: Ceres CLONE ID no. 1031695
  misc_feature: Ceres CDNA ID no. 35383320
  CDS (53)..(898): REFERENCED BY SEQ ID NO: 5080
atatctcaccccccgctccattgatagttcgtctcatcttagcttaatatccatggcagcaaagatggcgaagaacgtggacaagccactcttcacggcgacgttcaacgtccaggccagctccaccgactatgtcaccttcatcaccggcatccgcaacaagctccgcaacccggggcaatcctcccacaaccgccccgtgctaccgccgatcgagcccaacgtcccgccgagcaggtggttccacatcgtgctcaagacatcgccggccaacaccgggctcacactcgccacccgcgccgacaacctctattgggagggcttcaagagcagcgacggcacctggtgggagctcacccccggccttatccccggtgccacctatgtcgggtttggcggcacctaccgcgacctcctcggcgacaccgacaagctgaccaacgttgccctcggccggcagcagatggccgacgcggtgactgcgctccacgggcgcaccaaggccgacaagacctccggcccgaagcagcagcaggcgagggaagcggtgacgacgctgctcctcatggtgcacgaggccacgcggttccagaccgtgtcggggttcgtggctggcctgctgcaccccaagacggtggagaagaagagcgggaagatctccaacgagctaaaggcccaggtgaacgggtggcaggacctgtccgaagcgctgttgaagacggatgcgaagcccccggcgggaaagccgccagcaaagttcacgccgatcgagaagatgggtgtgaggacggcagagcaggcggccgccaccctggggatcctactgttcgtccaggtgcccggtgggatgacagtggctcaggcgctggagctgtttcataagagtggggggaaataggtagttgtgcaggtatatctgcatgggtatcgtataagtcaaataaacatgtcacagagtgactaaatgatataaataaataaacatgtcgcaaaaaaaaaaaaaaaa

SEQ ID NO: 5080 - protein, 277 aa, Triticum aestivum
  misc_feature: Ceres CLONE ID no. 1031695
  misc_feature: Ceres CDNA ID no. 35383320
  misc_feature (5)..(261): Pfam Name: RIP PFAM Desc: Ribosome inactivating protein
  misc_feature: Homolog of GI Number: 132577 NR Desc: Protein synthesis inhibitor I
  misc_feature: Homolog of GI Number: 132580 NR Desc: Protein synthesis inhibitor II
  misc_feature: Homolog of GI Number: 7442154 NR Desc: protein synthesis inhibitor
  misc_feature: Homolog of GI Number: 479388 NR Desc: tritin
  misc_feature: Homolog of GI Number: 167034 NR Desc: ribosome
  misc_feature: Homolog of GI Number: 7331166 NR Desc: ribosome
  misc_feature: Homolog of GI Number: 496164 NR Desc: ribosome
  misc_feature: Homolog of GI Number: 58803213 NR Desc: ribosome
  misc_feature: Homolog of GI Number: 132600 NR Desc: Ribosome
  misc_feature: Homolog of GI Number: 132589 NR Desc: Ribosome
MAKNVDKPLFTATFNVQASSTDYVTFITGIRNKLRNPGQSSHNRPVLPPIEPNVPPSRWFHIVLKTSPANTGLTLATRADNLYWEGFKSSDGTWWELTPGLIPGATYVGFGGTYRDLLGDTDKLTNVALGRQQMADAVTALHGRTKADKTSGPKQQQAREAVTTLLLMVHEATRFQTVSGFVAGLLHPKTVEKKSGKISNELKAQVNGWQDLSEALLKTDAKPPAGKPPAKFTPIEKMGVRTAEQAAATLGILLFVQVPGGMTVAQALELFHKSGGK

SEQ ID NO: 5081 - DNA, 1148 bp, Triticum aestivum
  misc_feature: Ceres CLONE ID no. 1031847
  misc_feature: Ceres CDNA ID no. 29191747
  CDS (213)..(803): REFERENCED BY SEQ ID NO: 5082
aaaaccaccctaaaatcttccgcaggtgcccctgagctgccgccgccgtagcttggcgtcagcgcggaggcccgctcccgctcccgctcgcccacccaatccctccgcctctcacgcgcgtcgccgccgtcgccgtttccgttgtagcccgtcgcgtccctgctgtctccacccccgtccgcagtcctcgacatccgttttcgagacctaccatgagcacgaaattgctcaacagcttgagcctgaggaggctcttaggacagcaaagaaacccaattgacttatacacagcatcgagagcatggagctctagcacttcattttctggtgttcatgagaagaatggcatgggcgtcgaggcagatggtgatgttgcagattcttggaaagatgctgacttccgtggtgtttaccgggccattatttgtggcagcgttggacaagtgcctgtgcagaaaaaattgaggaacgggcatattgtgactgtatttactgtcgggactggaggcatgtttgaccagaggagggcaggtgctgaaaacttgccaatgccagctcagtggcatcgcatagctgttcataatgagcagcttggtacatatgctgttcaaaagttggttaagaatgctgcagtatatgttgagggtgatattgagactagagtctacaatgatgacatcaataatctagtgaaaatcgtacctgagatctgtgtgcggtttgatggcaagatacacttggttcaatctgggggcagtgatgtcagcaaatcattggaagagttaagggaggggctattttagttgcgacctgagggacaatgagcagcaggaggagttggccaactggagtgttagattcagggcaactttgccaaagcacttttattaggtccattgataataactggactggagaactgaaagcccttgtagatgcaagcggtgctctctctgcctttttgagcgtatgggggcacttctggttgttgaaatcgagtttatattgagctgcaggagaaacggcggtctattgagatctctgaagatgcttttatttttcacagctagtaatgatgccccgtgctcgtaacaatgaccagtctcagtgtctattcataatacttggcgtcaaaaaaaaaaaaaaaa

SEQ ID NO: 5082 - protein, 196 aa, Triticum aestivum
  misc_feature: Ceres CLONE ID no. 1031847
  misc_feature: Ceres CDNA ID no. 29191747
  misc_feature (66)..(177): Pfam Name: SSB PFAM Desc: Single
  misc_feature: Homolog of GI Number: 50932307 NR Desc: putative single
  misc_feature: Homolog of GI Number: 3600051 NR Desc: contains similarity to the single
  misc_feature: Homolog of GI Number: 55297106 NR Desc: single
  misc_feature: Homolog of GI Number: 34911652 NR Desc: P0510C12.16
  misc_feature: Homolog of GI Number: 58416623 NR Desc: Single
  misc_feature: Homolog of GI Number: 58417579 NR Desc: Single
  misc_feature: Homolog of GI Number: 57239014 NR Desc: single
  misc_feature: Homolog of GI Number: 58039355 NR Desc: Single
  misc_feature: Homolog of GI Number: 22959712 NR Desc: COG0629: Single
MSTKLLNSLSLRRLLGQQRNPIDLYTASRAWSSSTSFSGVHEKNGMGVEADGDVADSWKDADFRGVYRAIICGSVGQVPVQKKLRNGHIVTVFTVGTGGMFDQRRAGAENLPMPAQWHRIAVHNEQLGTYAVQKLVKNAAVYVEGDIETRVYNDDINNLVKIVPEICVRFDGKIHLVQSGGSDVSKSLEELREGLF

SEQ ID NO: 5083 - DNA, 1240 bp, Triticum aestivum
  misc_feature: Ceres CLONE ID no. 1031888
  misc_feature: Ceres CDNA ID no. 25400712
  CDS (275)..(910): REFERENCED BY SEQ ID NO: 5084
ataggttaccactagtaggccacgaccaaccgctcccgtcgcccgatccatcgatccgtcagctccatcatcatctgattgccgccgccgcttgccgcccatcggtccagctcacactgaccgctacgtctcactctctcctccctctcctagctaattgtctagctacgggcagagctagctagctggtgatcaccacgcgcgcccgcccgcagctcgttttaagccggccgggtcggacacggcatgcgctgctctgcccgcacggcaaaagatggctccagcttccgcctcgctcctccccgccgccggcgccaagcgccccttcgccgcccccgacgctgctgagcaagagcagccactcgcgcaggaggaagcggtgaccaagaagaacggccagagcgagcagccgaagctggagtgcccgcggtgcagctccaccgacaccaagttctgctactacaacaactacagcacggcgcagccgcgccactactgccgcacctgccgccgctactggacgcaaggcggcacgctgcgcaaggtccccgtcggtggcgcctgccgccgcggctccggcagcagcagcaagcgccgcaggtcctccgccgagccccacacgccctcctccgactcgacgccaccgccgcagccagaacagcaggacacggtccccatgctcccggtcttcccgttcctcaccgacggcggccccgtcttcctgccgcagttcgacctcgggctcgccgggttcccgtggacggcaccgtcagtcacagacaacctttacgacagtctcgcgccgtgggctgcctgcgacggcgcgctcgcccccaccggcgcatgggagggcttcggtggcctcgagctcacctggccaccgccaccacccccggcggccggcgactgatggtcggcgtcatcgtgacagtcgccggcgcgttcgaggctcctgttttatcatcgcagcctcgatcgatcagctagttgttgcttaccttcaccagtctgcagtgtgtctgcctcctctgctaggaattaatgtactcatgcagctccatggatcttcactgtgtttctttcttctcatgcttaggtataaatgaatgatgtggcgattgttgtttgaaccaatggaccatcatcagacatcagtcgtgtagcagcagggaggaggatgtaacttggtccgtgcagtgatataatattatatatatttacagtaaaaaaaaaaaaaaaa

SEQ ID NO: 5084 - protein, 211 aa, Triticum aestivum
  misc_feature: Ceres CLONE ID no. 1031888
  misc_feature: Ceres CDNA ID no. 25400712
  misc_feature (43)..(105): Pfam Name: zf PFAM Desc: Dof domain
  misc_feature: Homolog of GI Number: 50929663 NR Desc: OSJNBa0064G10.24
  misc_feature: Homolog of GI Number: 42540757 NR Desc: Dof28
  misc_feature: Homolog of GI Number: 21538785 NR Desc: dof zinc finger protein
  misc_feature: Homolog of GI Number: 4996644 NR Desc: Dof zinc finger protein
  misc_feature: Homolog of GI Number: 50906737 NR Desc: putative Dof zinc finger protein
  misc_feature: Homolog of GI Number: 52077334 NR Desc: putative DNA
  misc_feature: Homolog of GI Number: 30684022 NR Desc: Dof
  misc_feature: Homolog of GI Number: 51979356 NR Desc: PREDICTED B1121A12.10 gene product
  misc_feature: Homolog of GI Number: 3927829 NR Desc: putative DOF zinc finger protein
  misc_feature: Homolog of GI Number: 6092016 NR Desc: elicitor
MAPASASLLPAAGAKRPFAAPDAAEQEQPLAQEEAVTKKNGQSEQPKLECPRCSSTDTKFCYYNNYSTAQPRHYCRTCRRYWTQGGTLRKVPVGGACRRGSGSSSKRRRSSAEPHTPSSDSTPPPQPEQQDTVPMLPVFPFLTDGGPVFLPQFDLGLAGFPWTAPSVTDNLYDSLAPWAACDGALAPTGAWEGFGGLELTWPPPPPPAAGD

SEQ ID NO: 5085 - DNA, 1040 bp, Triticum aestivum
  misc_feature: Ceres CLONE ID no. 1031903
  misc_feature: Ceres CDNA ID no. 25891888
  CDS (105)..(779): REFERENCED BY SEQ ID NO: 5086
actcatccaccacagcttagcagcaacaactaccagtgccatagacgctctccatcaacaaactctagctgatcagtcctagctaagcttgtcgcatagcaagcatggggtactccaaaactccagcagtttgcctgttcgccatgctattcctagctccgtccgtcttggccaccgaccctgaccctctccaggacttctgcgtcgccgacctcgacggcaaggcggtctcggtgaacgggcacacgtgcaagcccatgtcggaggccggcgacgacttcctcttctcgtccaagctggccaaggccggcaacacatcgaccccaaacggttcggctgtgacggagctcgacgtggccgagtggcccggtacgaacacgctgggcgtgtcgatgaaccgcgtggacttcgcgccggggggcaccaacccgccgcacatccacccccgcgccaccgagatcggcatcgtgatgaaaggtgagctccttgttggaatcctcggcagccttgactctgggaacaagctctactccagggtggtgcgcgccggagagacgttcctcatcccgcggggcctcatgcacttccagttcaatgtcgggaagaccgaggcctccatggtcgtctccttcaacagccagaaccccggcatcgtcttcgtgccactcacgctcttcggctccaatccacccatcccaacgccggtgctcaccaaggcactccgggtggagaccggggtcgtggaacttctcaagtccaagttcgccgctgggttttaatttcctgggagccttccctgaaaggctcaatatatattttgatatatgcatgctagcaaaatttaataattctcagcaaaagacatatactcaagcttcgggttaatctcgcatgcaattgtaataagattgaataagttagccccatggttaagccttcagatccaatatggggaattgtatgtacttctttttattgccgtctttgtttttcattgaacgaaatatatagttagcattttcataaaaaaaaaaaaaaaa

SEQ ID NO: 5086 - protein, 224 aa, Triticum aestivum
  misc_feature: Ceres CLONE ID no. 1031903
  misc_feature: Ceres CDNA ID no. 25891888
  misc_feature (98)..(176): Pfam Name: Cupin_2 PFAM Desc: Cupin domain
  misc_feature: Homolog of GI Number: 1171937 NR Desc: Oxalate oxidase 2 precursor
  misc_feature: Homolog of GI Number: 100782 NR Desc: germin precursor
  misc_feature: Homolog of GI Number: 46408929 NR Desc: oxalate oxidase precursor
  misc_feature: Homolog of GI Number: 2266668 NR Desc: oxalate oxidase
  misc_feature: Homolog of GI Number: 21912428 NR Desc: oxalate oxidase 2
  misc_feature: Homolog of GI Number: 21912430 NR Desc: oxalate oxidase 4
  misc_feature: Homolog of GI Number: 11967814 NR Desc: oxalate oxidase
  misc_feature: Homolog of GI Number: 22138786 NR Desc: oxalate oxidase
  misc_feature: Homolog of GI Number: 1772601 NR Desc: pSBGer3
  misc_feature: Homolog of GI Number: 100836 NR Desc: germin precursor
  misc_feature: Useful for making larger plants
  misc_feature: Useful for making stronger plants
MGYSKTPAVCLFAMLFLAPSVLATDPDPLQDFCVADLDGKAVSVNGHTCKPMSEAGDDFLFSSKLAKAGNTSTPNGSAVTELDVAEWPGTNTLGVSMNRVDFAPGGTNPPHIHPRATEIGIVMKGELLVGILGSLDSGNKLYSRVVRAGETFLIPRGLMHFQFNVGKTEASMVVSFNSQNPGIVFVPLTLFGSNPPIPTPVLTKALRVETGVVELLKSKFAAGF

SEQ ID NO: 5087 - DNA, 628 bp, Triticum aestivum
  misc_feature: Ceres CLONE ID no. 1031950
  misc_feature: Ceres CDNA ID no. 25891889
  CDS (88)..(435): REFERENCED BY SEQ ID NO: 5088
ccaccaccaccacacaagctaatcaagctctcagctccttcccagctccacggtttccagcaagcaaaccgaagcactagatcctcgatggctcgcgtggcactggtcgccgtgttcgccgtgctcgcggcactggcggtggcggagatggcgtccggggcggtgacctgcggcgacgtgacgtccgccgtcgcgccgtgcatgtcctacgcgagggggcaagcgtcggcaccctcgggggcgtgctgcagcggggtgaggaccctgaacgccaaggcgtccaccccggccgaccggaaggcggcgtgcaactgcctcaagaacctggcggggtcgggcatcagcatgggtaacgccgccaacatccccggcaaatgcggcgtctccgtctctttccccatcaacaccaaaaccaactgcaacaaccttcactaagttatctaccagcatcatcatcacaccaggctagctagcccactcggtgtctactgttgctgctctctgcgtgtgttcgttgttgttttctccatgtgttcgacctccatctgttgccgttaatacagatcgagcagattactgatcgaatcatcaataaaataatgtgttgagctcaaaaaaaaaaaaaaaa

SEQ ID NO: 5088 - protein, 115 aa, Triticum aestivum
  misc_feature: Ceres CLONE ID no. 1031950
  misc_feature: Ceres CDNA ID no. 25891889
  misc_feature (28)..(111): Pfam Name: Tryp_alpha_amyl PFAM Desc: Protease inhibitor/seed storage/LTP family
  misc_feature: Homolog of GI Number: 56713105 NR Desc: type 1 non
  misc_feature: Homolog of GI Number: 56713111 NR Desc: type 1 non
  misc_feature: Homolog of GI Number: 25990344 NR Desc: lipid transfer protein
  misc_feature: Homolog of GI Number: 75994111 NR Desc: phospholipid transfer protein 2
  misc_feature: Homolog of GI Number: 75994137 NR Desc: phospholipid transfer protein 2
  misc_feature: Homolog of GI Number: 75994109 NR Desc: phospholipid transfer protein 2
  misc_feature: Homolog of GI Number: 7438278 NR Desc: lipid transfer protein precursor
  misc_feature: Homolog of GI Number: 1498597 NR Desc: phospholipid transfer protein
  misc_feature: Homolog of GI Number: 75994095 NR Desc: phospholipid transfer protein 2
  misc_feature: Homolog of GI Number: 75994115 NR Desc: phospholipid transfer protein 2
MARVALVAVFAVLAALAVAEMASGAVTCGDVTSAVAPCMSYARGQASAPSGACCSGVRTLNAKASTPADRKAACNCLKNLAGSGISMGNAANIPGKCGVSVSFPINTKTNCNNLH

SEQ ID NO: 5089 - DNA, 1203 bp, Triticum aestivum
  misc_feature: Ceres CLONE ID no. 1032072
  misc_feature: Ceres CDNA ID no. 36530677
  CDS (54)..(905): REFERENCED BY SEQ ID NO: 5090
ctcaagctcaaatcccttaccctcctcgcgtgccctcccttatccccttcaccatggccacctccgccatgacactcgccatggccgcggccacggacgcctccctctttcaccccacgttcctctcccaacacaagctcaccccggcggccgccttcctcccactcattttctctcgcgcgccgctcctccgctccacccgcccccgcgccccccttacgcccctcgtcgcctcctccgacgccgccgaggcgggcctcgactgggccgacgcggaggaagccgaagagacggtgacggaggaggagcccgcggtggcggcctccggtggggatgcggggtacgcagccgagcctcccgaggaggctaaggtgtacgtcgggaacctgccgtatgatgtggacagcgagcggctcgcccagctcttcgaccaggccggcgtcgtcgaggtcgccgaggtcatttacaacagagagtcatgccagagccgtggatttggatttgttaccatgagtactattgaggaagctgacaaagccatcgagacgttcaaccgctacgacatcagcggaaggcttctgaacgtaaacagggcagctcaaaggggctcccgtgttgagagacctcctcgacagtttgcatcttctttcagggcttatgttggtaacctgccatggcaagcggaagactctaggttggtgcaattgttcagcgagcatggggaagtagttaacgctacagttgtgtacgacagagaaactgggcgttcacgaggatttggttttgtaactatggcttcaaaggaagatcttgacagtgctatttcagcgcttgatggacaggagatggatggccgtccactccgagtgaacgttgccgcggagcgaccgcagcgagggttctgatgcagaggagagcgggtgtttcttttggacacacgagaacaacactgctgaaatgttactgcggaagactgaagcatgtcaccacttaaaaatcctgcactggcctcctgatgttgggctatctcctcccatcccatattcttttttcatgcttccgtttgctgttgatgtcatcatgttactttcttgtcaacaccgtaagttcaacttttcaagtaggctactgtaatgatgtcctagtgttctcatgataatcgaagaaggttttgttggtaatgctacaaaaaaaaaaaaaaaa

SEQ ID NO: 5090 - protein, 283 aa, Triticum aestivum
  misc_feature: Ceres CLONE ID no. 1032072
  misc_feature: Ceres CDNA ID no. 36530677
  misc_feature (201)..(272): Pfam Name: RRM_1 PFAM Desc: RNA recognition motif.
  misc_feature: Homolog of GI Number: 3550483 NR Desc: cp31BHv
  misc_feature: Homolog of GI Number: 50948431 NR Desc: putative nucleic acid
  misc_feature: Homolog of GI Number: 3550467 NR Desc: cp31AHv protein
  misc_feature: Homolog of GI Number: 7446356 NR Desc: Ps16 protein
  misc_feature: Homolog of GI Number: 52076131 NR Desc: putative nucleic acid
  misc_feature: Homolog of GI Number: 100903 NR Desc: nucleic acid
  misc_feature: Homolog of GI Number: 19032260 NR Desc: RNA
  misc_feature: Homolog of GI Number: 681906 NR Desc: cp31
  misc_feature: Homolog of GI Number: 681908 NR Desc: cp31
  misc_feature: Homolog of GI Number: 510240 NR Desc: RNA binding protein
MATSAMTLAMAAATDASLFHPTFLSQHKLTPAAAFLPLIFSRAPLLRSTRPRAPLTPLVASSDAAEAGLDWADAEEAEETVTEEEPAVAASGGDAGYAAEPPEEAKVYVGNLPYDVDSERLAQLFDQAGVVEVAEVIYNRESCQSRGFGFVTMSTIEEADKAIETFNRYDISGRLLNVNRAAQRGSRVERPPRQFASSFRAYVGNLPWQAEDSRLVQLFSEHGEVVNATVVYDRETGRSRGFGFVTMASKEDLDSAISALDGQEMDGRPLRVNVAAERPQRGF

SEQ ID NO: 5091 - DNA, 1127 bp, Triticum aestivum
  misc_feature: Ceres CLONE ID no. 1032195
  misc_feature: Ceres CDNA ID no. 25092183
  CDS (92)..(919): REFERENCED BY SEQ ID NO: 5092
atcccttagccgccgccacagcctccagctccaaaccctcatcccccccatcggagctcccctgcccccaaccccccacccccacccagccatggcggaccgcggcggcgagcgtggtgtcggcgagcgcggcggcttcgggcgcggcttcggtcgcggcgggcgcggggaccgtggcgggcgccgcggcggccgccgtggccctcgccaggaggaggagaagtgggtgcccgtcaccaagctcggccgcctcgtcaaggagggccgcttcaccaagatggaggagatctacctacactcgctccccgtcaaggagcaccagatcgtggagacgctctgcccggggctcaaggacgaggtgatgaagatcaccccggtgcagaagcagacccgcgccgggcagcgcacccgcttcaaggccttcgtcgtcgtcggcgacagcaacggccacgtcggcctcggcgtcaagtgcgccaaggaggtggccacggccatccgcggcgccatcatcctcgccaagctctcgatcgtgcccgtcaggaggggctactgggggaacaagatcggcctgccccacaccgtgccctgcaaggtcaccggcaagtgcggctccgtcaccgtgcgcatggtgcccgcccccaggggttccggaatcgtcgccgcccgcgtccccaagaaggtgctgcagttcgccgggatcgatgatgtcttcacttcctcgcgtggatccaccaagacccttggcaacttcgtcaaggctacctttgactgcctgatgaagacctatggattcctcactcctgacttctggagggagacaaccttcaccaaggcgccgtaccaggagttcaccgacatcttggcgaagccgaccaaggccctgatgcttgatgcaccagctgagaagatagaagcttaggatgaagggtttttactagctgggagctgtctgttgcactttgctttattatagtcgagaaccaggtgtctttgaattgtgctacttgtggaagtctctgtttgctgtcaaagttttggattatggtgcaatgctactctgttattggcaatggatgctacataattatgccaattgcagtgttatttgtccaaaaaaaaaaaaaaaa

SEQ ID NO: 5092 - protein, 275 aa, Triticum aestivum; identical to SEQ ID NO: 4084
  misc_feature: Ceres CLONE ID no. 1032195
  misc_feature: Ceres CDNA ID no. 25092183
  misc_feature (168)..(241): Pfam Name: Ribosomal_S5_C PFAM Desc: Ribosomal protein S5
  misc_feature (85)..(151): Pfam Name: Ribosomal_S5 PFAM Desc: Ribosomal protein S5
  misc_feature: Homolog of GI Number: 30103021 NR Desc: putative 40S ribosomal protein S2
  misc_feature: Homolog of GI Number: 50935111 NR Desc: putative 40S ribosomal protein S2
  misc_feature: Homolog of GI Number: 22137092 NR Desc: At2g41840/T11A7.6
  misc_feature: Homolog of GI Number: 21553851 NR Desc: 40S ribosomal protein S2
  misc_feature: Homolog of GI Number: 30017231 NR Desc: At3g57490
  misc_feature: Homolog of GI Number: 22137288 NR Desc: At1g59359/T4M14_3
  misc_feature: Homolog of GI Number: 18181932 NR Desc: ribosomal protein S2
  misc_feature: Homolog of GI Number: 21618011 NR Desc: ribosomal protein S2
  misc_feature: Homolog of GI Number: 21539457 NR Desc: ribosomal protein S2
  misc_feature: Homolog of GI Number: 50755669 NR Desc:  similar to 40S ribosomal protein S2
  misc_feature: Useful for increasing chlorophyll and photosynthetic capacity
  misc_feature: Useful for sterility

SEQ ID NO: 5093 - DNA, 925 bp, Triticum aestivum
  misc_feature: Ceres CLONE ID no. 1032452
  misc_feature: Ceres CDNA ID no. 25891031
  CDS (154)..(735): REFERENCED BY SEQ ID NO: 5094
ccccttcgatgttgacgcccgagcaaaccccaaatctccaccgctgaacagtatatatcatccgccccggcgcaccccgtttccatcccacccaacccgacccccgcgcgtcggccgcacccgtccccagacccaagagcgagccagccgaagatgtccgcccaagaagccgccgcctccgtctccccgctcgccgcgctcccgccggcgctctacgcgctccactacttcaaccgcacggtcctccacccgctgcgcatcctccgcctgcgccgcgccgcggcgcccgtgcccgtgctcgtcgccgcctgcgccttcgggttcaacctcctcaacgcctacgtgcaggcccgctcctgggcgctccacgccgaccgccccgcctccgccttcgcgctcccccgctgcctcgccgggctcgccctcttcgcctgggggatgcgggtcaacgtcgcggcggacagggagctcctgcggctcaaggaggccgggggcgggtacaagatcccgcggggcggctggttcgacgcggtgacctgccccaactacttcggcgagatcgtggagtggctcggctactgcctggtggcctggtcgccggcggcctgggccttcttcctctacacctgcgccaacctcatgccgagggccagggaccaccgccagtggtacctcaacaagttcggcggcgagtacccggcgtcgcgcaaggccgtcatcccgtgcatctactagcctctgcaacttctgtcacccgggatcgaaggaaaaattggtgtggctgaggacaactgtaattccttttcttcctttccctaatggctgcctgtgattgaggattgcctgattccattcctttggaaaactgaatatggtttgcagagaatgaacttttcttaatcctcaaacaaaaaaaaaaaaaaaa

SEQ ID NO: 5094 - protein, 193 aa, Triticum aestivum
  misc_feature: Ceres CLONE ID no. 1032452
  misc_feature: Ceres CDNA ID no. 25891031
  misc_feature (44)..(193): Pfam Name: Steroid_dh PFAM Desc: 3
  misc_feature: Homolog of GI Number: 34908346 NR Desc: putative steroid reductase DET2
  misc_feature: Homolog of GI Number: 62954889 NR Desc: 3
  misc_feature: Homolog of GI Number: 34850849 NR Desc: steroid 5alpha
  misc_feature: Homolog of GI Number: 23476464 NR Desc: steroid 5
  misc_feature: Homolog of GI Number: 19310675 NR Desc: putative 3
  misc_feature: Homolog of GI Number: 57335416 NR Desc: steroid 5 alpha reductase DET2
  misc_feature: Homolog of GI Number: 11493760 NR Desc: putative steroid reductase
  misc_feature: Homolog of GI Number: 1280611 NR Desc: steroid reductase DET2
  misc_feature: Homolog of GI Number: 50403823 NR Desc: 5
  misc_feature: Homolog of GI Number: 54646476 NR Desc: 3
MSAQEAAASVSPLAALPPALYALHYFNRTVLHPLRILRLRRAAAPVPVLVAACAFGFNLLNAYVQARSWALHADRPASAFALPRCLAGLALFAWGMRVNVAADRELLRLKEAGGGYKIPRGGWFDAVTCPNYFGEIVEWLGYCLVAWSPAAWAFFLYTCANLMPRARDHRQWYLNKFGGEYPASRKAVIPCIY

SEQ ID NO: 5095 - DNA, 1148 bp, Triticum aestivum
  misc_feature: Ceres CLONE ID no. 1032545
  misc_feature: Ceres CDNA ID no. 25446957
  CDS (118)..(1047): REFERENCED BY SEQ ID NO: 5096
atcaccagtaaagcagtaagcaattccactcccgccgccacctccctctactccggcgctctctcggacgctccggcatacatacgtacttacaagcggaagcagccagagccagccatgtgccccggggcgccggtcgcggcggcggcgtcggacaagagcgtgtgcgtgatggacgcgtccggcccgctgggccaggcgctcgtgcaccgcctcctccgccggggctacaccgtccacgccgccacctacggccgctcgctcgacgcgctcgcgctgctcgccgccgccggccacgacgaggaccggctcaagctcttccgcgccgaccccttcgactaccactccatcgccgacgccgtccgcggctgctccggcctcttctgcatgttcaacacccacgaggaccaggccggctgcgacgaggtgatggtggaggtggaggtccgggcggcgcagaacgtgctggaggcgtgcgcgcagacggtgaccatggagcgggtggtcttcacctcctccgtcaccgccgtcgtctggaaggacgacgaccacaagcccgtcgacgccttcgacgagcggaactggagcgacctcaacctctgcaggaagcgcaagttgtggcatgcgctggccaagacgctgtcggagaagacggcctgggccttggccatggacagaggggtggacatggtggccatcaacgccggcctgctcaccgggccggggctctcctccgcccacccctgcctcaagggggtccccgagatgtacgagcacggcgtcctcgtcaccgtcgacgccgacttcctcgccgacgcccacgtggccgcctacgagtgccccacggccttcggccgctacctctgcttcaacaacgtcgtgtgccggcccgaggacgccctccagttcgcccagatgctcaccccgtccgctccatgctacccgccgagtgatgagctgaaggtgatcccacaaaggattcagaacaagaagctgaacaacctgatggtggagtttgccagtgccatatacggggacttggattagagaatcactagttcattgatttacatctcaagggcagctagggttgtattctttatgtacctaaatatctgtattctttttcctcaaaaaaaaaaaaaaaa

SEQ ID NO: 5096 - protein, 309 aa, Triticum aestivum
  misc_feature: Ceres CLONE ID no. 1032545
  misc_feature: Ceres CDNA ID no. 25446957
  misc_feature (16)..(251): Pfam Name: Epimerase PFAM Desc: NAD dependent epimerase/dehydratase family
  misc_feature: Homolog of GI Number: 78709048 NR Desc: cinnamoyl
  misc_feature: Homolog of GI Number: 37537132 NR Desc: putative cinnamoyl
  misc_feature: Homolog of GI Number: 25412171 NR Desc: probable cinnamoyl CoA reductase
  misc_feature: Homolog of GI Number: 20197297 NR Desc: putative cinnamoyl CoA reductase
  misc_feature: Homolog of GI Number: 21553382 NR Desc: putative cinnamoyl CoA reductase
  misc_feature: Homolog of GI Number: 7269948 NR Desc: cinnamoyl
  misc_feature: Homolog of GI Number: 21553548 NR Desc: cinnamoyl
  misc_feature: Homolog of GI Number: 3341511 NR Desc: cinnamoyl
  misc_feature: Homolog of GI Number: 17978649 NR Desc: cinnamoyl
  misc_feature: Homolog of GI Number: 3242328 NR Desc: cinnamoyl
  misc_feature: Useful for increasing chlorophyll and photosynthetic capacity
  misc_feature: Useful for making shorter plants
  misc_feature: Useful for sterility
MCPGAPVAAAASDKSVCVMDASGPLGQALVHRLLRRGYTVHAATYGRSLDALALLAAAGHDEDRLKLFRADPFDYHSIADAVRGCSGLFCMFNTHEDQAGCDEVMVEVEVRAAQNVLEACAQTVTMERVVFTSSVTAVVWKDDDHKPVDAFDERNWSDLNLCRKRKLWHALAKTLSEKTAWALAMDRGVDMVAINAGLLTGPGLSSAHPCLKGVPEMYEHGVLVTVDADFLADAHVAAYECPTAFGRYLCFNNVVCRPEDALQFAQMLTPSAPCYPPSDELKVIPQRIQNKKLNNLMVEFASAIYGDLD

SEQ ID NO: 5097 - DNA, 1014 bp, Triticum aestivum
  misc_feature: Ceres CLONE ID no. 1032557
  misc_feature: Ceres CDNA ID no. 36528692
  CDS (2)..(841): REFERENCED BY SEQ ID NO: 5098
catgtcccttgccgccgcagcctccccgtcctcgtcccgcttcctgttgccctccacggccgcccgccgccggttcctccaccacctcctcgccgcgcccgcgcccccgaggccgccgcagcttcggcgctgctccccgtaccactggatggcgcaattttgggctgaaggatcactggagaagaacaacgctctggttgaatacctgaaacagtatggtgttgttcgaaccgataaagtggcagaagttatggaaactatcgaccgagccttatttgtaccggagggctttaccccttacaccgacagtcctatgcctattggttacaatgcaacaatatctgctcctcacatgcacgcaacctgcttagaactgttgaaggattatttacagccaggcatgcatgctctggacgttggatcaggcagtggttacttgactgcttgctttgcaatgatggtcggaccagaaggtcgcgcagtggggattgaacacattcctgaactcgttgttgcttctactgaaaatgtcgaacggagtgctgcagcagcactaatgaaggatggttcactttcttttcatgtttcagatggaaggcttggctggccggatgcggcgccatacgatgctattcatgtgggcgcagcggcacctgagatccctcggccactgctggagcagctgaagcctggcgggcggatggtcatacccgttggcacatactctcaggacctgcaggtgattgacaagagcgccgacggatccaccagcgtccgcaacgatgcctctgttcgctacgtccctctgaccagccgctctgctcagctgcaggacagctgagatccttcgctctggatctggaaatgtgtgtgtatatatgtgagtgccgatgatctttgtctaccaatgtggcgtctgatgttttagatggtttggttttgtataatgcttactgctggttgatgttgcttagaatatgtgaatacgtgttgtgtgtaaaaaaaaaaaaaaaa

SEQ ID NO: 5098 - protein, 230 aa, Triticum aestivum
  misc_feature: Ceres CLONE ID no. 1032557
  misc_feature: Ceres CDNA ID no. 36528692
  misc_feature (11)..(225): Pfam Name: PCMT PFAM Desc: Protein
  misc_feature: Homolog of GI Number: 7451057 NR Desc: probable protein
  misc_feature: Homolog of GI Number: 50925225 NR Desc: OSJNBb0011N17.10
  misc_feature: Homolog of GI Number: 1322021 NR Desc: L
  misc_feature: Homolog of GI Number: 4678355 NR Desc: protein
  misc_feature: Homolog of GI Number: 40950547 NR Desc: L
  misc_feature: Homolog of GI Number: 40950548 NR Desc: L
  misc_feature: Homolog of GI Number: 14591631 NR Desc: L
  misc_feature: Homolog of GI Number: 18978294 NR Desc: l
  misc_feature: Homolog of GI Number: 68358234 NR Desc:  similar to L
MAQFWAEGSLEKNNALVEYLKQYGVVRTDKVAEVMETIDRALFVPEGFTPYTDSPMPIGYNATISAPHMHATCLELLKDYLQPGMHALDVGSGSGYLTACFAMMVGPEGRAVGIEHIPELVVASTENVERSAAAALMKDGSLSFHVSDGRLGWPDAAPYDAIHVGAAAPEIPRPLLEQLKPGGRMVIPVGTYSQDLQVIDKSADGSTSVRNDASVRYVPLTSRSAQLQDS

SEQ ID NO: 5099 - DNA, 807 bp, Triticum aestivum
  misc_feature: Ceres CLONE ID no. 1032614
  misc_feature: Ceres CDNA ID no. 29191524
  CDS (157)..(618): REFERENCED BY SEQ ID NO: 5100
ctcaatcaatcatcgtcgtcgtcgtccccaatcaatcaatcatcagcgagcgagcgacctaaacctccgctccgtctccgcgcaaaaccctagcggatccatcgacctcgcggagaggcggagagcggagagcggagagagggagtgggtccgaagatgcagatcttcgtgaagacgctgaccggcaagaccatcacgctcgaggtcgagagcagcgacaccatcgacaacgtcaaggccaagatccaggacaaggagggcattcccccagatcagcaaaggctaatttttgctggaaagcagttggaagatgggcgaacattagctgattacaacattcagaaagagtcgacgctccatttggtcctgaggctcaggggtggaactatgatcaaggtgaagacacttactgggaaggaaatcgagattgatattgagcccactgacacaatcgatagaatcaaggaacgtgttgaggagaaagagggtattccacctgttcaacagaggctcatctatgctgggaagcaactcgctgatgacaaaactgctaaggactacaacattgaaggtggttcagtgctccatcttgtgcttgctctgagaggcggtcagtagatgcaaagtcgacgtgggccgtataggccatttctaccaaaacttgttgcagacctagatctgtgaatttgccggttgattgaagtgccatgtaattgacgcatttgtgaagtcagctgtcacctgtacttggatggaattgtttgaactatatgcttatctgttgtcatcttaaaaaaaaaaaaaaaa

SEQ ID NO: 5100 - protein, 153 aa, Triticum aestivum
  misc_feature: Ceres CLONE ID no. 1032614
  misc_feature: Ceres CDNA ID no. 29191524
  misc_feature: The plant flowers significantly late compared to wild-type.
  misc_feature: null
  misc_feature: Useful for making plants with modulated cold sensitivity
  misc_feature: Useful for making plants with modulated flowering time
  misc_feature (1)..(74): Pfam Name: ubiquitin PFAM Desc: Ubiquitin family
  misc_feature: Homolog of GI Number: 51534981 NR Desc: polyubiquitin 2
  misc_feature: Homolog of GI Number: 50726105 NR Desc: polyubiquitin 2
  misc_feature: Homolog of GI Number: 29824269 NR Desc: putative ubiquitin
  misc_feature: Homolog of GI Number: 20562909 NR Desc: polyubiquitin 2
  misc_feature: Homolog of GI Number: 20197530 NR Desc: ubiquitin
  misc_feature: Homolog of GI Number: 7862066 NR Desc: polyubiquitin
  misc_feature: Homolog of GI Number: 81230138 NR Desc: putative polyubiquitin
  misc_feature: Homolog of GI Number: 34911624 NR Desc: putative polyubiquitin
  misc_feature: Homolog of GI Number: 51963880 NR Desc: PREDICTED OJ9003_G05.28 gene product
  misc_feature: Homolog of GI Number: 52076878 NR Desc: polyubiquitin
  misc_feature: Useful for delaying flowering time
  misc_feature: Useful for increasing chlorophyll and photosynthetic capacity
  misc_feature: Useful for making smaller plants
  misc_feature: Utility: Cold Germination Useful for making plants with increased tolerance to cold stress
MQIFVKTLTGKTITLEVESSDTIDNVKAKIQDKEGIPPDQQRLIFAGKQLEDGRTLADYNIQKESTLHLVLRLRGGTMIKVKTLTGKEIEIDIEPTDTIDRIKERVEEKEGIPPVQQRLIYAGKQLADDKTAKDYNIEGGSVLHLVLALRGGQ

SEQ ID NO: 5101 - DNA, 1046 bp, Triticum aestivum
  misc_feature: Ceres CLONE ID no. 1032626
  misc_feature: Ceres CDNA ID no. 40351560
  CDS (228)..(686): REFERENCED BY SEQ ID NO: 5102
cactcctgtcatcttcctcgcttcgccccaaatccattcccctccgccccctttccgttgccgaacaaaccttctgcaccccgatccggttcggtttagttcgctggcgtctccacccgatcgactccactgcaatatgctatagcccgtggagcctggggcgttggttgtacggcagtagattcccgcgggatctgccggggcgcccggagccggagaaggcgacgatgtcaacccctgcaaggaagaggctgatgagggatttcaaacgactgatgcaggatcctcctgcgggcataagtggcacacctcaggataacaatataatgctgtggaatgctgtaatttttggtcctgatgatactccctgggatggtggtacgttcaagctgacacttcagtttactgaagattatcctaataagccacctacagtgcggtttgtttctcgaatgtttcatcccaatatttatgcagatggaagcatatgtttagatattctccaaaaccagtggagcccgatatatgatgtagctgctatattgacatccattcagtcactgctttgcgacccaaacccaaattcacctgccaactcagaagcggcccgcctattcagcgagaacaagcgggagtacaaccgtaaagtacgtgaggtcgtggagcaaagctggactgcagactaaagtcgctgcatccagttgtgatgccagctaattgcccgttagcgccttgagtcctatgtactgaactgcttgcaaggtaattaaaatgttacatcatgcttgttgtcgtgtatgttgttgggagtgacatttttagacgctcaggatggagattattgtatccagtctacatataacataccatgctgcctttgaatcagatcgagcacaatatggatttgctatatgttagctctgttgtactgaatgacactgctgagcataagttctttcaaggaagtctctttttagctaccagaggaattgctcagagcctcagtcagagtaacatcatttgatcttccaaaaaaaaaaaaaaaa

SEQ ID NO: 5102 - protein, 152 aa, Triticum aestivum
  misc_feature: Ceres CLONE ID no. 1032626
  misc_feature: Ceres CDNA ID no. 40351560
  misc_feature (8)..(145): Pfam Name: UQ_con PFAM Desc: Ubiquitin
MSTPARKRLMRDFKRLMQDPPAGISGTPQDNNIMLWNAVIFGPDDTPWDGGTFKLTLQFTEDYPNKPPTVRFVSRMFHPNIYADGSICLDILQNQWSPIYDVAAILTSIQSLLCDPNPNSPANSEAARLFSENKREYNRKVREVVEQSWTAD

SEQ ID NO: 5103 - DNA, 1048 bp, Triticum aestivum
  misc_feature: Ceres CLONE ID no. 1032748
  misc_feature: Ceres CDNA ID no. 40351561
  CDS (61)..(924): REFERENCED BY SEQ ID NO: 5104
aacagcacactgacaccctctgtaccacctcgcacagaccagagagtagcagcagcgaccatggcggaaaggtcagccctcctcgccgtgctggtgctcctcgccgtgagcttcctggcgggggccaaggccgacttcgacgaccagttcgaggcgatcggcgaccgcgaccacatcgggtaccgggacgacggcaaggacaagggccaggagttctcgctggagctcgaccaggagtccggctccggcttcaagtccaaggccaagtacctcttcggcgagttcgaggtcaagatgaagctcgtcgacggcaactccgccggcacagtcacctccttctacctgacttccggcgagagcgcgacccacgacgagatcgacatcgagttcatgggcaactccagcggcgacccctacgtgatgaacaccaacgtgtgggccagcggcgacggcaagaaggagcaccagttctacctctggttcgacccctccgccgacttccacacctacaagatcacctggaaccccaagaacatcatcttcgaggtcgacggcgtgcccgtgcgcaccttcaagaagtacgacggcctgcccttcccctccagccggcccatgacggtgcacgccacgctgtgggacggcagctactgggcgacgcagcacggcaccgtcaagatccactggcgccaccaccccttcgtcgtcccctacaaggcctaccacgccaacggctgcgtccacgacaaggccaccaacaagacggcctgccccgccggcagcgacgcctggatgcgccgcgagctcggcgaggaggagctcaagaccgtcgcctgggccgagcgcaactgcctctcctacaactactgcgccgacggctggaggttccccaagggattcccctgcgagtgcggacgcgacctatgatgaattgatgattcagtgtttgtagcactagcagtacacctccgagccgagatttcattgattaatttcttcctttgctacagtacaatcaattgttcttcttgttctaaaaaaaaaaaaaaaa

SEQ ID NO: 5104 - protein, 287 aa, Triticum aestivum
  misc_feature: Ceres CLONE ID no. 1032748
  misc_feature: Ceres CDNA ID no. 40351561
  misc_feature (236)..(283): Pfam Name: XET_C PFAM Desc: Xyloglucan endo
  misc_feature (26)..(210): Pfam Name: Glyco_hydro_16 PFAM Desc: Glycosyl hydrolases family 16
MAERSALLAVLVLLAVSFLAGAKADFDDQFEAIGDRDHIGYRDDGKDKGQEFSLELDQESGSGFKSKAKYLFGEFEVKMKLVDGNSAGTVTSFYLTSGESATHDEIDIEFMGNSSGDPYVMNTNVWASGDGKKEHQFYLWFDPSADFHTYKITWNPKNIIFEVDGVPVRTFKKYDGLPFPSSRPMTVHATLWDGSYWATQHGTVKIHWRHHPFVVPYKAYHANGCVHDKATNKTACPAGSDAWMRRELGEEELKTVAWAERNCLSYNYCADGWRFPKGFPCECGRDL

SEQ ID NO: 5105 - DNA, 690 bp, Triticum aestivum
  misc_feature: Ceres CLONE ID no. 1033068
  misc_feature: Ceres CDNA ID no. 25446988
  CDS (114)..(485): REFERENCED BY SEQ ID NO: 5106
actcagtcgtcagacgtcgcagccacagagaacaagcgagaaaccactctacgcacgcccagagagagaggaagaaacagagagaaagagggatcgatatccgtgtgatcatcatgaggccgatcagggaaggcgaggcgctggtgggagtcgccggggctccgggggcggcggccggccacggcgcgcacccggagctgtggaggacgccgactccgtacctcttcctcggcttcgcgctcatgatggggctcatcgccgtcgcgctgctcgtgctcgtctgcacgcgccgcaagccgtcgggctcgtcgcggcgggggaccgccggcgaggacgcgtcggcgcgcgggatggcgccgctcgacagggagcccaaggtcgtcgtcatcatggccggcgacgacatgccatccttcctcgccagcgccaggccattcgcgttccctgacgccgtcgagccgccacgccaggcggacgcggtctaagcgcgcgcgccgcccgtgtgccctgcgggacgcgggaccaaaattttgctcaccaatcagatttctaggatttaccccaagtaattttgtcagtagtagtagtagtatctagtcgaggagatagccggcgggcacgacgtgagcgcccggcggcgttgagatctgtgaaagcgaatgaagtttcggctcaaaaaaaaaaaaaaaa

SEQ ID NO: 5106 - protein, 123 aa, Triticum aestivum
  misc_feature: Ceres CLONE ID no. 1033068
  misc_feature: Ceres CDNA ID no. 25446988
MRPIREGEALVGVAGAPGAAAGHGAHPELWRTPTPYLFLGFALMMGLIAVALLVLVCTRRKPSGSSRRGTAGEDASARGMAPLDREPKVVVIMAGDDMPSFLASARPFAFPDAVEPPRQADAV

SEQ ID NO: 5107 - DNA, 1191 bp, Triticum aestivum
  misc_feature: Ceres CLONE ID no. 1033406
  misc_feature: Ceres CDNA ID no. 35383321
  CDS (44)..(940): REFERENCED BY SEQ ID NO: 5108
caccgcaatcgaatccccttccttccttccgtcccgcacgacgatggagcgcgtgagaagggcttcgcatgccggctcctggtacaccaacaacgccagcaagctggaagaggaacttgatggttggctttcggcagctgctctcacgaagtcacctgatgttagggccgtaattgcaccccatgctggctattcgtactcagggcgatgtgcagcttatgcttttggcaacattgatccaactaacatttctcgggtgtttctgctcggcccatctcatcactactatactccaaaatgtgctctgtcaagagctactgtttatagcaccccgattggggatttaccagtagacctggaagttatcgaggaactcaaagctaccggaaaatttgaatttatggaccttaatgtcgatgaggctgaacatagcatggaaatgcatttgccttacctttctaaagtatttcagggacataatgtaaaagttgtacctatccttgttggtgctgtcaactcccaaaatgaagccatgtatgggcagttgcttgcaaaatatgtggatgatccaaagaactttttttctgtctcctcagacttttgccactggggatctcggtttagttatacatactatgacaagaagcatggtgccattcacaaatcaatcgaggcgttggaccgcttgggcatggagatcatagagactggtgaccccgacgcgttcaaacagtatctcgaggagtacgagaacaccatatgtggacgccatcccatcagcgtccttcttcatatgttgaaacactgctcgacgaagattaaggtcgggtttgttcgctatgagcagtcgagccagtgcaagagcacgagggacagcagtgtcagctacgcatctgctgcggccaaggtggacagtcctggagaagaaggtaaagattgagcaaaacgtggtttgctgggtacaccctggtgtaacgtgctgtagcatggctgttggcttgcaatcaccggagctttctgtcgaactttgtaataatagcaggctctggttgaagtcccatagtagctgctctggcggcaccaggattctgtgaaacaagagaacaatatatttctggatgttcttgtgtgtatcttcctagtaagctccagcaaaaagaaaacgttcaaaaccgaaaaaaaaaaaaaaaa

SEQ ID NO: 5108 - protein, 298 aa, Triticum aestivum
  misc_feature: Ceres CLONE ID no. 1033406
  misc_feature: Ceres CDNA ID no. 35383321
  misc_feature: Homolog of GI Number: 21357419 NR Desc: CG8031
  misc_feature: Homolog of GI Number: 54638244 NR Desc: GA20778
  misc_feature: Homolog of GI Number: 49522376 NR Desc: MGC89105 protein
  misc_feature: Homolog of GI Number: 49116700 NR Desc: MGC80879 protein
  misc_feature: Homolog of GI Number: 41054231 NR Desc: C21orf19
  misc_feature: Homolog of GI Number: 72115248 NR Desc:  similar to C21orf19
  misc_feature: Homolog of GI Number: 73980713 NR Desc:  similar to Protein C2orf4
  misc_feature: Homolog of GI Number: 41725523 NR Desc: COG1355: Predicted dioxygenase
MERVRRASHAGSWYTNNASKLEEELDGWLSAAALTKSPDVRAVIAPHAGYSYSGRCAAYAFGNIDPTNISRVFLLGPSHHYYTPKCALSRATVYSTPIGDLPVDLEVIEELKATGKFEFMDLNVDEAEHSMEMHLPYLSKVFQGHNVKVVPILVGAVNSQNEAMYGQLLAKYVDDPKNFFSVSSDFCHWGSRFSYTYYDKKHGAIHKSIEALDRLGMEIIETGDPDAFKQYLEEYENTICGRHPISVLLHMLKHCSTKIKVGFVRYEQSSQCKSTRDSSVSYASAAAKVDSPGEEGKD

SEQ ID NO: 5109 - DNA, 818 bp, Triticum aestivum
  misc_feature: Ceres CLONE ID no. 1033433
  misc_feature: Ceres CDNA ID no. 25892354
  CDS (88)..(546): REFERENCED BY SEQ ID NO: 5110
ctgtacttggccttcgcagtagagacaagcgcaagaacggttcatcagtggttcttgctggaagcaaaagttgagttagatcagatcatgggcgccttggatcacctgtcccgtctatgcaacttgacacatacaagggaagccatcaggattaagaaaaggcggccactgacgacggtgaacatcaaggtgaagatggactgtgagggctgcgagaggagggtcaagagcgccgtcaaatcgattcggggtgtgacggcagtggtggtgaatcgcaagatcagcaaggtgactgtgacggggtacgtggagcctcgcaaggtgctggcgagggtgaagaggactgggaagacgacggcggatatgtggccgtacgtgccctacacggtggccacctacccctacgtcggcggctcctacgacaagaaggcgccggcgggcctggtccgcaacgtgccgcaggccatggccgacccggccgcgccggaggtcaagtacatgaacatgttcaacgacgaggacgttaccgcttgcaccgtcatgtgattccatcatctcatattagcatctgcactccagccacgacatgatgcctagattactagatatatcggtcttctcacagcgctggggaaaaatgataccaagaaggtgaacttgtgcatgtacggtactgatggatgatattcatatatactgtgcaaattatcgttcacgtccaaggcgtagataagcccgagttacaactttatgctgccgctttatgatcttcgatatatacatccctgtcagtctcgagcctaaaaaaaaaaaaaaaa

SEQ ID NO: 5110 - protein, 152 aa, Triticum aestivum
  misc_feature: Ceres CLONE ID no. 1033433
  misc_feature: Ceres CDNA ID no. 25892354
  misc_feature (32)..(92): Pfam Name: HMA PFAM Desc: Heavy
  misc_feature: Homolog of GI Number: 28866019 NR Desc: farnesylated protein 3
  misc_feature: Homolog of GI Number: 28866017 NR Desc: farnesylated protein 2
  misc_feature: Homolog of GI Number: 34914538 NR Desc: OSJNBa0094H06.16
  misc_feature: Homolog of GI Number: 21593460 NR Desc: putative isoprenylated protein
  misc_feature: Homolog of GI Number: 32442810 NR Desc: putative farnesylated protein
  misc_feature: Homolog of GI Number: 9755769 NR Desc: farnesylated protein ATFP6
  misc_feature: Homolog of GI Number: 21536547 NR Desc: farnesylated protein
  misc_feature: Homolog of GI Number: 12642882 NR Desc: putative farnesylated protein ATFP6
  misc_feature: Homolog of GI Number: 50921835 NR Desc: OSJNBa0091C12.3
  misc_feature: Homolog of GI Number: 15221451 NR Desc: copper
MGALDHLSRLCNLTHTREAIRIKKRRPLTTVNIKVKMDCEGCERRVKSAVKSIRGVTAVVVNRKISKVTVTGYVEPRKVLARVKRTGKTTADMWPYVPYTVATYPYVGGSYDKKAPAGLVRNVPQAMADPAAPEVKYMNMFNDEDVTACTVM

SEQ ID NO: 5111 - DNA, 681 bp, Triticum aestivum
  misc_feature: Ceres CLONE ID no. 1033464
  misc_feature: Ceres CDNA ID no. 25891113
  CDS (319)..(579): REFERENCED BY SEQ ID NO: 5112
caagttgaggatgatgctgttcatttcatgagacggagtggcacaatattcgaacttcccttgtctcggcatgttcttgcactgcctgttgaatctcgtgtacatgtcttggggactttgaaactagcgactttggaagtgcttgtagatcagtatctggtgctcgacaagaatgttgtacgggctggatggactgtggaaacgggcctgtatgctgctatatgcattgagtcaagttctgttttctagatcccacggcacaccagatcctgttcttggtctgcttgctgcatcttgagcatcatctctgcagtctacatgcttgctcttgtgtcgggagtattctcaaaatacttaaaaaaatactttgctatcaaacagggcctaacacactttttgcttgcccaattgctaactgacatcttggattttcatctggaccatggcttgggtctttgttgtgcatctgcaattgctgaagctgttggtgaagttttaagagttgagcagagtagtttctttgtagtttattttagtggtttgttagaaacagtagctactttgactagctcggtctaattttgcatgtaaggtgttaacactgtcgtactcattatgttggtactcgaggctggatgagggctgccgtagtcattatttgttccaaaaaaaaaaaaaaaa

SEQ ID NO: 5112 - protein, 86 aa, Triticum aestivum
  misc_feature: Ceres CLONE ID no. 1033464
  misc_feature: Ceres CDNA ID no. 25891113
MLALVSGVFSKYLKKYFAIKQGLTHFLLAQLLTDILDFHLDHGLGLCCASAIAEAVGEVLRVEQSSFFVVYFSGLLETVATLTSSV

SEQ ID NO: 5113 - DNA, 875 bp, Triticum aestivum
  misc_feature: Ceres CLONE ID no. 1033478
  misc_feature: Ceres CDNA ID no. 36706303
  CDS (82)..(660): REFERENCED BY SEQ ID NO: 5114
ctcccaaaccctagcgccggcgcctccacttctctgctccctcgtctcctcgcgcgcagggcccggcgaaagggaagcaagatgtacaccgccaggaagaagatccagaaggacaagggcgtcgagccctccgagttcgaggacaccgttgcgcaggctttctttgacctggagaatggcaaccaggagctcaagagcgacctcaaggacctgtacatcaacactgcaatccagatggatgttgttggcaacaggaaggccgtggtgatccatgtgccgtaccgtctgcgcaagcccttcaggaagatccatgtcaggctcgtcagggagctggagaagaagtttagcggcaaggatgttgtctttgttgcaacaagaaggattgtgaggccacccaagaagggttctgctgttcagcgccctcgcaccaggaccctgacagctgttcatgatggtatcttggaggatgtcgtgtacccagctgagattgtggggaagcgtgtcagataccgtttggatggtgccaaggtcatcaagatctacttggacccaaaggagcgcaacaacactgaatacaagctggagaccttctctgcagtctaccgcaggctttgtgggaaagacgttgtctttgagtaccctgtgactgaaaccgcctgaagatccatgccttatgtctccattttcatatctttctgatccgaatgttttggtcgaggtctcagttagttgtgctatcaatgtattccagaaacatagttttgttaacgatctggggttaggaagtttgatggagattggcaatgaacgtgaacaatgttaaagttttgagcatttaaattatgaacctctgctcggcaaaaaaaaaaaaaaaa

SEQ ID NO: 5114 - protein, 192 aa, Triticum aestivum
  misc_feature: Ceres CLONE ID no. 1033478
  misc_feature: Ceres CDNA ID no. 36706303
  misc_feature: The plant is abnormally large.
  misc_feature: The plant is abnormally small.
  misc_feature: Useful for making plants with modulated biomass
  misc_feature (4)..(191): Pfam Name: Ribosomal_S7e PFAM Desc: Ribosomal protein S7e
  misc_feature: Homolog of GI Number: 57471724 NR Desc: ribosomal protein S7
  misc_feature: Homolog of GI Number: 14787424 NR Desc: Ribosomal protein S7
  misc_feature: Homolog of GI Number: 4588906 NR Desc: ribosomal protein S7
  misc_feature: Homolog of GI Number: 22671664 NR Desc: ribosomal protein S7
  misc_feature: Homolog of GI Number: 55167942 NR Desc: putative 40S ribosomal protein S7
  misc_feature: Homolog of GI Number: 77999315 NR Desc: ribosomal protein S7
  misc_feature: Homolog of GI Number: 5532505 NR Desc: 40S ribosomal protein S7 homolog
  misc_feature: Homolog of GI Number: 4128206 NR Desc: 40S ribosome protein S7
  misc_feature: Homolog of GI Number: 21555683 NR Desc: 40S ribosomal protein S7 homolog
  misc_feature: Homolog of GI Number: 6957719 NR Desc: putative 40S ribosomal protein
MYTARKKIQKDKGVEPSEFEDTVAQAFFDLENGNQELKSDLKDLYINTAIQMDVVGNRKAVVIHVPYRLRKPFRKIHVRLVRELEKKFSGKDVVFVATRRIVRPPKKGSAVQRPRTRTLTAVHDGILEDVVYPAEIVGKRVRYRLDGAKVIKIYLDPKERNNTEYKLETFSAVYRRLCGKDVVFEYPVTETA

SEQ ID NO: 5115 - DNA, 1553 bp, Triticum aestivum
  misc_feature: Ceres CLONE ID no. 1033488
  misc_feature: Ceres CDNA ID no. 40041384
  CDS (89)..(1201): REFERENCED BY SEQ ID NO: 5116
atctgctctgctctcctgatctcctcgactcctccgcctcccaaccaaccacgcccggcgcgtctgcccgcctgcagcgattgccgccatgcccgaagatgccgcgccaatagcccccgcccccgcttctgatctcaccgctggttctagtgatgatgagataacagtagaggatgcttcttttgcgcgtactgaactcccccaagatggcagtgccccacctgtcgtaacaactgatatggaagttctccatgataaagttaagaagcaagtcattaaagaaggccatgggaagataccctcaaaattttctacgtgctttgtgcattacagagcatgggtacaaagctctatgcataaatttgaggatacctggcaagaacagcatccagttgaaattgtcatcggaaaagagaaaaagcaaatgtccggtttgggtattggtgttggtcacatgaaaagtggggaacgtgcactgttgcatgttagctgggagctaggctatgggaaagaaggaagcttttcattcccgaatgtccctccatcagcagaccttatatatgaagttgaactcattggttttgatgatgctaaagagggaaaagcccgtagtgacatgacggtagaagagaggattgaagcagcggataggaggaagcttgagggcaacgattactttaaagagaagaaatttgaggaggctatgcagcaatacgagatggctgttgcgtatatgggagatgatttcatgtttcagttgtttgggaagtacagagatatggctttggctgtgaaaaacccgtgccatctcaacatggctgcttgcctgatcaaacaaaagagatttgacgaagctatcgcacagtgtagcattgtgctgtcagaggacgaaaccaacgtgaaagcactgttcagacgtggaaaagctagagccgagctcggccagacagaatcagcgagggaggactttctgaaagccaagaaacactccccggaagacaaggagatcatgcgggagcttcggtcgctggcggaacaagataaagcgatgtaccagaagcagagggagctatacaaaggtctgtttgggccgaggcctcagcccaaacccaaggccaaaaatttcgccgtcctcttctggcagtggctggtgtcactgctccgttatcttgccaggatgttcacgcgcaagaatgactagggtggctctgatgcaagtgctgctggcggcataccgacacgacaagggaaaacctgatgatacatctatagcttgtggtcaagacacaaccttcctctatatatacttgagtacaattgttttggtatggagttttgccgcgcactttggactggaggggatggtctctttgtgtttatgaagattggaactgcagtttcagtttcagaatgtccttccttccacttggataacagtgattcactgggaaggcagagtgttcagggcctaagatctaggatatctcgtgttgtattactagtatagtgtttgcaagcacattattctggtgaaaacaaaaaaaaaaaaaaaa

SEQ ID NO: 5116 - protein, 370 aa, Triticum aestivum
  misc_feature: Ceres CLONE ID no. 1033488
  misc_feature: Ceres CDNA ID no. 40041384
  misc_feature (237)..(270): Pfam Name: TPR_1 PFAM Desc: Tetratricopeptide repeat
  misc_feature (66)..(163): Pfam Name: FKBP_C PFAM Desc: FKBP
  misc_feature: Homolog of GI Number: 77548684 NR Desc: FKBP
  misc_feature: Homolog of GI Number: 77553676 NR Desc: FKBP
  misc_feature: Homolog of GI Number: 20260220 NR Desc: FKBP
  misc_feature: Homolog of GI Number: 51471872 NR Desc: putative FKBP
  misc_feature: Homolog of GI Number: 73919362 NR Desc: 70 kDa peptidylprolyl isomerase
  misc_feature: Homolog of GI Number: 1354207 NR Desc: rof1
  misc_feature: Homolog of GI Number: 9294180 NR Desc: peptidylprolyl isomerase
  misc_feature: Homolog of GI Number: 854626 NR Desc: peptidylprolyl isomerase
  misc_feature: Homolog of GI Number: 10177347 NR Desc: peptidylprolyl isomerase
  misc_feature: Homolog of GI Number: 50947791 NR Desc: putative 70 kDa peptidylprolyl isomerase
MPEDAAPIAPAPASDLTAGSSDDEITVEDASFARTELPQDGSAPPVVTTDMEVLHDKVKKQVIKEGHGKIPSKFSTCFVHYRAWVQSSMHKFEDTWQEQHPVEIVIGKEKKQMSGLGIGVGHMKSGERALLHVSWELGYGKEGSFSFPNVPPSADLIYEVELIGFDDAKEGKARSDMTVEERIEAADRRKLEGNDYFKEKKFEEAMQQYEMAVAYMGDDFMFQLFGKYRDMALAVKNPCHLNMAACLIKQKRFDEAIAQCSIVLSEDETNVKALFRRGKARAELGQTESAREDFLKAKKHSPEDKEIMRELRSLAEQDKAMYQKQRELYKGLFGPRPQPKPKAKNFAVLFWQWLVSLLRYLARMFTRKND

SEQ ID NO: 5117 - DNA, 893 bp, Triticum aestivum
  misc_feature: Ceres CLONE ID no. 1033671
  misc_feature: Ceres CDNA ID no. 25446485
  CDS (85)..(687): REFERENCED BY SEQ ID NO: 5118
gccccgcgcgccgattccactaggttttccaactcccctgcaaccgccgccgccacctcccctccccccaccacaccctcagccatggcggtcgcggagccggtgcccgggggcgacgtgaagctcttcaaccgctggaccttcgaggatgttcaggtgaccgacatctcgctgaacgactacctcgcggtgacgtcgatgaagcactacactttcctgccgcactccgccggtcgctactcggccaagcgcttccgcaaggcgcagtgccccatcatcgagcgcctcaccaactccctcatgatgcacgggcgcaacaacggaaagaagatcatggccgtccgcatcatcaagcacaccatggagatcatccacctcctcaccgacgccaaccccatccagatcatcgttgatgccatcatcaacagtggtccacgtgaggatgctacccgtattgggtctgctggtgttgtgaggaggcaggctgtggatatctcccccctgaggagggtgaaccaggctatctaccttctgaccactggtgccagggagagcgccttcaggaacgtcaagaccattgctgagtgccttgctgatgagctgatcaatgctgccaagggctcatccaacagctatgccatcaagaagaaggacgagattgagcgtgttgccaaggctaaccgttaagatggatgtgcatctgagggtctcgcttttggctggagattttgaagtgaatgtgttttacaagatatctagaactgttttagctatgcgttaagttttatggaatgaacatttcgatgtagtggcaagaacgtgcctgatgcttgtctttgtgaaacctattcctgttcagacatatttggatatgttgaaaaaaaaaaaaaaaa

SEQ ID NO: 5118 - protein, 200 aa, Triticum aestivum
  misc_feature: Ceres CLONE ID no. 1033671
  misc_feature: Ceres CDNA ID no. 25446485
  misc_feature: The plant flowers significantly late compared to wild-type.
  misc_feature: The plant is abnormally small.
  misc_feature: Useful for making plants with modulated biomass
  misc_feature: Useful for making plants with modulated flowering time
  misc_feature (47)..(200): Pfam Name: Ribosomal_S7 PFAM Desc: Ribosomal protein S7p/S5e
  misc_feature: Homolog of GI Number: 77550926 NR Desc: ribosomal protein S7
  misc_feature: Homolog of GI Number: 34893994 NR Desc: putative 40S ribosomal protein S5
  misc_feature: Homolog of GI Number: 4056502 NR Desc: 40S ribosomal protein S5
  misc_feature: Homolog of GI Number: 3043428 NR Desc: 40S ribosomal protein S5
  misc_feature: Homolog of GI Number: 6671950 NR Desc: putative 40S ribosomal protein S5
  misc_feature: Homolog of GI Number: 21617886 NR Desc: 40S ribosomal protein S5
  misc_feature: Homolog of GI Number: 40748265 NR Desc: 40S ribosomal protein S5
  misc_feature: Homolog of GI Number: 48120555 NR Desc: similar to ribosomal protein S5
  misc_feature: Homolog of GI Number: 34854534 NR Desc: similar to ribosomal protein S5
  misc_feature: Homolog of GI Number: 62083399 NR Desc: ribosomal protein S5 isoform A
  misc_feature: Useful for delaying flowering time
  misc_feature: Useful for increasing chlorophyll and photosynthetic capacity
  misc_feature: Useful for increasing increasing anthocyanin content
  misc_feature: Useful for making lethal plants for genetic confinement systems
  misc_feature: Useful for making ornamental plants with modified leaves
  misc_feature: Useful for making plants with altered leaf shape eg curled leaves
  misc_feature: Useful for making plants with increased biomass and foliage
  misc_feature: Useful for making plants with increased biomass and foliage
  misc_feature: Useful for making plants with increased biomass and foliage
  misc_feature: Useful for making shorter plants
MAVAEPVPGGDVKLFNRWTFEDVQVTDISLNDYLAVTSMKHYTFLPHSAGRYSAKRFRKAQCPIIERLTNSLMMHGRNNGKKIMAVRIIKHTMEIIHLLTDANPIQIIVDAIINSGPREDATRIGSAGVVRRQAVDISPLRRVNQAIYLLTTGARESAFRNVKTIAECLADELINAAKGSSNSYAIKKKDEIERVAKANR

SEQ ID NO: 5119 - DNA, 965 bp, Triticum aestivum
  misc_feature: Ceres CLONE ID no. 1033682
  misc_feature: Ceres CDNA ID no. 25891725
  CDS (265)..(669): REFERENCED BY SEQ ID NO: 5120
aaaacgctttacctctcagttctcttcgtccctggacattcttccggtcaccatcggagccggcgaccggtggcgaccgcgcggggacgccgttccctctcataactgtcgcacgccgggacgccgagcgatctcctacccccacccccatcccagtctaccacagcgacaccgtgtgagatccgtgcttcatcggtaggctcagttggtgccttggtggactagtgaactgaaactgtattaatatcttcaggctctggtgcaatggcctacgagatcagtgagatcaaaaaaattggcataggtctggtgggctttggcatcctgttctcgttcctaggtgttatccttttttttgacaggggtttgttggctctgggtaatattttcttcttgactggagtaggccttcttctcggttggcaatctatgtggcagctatttacaaagaaggcaaacattaagggatctgtacctttcttccttggtctctttcttctatttgtcagatggcctgttgctggtataatcctggaactgtatggatcttttgtcctcttcagtggttacgggcctcctatccaagccttcctatatcagattccaatcattggatggattctgcaatacccctttcagctatttggtctgaggcgtaagcgtgcttgacaattatggtggcagaaattcatgataattcatggggaaatagcatattgcccaatgttaaattgtcagtagaaaattattgtagccttcatcttttgtaactaagctctttaacactgcatctgcatgacatgggctttctaaccttggttgtgatgacttctacccttcaatcaacagtcggtagatgatagtttaatattttaagttcatacgtcaacaaagtaatgccatcaaatatgtggctggattatgggttttgtttggacttgagagacacaaaaaaaaaaaaaaaa

SEQ ID NO: 5120 - protein, 134 aa, Triticum aestivum
  misc_feature: Ceres CLONE ID no. 1033682
  misc_feature: Ceres CDNA ID no. 25891725
  misc_feature (29)..(127): Pfam Name: Got1 PFAM Desc: Got1
  misc_feature: Homolog of GI Number: 51964144 NR Desc: PREDICTED OJ1669_F01.17 gene product
  misc_feature: Homolog of GI Number: 78708240 NR Desc: Got1
  misc_feature: Homolog of GI Number: 38603916 NR Desc: At3g03180
  misc_feature: Homolog of GI Number: 50938913 NR Desc: NFkB activating protein
  misc_feature: Homolog of GI Number: 68365016 NR Desc:  similar to UPF0198 protein CGI
  misc_feature: Homolog of GI Number: 56207276 NR Desc: novel protein similar to human and mouse CGI
  misc_feature: Homolog of GI Number: 24642432 NR Desc: CG32576
  misc_feature: Homolog of GI Number: 17945675 NR Desc: RE29988p
  misc_feature: Homolog of GI Number: 76666457 NR Desc:  similar to UPF0198 protein CGI
MAYEISEIKKIGIGLVGFGILFSFLGVILFFDRGLLALGNIFFLTGVGLLLGWQSMWQLFTKKANIKGSVPFFLGLFLLFVRWPVAGIILELYGSFVLFSGYGPPIQAFLYQIPIIGWILQYPFQLFGLRRKRA

SEQ ID NO: 5121 - DNA, 704 bp, Triticum aestivum
  misc_feature: Ceres CLONE ID no. 1033791
  misc_feature: Ceres CDNA ID no. 25891843
  CDS (86)..(478): REFERENCED BY SEQ ID NO: 5122
acgttcctcaacatcgtcatttcactttggaaaattcaaactacgaagaaacagattcagatccaccgatctagatccgcgacgaatggctctcgaatgggttgtactaggctacgccgcggcggccgaagcgatcatgatcgtgctcctgacgatgccggggctcgacggactccgcaaggggctcgtcgccgtcacgcgcaacctcctgaaaccgtttctatccatcgtcccgttctgcctcttcctgctgatggacatctactggaagtacgagacgatgccttcgtgcgacggagactcctgcacgccttccgagcacctccgccaccagaaatcgatgatgaaatcccagaggaacgcgatcctcatcgcggccgcgctcgtgttctactggatcctcttctcggtcactcatctggtggtcaagatcgagcagcttagccagagggttgagaggctcaagaacaaggattgatccatcgtctttcgtctcaggtccaatttagtgcgatgccgttttgattttgtagtatcttgtgtgttttgtttgtgcgtttatcttctggacattgaaggacctaatcgttgctacttttatatgcttgtttgcttaaacagattgagattttgagttttgattggctcataatattttaattaattgagattagcattggttgatcctaaaaaaaaaaaaaaaa

SEQ ID NO: 5122 - protein, 130 aa, Triticum aestivum
  misc_feature: Ceres CLONE ID no. 1033791
  misc_feature: Ceres CDNA ID no. 25891843
  misc_feature: Homolog of GI Number: 28207685 NR Desc: Erwinia induced protein 2
  misc_feature: Homolog of GI Number: 50912505 NR Desc: Erwinia induced protein 2
  misc_feature: Homolog of GI Number: 8778685 NR Desc: T1N15.5
MALEWVVLGYAAAAEAIMIVLLTMPGLDGLRKGLVAVTRNLLKPFLSIVPFCLFLLMDIYWKYETMPSCDGDSCTPSEHLRHQKSMMKSQRNAILIAAALVFYWILFSVTHLVVKIEQLSQRVERLKNKD

SEQ ID NO: 5123 - DNA, 1324 bp, Triticum aestivum
  misc_feature: Ceres CLONE ID no. 1041332
  misc_feature: Ceres CDNA ID no. 40041385
  CDS (78)..(956): REFERENCED BY SEQ ID NO: 5124
ctaacctcgccggactcgcaatcgttccggccaatccacatcgccgaacagctccagcccaaaccctagctcagcacatggaccacgacgccgccgccgcttccccgtctgcctcgccctcctcctccggtgcctccccctcgccgcgctccaagcgtcgccgcaccgaccgctatgcgctcggcttcgagttcgctccgcgctctgcgccctcagctccggccccgcgcacgacgcctgagtggacggaggagtccaccttcgcgctcctcgacgcctggggcgaacgcttcgcctgcgacggccgccgcagcctcagcgccgacgagtggctcgaggtctcccgcatcgtagccgccgccgcctcccgccccgcgggatacttctccgagtcgcagtgccgcaaccgcatcgacaccctcaggaagatgtttcggaaggagaaggagaggtcccgcctggctgcccaccgctccagcaacccctcgccactactgccgccactaactcctctcgtgacgcggcgccgtgacacgcatccagtgccacgccgttcgtggggggtggacgtcggggagcttgtgctcgctggatgtagcaaagtggtaccagggaattcagtgccagatgcgcaattgaggggaaaacagacatatgaggctggcgcagtgcagggggaggaatttgcgattctcacagaggcaattcataggcttagggaggtttatgagagagtggagagtagcaggaggcagcacatggcggagttgaaacgtatgcggaaggatatgcaaagggaccttgaggtgaggcggagagagattttggaaaaggcacaaatggagatagcgagtcttgaggaggaggatgcaaaggagggtgctgttaacaatagattagaggatcacaatggtgttgaggagcagaacaatggcgctttggatgcttctccttagcccagcacgtacaagttcagcaaatgaggaacaaagctgggatatcatgtcaatagttggatccacaaggtgtttcagacacaaaatggggatttcatgtcaatagttggatccggtagccttaattacgattggtaatgttagatattaggattgtcagatatccgagtttaactcaatctgtcgacaccctgtgtagtttgttgtataactatcttttgtatcacccgtgtgaagctgaacaaaatatcagtgagtacttaattgttgtattttcaccacgtggatgaagattaatatggatcaataacatgtgatttgaccaatataagcttggctaatttgtagtgcgaaaaaaaaaaaaaaaa

SEQ ID NO: 5124 - protein, 292 aa, Triticum aestivum
  misc_feature: Ceres CLONE ID no. 1041332
  misc_feature: Ceres CDNA ID no. 40041385
  misc_feature: Homolog of GI Number: 34910652 NR Desc: P0480C01.17
  misc_feature: Homolog of GI Number: 50924578 NR Desc: OSJNBa0027P08.13
  misc_feature: Homolog of GI Number: 50909591 NR Desc: putative 6b
  misc_feature: Homolog of GI Number: 18149189 NR Desc: 6b
  misc_feature: Homolog of GI Number: 14253159 NR Desc: VMP3 protein
  misc_feature: Homolog of GI Number: 73852838 NR Desc: putative membrane protein
  misc_feature: Homolog of GI Number: 32420163 NR Desc: predicted protein
MDHDAAAASPSASPSSSGASPSPRSKRRRTDRYALGFEFAPRSAPSAPAPRTTPEWTEESTFALLDAWGERFACDGRRSLSADEWLEVSRIVAAAASRPAGYFSESQCRNRIDTLRKMFRKEKERSRLAAHRSSNPSPLLPPLTPLVTRRRDTHPVPRRSWGVDVGELVLAGCSKVVPGNSVPDAQLRGKQTYEAGAVQGEEFAILTEAIHRLREVYERVESSRRQHMAELKRMRKDMQRDLEVRRREILEKAQMEIASLEEEDAKEGAVNNRLEDHNGVEEQNNGALDASP

SEQ ID NO: 5125 - DNA, 1109 bp, Triticum aestivum
  misc_feature: Ceres CLONE ID no. 1041432
  misc_feature: Ceres CDNA ID no. 25892072
  CDS (127)..(795): REFERENCED BY SEQ ID NO: 5126
cttcctggacccaaggccagatcagatcagctcaggccgcctccgcttcccgaccccagttccaatttcgattcccacccccacccccgcccctcgggaccgaggaggaggaggaggaggaggaggatggcgatcgtgtacgcgctcgtggcgcggggcacggtcgtgctggccgagttcgccgccgtctcgggcaacgccggcgccgtcgcccgccgcatcctcgagaagctcccctccgaggccgaggcgcgcctctgcttcgcgcaggaccgctacatcttccacgtcctccgctcccccgccgacggcctcaccttcctctgcatggccaacgacaccttcggacggagagttcccttcatttatctcgaggacatccagatgaggttcatgaagaactatggcagggtcgcccattctgcgctggcctatgccatgaacgacgagttcgccagggtgttgcaccagcaaatggagttcttctccagtaaccccagtgccgacacgctcaaccgcctccggggtgaagtcagtgagatacacaccgtcatggttgacaacatagagaagattctggacagaggcgaccgcatctcgcttcttgtagacaagacctccacaatgcaggacagcggttttcacttccgcaagcaatccaagaggcttcggagagctctctggatgaagaatgtcaagcttctagcggtgttgacgggggtcattgtgctgctactttacctgatcattgctgctttctgcggaggcctatcccttccatcgtgcagatcatagaacactagctctacacctccatacatgatgttccaagttcggctcagcttccagagctaaaaccttatgttttggtcaacagattcgcagttgagttctcggtagattgtttttgctcatacaagtcgatatgaaatgtttgtacaaaaaccgggtccgtgtgtacagtatgaaatgtcgtttgtgcttcctttgggtatgttgtggcactagttaagagttgctcggtgcactggttcgtcgaaatttttactgatgtatagtacctccctttctggaaaagatgtgaacactgaacaaaaaaaaaaaaaaaa

SEQ ID NO: 5126 - protein, 222 aa, Triticum aestivum
  misc_feature: Ceres CLONE ID no. 1041432
  misc_feature: Ceres CDNA ID no. 25892072
  misc_feature (126)..(213): Pfam Name: Synaptobrevin PFAM Desc: Synaptobrevin
  misc_feature: Homolog of GI Number: 78707797 NR Desc: Synaptobrevin
  misc_feature: Homolog of GI Number: 31430244 NR Desc: putative synaptobrevin
  misc_feature: Homolog of GI Number: 9757817 NR Desc: synaptobrevin
  misc_feature: Homolog of GI Number: 21593706 NR Desc: synaptobrevin
  misc_feature: Homolog of GI Number: 34898442 NR Desc: ESTs AU082579
  misc_feature: Homolog of GI Number: 4567243 NR Desc: putative synaptobrevin
  misc_feature: Homolog of GI Number: 78707798 NR Desc: Synaptobrevin
  misc_feature: Homolog of GI Number: 51090589 NR Desc: putative synaptobrevin 1
  misc_feature: Homolog of GI Number: 21436025 NR Desc: AT5g22360/MWD9_16
  misc_feature: Homolog of GI Number: 50415577 NR Desc: Sybl1
MAIVYALVARGTVVLAEFAAVSGNAGAVARRILEKLPSEAEARLCFAQDRYIFHVLRSPADGLTFLCMANDTFGRRVPFIYLEDIQMRFMKNYGRVAHSALAYAMNDEFARVLHQQMEFFSSNPSADTLNRLRGEVSEIHTVMVDNIEKILDRGDRISLLVDKTSTMQDSGFHFRKQSKRLRRALWMKNVKLLAVLTGVIVLLLYLIIAAFCGGLSLPSCRS

SEQ ID NO: 5127 - DNA, 690 bp, Triticum aestivum
  misc_feature: Ceres CLONE ID no. 1041479
  misc_feature: Ceres CDNA ID no. 25400916
  CDS (1)..(465): REFERENCED BY SEQ ID NO: 5128
acaagacccggtgcccaggtacgtttccctgcctcccaccctaacctagcaacctaccacctctcaccgatggcgacgacgagctcccctcgtctcctacctctcccctcctccacctccacctgcacctcgtccgccctcccaccagtctgtccttcccgcctccgcttcaatccaccagcagcagcagcaggcgcggtttctacttccgccttgggccgtggctgcagttcttggctcagcctccgctgccgaagcgctgccggacccttgccgccctcctccgagccaccgcctccatctcctcaagattggcaagagaggttgtcaagattacaggatacgttacggatattctttgcagttctcttctggatgtcactgtttttctggggcagtgcttggggtggaagtaacaactcagggggcaagaagggccagcgatttcgaaacaaatccaagtgaataagccctaggaatggttagtgtctcagttttactggtatatatataactttcctgtgttcgtatgaacaagcaagtggtattatacatcctgctcaggtgcacagtggattcgcatgtattcaaatgtaacattgtgtgtagcgttgcaaagcttctctttgatatatgatatgccacgcgaggtgggcgaaaattagggatatgcgaaaaaaaaaaaaaaaa

SEQ ID NO: 5128 - protein, 131 aa, Triticum aestivum
  misc_feature: Ceres CLONE ID no. 1041479
  misc_feature: Ceres CDNA ID no. 25400916
MATTSSPRLLPLPSSTSTCTSSALPPVCPSRLRFNPPAAAAGAVSTSALGRGCSSWLSLRCRSAAGPLPPSSEPPPPSPQDWQERLSRLQDTLRIFFAVLFWMSLFFWGSAWGGSNNSGGKKGQRFRNKSK

SEQ ID NO: 5129 - DNA, 862 bp, Triticum aestivum
  misc_feature: Ceres CLONE ID no. 1041548
  misc_feature: Ceres CDNA ID no. 25891081
  CDS (1)..(357): REFERENCED BY SEQ ID NO: 5130
acagcctcgcacctctctccccacgaccacggaaaccctaatccatctccacctacagccgccgactcctctccctccctgttcccgattcagatccatgcccagcctccctcccagcgcggctgccacaccctcgatctcccgcgccgccgtcccaacgatctcccgctccatcttcgtctcccaccatctatcgctcctccactgccccaccctctccccctatgcagcctactcagatctgcgatgggggcacccgcggcggtagcggcggtccggcatccgcgtcaaggtcagccccttgctcgtcttcatgggtgtggtggtcgaggaaggtggttgaggtcggcgagataaacgttctcgcctacccgctggccaggaccaaggacggctgccccgacactccgtctccttcacaatctcgcgctgggaaaggagggggtggccgctgttttctttggcactccttggccttttttgcatcgccacaggtgacctcgccggaccacttgctgtgaaggtggaggagataactgaagtcgagggtgcggttaatgacatcaaatgtgttgatgaaatagagccttctgaagaacagaggagaaaaatacagaaaggtaattgaggtagaacagaagatattacactagtttcgttttgaagggtaacacgacttgggatggaacaaatgatgctacacttaagatagggaacacgacacacagattatatgtatctaaatgtctggtgtgattgtgagatgtaattgtaatctgctatggtggtctgaattttgtacttgtgaatctgtagttgtgcattatattattgtttttttttgccaaaaaaaaaaaaaaaa

SEQ ID NO: 5130 - protein, 98 aa, Triticum aestivum
  misc_feature: Ceres CLONE ID no. 1041548
  misc_feature: Ceres CDNA ID no. 25891081
MQPTQICDGGTRGGSGGPASASRSAPCSSSWVWWSRKVVEVGEINVLAYPLARTKDGCPDTPSPSQSRAGKGGGGRCFLWHSLAFFASPQVTSPDHLL

SEQ ID NO: 5131 - DNA, 765 bp, Triticum aestivum
  misc_feature: Ceres CLONE ID no. 1041601
  misc_feature: Ceres CDNA ID no. 35383322
  CDS (87)..(518): REFERENCED BY SEQ ID NO: 5132
atcgcaactcgcagcagttcaatacttgcacaaccatacacatcacacatcacctgtagatcgaccggtgcacgtaaggcgcgacaatggagtaccaggggcagaccggccacgccaccgacaaggtggaggagtacggccagcccgtggccgggcacggcggcgccaccgacggccccacggggacgcacggcgccgcagccgccgcgggcaccgggcagctccagccgaccagggacgaccacaagaccgacggtgtcctgcgccgctccggcagctccagctccagctcgtctgaggacgacggcgttggcgggaggaggaagaaggggatgaaggagaagatcaaggagaagctccccggcggagcccacaaggacgccaccgggcagcagcacacgccggcggccggcgagtacgccggcaccggcaccggcacccacggcgcggaggccaccggcgagaagaaaggcgtcatggacaagatcaaggagaagcttcccggcggacagcactaagttaagctaggcagctagcgatcgccctgtgctgtgtctgtgttcggtcaaagctcggtatcatgcgtacttctgcatgcgttcgtacggataaataatgggcgccgatcgaggtgccggagtatatatgttgtgtgtgtgacgtatttgtggaccccgtgtacatgtatttgtactgaagtgctaaaaccccatcgtaataaagcgctcgtttatatttgtgttttgtagaaaaaaaaaaaaaaaa

SEQ ID NO: 5132 - protein, 143 aa, Triticum aestivum
  misc_feature: Ceres CLONE ID no. 1041601
  misc_feature: Ceres CDNA ID no. 35383322
  misc_feature (11)..(143): Pfam Name: Dehydrin PFAM Desc: Dehydrin
  misc_feature: Homolog of GI Number: 6017930 NR Desc: dehydrin
  misc_feature: Homolog of GI Number: 18968 NR Desc: dehydrin
  misc_feature: Homolog of GI Number: 4105105 NR Desc: dehydrin 2
  misc_feature: Homolog of GI Number: 18966 NR Desc: dehydrin
  misc_feature: Homolog of GI Number: 296198 NR Desc: dehydrin 7
  misc_feature: Homolog of GI Number: 59894261 NR Desc: dehydrin 1
  misc_feature: Homolog of GI Number: 59894257 NR Desc: dehydrin 1
  misc_feature: Homolog of GI Number: 59894275 NR Desc: dehydrin 1
  misc_feature: Homolog of GI Number: 59894243 NR Desc: dehydrin 1
  misc_feature: Homolog of GI Number: 59894265 NR Desc: dehydrin 1
MEYQGQTGHATDKVEEYGQPVAGHGGATDGPTGTHGAAAAAGTGQLQPTRDDHKTDGVLRRSGSSSSSSSEDDGVGGRRKKGMKEKIKEKLPGGAHKDATGQQHTPAAGEYAGTGTGTHGAEATGEKKGVMDKIKEKLPGGQH

SEQ ID NO: 5133 - DNA, 561 bp, Triticum aestivum
  misc_feature: Ceres CLONE ID no. 1041753
  misc_feature: Ceres CDNA ID no. 36530678
  CDS (177)..(308): REFERENCED BY SEQ ID NO: 5134
ctattgcagcaaattctccagcatcagttggtactgcaggatatggctatgtagctaataaccatggtacaggagggccagcaattggacagccacctgcacctgccactaatagtaaaacgtctgctactcaaccagctacgagtgaggtctatctggtgtgggatgatgaagcaatgtcaatggaggaaagaaggttggcgctgcccatgtaccaggtgcatgacgaaactagccagatgagctcggttgatgcagcgttcgatcgaagaatatcagatattacattttctagacaattgacataaacaagctgcgcctggtgttcagtaaacagcttgatgcgattcaccaacgggctcacccgtgcatccatgggagggacgccgtgcaatcggtggtcctggatcccccctgttgttgatctacttagttagtgactggagctaccgcagtggaaagattgtgttggtctgacttggagattttgattcaacatcgtttgtcctgtcttttcgtaccgagagtggaaacctgttagacctaaaaaaaaaaaaaaaa

SEQ ID NO: 5134 - protein, 43 aa, Triticum aestivum
  misc_feature: Ceres CLONE ID no. 1041753
  misc_feature: Ceres CDNA ID no. 36530678
  misc_feature: Homolog of GI Number: 52077050 NR Desc: zinc finger protein
  misc_feature: Homolog of GI Number: 14517410 NR Desc: At1g30970/F17F8_14
  misc_feature: Homolog of GI Number: 62320182 NR Desc: putative 11
  misc_feature: Homolog of GI Number: 21553740 NR Desc: putative zinc finger protein
  misc_feature: Homolog of GI Number: 15293211 NR Desc: putative zinc finger protein
  misc_feature: Homolog of GI Number: 9755379 NR Desc: F17F8.14
MSMEERRLALPMYQVHDETSQMSSVDAAFDRRISDITFSRQLT

SEQ ID NO: 5135 - DNA, 887 bp, Glycine max
  misc_feature: Ceres CLONE ID no. 1041766
  misc_feature: Ceres CDNA ID no. 35383323
  CDS (87)..(662): REFERENCED BY SEQ ID NO: 5136
tcactgccgcggaaacagaacagggactcactctcttcgcagcggcactctcggtggctttcatcttctcggggtgagttgtcaagatgtacacatcgaggaagaaaattcacaaggataaggatgctgagccaactgaatttgaggaatcagttggacaggcattgtttgatctagaaaataccaacaatgagctgaaaagtgatctgaaagatttatacataaactcagctgtccaaattgatgtttctggcaaccgaaaggctgtggttatccatgtcccctacagactaaggaaaggattccggaagattcatgtcaggcttgtgagagaacttgagaaaaagtttagtggaaaagatgtaatcttgattgccaccaggaggatagtaaggccaccaaagaaaggttctgctgttcagcgcccccgcaccagaacactcactgctgtacatgaggcaatgctggaagatattgtattgcctgctgagattgttggaaagcgtgttaggtataaaattgatggttccaagattatgaaggtctttttggaccccaaggagcgaaacaataccgagtacaagttggagacttttgctgcagtatacaggaaactttcaggcaaaggtgtcgtgtttgagtatcctactaccgaggcttaggttctatttgttagctttgaatttcttcctgaattacatatggtggatgctggttttgttaagttggctttaattctggattttctttagttacttatagaaaatactgtgtcctggtttatcaatgtagaatttgatatattttcttgtaacatcctatgaatccgtatttttaagattttaacatcctatgaatccgtatttttaagaaaaaaaaaaaaaaaa

SEQ ID NO: 5136 - protein, 191 aa, Glycine max
  misc_feature: Ceres CLONE ID no. 1041766
  misc_feature: Ceres CDNA ID no. 35383323
  misc_feature: The plant is abnormally large.
  misc_feature: The plant is abnormally small.
  misc_feature: Useful for making plants with modulated biomass
  misc_feature (4)..(191): Pfam Name: Ribosomal_S7e PFAM Desc: Ribosomal protein S7e
  misc_feature: Homolog of GI Number: 77999315 NR Desc: ribosomal protein S7
  misc_feature: Homolog of GI Number: 4128206 NR Desc: 40S ribosome protein S7
  misc_feature: Homolog of GI Number: 57471724 NR Desc: ribosomal protein S7
  misc_feature: Homolog of GI Number: 22671664 NR Desc: ribosomal protein S7
  misc_feature: Homolog of GI Number: 4588906 NR Desc: ribosomal protein S7
  misc_feature: Homolog of GI Number: 55167942 NR Desc: putative 40S ribosomal protein S7
  misc_feature: Homolog of GI Number: 14787424 NR Desc: Ribosomal protein S7
  misc_feature: Homolog of GI Number: 21555683 NR Desc: 40S ribosomal protein S7 homolog
  misc_feature: Homolog of GI Number: 6957719 NR Desc: putative 40S ribosomal protein
  misc_feature: Homolog of GI Number: 5532505 NR Desc: 40S ribosomal protein S7 homolog
  misc_feature: Useful for decreasing plant size
  misc_feature: Useful for delaying flowering time
  misc_feature: Useful for increasing chlorophyll and photosynthetic capacity
  misc_feature: Useful for making larger plants
  misc_feature: Useful for making ornamental plants with modified flowers
  misc_feature: Useful for making ornamental plants with modified leaves
  misc_feature: Useful for making plants with altered leaf shape eg curled leaves
  misc_feature: Useful for making plants with increased biomass
  misc_feature: Useful for making plants with increased biomass and foliage
  misc_feature: Useful for making plants with increased biomass and foliage
MYTSRKKIHKDKDAEPTEFEESVGQALFDLENTNNELKSDLKDLYINSAVQIDVSGNRKAVVIHVPYRLRKGFRKIHVRLVRELEKKFSGKDVILIATRRIVRPPKKGSAVQRPRTRTLTAVHEAMLEDIVLPAEIVGKRVRYKIDGSKIMKVFLDPKERNNTEYKLETFAAVYRKLSGKGVVFEYPTTEA

SEQ ID NO: 5137 - DNA, 850 bp, Glycine max
  misc_feature: Ceres CLONE ID no. 1041793
  misc_feature: Ceres CDNA ID no. 25445655
  CDS (2)..(703): REFERENCED BY SEQ ID NO: 5138
aagaattgggtcccacgcgcctgcgacgtcagcatcattacaccgtactctctctctctctctccattgtccccctttatatataagcctcaccagatctcttcgccaccacaacccaccgtgtcaactctccttcaaacaccagcgattaaacttgtctctctttaatctcttaataccaaaacgctaccgttttgctcttttatttctctctctctctatggattgcaagaagcgagttcgggatgactcggacgaatcaattctggaatcgcccgaggcgaaacgactcagggacgatttactcgagttcttcgacgacgccgatgatgcagcttccactcaggaccttgactccgtcatgaagagcttgcaggaggagatttccggcgtgacgtcagattacggcgagtctcaggcgcagatcggatacctcctggaggcctccgacgacgatcttgggcttcctcccgccggaaactcgtcggcgccacaggagaagaacgtggaggccgagttggttcgagtcgcgtctgactcgtccggaatcggcgagttgtgggagtttgaggaccagattccgagatacgactcgttcgatttgggaatggggttcggttatgagtgcgatgctaccgaatacgctgcgtttggtgaacttttcgatcattctgatgtgtattatgactcgtggcggcaatagagatttaatgaaaactaaagggaaaaaagggttttagagatgtaaatgtttcttctcagcttttttattcttttagatgaagggaattacagaagaaagattataaagaaggacttgggataacaagatgcaaaaaaaaaaaaaaaa

SEQ ID NO: 5138 - protein, 160 aa, Glycine max
  misc_feature: Ceres CLONE ID no. 1041793
  misc_feature: Ceres CDNA ID no. 25445655
MDCKKRVRDDSDESILESPEAKRLRDDLLEFFDDADDAASTQDLDSVMKSLQEEISGVTSDYGESQAQIGYLLEASDDDLGLPPAGNSSAPQEKNVEAELVRVASDSSGIGELWEFEDQIPRYDSFDLGMGFGYECDATEYAAFGELFDHSDVYYDSWRQ

SEQ ID NO: 5139 - DNA, 754 bp, Glycine max
  misc_feature: Ceres CLONE ID no. 1041817
  misc_feature: Ceres CDNA ID no. 25892483
  CDS (105)..(629): REFERENCED BY SEQ ID NO: 5140
atacaagatccccaatttctctatttttcctccgtttctattgcaatttctcaattactacgtcgtattctgcaaattcaaactgggtcttggttttctgaaagatgggaggtggcaaggacaagcaccatgatgaatctgacaaaggaattttttcacagcttgctcatggggtagctggtgcagcacatggtggacatgggtacccacctggggcttacccaccaccacctggggcataccctccgcaccaagggtaccctccacaacatgggtatcctccggctgggtaccctccacatcaaggttaccctcctgctggttacccaccagctggttatcctggttcatctcatgcaccaggttctcatgggcacggcggcatgggagcaatgctcaccgggggtgctgccgcggctgctgctgcttatggtgctcaccatgtctctcatggctcccatggctcctatgaccaatatgctgcacatggtgctcacatgccccatggaaaattcaagcagcatggaaagcacggcaagttcaagcatggaaagcatggcaagtttggcaagcatggaaagcatggcaaattcggcaagcatggtggtgggttcaagaagtggaagtgaagaatgtgtatctaactatgattctaaaatgcagctctgtgtagagcttaaatctttataataaaccatactttggatgatgaaatcaatcgatctatgagattatgataaaaaaaaaaaaaaaa

SEQ ID NO: 5140 - protein, 174 aa, Glycine max
  misc_feature: Ceres CLONE ID no. 1041817
  misc_feature: Ceres CDNA ID no. 25892483
  misc_feature: Homolog of GI Number: 6478148 NR Desc: putative glycine and proline
  misc_feature: Homolog of GI Number: 33668156 NR Desc: GPRP
  misc_feature: Homolog of GI Number: 21553447 NR Desc: putative glycine and proline
  misc_feature: Homolog of GI Number: 9755790 NR Desc: glycine/proline
  misc_feature: Homolog of GI Number: 167666 NR Desc: annexin VII
  misc_feature: Homolog of GI Number: 66825303 NR Desc: annexin VII
  misc_feature: Homolog of GI Number: 671859 NR Desc: annexin VII
  misc_feature: Homolog of GI Number: 113965 NR Desc: Annexin A7
MGGGKDKHHDESDKGIFSQLAHGVAGAAHGGHGYPPGAYPPPPGAYPPHQGYPPQHGYPPAGYPPHQGYPPAGYPPAGYPGSSHAPGSHGHGGMGAMLTGGAAAAAAAYGAHHVSHGSHGSYDQYAAHGAHMPHGKFKQHGKHGKFKHGKHGKFGKHGKHGKFGKHGGGFKKWK

SEQ ID NO: 5141 - DNA, 863 bp, Glycine max
  misc_feature: Ceres CLONE ID no. 1041934
  misc_feature: Ceres CDNA ID no. 25447138
  CDS (55)..(633): REFERENCED BY SEQ ID NO: 5142
aaggcacactcccttatttaagcaacatcccaatttcatttcagttacccaaaaatggcatcaaaactgaccctgattgcgttggttgttgcggccctgtgcgccgttgatctaacccagagagcatcatcatcatcatcatcccctcacgcgccagcgccctccgtggactgctccaacctggttctcaccatggccgattgcttgtccttcgtcaccaacggcagcaccgtcacaaagccagagggcacatgctgctctggtttgaagtctgttctcaaaaccgctccggcgtgtctctgcgaggctttcaagagcagcgctcaattcggcgtcgttttgaatgtcaccaaggcaaccactctccctgctgcctgcaaagtctctgctccttctgccaccaactgtggattgtctgagacgcctgctgctgctcctgctggaggcctctctccacaagcttctccatctccccaacaagcagcagatgcttctactaatggtcctgtaaatgaggtatctccagcaccagcaccagcaccagctcaagggaacacagcatcagcattattcccaatttcagctatctccttgtttgttgccatattggtagccacattctcaggcttctgagaggagtttcgttccattttaaagtgtagagagatgacatgagggattattattattttgatgttttctttgggttttaccattggagagctcttcttcattctatgtttgacttaaaacttaaaaagtagataacattcattctgggagtgactcgaatctattttgaggttgtacccgcattttcattatatataagtctatttatttatataaaaaaaaaaaaaaaa

SEQ ID NO: 5142 - protein, 192 aa, Glycine max
  misc_feature: Ceres CLONE ID no. 1041934
  misc_feature: Ceres CDNA ID no. 25447138
  misc_feature (16)..(118): Pfam Name: Tryp_alpha_amyl PFAM Desc: Protease inhibitor/seed storage/LTP family
  misc_feature: Homolog of GI Number: 49204581 NR Desc: xylogen protein 1
  misc_feature: Homolog of GI Number: 20147301 NR Desc: AT5g64080/MHJ24_6
  misc_feature: Homolog of GI Number: 21618136 NR Desc: nonspecific lipid
  misc_feature: Homolog of GI Number: 42573786 NR Desc: protease inhibitor/seed storage/lipid transfer protein
  misc_feature: Homolog of GI Number: 27765012 NR Desc: At2g13820
  misc_feature: Homolog of GI Number: 21592471 NR Desc: putative nonspecific lipid
  misc_feature: Homolog of GI Number: 42570753 NR Desc: protease inhibitor/seed storage/lipid transfer protein
  misc_feature: Homolog of GI Number: 30680828 NR Desc: protease inhibitor/seed storage/lipid transfer protein
  misc_feature: Homolog of GI Number: 15220327 NR Desc: protease inhibitor/seed storage/lipid transfer protein
MASKLTLIALVVAALCAVDLTQRASSSSSSPHAPAPSVDCSNLVLTMADCLSFVTNGSTVTKPEGTCCSGLKSVLKTAPACLCEAFKSSAQFGVVLNVTKATTLPAACKVSAPSATNCGLSETPAAAPAGGLSPQASPSPQQAADASTNGPVNEVSPAPAPAPAQGNTASALFPISAISLFVAILVATFSGF

SEQ ID NO: 5143 - DNA, 769 bp, Glycine max
  misc_feature: Ceres CLONE ID no. 1042040
  misc_feature: Ceres CDNA ID no. 25445656
  CDS (110)..(541): REFERENCED BY SEQ ID NO: 5144
gtacgttaaacataaaaacaaaagcactctcctcttcctcctttcccccgaaaaacccttaaaccccgaccttcatatttgcagtgctagtctgtttatttcttcagctatgtttttgtcaagaacacttggacgaacactatttgctgcagctgccagatcaaaacaatatgccactacagcagctgctgctgctggcagagaaggacacaacccccttcaggagttctttgaggcagacaggagccctgatgatgacaaacctgttgtttatggtcggagttggaaggcgtctgaactgcgtctgaagtcttgggacgaccttcataagttgtggtatgtgttgttaaaggaaaagaacatgttgatgactcaacgtcaaatgcttaatgcacagaacctgcgttttcctaacccggagcgcatccctaaggtgaggaagtcaatgtgtcgcatcaagcatgtacttactgagagagcaattgaagaaccagatcccaggaggtctgctgagatgaaaagaatgataaatgctctttgatgacttaaaattgacctgttcttgtgatgacattactgggtatgttgttagaataggacatctacatttgcggatgtaaggttcgctaacttgaagcattgtccaaaaatattgtttatgaaggagtttacccgtgaatgatttttgcttggttttgtttaagggtcagtccggagggaatctaatcaatcattcattgttccttgcgatctaaaaaaaaaaaaaaaa

SEQ ID NO: 5144 - protein, 143 aa, Glycine max
  misc_feature: Ceres CLONE ID no. 1042040
  misc_feature: Ceres CDNA ID no. 25445656
  misc_feature (37)..(123): Pfam Name: MRP PFAM Desc: Mitochondrial 39
  misc_feature: Homolog of GI Number: 19548071 NR Desc: At1g07830/F24B9_7
  misc_feature: Homolog of GI Number: 8439885 NR Desc: Contains similarity to a mitochondrial ribosomal protein from Saccharomyces cerevisiae gbZ30582.
  misc_feature: Homolog of GI Number: 52075615 NR Desc: ribosomal protein L29 protein
  misc_feature: Homolog of GI Number: 66526686 NR Desc:  similar to CG9378
  misc_feature: Homolog of GI Number: 48141339 NR Desc: similar to ENSANGP00000013554
  misc_feature: Homolog of GI Number: 50752448 NR Desc:  similar to 4833424P18Rik protein
  misc_feature: Homolog of GI Number: 50805778 NR Desc:  similar to 4833424P18Rik protein
  misc_feature: Homolog of GI Number: 68362148 NR Desc:  similar to Mrpl47 protein
  misc_feature: Homolog of GI Number: 23273006 NR Desc: Mrpl47 protein
  misc_feature: Homolog of GI Number: 20810578 NR Desc: Mrpl47 protein
MFLSRTLGRTLFAAAARSKQYATTAAAAAGREGHNPLQEFFEADRSPDDDKPVVYGRSWKASELRLKSWDDLHKLWYVLLKEKNMLMTQRQMLNAQNLRFPNPERIPKVRKSMCRIKHVLTERAIEEPDPRRSAEMKRMINAL

SEQ ID NO: 5145 - DNA, 680 bp, Glycine max
  misc_feature: Ceres CLONE ID no. 1042050
  misc_feature: Ceres CDNA ID no. 25445576
  CDS (117)..(542): REFERENCED BY SEQ ID NO: 5146
aaaagtcaaattaggttttcaaaaacaaatcagaaaacccaaatctatcgtctcttcgctcctcttcactcacgcgcgccatcttctctgtcgcccaggctgaaaaggaatatattatgggtgataggctagtagttgaccaacagcacacgggtgatgcacaacttccatcttctcctccctcaaaagatgatatggtttcgtgtgttatggctttggaggctgctttgcttccctgtttgccagccagagaacttcaagcaatagaccgttccccccacccttcacatcaaattgatgtggataggtatgcaagagattttatggaggctgccaagaagcttcagctttattttatcagcctgcaacgagaggataagccaacaaaacttgaaatgcttagaaaggaggttgctctcatggaagaggagcttaacaaaaaaaatgagctgataaaaaagcaagaaaatttaattcaggagtggaagaaagagttgaaagatcagttggacaaacacaagattgagttggatagggtttagccttatgtctgggctcatctgcactttaaatattcaaggataaatagtcacttttatccttgaatatgtaattcactaacaaatgcgtccttaaaagatgaaaatacaaaattgagtctcctaaaaaaaaaaaaaaaa

SEQ ID NO: 5146 - protein, 141 aa, Glycine max
  misc_feature: Ceres CLONE ID no. 1042050
  misc_feature: Ceres CDNA ID no. 25445576
MGDRLVVDQQHTGDAQLPSSPPSKDDMVSCVMALEAALLPCLPARELQAIDRSPHPSHQIDVDRYARDFMEAAKKLQLYFISLQREDKPTKLEMLRKEVALMEEELNKKNELIKKQENLIQEWKKELKDQLDKHKIELDRV

SEQ ID NO: 5147 - DNA, 675 bp, Glycine max
  misc_feature: Ceres CLONE ID no. 1042060
  misc_feature: Ceres CDNA ID no. 29191397
  CDS (167)..(499): REFERENCED BY SEQ ID NO: 5148
gcatacactctgctcgcagggtttctccaccaagaggtaataatggctgcttctgatccttgcttggtttaatgcgaaattgaaaatcactgttcaacattaacttgtgattgcataagccataagcgaaacaattctgaagcgtgtttgtttttgggacagggaaatggctcccaaaccgcctagtacgggtctgtttgttggactgaacaagggtcacgtcgtcaccaagaaggaattgcctccacgcccctcagatcgtaaggggaaaacaagcaagagggtgcactttgtgaggaacctcataagagaggtagccggttttgcaccctatgaaaagcgtataactgagttgctgaaggttgggaaggataagagggcactgaaggttgcaaagagaaagctcggaacacacaaacgcgcaaagaagaagcgtgaggaaatgtccagtgttctcaggaagatgagggctggtggtgctggagacaagaagaaataagtcttatttactgttttccagattcactagatggacctgtgtattgatggacgagctttcatatttttgctttggttcaattagtttacttcaagattttgtttgagaaatatgttttgcttaactgagacatgatttatggaagaagctagattggattaaaaaaaaaaaaaaaa

SEQ ID NO: 5148 - protein, 110 aa, Glycine max; identical to SEQ ID NO: 4624
  misc_feature: Ceres CLONE ID no. 1042060
  misc_feature: Ceres CDNA ID no. 29191397
  misc_feature (5)..(103): Pfam Name: Ribosomal_L36e PFAM Desc: Ribosomal protein L36e
  misc_feature: Homolog of GI Number: 57471698 NR Desc: ribosomal protein L36
  misc_feature: Homolog of GI Number: 34908154 NR Desc: putative 60S RIBOSOMAL PROTEIN L36
  misc_feature: Homolog of GI Number: 50931673 NR Desc: putative 60S ribosomal protein L36
  misc_feature: Homolog of GI Number: 56182368 NR Desc: putative 60S ribosomal protein L36
  misc_feature: Homolog of GI Number: 12642884 NR Desc: putative 60S ribosomal protein
  misc_feature: Homolog of GI Number: 20148501 NR Desc: 60S ribosomal protein L36
  misc_feature: Homolog of GI Number: 21592383 NR Desc: 60S ribosomal protein L36
  misc_feature: Homolog of GI Number: 1276967 NR Desc: putative ribosomal protein
  misc_feature: Homolog of GI Number: 17865758 NR Desc: 60S ribosomal protein L36
  misc_feature: Homolog of GI Number: 21554932 NR Desc: 60S RIBOSOMAL PROTEIN L36 homolog

SEQ ID NO: 5149 - DNA, 641 bp, Glycine max
  misc_feature: Ceres CLONE ID no. 1042271
  misc_feature: Ceres CDNA ID no. 40351562
  CDS (3)..(437): REFERENCED BY SEQ ID NO: 5150
ctaacaacacaggcgcagacgcaaacgcaaacgcaaacgcaaacgcaaacgcagagcgtgatccattgacgaagatggtgcagcgtctcacctaccgcaagcggcacagctatgccaccaagtccaaccaacacagggtcgtcaaaacccctggtgggaagctcgtttatcagactaccaagaagagggccagcggacccaagtgccccgtcactggcaagaggattcaggggattccacacttgaggcctgcagagtacaagaggtcaaggttacccagaaaccgtaggactgtcaaccgtgcatatggtggagttttatctggaagtgccgtcagggagaggattatccgagccttcttagttgaagagcaaaagattgtgaagaaggtcttgaagatccagaaggcaaaggaaaagcaggcctcaaaggcttgaatttgaaaaacacaatgagacacatctttttggaggactgttaggtttgagtggttatagtaaatcacaaattttattagagttgttctcatgttaattgtgcttttattatttggcttgtttgaactctttctagagcaagtgttaaagttgtcgacaatgccattacgatacagttttgtttgtctaaaaaaaaaaaaaaaa

SEQ ID NO: 5150 - protein, 120 aa, Glycine max; identical to SEQ ID NO: 1966
  misc_feature: Ceres CLONE ID no. 1042271
  misc_feature: Ceres CDNA ID no. 40351562
  misc_feature (5)..(103): Pfam Name: Ribosomal_L34e PFAM Desc: Ribosomal protein L34e

SEQ ID NO: 5151 - DNA, 692 bp, Glycine max
  misc_feature: Ceres CLONE ID no. 1042395
  misc_feature: Ceres CDNA ID no. 29191664
  CDS (12)..(422): REFERENCED BY SEQ ID NO: 5152
aatcgatcgatatgtcgggaaaaggggcaaagggattgataacaggtaaaacctcagcttcagccaaagacaaagacaaagacaagaagaaacccgtttctcgttcttctagagctggtcttcagtttcctgttggacgaattcaccgtcttttgaagtcaagggtgagtgccaatggaagagttggggccacagctgctgtgtattctgctgctatactggagtatctaactgcagaggtgttggagttggctggtaatgcaagcaaggatctgaaggtgaagcgtattacccctagacatttacagcttgctatacgtggagatgaagaacttgacaccctcattaaaggaacaattgccggtggtggtgttattcctcatatccacaagtctctaatcaacaaatcctcaaaggagtgagggttaaaagaaaaatatttgaattaaccttggagatgagttttcctgtaaatttgatggtatcttattttgtggatattttgcttgttgtgttagtttggtagaagagacatcctgcagcagttctgatatctttatttgagctgtatggactgacatactggcttctgtgctctgttgctgcaagctagctacatgaaactagctgttaggatgtatattgaagcatggttaattattatgttcaacctattaaaaaaaaaaaaaaaa

SEQ ID NO: 5152 - protein, 136 aa, Glycine max
  misc_feature: Ceres CLONE ID no. 1042395
  misc_feature: Ceres CDNA ID no. 29191664
  misc_feature (31)..(107): Pfam Name: Histone PFAM Desc: Core histone H2A/H2B/H3/H4
  misc_feature: Homolog of GI Number: 21592838 NR Desc: histone H2A.F/Z
  misc_feature: Homolog of GI Number: 21536635 NR Desc: putative histone H2A
  misc_feature: Homolog of GI Number: 30024110 NR Desc: putative histone H2A
  misc_feature: Homolog of GI Number: 34902610 NR Desc: Putative histone H2A
  misc_feature: Homolog of GI Number: 31432099 NR Desc: putative histone H2A
  misc_feature: Homolog of GI Number: 50918585 NR Desc: putative histone H2A protein
  misc_feature: Homolog of GI Number: 62319094 NR Desc: histone H2A
  misc_feature: Homolog of GI Number: 6319146 NR Desc: H2A protein
  misc_feature: Homolog of GI Number: 16805290 NR Desc: histone H2A variant
  misc_feature: Homolog of GI Number: 62087582 NR Desc: H2A histone family
  misc_feature: Useful for making ornamental plants with modified flowers
MSGKGAKGLITGKTSASAKDKDKDKKKPVSRSSRAGLQFPVGRIHRLLKSRVSANGRVGATAAVYSAAILEYLTAEVLELAGNASKDLKVKRITPRHLQLAIRGDEELDTLIKGTIAGGGVIPHIHKSLINKSSKE

SEQ ID NO: 5153 - DNA, 625 bp, Glycine max
  misc_feature: Ceres CLONE ID no. 1042534
  misc_feature: Ceres CDNA ID no. 40351563
  CDS (158)..(388): REFERENCED BY SEQ ID NO: 5154
attgttgctacaagattatctaagatagcaacttaagagacggttcttttcttgtgttactaaaatattatatttgctgaacgagttcactttagattaaaacttataactcttatactacgatttgttttgtaatttttctttttgaaaaagccacatgggggccattgcagttggaaaccatgcagatattgtagtttggaaaccagaggtggagtttgacctgaatgaagattatcctgttttccttaaacatcctagcctctctgcttacatgggaagaaggttatcaggaaaagttttggagacttttgttagaggaaaccttgtgtttaagaaaggaaagcatgctcatgcagcctgtggtgttccaattctagccaaatgaattagttaaatattggtttctttcagatgctagtttctttggggcacaataagagatgggaagtagctgccggcatcggccattgacctagcattctccttctcatagactagtgcataccatgtattattgcagtttggatgtttggatagtgacactaatgtcatacttgaatgtatatgtagattataattttacaaattctaaagtttctttcttaacaaaaaaaaaaaaaaa

SEQ ID NO: 5154 - protein, 76 aa, Glycine max
  misc_feature: Ceres CLONE ID no. 1042534
  misc_feature: Ceres CDNA ID no. 40351563
MGAIAVGNHADIVVWKPEVEFDLNEDYPVFLKHPSLSAYMGRRLSGKVLETFVRGNLVFKKGKHAHAACGVPILAK

SEQ ID NO: 5155 - DNA, 897 bp, Glycine max
  misc_feature: Ceres CLONE ID no. 1042590
  misc_feature: Ceres CDNA ID no. 36582147
  CDS (74)..(595): REFERENCED BY SEQ ID NO: 5156
accgagctgaagaaaacctaagcttagaattagaaacaaagaaaagaagaaaggaaagaattgatcgttgaaaatgcagggaggaaagaaagcgggagagtccattaaggaaacagctacaaacattggtgcttctgccaaggctggcatggagaagaccaaggccactgtccaagagaaggcagaaagaatgacagcacgtgatccggtgcaaaaggagttggcaacccaaaagaaagaggcaaagatgaaccaggcggagctggacaagcaggcggcgcgtcagcataacacggcggccaaacagtccgccaccacggctgggcacatgggacatggccaccacaccaccggaaccgggactggaaccgccacgtattccaccaccggggaatatggtcagcccatgggggcccaccagacgtcggcaatgcctggccatggaaccgggcagcccacgggccatgtcaccgaaggagtggtgggctcacatcccattggaaccaacagagggccgggtgggaccgctacagctcataatacccgtgcgggtggaaagccgaatgattatgggtatgggactgggggtacttaattaatgatgattatatcatcaaggtttattggcaatagtttaataataaggtttattaaatgtagttagtttggggtatggcttttgtacttgtttgtttggttatctttgtttgtctgcttttctctccacttgttatggagagacttgggtgtggttatgacagtgttttcactacgtggaaacgttatatgtggtaaacttgtacttgtatcatttcgtgataataattaaataaaatagtggttgtgtaaaaaaaaaaaaaaaaaaaaaaaaaaaaaaaaccaaaaaaaaaaaaaaaa

SEQ ID NO: 5156 - protein, 173 aa, Glycine max
  misc_feature: Ceres CLONE ID no. 1042590
  misc_feature: Ceres CDNA ID no. 36582147
  misc_feature (8)..(80): Pfam Name: LEA_1 PFAM Desc: Late embryogenesis abundant
  misc_feature: Homolog of GI Number: 11612175 NR Desc: seed maturation protein LEA 4
  misc_feature: Homolog of GI Number: 1079652 NR Desc: late embryogenesis abundant protein
  misc_feature: Homolog of GI Number: 11612179 NR Desc: seed maturation protein LEA 4
  misc_feature: Homolog of GI Number: 11612189 NR Desc: seed maturation protein LEA 4
  misc_feature: Homolog of GI Number: 11612197 NR Desc: seed maturation protein LEA 4
  misc_feature: Homolog of GI Number: 10334833 NR Desc: seed maturation protein
  misc_feature: Homolog of GI Number: 10334848 NR Desc: seed maturation protein
  misc_feature: Homolog of GI Number: 11612177 NR Desc: seed maturation protein LEA 4
  misc_feature: Homolog of GI Number: 11612191 NR Desc: seed maturation protein LEA 4
  misc_feature: Homolog of GI Number: 10334840 NR Desc: seed maturation protein
MQGGKKAGESIKETATNIGASAKAGMEKTKATVQEKAERMTARDPVQKELATQKKEAKMNQAELDKQAARQHNTAAKQSATTAGHMGHGHHTTGTGTGTATYSTTGEYGQPMGAHQTSAMPGHGTGQPTGHVTEGVVGSHPIGTNRGPGGTATAHNTRAGGKPNDYGYGTGGT

SEQ ID NO: 5157 - DNA, 642 bp, Glycine max
  misc_feature: Ceres CLONE ID no. 1042855
  misc_feature: Ceres CDNA ID no. 25445657
  CDS (124)..(297): REFERENCED BY SEQ ID NO: 5158
aaaaaaggcagtagtagtgttactttccaatttgaattgttccattttcatttctttcgcaaaagttgcaactacttcctcagaaaaaaagtttctaagttaaggaaatccagagagacaaaaatggccggtgacggtgcagctacatgcatagacatcctccttgccatcattctccctcctcttggagtctttctcaaatatggctgccaggtggagttctggatttgtttggtgctgaccctttttggttatatacctggaattatctatgctgtctatgctatcaccaagtgatcaccctttaactttgtgtggacaataaacaaatgtcatgggcgtttctgtctttcaactcagatattagtgtttctttaatatatcgccaatgttgtcatattcttatgttctgtttttaaaaccccttttgttcttagcttaagcgagagtggagtgtgtagcttactagcttgtgtatgtagtctctagatttggtaattgatttgaaatacacaatttcatttgtatcaacgatcttgttcatgtatcttatgtaaactgtgctattcattactttcaaattaataaatcggatttattcttattataaaaaaaaaaaaaaaaacaaaaaaaaaaaaaaaa

SEQ ID NO: 5158 - protein, 57 aa, Glycine max; identical to SEQ ID NO: 3440
  misc_feature: Ceres CLONE ID no. 1042855
  misc_feature: Ceres CDNA ID no. 25445657
  misc_feature (7)..(57): Pfam Name: UPF0057 PFAM Desc: Uncharacterized protein family UPF0057
  misc_feature: Homolog of GI Number: 56412213 NR Desc: low temperature and salt responsive protein
  misc_feature: Homolog of GI Number: 35186896 NR Desc: Clt1
  misc_feature: Homolog of GI Number: 24745954 NR Desc: low temperature and salt responsive protein
  misc_feature: Homolog of GI Number: 50939439 NR Desc: putative low temperature and salt responsive protein
  misc_feature: Homolog of GI Number: 21314334 NR Desc: early drought induced protein
  misc_feature: Homolog of GI Number: 50897020 NR Desc: plasma membrane protein 3
  misc_feature: Homolog of GI Number: 50897022 NR Desc: plasma membrane protein 3
  misc_feature: Homolog of GI Number: 6671968 NR Desc: low temperature and salt responsive protein
  misc_feature: Homolog of GI Number: 6714402 NR Desc: low temperature and salt responsive protein LTI6B
  misc_feature: Homolog of GI Number: 34896280 NR Desc: putative low temperature and salt responsive protein

SEQ ID NO: 5159 - DNA, 767 bp, Glycine max
  misc_feature: Ceres CLONE ID no. 1042856
  misc_feature: Ceres CDNA ID no. 35383324
  CDS (177)..(569): REFERENCED BY SEQ ID NO: 5160
gtactttctttttctactcttgcttccttctaatactcattccattacactgtgcattcccttcttcttctctctctctgagtgattggtggtggccatagtgtgaagccaaagtgcaagaaaataaaagggttgatgtttttttgtttgttttgtgagtgatgagagtgtaagacatggaagaagcagagaaagagttagagagaaggagcaagtttctgaacagtttgatacagaagaagaagaaaggcatagagcagcatgaacatgagagtttcaaggttcatgtcagagcttgtgacatgcccctccctttgcagaaccgcgccttacaatgcgcacgtcttcacttggaatctatgccacctggcaacaagcttgacaacaaacgccttgcactggcccttaagaaggaatttgattcttcgtatggtccagcttggcactgcattgtgggtactagctttggttcttatgttacacattctgttggtggctttttgtacttttccattgataaggtttatatccttctcttcaagacagctgttgaaccattggaccattgataacttccacaactgtgagtcatgcctccttgggagaatatattttaaaattttatagcagctgatatgtaaaattacaaagtggaacatttaaatacctgtattctgtgatatatgtgatgcacttctatttggatttgtagactgtgagagagtatttcgaatgcagaatttgttctggcaaaaaaaaaaaaaaaa

SEQ ID NO: 5160 - protein, 130 aa, Glycine max
  misc_feature: Ceres CLONE ID no. 1042856
  misc_feature: Ceres CDNA ID no. 35383324
  misc_feature (30)..(124): Pfam Name: Dynein_light PFAM Desc: Dynein light chain type 1
  misc_feature: Homolog of GI Number: 20465367 NR Desc: putative dynein light subunit lc6
  misc_feature: Homolog of GI Number: 50253310 NR Desc: putative dynein light chain 2
  misc_feature: Homolog of GI Number: 50924836 NR Desc: B1358B12.13
  misc_feature: Homolog of GI Number: 45752676 NR Desc: At5g20110
  misc_feature: Homolog of GI Number: 66796189 NR Desc: dynein light chain
  misc_feature: Homolog of GI Number: 34913978 NR Desc: dynein light chain
  misc_feature: Homolog of GI Number: 2208914 NR Desc: outer arm dynein LC6
  misc_feature: Homolog of GI Number: 72009019 NR Desc:  similar to dynein light chain
  misc_feature: Homolog of GI Number: 72159103 NR Desc:  similar to dynein light chain
  misc_feature: Homolog of GI Number: 61872640 NR Desc:  similar to dynein light chain
MEEAEKELERRSKFLNSLIQKKKKGIEQHEHESFKVHVRACDMPLPLQNRALQCARLHLESMPPGNKLDNKRLALALKKEFDSSYGPAWHCIVGTSFGSYVTHSVGGFLYFSIDKVYILLFKTAVEPLDH

SEQ ID NO: 5161 - DNA, 1168 bp, Glycine max
  misc_feature: Ceres CLONE ID no. 1043046
  misc_feature: Ceres CDNA ID no. 25447430
  CDS (32)..(919): REFERENCED BY SEQ ID NO: 5162
atttttttttttgcaattatcttgggttgcaatggagggagtgttgcttcccgtgtgtccttcaccttcttcttgctctgcaactcctaaacccagaatccccattccgctacgctcttctttcccttctccattattacacaaccgtttcttctcccaaaacgcagcgttttcccttcgcaactctctccgcacttccaccttcgcactcgcgcaacacgaagctcccgttctgggcaaacccgataacaacaacaactcttcaccctatcttcccaaaatcgataagacgggacgcttctgcagccccagagccgccagagaactcgcactgtcgataatctatgctgcgtgcttggagggaatggacccggttcggctctttgagaaacggatgaatgcgcggcgagaagccggatataaatttaatgaggaaaagttgttggagtataatcatatgagtttcggagggccgcctgttactgttggatcggacgaagaagcaaatgagctactgcggcacattgaagaagagtctgccattgaagcagaagtccttacagctcctccaaagctggtatacaacaaactgattttaagattcaccaagaaactattggttgcagtcagggatacatgggacagtcatgtcctggtcattaacaaaattgccccacaaaattggaagaatgaaccagctgcgaagattttagagctgtctattcttcacttggccatgtccgaaatggaagtgctagaaacgagacaccaaatcgtcattaatgaggcggtagatcttgctaaacggttttgtgatggagcagcccctcgcatcattaacggctgtctccgcacatttttccgagaactggagcttgaagcatcgaataaccaggaaatatcacctatgggggtttgataatttgcatattgacctgtagacaaggcctgagttaggaatcgtgttgtttgaaactggtagagttattatgacattttgtttttacagcagttattatgacattgcaatattgtaatcgtgtatatgtatattttatgtatgctagctcgtgggatttgtaataaattttgtttaagttaaagaacttttgaaatttaatttaattaagtacttttgaaacatggtactacaaaaaaaaaaaaaaaa

SEQ ID NO: 5162 - protein, 295 aa, Glycine max
  misc_feature: Ceres CLONE ID no. 1043046
  misc_feature: Ceres CDNA ID no. 25447430
  misc_feature (248)..(280): Pfam Name: NusB PFAM Desc: NusB family
  misc_feature: Homolog of GI Number: 42573051 NR Desc: antitermination NusB domain
MEGVLLPVCPSPSSCSATPKPRIPIPLRSSFPSPLLHNRFFSQNAAFSLRNSLRTSTFALAQHEAPVLGKPDNNNNSSPYLPKIDKTGRFCSPRAARELALSIIYAACLEGMDPVRLFEKRMNARREAGYKFNEEKLLEYNHMSFGGPPVTVGSDEEANELLRHIEEESAIEAEVLTAPPKLVYNKLILRFTKKLLVAVRDTWDSHVLVINKIAPQNWKNEPAAKILELSILHLAMSEMEVLETRHQIVINEAVDLAKRFCDGAAPRIINGCLRTFFRELELEASNNQEISPMGV

SEQ ID NO: 5163 - DNA, 620 bp, Glycine max
  misc_feature: Ceres CLONE ID no. 1043065
  misc_feature: Ceres CDNA ID no. 25445659
  CDS (179)..(442): REFERENCED BY SEQ ID NO: 5164
atagacaccttctagaaaaaaataactcaaccccaacattctcgtacgcttgatccttcctgggctgtcaacaattttccctcttttcattttctgtttctgaaaaatcataccttgaaattgaaagtcccttgttttttttttattccttggtgttttttttgttgctgtgagagaaatgtgccctttaaggtttatcttggtgttcttctccgccgtgctggcgggttattttgcgtggaaaacggtgcgttctgacccgaagatcgaggtgttttccgaggattctgccaatgaagataaatccttcaagaaggaagattttgatttcaagaagatgattcagaatggattttggggtttcgttgacatggctagtgggaggtatctgtggaggaatttgaggccaaccaacaaagatgccgaattgaagagttcttagtgacctaaccctcttctttaatcatgagtctttgtttagtgatttgtcttgtggaaatgtatgtgtaaattattgtattcccacttctctttatccttgtttgtgggttcaagaatgtttggtggataaatttggccaaagaaacgttgtggaattctcaccaaaaaaaaaaaaaaaa

SEQ ID NO: 5164 - protein, 87 aa, Glycine max
  misc_feature: Ceres CLONE ID no. 1043065
  misc_feature: Ceres CDNA ID no. 25445659
MCPLRFILVFFSAVLAGYFAWKTVRSDPKIEVFSEDSANEDKSFKKEDFDFKKMIQNGFWGFVDMASGRYLWRNLRPTNKDAELKSS

SEQ ID NO: 5165 - DNA, 467 bp, Glycine max
  misc_feature: Ceres CLONE ID no. 1043154
  misc_feature: Ceres CDNA ID no. 40351564
  CDS (49)..(258): REFERENCED BY SEQ ID NO: 5166
gggttctctaagtggaaggaagttgcagcggcgaaaacagaaccgagaatgcctaagcaaatccacgagatcaaagacttccttctgacagcgagaaggaaggatgctaggtctgtgaagatcaagagaagcaaggacattgtcaagttcaaggtcaggtgctctaggtacctctacactctttgcgtcttcgaccaagagaaggctgataagctgaagcagtctcttcctccaggtttgagtgttcaagacctttgaagtcagggctctatgttaatgccaccagcgttgaattatagagatatctttcgcttgggatactttgtttcttgttaccttttgaattactatgattcagactcttctcttttcatttttaagactgggttttgtattttgctatttgccatgtgatgtcaatgactgcaacaacaaaaaaacttcaattgctaaaaaaaaaaaaaaaa

SEQ ID NO: 5166 - protein, 69 aa, Glycine max [sequence omitted]

SEQ ID NO: 5167 - DNA, 1105 bp, Glycine max
  misc_feature: Ceres CLONE ID no. 1043156
  misc_feature: Ceres CDNA ID no. 35383325
  CDS (59)..(772): REFERENCED BY SEQ ID NO: 5168
acaccattctgattttgtccatccaaaccttaaaaagattcagtgaagaacaacgttaatggcatctcttggtgtgcaagcagttcatcctcctccattaacatccacctccgacccacctcctctttttgatggcaccaccaggttgtacatcagttattcttgcccctatgcacaacgtgtatggatcgctcggaacttcaagggactaaaagacaagatcaatttggtccctataaaccttcaagacaggccagcttggtataaggagaaagtctaccctgaaaataaggtgccatccttggagcacaatggcaaggtgttgggagaaagtcttgatttgatcaaatatgtagatgaaaactttgaagggacacctttgtttcccagagatcctgccaagaaagagttcggagagcaattgatatcccatgttgatacattcagcagagacctgttcgtttcattgaaaggggatgctgtacagcaagccagtcccgcttttgaatacttggagaatgctcttggtaaatttgatgatgggccattcttgcttggtcaattcagtttggtggatattgcctatattccatttgctgaaagattccaaattgtctttgctgaggtgttcaaacatgacatcacagaaggaaggcctaaacttgcaacatggtttgaggagttgaataagctaaatgcttataccgagacaagagtcgatcctcaggaaatcgttgatcttttcaagaaacgtttcctgtctcaacagtgaaacgttgtattgctgcaggcttcctctaagatgtagactgagccaataaagcgtcctttcattcaatggatgggatgcatctacagtcaaatagaagttgtgtttatctgctagagtcgtaggatagtttgaagtcataatcatgttcatttttcagcttgttttgtttgatgtaataataatgtttatgtaccagtttgtgatcactgatcaatatggtgtaatttatcctataatttatcctacttgtgtagttgtgttatatctcaagtgtctgtcaacaaaggtttattgcatgaaagttatacatggttaataaaaaaaaaaaaaaaa

SEQ ID NO: 5168 - protein, 237 aa, Glycine max
  misc_feature: Ceres CLONE ID no. 1043156
  misc_feature: Ceres CDNA ID no. 35383325
  misc_feature (147)..(213): Pfam Name: GST_C PFAM Desc: Glutathione S
  misc_feature: Homolog of GI Number: 11385579 NR Desc: In2
  misc_feature: Homolog of GI Number: 37051105 NR Desc: glutathione S
  misc_feature: Homolog of GI Number: 21537338 NR Desc: In2
  misc_feature: Homolog of GI Number: 38454162 NR Desc: At5g02780
  misc_feature: Homolog of GI Number: 50948973 NR Desc: putative glutathione S
  misc_feature: Homolog of GI Number: 7939638 NR Desc: XIG
  misc_feature: Homolog of GI Number: 50948975 NR Desc: putative glutathione S
  misc_feature: Homolog of GI Number: 50948971 NR Desc: putative dehydroascorbate reductase
  misc_feature: Homolog of GI Number: 33242901 NR Desc: glutathione S
  misc_feature: Homolog of GI Number: 46134773 NR Desc: COG0625: Glutathione S
MASLGVQAVHPPPLTSTSDPPPLFDGTTRLYISYSCPYAQRVWIARNFKGLKDKINLVPINLQDRPAWYKEKVYPENKVPSLEHNGKVLGESLDLIKYVDENFEGTPLFPRDPAKKEFGEQLISHVDTFSRDLFVSLKGDAVQQASPAFEYLENALGKFDDGPFLLGQFSLVDIAYIPFAERFQIVFAEVFKHDITEGRPKLATWFEELNKLNAYTETRVDPQEIVDLFKKRFLSQQ

SEQ ID NO: 5169 - DNA, 833 bp, Glycine max
  misc_feature: Ceres CLONE ID no. 1043227
  misc_feature: Ceres CDNA ID no. 35389335
  CDS (59)..(502): REFERENCED BY SEQ ID NO: 5170
ctatgcttgaagacggtggattagaacctcaacaagagaaagagactcgtcagagaatatgatccttgcggtgctgtttgccaacgctgagggcaatatcctcatcgaacgttttcatggagttcctgcagaggagcgtctgcactggcgttcattcttagtcaaactaggagctgataatcttaagggtgtcaaaaacgaagagctcctagttgcttgccacaaatcggtttatattgtatacacagtgcttggcgatgtcagcatctatgtcgtgggcaaggatgagtatgacgaacttgccttgtccgaagtgatctttgtgataacctcagctgtgaaggatgtatgtgggaagcccccaagtgagcgccttttccttgacaagtatggaagaatttgtctgtgtctggatgaaattgtatggcagggatatttggaaaatacagaaaaggatagaatcaaaagactgataaggttaaagcctccaacagagttttgaatgaaaagtccagagccagtcatagttcaatgattagtctgagtcctgtgggtcatagtgtggcattttgtaaacggatatgggcaagcaaccgaagattgtgctggatgtatgcgctctgcaatgattgtattaaaatacttgcattaaaatcttcttaaattttagcacttgtattttgtagcattcccaaactctgcattatttcatttgcgtattttgcacctcttttatcccttactattgtttgctatggcaatcatgtttccattttatgtttccattttatggaatgagagattttcatgcttggttaaaaaaaaaaaaaaaa

SEQ ID NO: 5170 - protein, 147 aa, Glycine max
  misc_feature: Ceres CLONE ID no. 1043227
  misc_feature: Ceres CDNA ID no. 35389335
  misc_feature: Homolog of GI Number: 50920221 NR Desc: putative chloroplastic RNA
MILAVLFANAEGNILIERFHGVPAEERLHWRSFLVKLGADNLKGVKNEELLVACHKSVYIVYTVLGDVSIYVVGKDEYDELALSEVIFVITSAVKDVCGKPPSERLFLDKYGRICLCLDEIVWQGYLENTEKDRIKRLIRLKPPTEF

SEQ ID NO: 5171 - DNA, 835 bp, Glycine max
  misc_feature: Ceres CLONE ID no. 1043303
  misc_feature: Ceres CDNA ID no. 35383326
  CDS (3)..(668): REFERENCED BY SEQ ID NO: 5172
agttttctgttggcgcgggtgaggtagaacccttccacggtggtgactgcgcgatgggtgcctacaagtatgtttcagagctatggcgcaagaagcagtctgatgtcatgcgcttcttgcagcgggtgaggtgctgggagtataggcagcaaccttccattgttcgcttgacaaggtcgacccgccctgacaaggctcgtcgcttgggcttcaaggctaagcagggctatgtgatataccgtgttcgtgttaggaggggtggccgaaagaggccagttcccaaaggtattgtttatgggaagcccacaaaccagggtgttacccaactgaaatttcagcgtagcaagaggtcagttgctgaggagcgagctggacggaagctgggtggacttagggtcctcaattcttactgggtgaatgaggactctacttataaatactttgaggtgattctggtggatgtggctcatgctgctattagaaatgatcccagaatcaattggctcgccaatccagtgcacaagcacagagagctgcgtgggctcacctctgctgggaaaagcaacaggggtttacgtggcagaggacatctgtaccacaaagcacgtccatctcgcagggcaacctggaagagaaacaacaccctgtctctccgccgttaccgctaatttctgctgttatcatcttatttttgcttcattttctggaatactattttgaggacataggtatttggtgttttgacttcgaaattcgagttttgaacgctttaatcatatctttttctatataatttgagttttgttattgttaaaattgaaaaaaaaaaaaaaaa

SEQ ID NO: 5172 - protein, 204 aa, Glycine max
  misc_feature: Ceres CLONE ID no. 1043303
  misc_feature: Ceres CDNA ID no. 35383326
  misc_feature (2)..(193): Pfam Name: Ribosomal_L15e PFAM Desc: Ribosomal L15
  misc_feature: Homolog of GI Number: 34896990 NR Desc: ribosomal protein L15
  misc_feature: Homolog of GI Number: 23505795 NR Desc: At4g16720/dl4385c
  misc_feature: Homolog of GI Number: 21689875 NR Desc: putative 60S ribosomal protein L15
  misc_feature: Homolog of GI Number: 3608479 NR Desc: ribosomal protein L15
  misc_feature: Homolog of GI Number: 2982318 NR Desc: probable 60S ribosomal protein L15
  misc_feature: Homolog of GI Number: 7268491 NR Desc: ribosomal protein
  misc_feature: Homolog of GI Number: 14585879 NR Desc: ribosomal protein L15
  misc_feature: Homolog of GI Number: 2982249 NR Desc: probable 60S ribosomal protein L15
  misc_feature: Homolog of GI Number: 48596903 NR Desc: ribosomal protein
  misc_feature: Homolog of GI Number: 50878349 NR Desc: putative 60s ribosomal protein L15
  misc_feature: Useful for decreasing plant size
  misc_feature: Useful for making plants with increased biomass
  misc_feature: Useful for making shorter plants
  misc_feature: Useful for sterility
  misc_feature: Useful for sterility
MGAYKYVSELWRKKQSDVMRFLQRVRCWEYRQQPSIVRLTRSTRPDKARRLGFKAKQGYVIYRVRVRRGGRKRPVPKGIVYGKPTNQGVTQLKFQRSKRSVAEERAGRKLGGLRVLNSYWVNEDSTYKYFEVILVDVAHAAIRNDPRINWLANPVHKHRELRGLTSAGKSNRGLRGRGHLYHKARPSRRATWKRNNTLSLRRYR

SEQ ID NO: 5173 - DNA, 1272 bp, Glycine max
  misc_feature: Ceres CLONE ID no. 1043366
  misc_feature: Ceres CDNA ID no. 36582160
  CDS (522)..(989): REFERENCED BY SEQ ID NO: 5174
cttccactttcttccttctttctcatcactcttttaagatatttttgttacatagtttatggtctacgagagccctgcctctgtagagtgtagaccaacctccttttctttgctttgagctcgctcgatcttcttccatttcatgtcttgttttattttattttatttatttaagccttttaaatgcccaacattttgttcttgatgtttgagattgatgtattcaattctgagtgaaatcttcttttccgggtgtatgatcaattccactgtgagacgcaggacccatttagttcaatccttctctgttgctttcctttactggctctactacgtttcatgatttctaaccccctctccaattattaattaaataaaaccctattatatatctcttacatatttttatctgcaaaaaaaaataatctttttttgttcttgttcttgtttagtgtctgggtcctgcgaactccaagtacaagaagggtcaatttttgtttttctgttaacttttgattactatggcttgttcaagtggaacatcttcaggggcgacgtcgtcgatgcttcaaaataactcaggttcggaggaggagctgcaggcactgatggagcagaggaagaggaagagaatgatatcgaaccgcgaatcggctaggcgatctcgaatgaggaagcagaagcacttggatgatctagcatcgcaggtgactcagctcaggaacgagaaccaccagattctcacatcggtgaacctcactacccagaagtacttggcggttgaggctgagaactctgttttgagagcacaagtgaacgaactcagccactggttggagtctctgaacgagatcatccacttcttgaatgccactgatggtggtccaccaccaccaccaagctccttctttgagcccgatgctaccttcttcaacaaggcttatctgagccagccgattatggcttcagcagacatgttgcagtactgagtgtgatggttgttggtttcttttaggttttagtctgttagggaaaattgtaatcgctggcagatagtgagtacgataaggaataatgatgaatgtgtaacatatcataaagcgggtaagcttgttggggcccctgtagtcttcagagatcagatcaccctattattgttgcaactgcacttccccatactagacttattatttatgtcatatcaccaaatcatataacattaagtttaatttagtgtcaatgtaaaagaatttatcaaaaaaaaaaaaaaaa

SEQ ID NO: 5174 - protein, 155 aa, Glycine max
  misc_feature: Ceres CLONE ID no. 1043366
  misc_feature: Ceres CDNA ID no. 36582160
  misc_feature (29)..(83): Pfam Name: bZIP_2 PFAM Desc: Basic region leucine zipper
  misc_feature: Homolog of GI Number: 22597162 NR Desc: bZIP transcription factor ATB2
  misc_feature: Homolog of GI Number: 24460973 NR Desc: bZIP transcription factor
  misc_feature: Homolog of GI Number: 4457221 NR Desc: putative bZIP DNA
  misc_feature: Homolog of GI Number: 16580130 NR Desc: bZIP transcription factor BZI
  misc_feature: Homolog of GI Number: 60459385 NR Desc: bZIP protein
  misc_feature: Homolog of GI Number: 20465863 NR Desc: putative bZIP transcription factor ATB2
  misc_feature: Homolog of GI Number: 1865679 NR Desc: ATB2
  misc_feature: Homolog of GI Number: 9650828 NR Desc: common plant regulatory factor 7
  misc_feature: Homolog of GI Number: 42563231 NR Desc: bZIP transcription factor family protein
  misc_feature: Homolog of GI Number: 23397120 NR Desc: putative bZIP transcription factor
MACSSGTSSGATSSMLQNNSGSEEELQALMEQRKRKRMISNRESARRSRMRKQKHLDDLASQVTQLRNENHQILTSVNLTTQKYLAVEAENSVLRAQVNELSHWLESLNEIIHFLNATDGGPPPPPSSFFEPDATFFNKAYLSQPIMASADMLQY

SEQ ID NO: 5175 - DNA, 2092 bp, Glycine max
  misc_feature: Ceres CLONE ID no. 1043425
  misc_feature: Ceres CDNA ID no. 40041386
  CDS (58)..(1767): REFERENCED BY SEQ ID NO: 5176
aacaaaaaacaacacaactagaatctctctctctctctgcattctcttctcttcctcatggcgtccctgaccccgggcgtcctctcgaagctcctggacaacgcgggttccaaggtaaccgccgctcaccggcaggccctcctgcaggtgacggagatcgtgccgcgcctctcctcaacctccccattacagagccgcggctactttttaaaactctcggactccctccactccgcctacgtctccgtccccgacgccgacgccgacctcatctgcgccggcaagctccacctcggccagttcgtctacgtcacacgcctcgacgccgcctcccccgtcccccttgtccgcggcctcaacgtgctcccccgccggaggccctgcgtcgggaaccctactgagttggttcccagcgagaggctttgcgtcgccactccgaagaaaaagaagagagaagaggttgttaagaaggagaaggggttggagatgatgaggaggttgagtttggattcttctagaagggtttgggatcagagtccggttgcaaaacggaaaaccgcttctgcgagttcgctttcgaacaatcttaaggccaagaagtctaactctaaccccacttcgcttaacgtgatagacaagaaggttgtttctgtcaaacctgattctccactaaaatctccaacatcaagtgtctcacccttgaagaataaaaacgagaacctgtgtccaaaatcattgacaatcacacctccgaggaagagtactagtactagtactaggtcaccctgtggtggcactgttcatagcccacttgttaaggtccccctcaatttcaagacttggtgttatgatactcctgcatgttgggaagatgtctcactccccatgtgtgatcttggaaagcaagttgtgactcatagaactgttgcctttttagcggctgtgcggtctcttgaagaagcatctgctacagattctgtgatccaatgcatgtgcatgtatgcagaactttgccagtctggtcaaacacattctcctggatcacttgtgaagcagtttttggagcttcacctgagtttgcagagagtaacagtgctgtttgattcgttactcaacccacttcctgaaacaaagtcaagcagccactctaccctacagtgtctaacagaagatgcatgcaaagttcccacccgaaagaatgctatatcttgggtacaagctgccgtaggtaccaatctttccaaattcaatctatttgaaacacaggcgaaaagtgaggttctaaatggtgagaaatgtcattatgttgtcattgagaatactcccgaggacatcaatactgagacttcacctgctcaaaacaagcaaaatcgtgtaactcaagcaaaccacttgccaaattcaactgctaaaagacttccttcttcaaagcggaatctcttggcagcaaagaacaaggatgctgacaaacatgatcgatcaaaagaaatcaaattaaaagaggctgcgagtttggcagaaaaactgcttgaggcatctagcgaatggttcctgaagtacttggaggagtctctgagtaatgagttcgggttgaaaaatgaagggaacactgaaattgcaagtcttcttggacaactcaaacaggtgaatcactggttagataatttggctggtggagataaggttgatcaccgggtagagaagctaaggaaaaatttgtaccggtttctacttgagcatgttaattctgccgttacttctaattagagtaaatgtagaagaactacgagagctaacaattgacaaaatggagaatactatcctcaaatgactgtgcattggacagctgacagtggtattacagtgaatatttaaagtttaaacagatcgatttggtcttggtgtaaccacttaacttaggatcttacatgtaccttgtataatttagtctttgtcactgaatgaagttatgcccaagatttttacattttgagctgtattctaatgatatggacatgttattattgacagtaaattttggtttatattcattttggattaaccttgagagttcccaaaaaaaaaaaaaaaa

SEQ ID NO: 5176 - protein, 569 aa, Glycine max
  misc_feature: Ceres CLONE ID no. 1043425
  misc_feature: Ceres CDNA ID no. 40041386
  misc_feature: Homolog of GI Number: 34894146 NR Desc: P0482C06.21
MASLTPGVLSKLLDNAGSKVTAAHRQALLQVTEIVPRLSSTSPLQSRGYFLKLSDSLHSAYVSVPDADADLICAGKLHLGQFVYVTRLDAASPVPLVRGLNVLPRRRPCVGNPTELVPSERLCVATPKKKKREEVVKKEKGLEMMRRLSLDSSRRVWDQSPVAKRKTASASSLSNNLKAKKSNSNPTSLNVIDKKVVSVKPDSPLKSPTSSVSPLKNKNENLCPKSLTITPPRKSTSTSTRSPCGGTVHSPLVKVPLNFKTWCYDTPACWEDVSLPMCDLGKQVVTHRTVAFLAAVRSLEEASATDSVIQCMCMYAELCQSGQTHSPGSLVKQFLELHLSLQRVTVLFDSLLNPLPETKSSSHSTLQCLTEDACKVPTRKNAISWVQAAVGTNLSKFNLFETQAKSEVLNGEKCHYVVIENTPEDINTETSPAQNKQNRVTQANHLPNSTAKRLPSSKRNLLAAKNKDADKHDRSKEIKLKEAASLAEKLLEASSEWFLKYLEESLSNEFGLKNEGNTEIASLLGQLKQVNHWLDNLAGGDKVDHRVEKLRKNLYRFLLEHVNSAVTSN

SEQ ID NO: 5177 - DNA, 1390 bp, Glycine max
  misc_feature: Ceres CLONE ID no. 1043462
  misc_feature: Ceres CDNA ID no. 36571710
  CDS (40)..(1179): REFERENCED BY SEQ ID NO: 5178
atatcttaatttcaaatcataaaattcttccaccaagttatgggtttccttgtgttgcttcttttctccctcttaggtctctcttctagttccagcatatcaactcatcgttccatattggaccttgacctaaccaagtttaccacacagaaacaggtgtcttcactgttccaactatggaagagtgagcatggacgtgtctaccataaccacgaagaagaggcaaagagacttgagattttcaagaataacttgaactatatcagggacatgaatgcaaacagaaaatcaccccattctcatcgtttaggattgaacaagtttgctgacatcactcctcaagagttcagcaaaaagtacttgcaagctcccaaggatgtgtcgcagcaaatcaaaatggccaacaagaaaatgaagaaggaacaatattcttgtgaccatccacctgcatcatgggattggaggaaaaaaggtgtcatcacccaagtaaagtaccaagggggctgtggaagcggttgggcgttttctgccacgggagccatagaagcagcacatgcaatagcaacaggagaccttgttagcctttctgaacaagaactcgtagactgtgtggaagaaagcgaaggttgttacaatggatggcactatcaatcgttcgaatgggttttagaacatggtgggattgccactgatgatgattatccttacagagctaaagagggtagatgcaaagccaataagatacaagacaaggttacaattgacggatatgaaactctaataatgtcagatgagagtacagaatcagagacagagcaagcgttcttaagcgccatccttgagcaaccaattagtgtctccattgatgcaaaagattttcatttatacaccgggggaatttatgatggagaaaactgtacaagtccgtatgggattaatcactttgttttacttgtgggttatggttcagcggatggtgtagattactggatagcgaaaaattcatggggagaagattggggagaagatggttacatttggatccaaagaaacacgggtaatttattaggagtgtgtgggatgaattatttcgcttcatacccaaccaaagaggaatcagaaacactggtgtctgctcgcgttaaaggtcatcgaagagttgatcactctcctctttgagccgtaaaggttcaatacaacgagtgcttgttttcttagggacaagcattgtacttatgtatgattctgtgtaaccatgagtcttccacgttgtactaatgtgaagggcaaaaataaaacacagaacaagttcgtttttctcaaataatgtgaaggtagaaaatggaaccatgcctcctctcttgcatgtgatttaaaaaaaaaaaaaaaa

SEQ ID NO: 5178 - protein, 379 aa, Glycine max
  misc_feature: Ceres CLONE ID no. 1043462
  misc_feature: Ceres CDNA ID no. 36571710
  misc_feature (135)..(356): Pfam Name: Peptidase_C1 PFAM Desc: Papain family cysteine protease
  misc_feature: Homolog of GI Number: 1199563 NR Desc: 34 kDa maturing seed vacuolar thiol protease precursor
  misc_feature: Homolog of GI Number: 3097321 NR Desc: Bd 30K
  misc_feature: Homolog of GI Number: 129353 NR Desc: P34 probable thiol protease precursor
  misc_feature: Homolog of GI Number: 73623011 NR Desc: papain
  misc_feature: Homolog of GI Number: 27728675 NR Desc: cysteine protease
  misc_feature: Homolog of GI Number: 33943511 NR Desc: 34 kDa maturing seed vacuolar thiol protease precursor
  misc_feature: Homolog of GI Number: 5853329 NR Desc: thiol protease
  misc_feature: Homolog of GI Number: 32396018 NR Desc: cysteine protease
  misc_feature: Homolog of GI Number: 30141019 NR Desc: cysteine protease
  misc_feature: Homolog of GI Number: 13897890 NR Desc: putative cysteine protease
MGFLVLLLFSLLGLSSSSSISTHRSILDLDLTKFTTQKQVSSLFQLWKSEHGRVYHNHEEEAKRLEIFKNNLNYIRDMNANRKSPHSHRLGLNKFADITPQEFSKKYLQAPKDVSQQIKMANKKMKKEQYSCDHPPASWDWRKKGVITQVKYQGGCGSGWAFSATGAIEAAHAIATGDLVSLSEQELVDCVEESEGCYNGWHYQSFEWVLEHGGIATDDDYPYRAKEGRCKANKIQDKVTIDGYETLIMSDESTESETEQAFLSAILEQPISVSIDAKDFHLYTGGIYDGENCTSPYGINHFVLLVGYGSADGVDYWIAKNSWGEDWGEDGYIWIQRNTGNLLGVCGMNYFASYPTKEESETLVSARVKGHRRVDHSPL

SEQ ID NO: 5179 - DNA, 1136 bp, Glycine max
  misc_feature: Ceres CLONE ID no. 1043531
  misc_feature: Ceres CDNA ID no. 35383327
  CDS (216)..(869): REFERENCED BY SEQ ID NO: 5180
gtttttcattttgatctgatatcatatcattcgagctctgaatgcttctccctccataataacaaaaccaacaccctctttctctttctctcttcttcatttccaatgctgcagcaatctgcaagcttcataggcactacgacagacccaattgaattcccgagaaagaattgaagagaaaaaaccgtaaagttaggatcttttgtgtgatttcgatgggtgcgtacagagcggacgatgattacgactacttgttcaaggtggtgttgatcggagactcaggcgttgggaaatcgaacctcttgtctcgtttcacgaagaacgaattcagcttggaatccaaatccaccattgtcgtcgaattcgccacccgcagcatccacgtcgatgacaagatcgtcaaggctcaaatttgggacacggcaggccaagaaagatatcgcgcaatcacaagtgcatattatcgaggggctgttggtgcactgcttgtgtatgatgttaccagacatgtgacttttgaaaacgtggagagatggttaaaggagcttcgtgatcacacagatgccaacattgtaatcatgcttgtggggaacaaggcggatcttcgtcacttgcgtgctgtctccacagacgatgccaaggcatttgccgagagagaaaatacgtttttcatggaaacatctgctcttgagtccttgaatgtcgataatgccttcaccgaagtgctcactcagatataccgcgttgttagtaggaagactcttgagattggggatgaccctgcagccttgcccaaggggcagaccatcaatgttggcagtagggatgatgtctcagctgttaaaaagtctggatgctgctctgcttagtttcacaagccttttgcagcagaatagaataatatctatatgtgcatgattcaaccaattctcaacattttggagtccaagtgaaatcttttaatacctacacttctctttttatgtagtttttcccacatatcttggcaagtttattgttttctctttttctttttcttttcttttcatgtaagtgtttggtcataggaatgatgtcttgttgttcttaaatatacaaaatatactgtttgtattgagtgaaaaaaaaaaaaaaaa

SEQ ID NO: 5180 - protein, 217 aa, Glycine max
  misc_feature: Ceres CLONE ID no. 1043531
  misc_feature: Ceres CDNA ID no. 35383327
  misc_feature: Homolog of GI Number: 28950757 NR Desc: At5g60860
  misc_feature: Homolog of GI Number: 303742 NR Desc: GTP
  misc_feature: Homolog of GI Number: 50511479 NR Desc: putative GTP
  misc_feature: Homolog of GI Number: 50899518 NR Desc: putative GTP
  misc_feature: Homolog of GI Number: 51243763 NR Desc: rab GTP
  misc_feature: Homolog of GI Number: 1370156 NR Desc: RAB11H
  misc_feature: Homolog of GI Number: 28973321 NR Desc: putative Ras family GTP
  misc_feature: Homolog of GI Number: 3024504 NR Desc: Ras
  misc_feature: Homolog of GI Number: 452357 NR Desc: guanine nucleotide regulatory protein
  misc_feature: Homolog of GI Number: 6560749 NR Desc: F3M18.2
MGAYRADDDYDYLFKVVLIGDSGVGKSNLLSRFTKNEFSLESKSTIVVEFATRSIHVDDKIVKAQIWDTAGQERYRAITSAYYRGAVGALLVYDVTRHVTFENVERWLKELRDHTDANIVIMLVGNKADLRHLRAVSTDDAKAFAERENTFFMETSALESLNVDNAFTEVLTQIYRVVSRKTLEIGDDPAALPKGQTINVGSRDDVSAVKKSGCCSA

SEQ ID NO: 5181 - DNA, 800 bp, Glycine max
  misc_feature: Ceres CLONE ID no. 1043695
  misc_feature: Ceres CDNA ID no. 36571714
  CDS (68)..(565): REFERENCED BY SEQ ID NO: 5182
atcacattattctatatcaattttggttaagagtcttgaaaaagcaagagaaaaaaaaataccaaccatggcaaccatttctgatcaacctagagggtcctactcctatggaacctcatatggagcaccctatggaaccacgtatgagaccaacaccagcattaacaacccaccttcacgccaaacagtgaagttcataactgctgccactattggcatcacactcttgctcctgtctgggttgaccctcacaggcactgtcataggtttgatcattgcaacccctcttcttgttatcttcagccccatccttgtccctgctgcgtttgtgctgttcctagttgcttctggctttttgttctctgggggctgtggtgtggctgccattgctgctttgtcttggatttacaactatgtgtctgggaaccagcctgcgggttatgacacccttgactatgcaaaagggtaccttgccgataaggcaagggatgtaaaggagagggcaaaggattatggaagttatgctcaaggtagaattaatgaggccacacaaggagcttattagtcatgcctgcttatatatgcatgagtgtatgaggttgaattgaaggtggtgatggtggtggtacccttgtggatttgcatgttcaagttctgcagtttattttgaatcttgtttgcattgttctatgtagttctggtttttgtaatctcgtttgtttttgaagctaaatcgttcgccttatttgtgtaaccatcatgttaataaatctcttttgtagctaaaaaaaaaaaaaaaa

SEQ ID NO: 5182 - protein, 165 aa, Glycine max
  misc_feature: Ceres CLONE ID no. 1043695
  misc_feature: Ceres CDNA ID no. 36571714
  misc_feature (36)..(153): Pfam Name: Oleosin PFAM Desc: Oleosin
  misc_feature: Homolog of GI Number: 52001241 NR Desc: oleosin 3
  misc_feature: Homolog of GI Number: 21311555 NR Desc: 15.8 kDa oleosin
  misc_feature: Homolog of GI Number: 42569328 NR Desc: glycine
  misc_feature: Homolog of GI Number: 3643595 NR Desc: oleosin
  misc_feature: Homolog of GI Number: 27754701 NR Desc: putative oleosin protein
  misc_feature: Homolog of GI Number: 2119749 NR Desc: oleosin
  misc_feature: Homolog of GI Number: 460803 NR Desc: oleosin
  misc_feature: Homolog of GI Number: 61658200 NR Desc: OLE
  misc_feature: Homolog of GI Number: 38259658 NR Desc: oleosin
  misc_feature: Homolog of GI Number: 8515912 NR Desc: oleosin
MATISDQPRGSYSYGTSYGAPYGTTYETNTSINNPPSRQTVKFITAATIGITLLLLSGLTLTGTVIGLIIATPLLVIFSPILVPAAFVLFLVASGFLFSGGCGVAAIAALSWIYNYVSGNQPAGYDTLDYAKGYLADKARDVKERAKDYGSYAQGRINEATQGAY

SEQ ID NO: 5183 - DNA, 983 bp, Glycine max
  misc_feature: Ceres CLONE ID no. 1043724
  misc_feature: Ceres CDNA ID no. 36703988
  CDS (36)..(500): REFERENCED BY SEQ ID NO: 5184
aaacaagctcgcttcttccttctctcatcaacaacatgcagatcttcgtcaagactttgaccggcaagaccatcaccctcgaggtcgagagcagcgacaccatcgacaacgtcaaggccaagatccaggacaaggaaggtatccctcctgaccagcagaggttgatttttgctggtaagcagctggaagatggtcgcactcttgctgattataacatacaaaaggaatcaacacttcacttggtcttgaggctaaggggaggtaccatgattaaagtgaagactttaactgggaaagaaattgaaattgacattgaaccaactgatacaatcgaccggatcaaggaacgtgtagaagaaaaagagggaattccacctgtgcagcagagactcatatatgccggtaagcagcttgctgatgacaaaacagctaaagagtacaacattgagggtggttctgtacttcacttggtgcttgcattgaggggtggtacttattagtgtagatgcatatcagaacccaaagacatgaaaggaagctctatacctgtcccgtctctgaagacatcattgttcttatgtgcttggttgtaattgaggctgctattggtggtcagtaactcagtatctttaagttgtatgctatttgaaacccgaagttggcctttataaagaatatctgaaaaccaatgatttaaaaccatagtttaggtacatattttgctttcttctgcttttcaagggagcaccaatgttaaccttcaaacgcttctgtcagtgtcagagaagtttatcttctgtagccttgtttgtgggtgtcttccgcttgaaaagagggaaatggaaggttgattgttcgtgttttaagccattttggaatggaatgttgtcaaaatgatggatcggattgaggtcatcggggcattgtagttgattttaaaatttttaatgtttggttttaggaggctaaaaaaaaaaaaaaaa

SEQ ID NO: 5184 - protein, 154 aa, Glycine max; identical to SEQ ID NO: 1722
  misc_feature: Ceres CLONE ID no. 1043724
  misc_feature: Ceres CDNA ID no. 36703988
  misc_feature: The plant flowers significantly late compared to wild-type.
  misc_feature: null
  misc_feature: Useful for making plants with modulated cold sensitivity
  misc_feature: Useful for making plants with modulated flowering time
  misc_feature (1)..(74): Pfam Name: ubiquitin PFAM Desc: Ubiquitin family
  misc_feature: Homolog of GI Number: 51534981 NR Desc: polyubiquitin 2
  misc_feature: Homolog of GI Number: 50726105 NR Desc: polyubiquitin 2
  misc_feature: Homolog of GI Number: 29824269 NR Desc: putative ubiquitin
  misc_feature: Homolog of GI Number: 20562909 NR Desc: polyubiquitin 2
  misc_feature: Homolog of GI Number: 20197530 NR Desc: ubiquitin
  misc_feature: Homolog of GI Number: 7862066 NR Desc: polyubiquitin
  misc_feature: Homolog of GI Number: 81230138 NR Desc: putative polyubiquitin
  misc_feature: Homolog of GI Number: 34911624 NR Desc: putative polyubiquitin
  misc_feature: Homolog of GI Number: 30523391 NR Desc: ubiquitin
  misc_feature: Homolog of GI Number: 15982787 NR Desc: AT4g05320/C17L7_240

SEQ ID NO: 5185 - DNA, 794 bp, Glycine max
  misc_feature: Ceres CLONE ID no. 1044098
  misc_feature: Ceres CDNA ID no. 29191665
  CDS (191)..(613): REFERENCED BY SEQ ID NO: 5186
agaataccactgatatgtaacacgggctaacctcattacaaaaaaaggcccaatccctctcataacacttctacaaaaccctagtttccctccctcgcctaatcctcacccttaacctctctgttctcttctgtcattgcttctcctccacacacgcacagagacacacacttttgcagtcacattgagaatggggcgtgttcgcacgaagacggtgaagaaatcctcgcggcaagtgatagagaggtactactcccgcatgacgctggacttccacacgaacaagaaggttctggaagaggtggccatcattccctccaagaggctccgcaacaagatcgcggggttctccacccatctcatgaagcggatccagaagggtcccgtgcgtggaatctccctgaagctgcaggaggaggaacgcgagcgtcgcatggacttcgtccccgatgtctccgccatcaggaccgaccagatcgaggtcgacaaggagacgctcgacatgctcgccgccctcgggatgtccgaggttcctggcatcgttcaggtggatcctgttgccgtccaggcgcccctcggcttcggccgtggcggccctggaaggaggtactaactgtccgcctccttcgagcttccagtttttgtcgtgttgtcaactagagcactaatttgtcatgcgttgagttttggttttacattattttaaaatttctgtagctgagtttcggattgtttggacttgttaaagctgttaatggaattcattttgtctttgcttaaaaaaaaaaaaaaaa

SEQ ID NO: 5186 - protein, 140 aa, Glycine max
  misc_feature: Ceres CLONE ID no. 1044098
  misc_feature: Ceres CDNA ID no. 29191665
  misc_feature (2)..(122): Pfam Name: Ribosomal_S17e PFAM Desc: Ribosomal S17
  misc_feature: Homolog of GI Number: 5758304 NR Desc: 40S ribosomal protein S17
  misc_feature: Homolog of GI Number: 40287504 NR Desc: 40S ribosomal protein S17
  misc_feature: Homolog of GI Number: 23507769 NR Desc: At5g04800/MUK11_12
  misc_feature: Homolog of GI Number: 76573345 NR Desc: 40S ribosomal protein S17
  misc_feature: Homolog of GI Number: 21595522 NR Desc: 40S ribosomal protein S17
  misc_feature: Homolog of GI Number: 21593447 NR Desc: 40S ribosomal protein S17
  misc_feature: Homolog of GI Number: 25295117 NR Desc: 40S ribosomal protein S17
  misc_feature: Homolog of GI Number: 30102846 NR Desc: At2g05220
  misc_feature: Homolog of GI Number: 8567795 NR Desc: 40S ribosomal protein S17
  misc_feature: Homolog of GI Number: 50916209 NR Desc: Putative 40S ribosomal protein S17
MGRVRTKTVKKSSRQVIERYYSRMTLDFHTNKKVLEEVAIIPSKRLRNKIAGFSTHLMKRIQKGPVRGISLKLQEEERERRMDFVPDVSAIRTDQIEVDKETLDMLAALGMSEVPGIVQVDPVAVQAPLGFGRGGPGRRY

SEQ ID NO: 5187 - DNA, 1365 bp, Glycine max
  misc_feature: Ceres CLONE ID no. 1044190
  misc_feature: Ceres CDNA ID no. 40351565
  CDS (3)..(968): REFERENCED BY SEQ ID NO: 5188
aacctcaacttcaaccccccacgccactcgccagcaccttcgctcccctcgccttcttgctctgctcaccgcgagcgcgcgcgtgcgcccggagcgccgatggccgccgcaatgccaccgtcgctgcccgccctcctcgcggcgctgctgctgctggtgacgctttcgccggccgcggcgcgcgtccccggcgtgtacaccggcggcgactggcagagcgcgcacgccaccttctacggcggcagcgacgcctccggcaccatgggcggcgcgtgcgggtacgggaacctgtacagccaggggtacggggtgaacaacgcggcgctgagcacggcgctgttcaacgaggggcagcgctgcggggcgtgcttcgagatccggtgcgtgaaccagccggggtgggcgtggtgcctcccggggcggccgtccatcgtggtcaccgccaccaacttctgcccgcccaactacgcgctgccctcggacgacggcggctggtgcaacccgccccgcccccacttcgacctcgccatgcccatgttcctccacatggcgcagtaccgcgccggcatcgtccccgtctcctaccgccgggtggcgtgccggaagtcgggcggggtgcggttcacgatcaacgggttcaggtacttcaacctggtgctcatcacgaacgtggccggggcgggggacctggtgcgcgccagcgtgaaggggtccagcaccgggtggatgcccatgtcccgcaactggggccagaactggcagtccaacgccatcctcgtcggccaggccctctccttccgcgtcaccgccagcgaccgccgcacctccacctcctggaacgccgcaccccagaactggcgcttcggacagaccttcgagggcaagaacttcagggtctagttggccttcttctccttctccggcgccggcgatggagcagatggacgtcgtcttatatactatactagcgagtaattactacagtgagcggtcgagtggtatgggttggtgtgttttttccgttcctggtgcgtggcctgtgaatgcagatgcaaggtgcaagcaggttgatagtaccagtagtagcagtaaaagtctagtcttgattagggtaaagaggtgatggttgctgggtactgagtagagtggttgtgtggagtggtggctgaagtggctgcaaagccgcagctgaagagtgggagcggcgagtgtagcccgcagctgcttctccggtccggtgtcccgtgtcgtgtcatctttgtctccatggcacgctgctggctgttactactactatttatcaaccaatcatggacctgatttgtatcgtatgagcttgatgattatgcaaaaaaaaaaaaaaaa

SEQ ID NO: 5188 - protein, 266 aa, Glycine max
  misc_feature: Ceres CLONE ID no. 1044190
  misc_feature: Ceres CDNA ID no. 40351565
  misc_feature: null
  misc_feature: Useful for making plants with altered cell wall content and/or composition
  misc_feature (173)..(250): Pfam Name: Pollen_allerg_1 PFAM Desc: Pollen allergen
  misc_feature (73)..(162): Pfam Name: DPBB_1 PFAM Desc: Rare lipoprotein A
MAAAMPPSLPALLAALLLLVTLSPAAARVPGVYTGGDWQSAHATFYGGSDASGTMGGACGYGNLYSQGYGVNNAALSTALFNEGQRCGACFEIRCVNQPGWAWCLPGRPSIVVTATNFCPPNYALPSDDGGWCNPPRPHFDLAMPMFLHMAQYRAGIVPVSYRRVACRKSGGVRFTINGFRYFNLVLITNVAGAGDLVRASVKGSSTGWMPMSRNWGQNWQSNAILVGQALSFRVTASDRRTSTSWNAAPQNWRFGQTFEGKNFRV

SEQ ID NO: 5189 - DNA, 1308 bp, Glycine max
  misc_feature: Ceres CLONE ID no. 1044196
  misc_feature: Ceres CDNA ID no. 24766052
  CDS (299)..(1045): REFERENCED BY SEQ ID NO: 5190
aacggagtttgcgtgtgggtgaaaccagcaccagcgcagtgcgtaaaggcagagagagagagagagtgaaatgagtgagttacaaaatgaagagtgacgaagccatttcgccattatcactcctctcgcaccaaaagcgatgaaagtctaggtttttacatttctggagtagctgaatcagatgaggcggatggtcttttgttaattacttcaacttaggtagacgaatctgccttggtgaatctgtcaagattgaagaatagactgcagattacttgtctggcagaaaggattcaaaatgagttggaacccacacatggagctccattacaataccattagctatccctataatacagcaggaagctttatcgaatattttgaaggtctcacctatgaacatgtcaacttcattttttctggtgcatcacatgctcaggagagttcatacccttcaaattcaagcttttacaagtttggaatttctgaaccagtgaatacttcatactatcgttacggtcatggttatgaggtaaatcatcacgaacctctggtggatgagtataggagaccttcagagaactcattgacaatcaatgaacagtcagcagctgtaagcacagaatgggttgaaggtggaaacactggcacacgagacaattctattgaatgtcctcgaagacatcatagtaattcaaatgattatcaggttatttggcaagacaatattgatcccgacaacatgacctatgaggaactacttgaattgggtgaagctgttggaactcaaagccgtggtctcacccaagaacagatctcctcacttccggtgtcaaagtacaaatgtgggttcttctcgaggaagaagtcacgggatgagagatgtgtgatttgccagatggaatataaaagaggggacaagcgcatcaccttgccatgtaaacatgtttatcatgctagttgtgggaacaaatggcttagcatcaataaggcctgccctatatgttacacggaagtgtttgccgacaagtcaaaacacaaataatctcaagcggataagtaacctgcatatgtttctgtttctccttgagtgtgggggtctttcatagaaatacatttttatttgatttttcccttttcgtagtgaggtcagccctgggtttagtaaaaatacagagaatctaaagttttataaaaggatatggacatgtatcaattgtcattgttgtactggagaggttggattacggtttgttttcataatagctaatacggtgtgctatgatttcacgaaaaaaaaaaaaaaaa

SEQ ID NO: 5190 - protein, 248 aa, Glycine max
  misc_feature: Ceres CLONE ID no. 1044196
  misc_feature: Ceres CDNA ID no. 24766052
  misc_feature (196)..(236): Pfam Name: zf PFAM Desc: Zinc finger
  misc_feature: Homolog of GI Number: 50948261 NR Desc: putative RING
  misc_feature: Homolog of GI Number: 34898016 NR Desc: ESTs C26000
  misc_feature: Homolog of GI Number: 6522599 NR Desc: zinc
  misc_feature: Homolog of GI Number: 10129643 NR Desc: Pspzf zinc finger protein
  misc_feature: Homolog of GI Number: 53850555 NR Desc: At5g10650
  misc_feature: Homolog of GI Number: 20466428 NR Desc: Pspzf zinc finger protein
  misc_feature: Homolog of GI Number: 3822225 NR Desc: RING
  misc_feature: Homolog of GI Number: 558543 NR Desc: C
  misc_feature: Homolog of GI Number: 4240031 NR Desc: DNA binding zinc finger protein
MSWNPHMELHYNTISYPYNTAGSFIEYFEGLTYEHVNFIFSGASHAQESSYPSNSSFYKFGISEPVNTSYYRYGHGYEVNHHEPLVDEYRRPSENSLTINEQSAAVSTEWVEGGNTGTRDNSIECPRRHHSNSNDYQVIWQDNIDPDNMTYEELLELGEAVGTQSRGLTQEQISSLPVSKYKCGFFSRKKSRDERCVICQMEYKRGDKRITLPCKHVYHASCGNKWLSINKACPICYTEVFADKSKHK

SEQ ID NO: 5191 - DNA, 1075 bp, Glycine max
  misc_feature: Ceres CLONE ID no. 1044224
  misc_feature: Ceres CDNA ID no. 25447140
  CDS (160)..(666): REFERENCED BY SEQ ID NO: 5192
attgatggtaaagtctttggtgaatgagtctacctttctgctatgctgctagtgattcaagtctacacttcatttgattttgccacctaaccttcctttgatagattaactatcacaaactaaactacacacacaagatccggggtttgatcaaccatcatgtctgacgaagtcaacagcgttttcaagaaatatctcaaccagcttcagcttcatcctctcagaaccaaggcgattactgcggcatttttggctggttttagtgatgcagtggcacagaagttatctggggccaagaaacttcagttgagaagggtacttcttttcatgctctatggtttcgcctactctgggccctttggacattttctccacaaattgatggataaaatatttaagggggagaaaggcaatgacactgttgctaagaaggtgatccttgaacagataaccagttccccatggaacaactttttgttcatgatgtactatggcttggttatagaaggaagaccttggagtacagtcataaacaaagttaaaaaggattacccttctgttcagttgactgcatggaagttttggcctatagttggttgggtgaattaccagtatatgcctctgcagctccgtgttgtatttcacagctctgttgctgcttgctgatgcctagaaccgggttaaactatgtcagtatgtttcaaagccactaggacattcattttacttgaggttgaactttgaagtgccataataggttttaagtgaaggtattgtgtgagtgacacatgctgattactttgggcaatctttctgaatctgaaagcaaggtctgttgcaattaaggctgcctaggacatcacaaatttcatacttttgggtaattttctgtttccttcctatgtaaattgggatggaaaaaaaatctgccatatttgttaatagtggagcattcatcatagtttgtttggcatattagactattacattggttgttatgacttgtttggacttgcacttgccaatattgataaattagatgtttgtttcctgctgactaaaaaaaaaaaaaaaa

SEQ ID NO: 5192 - protein, 168 aa, Glycine max
  misc_feature: Ceres CLONE ID no. 1044224
  misc_feature: Ceres CDNA ID no. 25447140
  misc_feature: Homolog of GI Number: 50948647 NR Desc: putative peroxisomal membrane protein
  misc_feature: Homolog of GI Number: 50906511 NR Desc: putative peroxisomal membrane protein 22 kDa
  misc_feature: Homolog of GI Number: 30682784 NR Desc: peroxisomal membrane protein
  misc_feature: Homolog of GI Number: 27764998 NR Desc: At4g04470
  misc_feature: Homolog of GI Number: 58388167 NR Desc: ENSANGP00000012562
  misc_feature: Homolog of GI Number: 54640710 NR Desc: GA20730
  misc_feature: Homolog of GI Number: 21358267 NR Desc: CG7970
  misc_feature: Homolog of GI Number: 61886515 NR Desc:  similar to Peroxisomal membrane protein 2
  misc_feature: Homolog of GI Number: 21553640 NR Desc: contains similarity to 22 kDa peroxisomal membrane protein
  misc_feature: Homolog of GI Number: 18422298 NR Desc: peroxisomal membrane 22 kDa family protein
MSDEVNSVFKKYLNQLQLHPLRTKAITAAFLAGFSDAVAQKLSGAKKLQLRRVLLFMLYGFAYSGPFGHFLHKLMDKIFKGEKGNDTVAKKVILEQITSSPWNNFLFMMYYGLVIEGRPWSTVINKVKKDYPSVQLTAWKFWPIVGWVNYQYMPLQLRVVFHSSVAAC

SEQ ID NO: 5193 - DNA, 1076 bp, Glycine max
  misc_feature: Ceres CLONE ID no. 1044240
  misc_feature: Ceres CDNA ID no. 25447289
  CDS (146)..(835): REFERENCED BY SEQ ID NO: 5194
acccttttgctttctttatccaataataataaccccctttttccctctccatacctttttgctttctttatccaataataagaacttcccacgagtggctttaactggtctggtctggtctggtcggacacacaaaaatattagtatggagaaggtgagttttgtgaagaatggagagcttagattgcctccggggtttcgtttccacccgactgatgaggagctggttttgcagtacttgaagcgcaaggtcttctcctgccctctgccagcctctatcattcctgaggttgatgtttgcaagtctgatccttgggatttgccaggtgatttggagcaagagagatacttctttagcaccaaagaggccaaatatcccaacggaaatcgctctaacagagccacaaattcgggttattggaaggcaactggcttggacaaacaaattgttacttcaaaagggaaccaagttgtggggatgaagaagacacttgttttctacagaggcaagcctcctcatggatccagaactgattggatcatgcatgagtatcgcctcaacatccttaacgcctctcagagccatgttcccatggaaaattgggttctatgtcgcatatttttgaagaagagaagcggtgctaaaaatggggaggagagcaacaaggtgaggaactctaaggtggttttctatgacttcctagcgcagaacaagactgattcctcatcctcggccgccagtggaattacacatgaacatgaatcagatgaacatgaccatgaagagagcagtagctccaacaccttcccttatactattagaacgaaaccttaacaaccaagtcaacaaccaccttccttaaaaagttgattatcacctagttttttttttttttaattctctttccctttccctgtaatcatcatcaaccacttgttgaaaggaagcatccctcccaatgagaccggcattagttaaagggtagcctgcagagtatggtactgatagtagcagtgtgtaatggactccccattttccttcaatttaacctttttttctaaaaaaaaaaaaaaaa

SEQ ID NO: 5194 - protein, 229 aa, Glycine max
  misc_feature: Ceres CLONE ID no. 1044240
  misc_feature: Ceres CDNA ID no. 25447289
  misc_feature (14)..(139): Pfam Name: NAM PFAM Desc: No apical meristem
  misc_feature: Homolog of GI Number: 23506087 NR Desc: At5g13180/T19L5_140
  misc_feature: Homolog of GI Number: 56718885 NR Desc: NAC
  misc_feature: Homolog of GI Number: 2459430 NR Desc: putative NAM
  misc_feature: Homolog of GI Number: 7021736 NR Desc: putative jasmonic acid regulatory protein
  misc_feature: Homolog of GI Number: 21389179 NR Desc: nam
  misc_feature: Homolog of GI Number: 62546183 NR Desc: NAC1 protein
  misc_feature: Homolog of GI Number: 15148914 NR Desc: NAC domain protein NAC2
  misc_feature: Homolog of GI Number: 21593425 NR Desc: NAM protein
  misc_feature: Homolog of GI Number: 63252923 NR Desc: NAM
  misc_feature: Homolog of GI Number: 6223651 NR Desc: NAM
  misc_feature: Useful for accelerating crop development and harvest
  misc_feature: Useful for increasing chlorophyll and photosynthetic capacity
  misc_feature: Useful for making ornamental plants with modified flowers
  misc_feature: Useful for making plants with increased biomass and foliage
  misc_feature: Useful for making shorter plants
  misc_feature: Useful for sterility
MEKVSFVKNGELRLPPGFRFHPTDEELVLQYLKRKVFSCPLPASIIPEVDVCKSDPWDLPGDLEQERYFFSTKEAKYPNGNRSNRATNSGYWKATGLDKQIVTSKGNQVVGMKKTLVFYRGKPPHGSRTDWIMHEYRLNILNASQSHVPMENWVLCRIFLKKRSGAKNGEESNKVRNSKVVFYDFLAQNKTDSSSSAASGITHEHESDEHDHEESSSSNTFPYTIRTKP

SEQ ID NO: 5195 - DNA, 1572 bp, Glycine max
  misc_feature: Ceres CLONE ID no. 1044287
  misc_feature: Ceres CDNA ID no. 25892484
  CDS (56)..(1273): REFERENCED BY SEQ ID NO: 5196
agatagaagttgagctgagtgagtcacagttgttctcattgaagcagaagaagaaatggcggcttctctgcaactgttccaatgcaaactagcgagaccctttcggtccttccctttgcgaaggtcaactccccctctgagtctgaggtgttgcgcttcgcccccttcttcctacagcatcactctcattcccggcgatggtatcggccccgaaatcatctctgtggccaaagacgttcttgtcctcgtgggttctctcgaagggatcaaattcgagttccaagaggttcttatgggtggagctgcattggatgccaccggagtccctttacccgatgataccctttctgccgctaagcaatctcatgccgttttgcttggtgctgttggaggttataaatgggataagaacgagaaacatctcaagcctgagactggcttgcttcagatacgtaaagagcttggagtatttgcaaatcttagaccagctaccgtatactctccgttagtggatgcttcaactttgaagagagaggttgctgaaggggtcgatatcatgcttataagggaactcactggaggtatctattttggagaacccaggggctttggcaccaatgaaaatggtgaagagattggctttaatactgagatttatgctacacatgagatagatcgcatagctcattttgcatttaaggttgctcagaagcgttgtgggaaactttgttctgttgacaaagccaatgtactagaggcatcaatgttatggagaaagagatttttggcaatagcgcaagaatatcctgatgttgagctctcacatatgtatgttgataatgcttcaatgcaactaattcgcaatccaaaacagtttgacaccatggtgacaaacaacatttttggcgatatattatcagatgaggcttcaatggtcactggaagtattgggatgcttccttctgctagccttggggcttcgggacctggactttttgaacccatacacggttctgcacctgatattgccggacaggacaaggcaaatccatttgctactgttcttagtgctgctatgcttttgaggtatggcctaggagaagaaaaggcagctaaaagaatagagaatgcagtggtggacactttgaacaggggatttcgaactggtgacatatattctgcaggaacaaagctggtaggatgcaaacagttaggtgaagagatactgaagtcagttgaatctaacgttcatgctggtgctgctacagtgtgatctcgagaccaactcgccatagaactttggattctggtttttatcctggagatcactatgactgccaaagctgagaaaatctccctaatttggcttccttctgcgtcatgtattttgtcacgagtgtctactactatgcatatatgatatatgaatgtaaccctttgcttagaggtgtgatcaaacaatgagacatcattaattaaaattgttttgcagcgccgaaatatcctcatgccagatgtcttaaattatccaagtgaaatagaaagaaataccagctaaaaaaaaaaaaaaaa

SEQ ID NO: 5196 - protein, 405 aa, Glycine max
  misc_feature: Ceres CLONE ID no. 1044287
  misc_feature: Ceres CDNA ID no. 25892484
  misc_feature: The plant is abnormally small.
  misc_feature: Useful for making plants with modulated biomass
  misc_feature (41)..(390): Pfam Name: Iso_dh PFAM Desc: Isocitrate/isopropylmalate dehydrogenase
  misc_feature: Homolog of GI Number: 17827 NR Desc: 3
  misc_feature: Homolog of GI Number: 15221631 NR Desc: 3
  misc_feature: Homolog of GI Number: 21592944 NR Desc: 3
  misc_feature: Homolog of GI Number: 18377879 NR Desc: AT5g14200/MUA22_20
  misc_feature: Homolog of GI Number: 53749178 NR Desc: At5g14200
  misc_feature: Homolog of GI Number: 4512615 NR Desc: Strong similarity to gbX59970 3
  misc_feature: Homolog of GI Number: 1903021 NR Desc: hypothetical 3
  misc_feature: Homolog of GI Number: 21553584 NR Desc: putative 3
  misc_feature: Homolog of GI Number: 21387085 NR Desc: putative 3
  misc_feature: Homolog of GI Number: 50917349 NR Desc: putative 3
  misc_feature: Useful for decreasing plant size
  misc_feature: Useful for increasing chlorophyll and photosynthetic capacity
  misc_feature: Useful for making bigger plants
  misc_feature: Useful for making lethal plants for genetic confinement systems
MAASLQLFQCKLARPFRSFPLRRSTPPLSLRCCASPPSSYSITLIPGDGIGPEIISVAKDVLVLVGSLEGIKFEFQEVLMGGAALDATGVPLPDDTLSAAKQSHAVLLGAVGGYKWDKNEKHLKPETGLLQIRKELGVFANLRPATVYSPLVDASTLKREVAEGVDIMLIRELTGGIYFGEPRGFGTNENGEEIGFNTEIYATHEIDRIAHFAFKVAQKRCGKLCSVDKANVLEASMLWRKRFLAIAQEYPDVELSHMYVDNASMQLIRNPKQFDTMVTNNIFGDILSDEASMVTGSIGMLPSASLGASGPGLFEPIHGSAPDIAGQDKANPFATVLSAAMLLRYGLGEEKAAKRIENAVVDTLNRGFRTGDIYSAGTKLVGCKQLGEEILKSVESNVHAGAATV

SEQ ID NO: 5197 - DNA, 1383 bp, Glycine max
  misc_feature: Ceres CLONE ID no. 1044695
  misc_feature: Ceres CDNA ID no. 25402642
  CDS (112)..(1131): REFERENCED BY SEQ ID NO: 5198
aacggttaagtgttgattcattgtacttgtactagcagcagcaatttgtttcgtgaacacttgcagcttcggtttcttaattcatcttcgctagggtttttgaagttgacgatggcttcccctcctcatttcgacgacgactttgattttggaggcggttttagcggaacgcaatcaggtaataagaggccatctcccgactatgacgaggatgaatatgaaaatgatccttttggacacaagaaggccaaatcaaaagctgaagaagcggcttctggtgtgaccacaggaatgattttgtctcttcgtgaaagtcttcagaactgtaaggacatgcttgctacatgccaaaatgaacttgaggctgcaaaatctgagattcagaagtggcattcttcatttcaaaatgaaccttttatatctgctgggaccactccagtaccgaaatcggtgattaattatcttcaagctctgaaatcatctgaagagtctttaagagagcagcttgaaaaagcaaagaaaaaggaagctgcattcattgtcacatttgccaaacgggaacaagagatagcagagttgaagtctgctgtacgggacctgaaatctcaattcaacccagcttctatgcaggctaggaggttgttactagatccagcagttcatgaagagttcacacgattaaagaatttagttgaagaaaaggataaaaaagtaaaggagttgcaagataacattgctgctgtaaactttactccccaaagcaagatggggaagatgctgatggctaaatgtagaaccctacaggaggaaaatgaggagattgggaatcaagcttctgagggcaagatgcacgaattagcaatgaaactttcagtgcagaaataccaaaatgcagaactcagatgtcaatttgaagggttgcaaaagcatatggatggtttgacaaatgatgtggatagatccaatgaaatggtgttaatgttgcaagataaattagaagagaaggatcaggagatccaaagactgaaagatgaattacaaccaaaaagcctcgtcgtggaggacgagaaaacagatccagcatctaataggaattatgatgaaacgatacctactgaagccgctaagtagtataactttagacttgagaagtttgagtaaaatagtcaaatttgtccatgaaaagaatgacggggatgttttgatctctaaaaggaaaatgatcatttcaatcttcatccctcaagcttgtaaacatagagcactttagtcctttcatccaatagatgagttttgggggatcgaatcaggtaaagtgaatatttttaggaataagttgtgtttattctaaaagtttttgtaccgtcaaaaaaaaaaaaaaaa

SEQ ID NO: 5198 - protein, 339 aa, Glycine max
  misc_feature: Ceres CLONE ID no. 1044695
  misc_feature: Ceres CDNA ID no. 25402642
  misc_feature: Homolog of GI Number: 21281199 NR Desc: putative FKBP12 interacting protein FIP37
  misc_feature: Homolog of GI Number: 46949204 NR Desc: FKBP12
  misc_feature: Homolog of GI Number: 51090427 NR Desc: putative FKBP12 interacting protein
  misc_feature: Homolog of GI Number: 41054117 NR Desc: Wilms' tumour 1
  misc_feature: Homolog of GI Number: 76626339 NR Desc:  similar to Wilms tumour 1
  misc_feature: Homolog of GI Number: 10334526 NR Desc: WTAP protein
  misc_feature: Homolog of GI Number: 11322455 NR Desc: WTAP protein
  misc_feature: Homolog of GI Number: 47117627 NR Desc: Wilms' tumor 1
  misc_feature: Homolog of GI Number: 21361159 NR Desc: Wilms' tumour 1
MASPPHFDDDFDFGGGFSGTQSGNKRPSPDYDEDEYENDPFGHKKAKSKAEEAASGVTTGMILSLRESLQNCKDMLATCQNELEAAKSEIQKWHSSFQNEPFISAGTTPVPKSVINYLQALKSSEESLREQLEKAKKKEAAFIVTFAKREQEIAELKSAVRDLKSQFNPASMQARRLLLDPAVHEEFTRLKNLVEEKDKKVKELQDNIAAVNFTPQSKMGKMLMAKCRTLQEENEEIGNQASEGKMHELAMKLSVQKYQNAELRCQFEGLQKHMDGLTNDVDRSNEMVLMLQDKLEEKDQEIQRLKDELQPKSLVVEDEKTDPASNRNYDETIPTEAAK

SEQ ID NO: 5199 - DNA, 614 bp, Glycine max
  misc_feature: Ceres CLONE ID no. 1044710
  misc_feature: Ceres CDNA ID no. 29191468
  CDS (62)..(373): REFERENCED BY SEQ ID NO: 5200
accaagttagtttaatttgagtgtatattcagagagaaaaacgaagaaaacatcgtgaagcatgtctggaagaggaaagggagggaagggtctaggaaagggaggagcgaaacggcaccgtaaggttctgagggataacattcagggaatcacgaagcccgcgattcggcgtctggcgcgacgtggtggcgtgaagcgtatcagtggtctcatctatgaagaaactcgcggtgttctcaagatcttcctcgagaacgtcattcgcgacgctgtcacctatactgagcacgctcgccgcaagaccgtcactgctatggacgttgtttacgctctcaagaggcagggcaggaccctctatggtttcggtggttagagatttggggagtggattagggtttctcatcaatttcgttgttgatagttctttagctcttcttgtttgcctttgagttgtagctatgagaaattttaatatgtttatctgattaacttggatatatatatttatatcgtggcctgggtagattcattgttttctcgttattttgcttgtgccaaactgaatttaattgcaatgtttgttctttcggctaagttgaaaaaaaaaaaaaaaa

SEQ ID NO: 5200 - protein, 103 aa, Glycine max; identical to SEQ ID NO: 8
  misc_feature: Ceres CLONE ID no. 1044710
  misc_feature: Ceres CDNA ID no. 29191468
  misc_feature (66)..(92): Pfam Name: TAF PFAM Desc: TATA box binding protein associated factor
  misc_feature: Homolog of GI Number: 68441405 NR Desc:  similar to histone H2A
  misc_feature: Homolog of GI Number: 57098917 NR Desc:  similar to germinal histone H4 gene
  misc_feature: Homolog of GI Number: 56798269 NR Desc: histone H4
  misc_feature: Homolog of GI Number: 61820747 NR Desc:  similar to germinal histone H4 gene
  misc_feature: Homolog of GI Number: 57110415 NR Desc:  similar to germinal histone H4 gene
  misc_feature: Homolog of GI Number: 50728590 NR Desc:  similar to germinal histone H4 gene
  misc_feature: Homolog of GI Number: 1806283 NR Desc: Histone H4 homologue
  misc_feature: Homolog of GI Number: 61834317 NR Desc:  similar to germinal histone H4 gene
  misc_feature: Homolog of GI Number: 61835903 NR Desc:  similar to germinal histone H4 gene
  misc_feature: Homolog of GI Number: 61871726 NR Desc:  similar to germinal histone H4 gene

SEQ ID NO: 5201 - DNA, 596 bp, Glycine max
  misc_feature: Ceres CLONE ID no. 1044736
  misc_feature: Ceres CDNA ID no. 25446486
  CDS (260)..(442): REFERENCED BY SEQ ID NO: 5202
attattaggagtttctcttcttatcttgatttatctcattaatcttgctcctgcatatcctcttcaccacaccttgctttcagcatcctgtgagagggttcataattgaagaggtctactttgcagtcagtacttcaacataagctgggaatatagttattgttattgcactagtatttaccagtaggataaattgtgcagaatagcaagttcgaagataagggaatactatatggaagtaggataggaggcgctggtcatggaggcagttcacacggaaatggaaatggaaattcaggatcacctgaaacacgaggaggaggagctgcacttatacctgtttatgcagcaggtgctgcaaacaaaaatcaccaacatcagacccgtcatggtgctgcaaactgcaaccttaacaaaatcagattttccaacttgcttatgatcatcctggtctatcctctcatactgtcatttttgttgtaatagaaagcgcaaaaaatagttcattgtatattatgtaacaactgttacaggtctttcgagaaatagtgctgtcatggtctactgatgtattttgtttaaaaaaaaaaaaaaaa

SEQ ID NO: 5202 - protein, 60 aa, Glycine max
  misc_feature: Ceres CLONE ID no. 1044736
  misc_feature: Ceres CDNA ID no. 25446486
MEAVHTEMEMEIQDHLKHEEEELHLYLFMQQVLQTKITNIRPVMVLQTATLTKSDFPTCL

SEQ ID NO: 5203 - DNA, 1290 bp, Glycine max
  misc_feature: Ceres CLONE ID no. 1044766
  misc_feature: Ceres CDNA ID no. 25447141
  CDS (219)..(1109): REFERENCED BY SEQ ID NO: 5204
cattacatacattatctttctttgcacgctcttactcgtttcctttgtctttgtctttctctttcggctttttcttctgctccactgtttctatcccttcctttctgtatgcaatattggcatgcttgtttggtatcagaatcgcattaactgtcatatatacttggacggagttgatcaggacttcaattagcttccatgtaaacataatattaagaatgatcacatggacatttgggcttatctccctgcctgcaagagttgtgaatgcctttcaaagggagaggcagctggaacaaaaactacatgaaatgcacatagagttggagaatctagtgtgggataagaaggaacttcaagaacattttcaaatggctgtcaaagagcgcaaaatgatggagatactactggcagagcttgaagaggagcatgatatggccattgcaaatattgaaaagttagagggaaagttgcgggatcagacaaatgaaaatcttcggctgaaagaaattcaaggaaagggatactggagctccaaagaccacaacaacactgacagagtccaaaccatagatgacagcaactacaacatttctcatcctatactctcactgaactccaactacaacggcagtggaatcacccttcaagatcttctaatgcgcaaagatatttggcaagatgagagcaaaaccagaagtgagttgcttaaactcttgaaagctgtaccaaagtccgggcaagttaagtccgaaatgagggaagcactagaccatcatcgagacatagctctttcacaatcacttttcagtgcccttatgtcacttgtggttggagtcactgcgtgggaagctgaggacccttgcatgcctcttgtggtggctctcttcgccgtagtaggcatgtccttgaagagtgtggtgcagtttttctccaccattagaaataagcctgcatctgatgctgttgctcttttaagcttcaattggtttgttcttggcactctaacctaccctaccttaccaagggttgctcgcatgctgtctccactagcgcaacgccttatggaccaaaccatgatccggtttggtctcctttccttagcttgacactgctttttttcttttctgttgtgttatattattatgtgcagtataatctgaattttgagtcctatttactgtggtgtgcgtttcttactgcttgtaaaatatgatgaggaatctctgtaatttggttgtctgtgatgagatattctgctttctctgtttcaaaaaaaaaaaaaaaaaa

SEQ ID NO: 5204 - protein, 296 aa, Glycine max
  misc_feature: Ceres CLONE ID no. 1044766
  misc_feature: Ceres CDNA ID no. 25447141
  misc_feature: Homolog of GI Number: 34905816 NR Desc: P0483G10.12
MITWTFGLISLPARVVNAFQRERQLEQKLHEMHIELENLVWDKKELQEHFQMAVKERKMMEILLAELEEEHDMAIANIEKLEGKLRDQTNENLRLKEIQGKGYWSSKDHNNTDRVQTIDDSNYNISHPILSLNSNYNGSGITLQDLLMRKDIWQDESKTRSELLKLLKAVPKSGQVKSEMREALDHHRDIALSQSLFSALMSLVVGVTAWEAEDPCMPLVVALFAVVGMSLKSVVQFFSTIRNKPASDAVALLSFNWFVLGTLTYPTLPRVARMLSPLAQRLMDQTMIRFGLLSLA

SEQ ID NO: 5205 - DNA, 1248 bp, Glycine max
  misc_feature: Ceres CLONE ID no. 1044817
  misc_feature: Ceres CDNA ID no. 40041387
  CDS (176)..(1036): REFERENCED BY SEQ ID NO: 5206
ctacttttcctttatccattttccaagcaaaacttttcaaacccaaaaaaaatccaaaaaaaagaaaaacaaaacgcttaacgcaatacaaaaaccacagtttcaatcacatctctctctctctttctcgcaaatttctactttctgggttttctatttgagattcgttgttccaatgagcgatcacttggtggtgttcgttgaccgtctcgcgcgccctgtccccgttgacccggtggcgcagccgccttccgagccgtctcctcctccggcccccgtgaatgctgacgcttccgggagctccggcaccgctccggtggaggattgtgacggagagggcggcggcgaggaggagccgctgatccagatggcggagtgccgcatctgccaggaggaggacggcgtttccaacttggagacgccctgcgcctgtagcggcagtcttaagtatgctcacagaaagtgtgtccagcattggtgtgatgagaaaggagacataacttgtgagatatgtcatcagccatatcaacctgggtatactgcccccccacctcgtcctaatcctgaagaaactactattgatataggaggtggctggacaatatctggcacacccttagacttgcgtgatcctcgactcttggcaattgcagaagcagaacgtcagttcttggatgctgaatatgatgagtatgctgcttccaacgccagtggagctgcattttgccgctcagctgctttaattttaatggcccttttactcctgcggcatgcactttctgtctcagatggtgataattctgatgatgatccatccagttttttctcccttttcttgcttcgtgctgctggatttctattaccttgctacatcatggcttgggcaatcagtattctgcagcgtcggcgacaaagacaagaggctgcagcactagcggcaacccaagttgcttttgttctacaatctggtcagcgtagaggtttacagtttgcaatagcaccaggaccacccacactacaccaggaacaagtataataatttgtatgcttttttatgtatgaatgaatattaagaaggctttgttgaaatgccgtgcatttttactctttactttcagctgtaacgttatgtacatgtacatacttagggggtgctaaaacgatgtacatgaatccattggtatccattcaattcatctatctatgaatgtaaccgaatccatccacttactaaaaaaaaaaaaaaaa

SEQ ID NO: 5206 - protein, 286 aa, Glycine max
  misc_feature: Ceres CLONE ID no. 1044817
  misc_feature: Ceres CDNA ID no. 40041387
  misc_feature (68)..(113): Pfam Name: zf PFAM Desc: Zinc finger
  misc_feature: Homolog of GI Number: 49533771 NR Desc: putative zinc finger protein
  misc_feature: Homolog of GI Number: 77551787 NR Desc: Zinc finger
  misc_feature: Homolog of GI Number: 50946099 NR Desc: zinc finger protein
  misc_feature: Homolog of GI Number: 21537046 NR Desc: nucleoside triphosphatase
  misc_feature: Homolog of GI Number: 15223693 NR Desc: zinc finger
  misc_feature: Homolog of GI Number: 30692888 NR Desc: zinc finger
  misc_feature: Homolog of GI Number: 42570667 NR Desc: zinc finger
  misc_feature: Homolog of GI Number: 15217818 NR Desc: zinc finger
  misc_feature: Homolog of GI Number: 72006378 NR Desc:  similar to cellular modulator of immune recognition
MSDHLVVFVDRLARPVPVDPVAQPPSEPSPPPAPVNADASGSSGTAPVEDCDGEGGGEEEPLIQMAECRICQEEDGVSNLETPCACSGSLKYAHRKCVQHWCDEKGDITCEICHQPYQPGYTAPPPRPNPEETTIDIGGGWTISGTPLDLRDPRLLAIAEAERQFLDAEYDEYAASNASGAAFCRSAALILMALLLLRHALSVSDGDNSDDDPSSFFSLFLLRAAGFLLPCYIMAWAISILQRRRQRQEAAALAATQVAFVLQSGQRRGLQFAIAPGPPTLHQEQV

SEQ ID NO: 5207 - DNA, 509 bp, Glycine max
  misc_feature: Ceres CLONE ID no. 1044901
  misc_feature: Ceres CDNA ID no. 25446487
  CDS (108)..(329): REFERENCED BY SEQ ID NO: 5208
aaaaacagcgcactgagtgctgagaacgttacctcattcaaaagcagcaacagcagattattcttctttgtttctgttcttcttcatcagccgattcagctttgtccatggccaccgaaccaaaagcagccgccgatgacgtcaagatcgatctcttcgaagacgacgacgagttcgaagagttcgaaatcaatgaagagtgggatgacaaggaagaagggaaggaagtgactcaacagtgggaggatgattgggatgatgatgatgttagtgatgatttttctctccagttgagaagggagttggagagcaacaccgagaagaactaaaccacctgctagttattattgcttgatatgacatgcgctatgtcttgggttgggtgttcgagctcttggaaggagatgaaaactatgccttgtttggaaggaaatgtaagaacatagagacatgatttttctgtaccttcttgaatatatatgcttttaaagttaaaaaaaaaaaaaaaa

SEQ ID NO: 5208 - protein, 73 aa, Glycine max
  misc_feature: Ceres CLONE ID no. 1044901
  misc_feature: Ceres CDNA ID no. 25446487
  misc_feature (7)..(69): Pfam Name: DSS1_SEM1 PFAM Desc: DSS1/SEM1 family
  misc_feature: Homolog of GI Number: 37050895 NR Desc: deleted in split hand/splt foot protein 1
  misc_feature: Homolog of GI Number: 66509809 NR Desc:  similar to ENSANGP00000017966
  misc_feature: Homolog of GI Number: 51593680 NR Desc: MGC85362 protein
  misc_feature: Homolog of GI Number: 58380251 NR Desc: ENSANGP00000017966
  misc_feature: Homolog of GI Number: 32416282 NR Desc: predicted protein
  misc_feature: Homolog of GI Number: 55628924 NR Desc:  similar to 26 proteasome complex subunit DSS1
MATEPKAAADDVKIDLFEDDDEFEEFEINEEWDDKEEGKEVTQQWEDDWDDDDVSDDFSLQLRRELESNTEKN

SEQ ID NO: 5209 - DNA, 1094 bp, Glycine max
  misc_feature: Ceres CLONE ID no. 1044962
  misc_feature: Ceres CDNA ID no. 25447142
  CDS (90)..(911): REFERENCED BY SEQ ID NO: 5210
agaataacgttgtgattcactcactcttctattttccaactttacaatttcatttcagatagcttcttgactcgttactgactcactcaatggctgaccgagttcaccccagccactcgccttccgtttccgcggattcacaaccgccatcgcctcaagactcctccgtcgttccgaaaccgccgtcgccaccgtcaccggagaagccagtgcctccgcctggaacctacgtcatcaagatccccaaggaccaagtctaccgcgtccctccgccggagaacgctcgccgctacgaccaatacgctcgccgtaaacaccgccggagccgatgctgctgctgcttctgctggctcatcggaatcctcttcattctcgtcgtgctcctcgccatcgccgccggcgtcctctacctcgttttccgtcccgaggcgccgaaatactccatcgaaaacatcaccgtcagaggaattaacctcacctcgccgtcgtccgtggcggcgatctcgccggagttcaacgtcaccgtcaaggccgataaccctaacgacaagatcgggatccgttacttgaaggatagctccgccgaggtgttttataaggacgcgaggctgtgtaacggcgctctgccggcgttttaccagccgtcaaacaacgtgacggtgtttgggacggcgttaaggggtgacggaatcgagctgagaagcgaggaccgaagagcgttgctggaggcgcagaccaaacggagagtgccgttgaccgttaggattagggcaccggtgaaaataaaagtggggtccattaggacgtggaagattaccgttaaggtgaactgtgatgtgacggtgaatgagttaacggcgcaggccaagattgtttctaaacgttgtagttatgacgtggatctttggtgaagaaaacggtgacaacagagggtgtttttttttcgtttatagataggaccgaaatattggagattatacaaattttcgtatacattaatgttacattgtagcgcatttattgatacgcgtacgccatgtatcttaggatttgatttggttttgtgcaaaaaaaaaaacaaaaaaaaaaaaaaa

SEQ ID NO: 5210 - protein, 273 aa, Glycine max
  misc_feature: Ceres CLONE ID no. 1044962
  misc_feature: Ceres CDNA ID no. 25447142
  misc_feature (107)..(248): Pfam Name: Hin1 PFAM Desc: Harpin
  misc_feature: Homolog of GI Number: 34909192 NR Desc: P0425G02.19
  misc_feature: Homolog of GI Number: 56542461 NR Desc: Avr9/Cf
  misc_feature: Homolog of GI Number: 15239459 NR Desc: harpin
  misc_feature: Homolog of GI Number: 6686408 NR Desc: F1E22.7
  misc_feature: Homolog of GI Number: 50929643 NR Desc: OSJNBa0064G10.14
  misc_feature: Homolog of GI Number: 34903552 NR Desc: P0001B06.28
MADRVHPSHSPSVSADSQPPSPQDSSVVPKPPSPPSPEKPVPPPGTYVIKIPKDQVYRVPPPENARRYDQYARRKHRRSRCCCCFCWLIGILFILVVLLAIAAGVLYLVFRPEAPKYSIENITVRGINLTSPSSVAAISPEFNVTVKADNPNDKIGIRYLKDSSAEVFYKDARLCNGALPAFYQPSNNVTVFGTALRGDGIELRSEDRRALLEAQTKRRVPLTVRIRAPVKIKVGSIRTWKITVKVNCDVTVNELTAQAKIVSKRCSYDVDLW

SEQ ID NO: 5211 - DNA, 859 bp, Glycine max
  misc_feature: Ceres CLONE ID no. 1045057
  misc_feature: Ceres CDNA ID no. 25446695
  CDS (443)..(661): REFERENCED BY SEQ ID NO: 5212
gagaatctgaaaccctaggaagaggaggaagatgatcttcttgacgaacaagcacatcatgattactccaccaagtaccgctactagtttcagatgttactcgtagcaaccaaccaactttgcttgctcaattcgcatagtttatactttatggcatcttgcttatttatttgtgctcaagcataacgctgaaagctgctgccagggtacactgcaaccaagagctgttaacaatttgcagagctagagaaccagctacatgttgttgcagtttacttgttgactcaactgtgtgcatttgaactgtaaccactgcagtcaatgcagtaattattggcttttcaagtggggttggagtagttgtacttctagttgaagatggaagagcatgagttgatggagtccaatactcctcaggatgaatgaaatttaatggggtttgatgtttggtccttgtcctatctcgtactttcttccttgcaaccgcgtctctgagcttgctgatatcagagacacgagcaccggctgtgtgagctgcacctactcttacattgccacgtggctgcttggacatcaagaactccaaagctgcaaggttggacctctcaacaaccctattttattccaaagaagaagaagaatggtcgttaacaagaactaaaatgaaaaggggagaaccgtgatttaaaaattcctgaccaacacaattatcatgtttgtccctaagtcacaattcttccaaagaataatggctactctttaatgtctattcaacaattgctgcttgcaaactgcttgcaaattacaaatgtgaaataggtgaaagcaaagatcttgctttacaaaaaaaaaaaaaaaa

SEQ ID NO: 5212 - protein, 72 aa, Glycine max
  misc_feature: Ceres CLONE ID no. 1045057
  misc_feature: Ceres CDNA ID no. 25446695
MFGPCPISYFLPCNRVSELADIRDTSTGCVSCTYSYIATWLLGHQELQSCKVGPLNNPILFQRRRRMVVNKN

SEQ ID NO: 5213 - DNA, 1674 bp, Glycine max
  misc_feature: Ceres CLONE ID no. 1045082
  misc_feature: Ceres CDNA ID no. 35383328
  CDS (63)..(1373): REFERENCED BY SEQ ID NO: 5214
ttttccaattcgagagcttcggaataaacctgaagctaacgaaccaaccataaaccctatctatggccaccctcgacccaatccaaaacggcgtctcttcggacaatccagccgccgaaccgtcctccacccccgccgaagaccccaccccagaccccgccgccgccgagaagcggtggccggggtggcctggccactgcgttttccgcctaatcgtgccggtgctcaaggtcggtagcatcatcggccgcaagggggagctcatcaagaagacctgcgaggaaacgaaagctcgcattcgagtcctcgacggcgccgtcggcacctccgatcgaatcgtactcatatcagggaaggaagagccggaggcacctctttctcctgcaatgaatgctgtaataagggtttttaaacgtgtctctgggttttctgaaattgatgccgagaataaagcatcagcagttgcattttgttctgtccgtttattggtggcctcaacacaggctataaatttgattggaaagcagggttcattaattaaatctatacaggaaaataccggtgcttctgttagagtgctgtctggagatgaggttcccttttatgctgctgcggacgagaggatcgtggaactacagggagaagccatgaaggtccttaaggctttagaagcagtagttgggcacctgaggaagtttttggttgataatagtgttcttcccttatttgagaaaacttacaatgcaacaatctcccaagagcaccaggcagatactacctgggttgataaaccatcactgcatagtgcttcacaacctagcattgtaactgatcttcctctttcaacaaaaagggattctctctttgctgaccgtgaaagtcagttggactcattgctccctccttccacaatgtcaatatatgggcaagattcttcactttctggtcttcgttcttcggctctcagtcgacccagtgctcctcctattgttacaacggtaatacaaaccatgcaaataccattgtcctatgcagaggacataattggtatacaagggactaatattgaatacattcgctgtactagtggagccatattgactgttcaggagagcccggtgcctgatgaaatcattgtggaaataaaaggtacctcatctcaggttcaaacggcacaacagttgattcaggaagttataagtaatcacaaagaacctcttgctagtaattacagcaggttagatacaggcctgaggtcttcttaccctcagttgggcagttcatcgtattcctcatcttccttgtcctcgcaaccctatagcggtgggtacggatcttctggtcttggaggctataggactttcagactttgaatttagtctctaggtctcacactgacttcatttgttctaattgggtctgatttgagagtcgatgctggaatgtattatggagccaccaaaatcacgtttttattatctgttatcatcatcataattgggtaatcttcgatgtggccaaagagttgagtagtgccatagaaaatgtaatgaaatattaaccatttccaggatgtttagtttgtagtgtatatgtgcattgatttaaagcttaatcgtggaatctataggggcatgaagctatgttatatttattttaaaaaaaaaaaaaaaa

SEQ ID NO: 5214 - protein, 436 aa, Glycine max
  misc_feature: Ceres CLONE ID no. 1045082
  misc_feature: Ceres CDNA ID no. 35383328
  misc_feature (47)..(109): Pfam Name: KH_1 PFAM Desc: KH domain
  misc_feature: Homolog of GI Number: 21280915 NR Desc: putative nucleic acid binding protein
  misc_feature: Homolog of GI Number: 37536904 NR Desc: putative nucleic acid binding protein
  misc_feature: Homolog of GI Number: 50901642 NR Desc: putative RNA binding protein
  misc_feature: Homolog of GI Number: 61661326 NR Desc: FLK
  misc_feature: Homolog of GI Number: 6175183 NR Desc: putative RNA
  misc_feature: Homolog of GI Number: 77556446 NR Desc: KH domain
  misc_feature: Homolog of GI Number: 50904937 NR Desc: putative KH domain protein
  misc_feature: Homolog of GI Number: 78708635 NR Desc: KH domain
  misc_feature: Homolog of GI Number: 56783855 NR Desc: HEN4
  misc_feature: Homolog of GI Number: 50920709 NR Desc: putative nucleic acid binding protein
  misc_feature: Useful for increasing chlorophyll and photosynthetic capacity
MATLDPIQNGVSSDNPAAEPSSTPAEDPTPDPAAAEKRWPGWPGHCVFRLIVPVLKVGSIIGRKGELIKKTCEETKARIRVLDGAVGTSDRIVLISGKEEPEAPLSPAMNAVIRVFKRVSGFSEIDAENKASAVAFCSVRLLVASTQAINLIGKQGSLIKSIQENTGASVRVLSGDEVPFYAAADERIVELQGEAMKVLKALEAVVGHLRKFLVDNSVLPLFEKTYNATISQEHQADTTWVDKPSLHSASQPSIVTDLPLSTKRDSLFADRESQLDSLLPPSTMSIYGQDSSLSGLRSSALSRPSAPPIVTTVIQTMQIPLSYAEDIIGIQGTNIEYIRCTSGAILTVQESPVPDEIIVEIKGTSSQVQTAQQLIQEVISNHKEPLASNYSRLDTGLRSSYPQLGSSSYSSSSLSSQPYSGGYGSSGLGGYRTFRL

SEQ ID NO: 5215 - DNA, 1193 bp, Glycine max
  misc_feature: Ceres CLONE ID no. 1045207
  misc_feature: Ceres CDNA ID no. 24766053
  CDS (189)..(920): REFERENCED BY SEQ ID NO: 5216
attattttgcattcccctaagttggtgcagtagaagtaaccagtccctagtagaccctagtcgtgtcccagacgggccagagtcagtttccaacaccaacacagcagcaaccctcaaacgccacctagggttagggtttctgcaattccccaatctctatcttccaaaaattagggttttttcaagccatggcggacggctactggaaccggcaacaggcgtttctgcctcactccggcatgctcaaacggccgcgttccgactacggtaatgagatgcataatcatattgctcgtgatgatgaccgtactggtcaccgaatgctaaaggacacacaaacaattggatctgcttatgaccgctaccttcagagtgggcaactttcttcatttacttctggggaagtcagtacagttggtggtcttgggttggctaggggtggtggtggtggattatcaggccattcactagctgatcctgctgtcatggggcgtcatgggggtagtggttcagatctagcaccaaatggacggggtgttaattatggtggtcagctaccagtagatgcggtttccagacctggacctgagacaggatctctacctccagatgcttcaagtactttatatgttgaaggtctcccttctgatagcaccagaagggaagtagctcatattttccgcccttttgttggatatagagaagttagacttgtgagcaaagaatcgaaacatcgtggtggagatcctcattacctttgttttgtggactttgcaaatccagcttgtgcagcaaccgctatgagtgccttgcaaggttataaagttgatgaactcaatcccgagtccagtcacttgcggcttcagttttctcggtatcctggtccaagaagtggacctgcttttcgcagtaaaagatgatctggttcacataagccatctaggttttatgctcatcagaatgtctgtggttcttcgttttgggggcgatactccacatgcaattttattcacccctctggacacaatccttattagagcccttgaaatgcataaattattaacaggccgagatcaaagtacaatttcaattagcaaaaaaggatttttagttcatgtattcaattactctgccgtaccattatttgctaaactttagtatattcacctggtgtctgaaaaaaaaaaaaaaaa

SEQ ID NO: 5216 - protein, 226 aa, Glycine max
  misc_feature: Ceres CLONE ID no. 1045207
  misc_feature: Ceres CDNA ID no. 24766053
  misc_feature (129)..(203): Pfam Name: RRM_1 PFAM Desc: RNA recognition motif.
  misc_feature: Homolog of GI Number: 23304837 NR Desc: RNA
  misc_feature: Homolog of GI Number: 42571569 NR Desc: RNA recognition motif
  misc_feature: Homolog of GI Number: 30699215 NR Desc: RNA recognition motif
  misc_feature: Homolog of GI Number: 47078331 NR Desc: MEG5
  misc_feature: Homolog of GI Number: 50948223 NR Desc: putative RNA
  misc_feature: Homolog of GI Number: 52077323 NR Desc: putative RNA
  misc_feature: Homolog of GI Number: 25513502 NR Desc: F16F4.3 protein
MLKRPRSDYGNEMHNHIARDDDRTGHRMLKDTQTIGSAYDRYLQSGQLSSFTSGEVSTVGGLGLARGGGGGLSGHSLADPAVMGRHGGSGSDLAPNGRGVNYGGQLPVDAVSRPGPETGSLPPDASSTLYVEGLPSDSTRREVAHIFRPFVGYREVRLVSKESKHRGGDPHYLCFVDFANPACAATAMSALQGYKVDELNPESSHLRLQFSRYPGPRSGPAFRSKR

SEQ ID NO: 5217 - DNA, 1334 bp, Glycine max
  misc_feature: Ceres CLONE ID no. 1045289
  misc_feature: Ceres CDNA ID no. 36706940
  CDS (315)..(1166): REFERENCED BY SEQ ID NO: 5218
attccttccttcctttcttcttcttccttacccctttccctggctgatttagggttttctggcaataatctcctttcggtactttttacctctgaatcctcatcatcgctattgctgattacactcctcacaatgctcactcaacgcctcgttcgaaaaacgtgaaatcttctcttctgcaatttctagggtttcgaattgcggaaccgattcattcaactcaacaccacaaagactcgatcgatccatggtagcgttgtgattggcgctcggtggcgagcgagttgatagattgcgggttggctggattttgtatggaaactcggagccggaagcgggcggaggcttcctcagctgccccttcatccccttcctctggtcccaccactcgttcaagcaagcgcgcacgtctctcttcttcttcttccgcttccgccgccgtgaacactcggtcccgtgcatccaatactaaggaacccttgccccctaaaaatccccctcctcctcttcctcccatggactctgccaacgaatcctctggctcccgccgtgatcgccgcaacaacaaagaaaactcctccgacaaggggaaggagaaagagcatgatgtcaggattagggacagggatgcggcattgaacatggatggcagtggtggagacgaggacgatgacaatgacaatgacagtgaaggcggtgtggggattttgcatcaaaacttgacctctgcgagtagtgcacttcaggggcttcttcggaaactcggtgctggtttggatgatctgcttccatcgtcggctatgggctctgcatcttcctctcaccagagtgggaggctgaaaaagatcctctttggattgcgggcggacggcgaagaagggcggcaggtcgaagcattgacacagctctgtgagatgctttcgattgggactgaagaatcgcttagtacattctctgttgattcgtttgttcctgtgctcgtggggttgttgaatcacgagagcaaccctgacatcatgcttcttgctgccagagcattgacccatctctgcgatgtgctcccttcatcttgtgctgcggttgtgcattatggtgcagtctcaatcttttgtgccaggttgctcacaatagaatacatggacttggctgagcaggttgttctttaatgggaatggtgttagaagaaacttatgaaatataaatatttgtcttgaactctggtgctgcctaattgttttttaaaactatgtatattgcaatgtttctgggttcagttgtagaagaatcatgcattttgaaaatgaaattcttatagtttaaaaaaaaaaaaaaaa

SEQ ID NO: 5218 - protein, 283 aa, Glycine max
  misc_feature: Ceres CLONE ID no. 1045289
  misc_feature: Ceres CDNA ID no. 36706940
  misc_feature (212)..(249): Pfam Name: HEAT PFAM Desc: HEAT repeat
  misc_feature: Homolog of GI Number: 32965334 NR Desc: HECT ubiquitin
  misc_feature: Homolog of GI Number: 30692023 NR Desc: HECT
  misc_feature: Homolog of GI Number: 50904583 NR Desc: putative HECT ubiquitin
  misc_feature: Homolog of GI Number: 66848410 NR Desc: ubiquitin fusion degradation protein
  misc_feature: Homolog of GI Number: 72004355 NR Desc:  similar to thyroid hormone receptor interactor 12
  misc_feature: Homolog of GI Number: 73993924 NR Desc:  similar to thyroid hormone receptor interactor 12 isoform 2
  misc_feature: Homolog of GI Number: 73993930 NR Desc:  similar to thyroid hormone receptor interactor 12 isoform 7
  misc_feature: Homolog of GI Number: 10863903 NR Desc: thyroid hormone receptor interactor 12
  misc_feature: Homolog of GI Number: 40788945 NR Desc: KIAA0045
METRSRKRAEASSAAPSSPSSGPTTRSSKRARLSSSSSASAAVNTRSRASNTKEPLPPKNPPPPLPPMDSANESSGSRRDRRNNKENSSDKGKEKEHDVRIRDRDAALNMDGSGGDEDDDNDNDSEGGVGILHQNLTSASSALQGLLRKLGAGLDDLLPSSAMGSASSSHQSGRLKKILFGLRADGEEGRQVEALTQLCEMLSIGTEESLSTFSVDSFVPVLVGLLNHESNPDIMLLAARALTHLCDVLPSSCAAVVHYGAVSIFCARLLTIEYMDLAEQVVL

SEQ ID NO: 5219 - DNA, 1722 bp, Glycine max
  misc_feature: Ceres CLONE ID no. 1045323
  misc_feature: Ceres CDNA ID no. 29191214
  CDS (164)..(1396): REFERENCED BY SEQ ID NO: 5220
aaaaaagttcctcttttgaaccttcgtgcttccttccacgatccttctcctctcatcaaaccccaaatgatagaaagctgaaaaaagggtttctgaaatatcagctaatgttactgagtgcgtaatcattgagatctgccttcatcttggggtgattttgttgatgggtgcttgctggagtaataggattaaggctgtgagtccttccaatacagggatcacttctagaagtgtcagcaggagtggccatgacatcagctcaaatagcaggagctcatcagcctccatacccgtcacttctcggagtgagggtgagatcttgcaatcttccaacttgaaaagcttcagctatcatgagctaagagcagccacaagaaatttccgccccgatagtgtcttgggagagggcgggtttggttcagtttttaagggctggattgatgagcattcacttgctgctaccaaaccaggaataggcaagattgttgctgttaagaagcttaaccaagatgggctccagggtcacagagagtggttggctgaaataaactatcttggccaactacagcatcctaaccttgtcaagttaataggatactgctttgaggatgaacatcggcttctggtttatgaatttatgcctaagggtagcatggaaaatcatctattcagaagaggttcttactttcagccattctcttggagtttgcgaatgaaaatagcactaggggctgcaaagggtcttgcttttcttcatagtacagaacataaagtcatataccgtgactttaaaacgtcaaatatcctactcgatacaaactataatgccaaactttctgattttgggttggccagagatggtcctactggtgataaaagccatgtctctactagggtcatgggaacccgtggatatgcggcaccagagtatttagcgacaggtcatctcactaccaagagtgatgtgtatagttttggagtagttcttctggaaatgatatcaggaagacgagctattgacaagaaccagccaactggagagcataaccttgttgaatgggccaagccttatctatctaataaacgaagagtcttccgtgtaatggatccccgtctcgaaggtcaatattcacagaatcgagctcaagcagcagctgcgcttgctatgcaatgtttttccgtagagcctaagtgcaggccgaatatggatgaggtggtaaaagcattggaggagcttcaggaatcaaagaacatgcagagaaaaggcgctgatcataaacagcatcatgtacgcaattccggccccggccgtaccaatggtggcgatggtggttcagatgcccctagaaaggcttctgcttatcctagaccttctgcttctctcctccgcggttgagagaattttgtgatgcggcaagtagtaaagcatataacaaaattcggaggtttaggtgtggctggcatgaaccatgtttatgtaagcaatgtatagtttgctttatttccatgttacattttgtgctatatataatttttttttctcgttgtggttctgattgttagacattcaagggtctaatgtgggtccttaaggtgttcattaattttgaaccctgtaaacaactgcaacactacccatgtggttgattctctacatttttatcttttgctttataatatgtaaaaaagtcttctccatgttgactaaaaaaaaaaaaaaaa

SEQ ID NO: 5220 - protein, 410 aa, Glycine max
  misc_feature: Ceres CLONE ID no. 1045323
  misc_feature: Ceres CDNA ID no. 29191214
  misc_feature (335)..(355): Pfam Name: Pkinase_Tyr PFAM Desc: Protein tyrosine kinase
  misc_feature: Homolog of GI Number: 8778537 NR Desc: F22G5.5
  misc_feature: Homolog of GI Number: 166809 NR Desc: protein kinase
  misc_feature: Homolog of GI Number: 42569425 NR Desc: protein kinase
  misc_feature: Homolog of GI Number: 34906046 NR Desc: putative serine/threonine
  misc_feature: Homolog of GI Number: 21555255 NR Desc: serine/threonine
  misc_feature: Homolog of GI Number: 28804505 NR Desc: serine/threonine protein kinase
  misc_feature: Homolog of GI Number: 53689728 NR Desc: serine/threonine protein kinase
  misc_feature: Homolog of GI Number: 27311943 NR Desc: serine/threonine specific protein kinase
  misc_feature: Homolog of GI Number: 50927967 NR Desc: OSJNBa0017B10.2
  misc_feature: Homolog of GI Number: 34898434 NR Desc: ESTs C98382
  misc_feature: Useful for decreasing plant size
  misc_feature: Utility: PEG Useful for making plants with increased tolerance to drought
MGACWSNRIKAVSPSNTGITSRSVSRSGHDISSNSRSSSASIPVTSRSEGEILQSSNLKSFSYHELRAATRNFRPDSVLGEGGFGSVFKGWIDEHSLAATKPGIGKIVAVKKLNQDGLQGHREWLAEINYLGQLQHPNLVKLIGYCFEDEHRLLVYEFMPKGSMENHLFRRGSYFQPFSWSLRMKIALGAAKGLAFLHSTEHKVIYRDFKTSNILLDTNYNAKLSDFGLARDGPTGDKSHVSTRVMGTRGYAAPEYLATGHLTTKSDVYSFGVVLLEMISGRRAIDKNQPTGEHNLVEWAKPYLSNKRRVFRVMDPRLEGQYSQNRAQAAAALAMQCFSVEPKCRPNMDEVVKALEELQESKNMQRKGADHKQHHVRNSGPGRTNGGDGGSDAPRKASAYPRPSASLLRG

SEQ ID NO: 5221 - DNA, 622 bp, Glycine max
  misc_feature: Ceres CLONE ID no. 1045356
  misc_feature: Ceres CDNA ID no. 29191666
  CDS (57)..(458): REFERENCED BY SEQ ID NO: 5222
acatatcttcgtacgcttcctcctcaaattcgcttttaattgttttcactgagtcaatggcgggtcgtggtaaaactctcggatctggtgttgccaagaaggcgacgtcgagaagcagcaaggccggtctccagttccccgtcggtcgtatcgcccggttcctgaaaaacggcaagtacgccgaacgcgtcggcgccggagctccggtttacctcgccgccgttctcgagtacctcgccgcggaggttctcgaattggctggaaacgcggcgagggacaacaagaagacgagaatcgtgccacgtcatatccagttggcggtgaggaacgacgaggagctgagcaagttgcttggggatgtgacgattgctaacggaggtgtgatgcccaacattcacaaccttcttctccctaagaaggctggtggtgcttccaagccttccggtgacgacgagtagattcggtttttgtgtttgtggcttatgaatgtgtagcgtaggtttagattaggtcttttatgttccctttagactacggtgcggtgtccttttgtgttaaaatgaaatcatgtgaacttaatatatgaaatggtgtgaggaattaaagaaaaaaaaaaaaaaaa

SEQ ID NO: 5222 - protein, 133 aa, Glycine max
  misc_feature: Ceres CLONE ID no. 1045356
  misc_feature: Ceres CDNA ID no. 29191666
  misc_feature (25)..(89): Pfam Name: CBFD_NFYB_HMF PFAM Desc: Histone
  misc_feature: Homolog of GI Number: 19310641 NR Desc: putative histone H2A protein
  misc_feature: Homolog of GI Number: 17065594 NR Desc: putative histone H2A protein
  misc_feature: Homolog of GI Number: 21593834 NR Desc: histone H2A
  misc_feature: Homolog of GI Number: 29824201 NR Desc: putative histone H2A
  misc_feature: Homolog of GI Number: 21617982 NR Desc: histone H2A
  misc_feature: Homolog of GI Number: 50938211 NR Desc: putative histone H2A
  misc_feature: Homolog of GI Number: 50945929 NR Desc: putative histone H2A
  misc_feature: Homolog of GI Number: 536896 NR Desc: protein H2A
  misc_feature: Homolog of GI Number: 77555213 NR Desc: Core histone H2A/H2B/H3/H4
  misc_feature: Homolog of GI Number: 50938209 NR Desc: histone H2A
MAGRGKTLGSGVAKKATSRSSKAGLQFPVGRIARFLKNGKYAERVGAGAPVYLAAVLEYLAAEVLELAGNAARDNKKTRIVPRHIQLAVRNDEELSKLLGDVTIANGGVMPNIHNLLLPKKAGGASKPSGDDE

SEQ ID NO: 5223 - DNA, 1571 bp, Glycine max
  misc_feature: Ceres CLONE ID no. 1045372
  misc_feature: Ceres CDNA ID no. 40041388
  CDS (63)..(1454): REFERENCED BY SEQ ID NO: 5224
agaagaaggaaacacagacagaactgagagtgagtgagagcagaagaaggaacgtagcaacaatgggtccagcggcaaagacgacgacgatgcgttcgatctctcaagaagcgttcgaagaactggtgaatgagaacatcgacgacctcggcatggaccccaccgaggccctccaagacgcaatccaaaccctcactctccaaggcgtcgatctctcaggcatcgtcacgtgcgtccccggagaaaccaaccccgtcatcgagtgcttggaccgcttaagacaccttgaaaccgaaccggaccaaaacctaatcgcgcaagcgtttaacaccctccacgagttgtgcgcaaatccaaattctgattcaaattcaaatgtggctattgcaaccaaaaacggcgccgttgagctagcttgttcgctctgttccaaaatttctcttgccgccggatctcacgttgttccccttgtctccgcattaaacgcgttgtcgtcgttgcttcacgatgttcagagcacgggggcttttcatcgctgcgacgggccgaggattgtgatggcttttctggttgataataagggaaatgtggagcttttgagcagtggatttcgagttgtggcttcggcggccaccggagatgagattgtgaaggaggcatttatggagttgaaggttgacgagctgattttggagatcatgtcgttgcataggcacaaggggatccagagtttgtatgacgctgtttgcgcgcttttgatgcccgatgacgatcgagttgtggcttctcaggtgtatggttatgcacggaaatttgcaaagattggaattgcagaagcccttgtggattctctgagtgcaggggttagctcacatgacctgatttcagcatgcatcactttgagggccgttgctgtaaatgatgaaatatgtaaatccattgctgagaaaggtggtattgatgcattactcagatgtatagatgacagtggtgaacaaggcgacaaagctgtggccaaagtttgttgctcattactttcaaagttagcaggaagtgacgcaaacaagagtgcaattgttgggaaaggaggtatggataagctaatcaaactttcagccagatttgctgatgacccttctgttttgcaagagattatgtctattatttcggtgctttctttaagatccccagacaatgcagcccgtgccattgaagctggtgctggtgaccttgctattcaagccatggagaaatttcctgcggcacaccaaatgcagagaaactcctgtcttatgatcagaaatcttgtagtgagaaatccagagaacagaactattctgcttaataatggaattgagaaatacataaggaaagcaaagcaaacacataccaactgtaaggatgctgctacagatgcgttgagggatctggggcttgataattacaacttgtagttgataatttgtttacctctgtattgtcttacaatgtaataatacccatcaatatttttttgttactgaagaaaaaaagtgagtgtatgactacatattttaaaaaaaaaaaaaaaa

SEQ ID NO: 5224 - protein, 463 aa, Glycine max
  misc_feature: Ceres CLONE ID no. 1045372
  misc_feature: Ceres CDNA ID no. 40041388
  misc_feature (286)..(330): Pfam Name: Arm PFAM Desc: Armadillo/beta
  misc_feature: Homolog of GI Number: 50913021 NR Desc: armadillo/beta
  misc_feature: Homolog of GI Number: 57101718 NR Desc:  similar to armadillo repeat containing 6
  misc_feature: Homolog of GI Number: 51764170 NR Desc: 2410153K17 protein
  misc_feature: Homolog of GI Number: 50761098 NR Desc:  similar to hypothetical gene MGC19595
  misc_feature: Homolog of GI Number: 4106984 NR Desc: R30923_1
  misc_feature: Homolog of GI Number: 62662444 NR Desc:  similar to armadillo repeat containing 6
  misc_feature: Homolog of GI Number: 55648679 NR Desc:  similar to R30923_1
MGPAAKTTTMRSISQEAFEELVNENIDDLGMDPTEALQDAIQTLTLQGVDLSGIVTCVPGETNPVIECLDRLRHLETEPDQNLIAQAFNTLHELCANPNSDSNSNVAIATKNGAVELACSLCSKISLAAGSHVVPLVSALNALSSLLHDVQSTGAFHRCDGPRIVMAFLVDNKGNVELLSSGFRVVASAATGDEIVKEAFMELKVDELILEIMSLHRHKGIQSLYDAVCALLMPDDDRVVASQVYGYARKFAKIGIAEALVDSLSAGVSSHDLISACITLRAVAVNDEICKSIAEKGGIDALLRCIDDSGEQGDKAVAKVCCSLLSKLAGSDANKSAIVGKGGMDKLIKLSARFADDPSVLQEIMSIISVLSLRSPDNAARAIEAGAGDLAIQAMEKFPAAHQMQRNSCLMIRNLVVRNPENRTILLNNGIEKYIRKAKQTHTNCKDAATDALRDLGLDNYNL

SEQ ID NO: 5225 - DNA, 1705 bp, Glycine max
  misc_feature: Ceres CLONE ID no. 1045405
  misc_feature: Ceres CDNA ID no. 35383329
  CDS (161)..(1381): REFERENCED BY SEQ ID NO: 5226
aaaatttatccataaaaagataccagggttattatcgtgacatttgaactggggatgacacggtgctaccttttctagggctagcagcactgtaacctcaactcacctctcccaaatccgttccctctttcaaacctttttttttttcaccaaatcggcgatggcaacgacgtcggtggtgccggcgaaccggcgtcgcgcggcgaaccccgcggaggagatggacttcgagacgacggagggcgtgaaggccatcgcaagcttcgaggagatggggatcaaggacgatctgctccgcggaatctaccagtacggcttcgagaagccctccgccattcagcagcgggccgtcacgcccatcattcagggccgtgacgtcatcgctcaggcccaatccggaacggggaaaacgtccatgattgctctcaccgtttgccaggtcgtcgatacctccgtcagagaggttcaggcattgatattgtcaccaacgagggaactggcctcacagactgagaaagttatattggctattggggatttcattaatatacaagctcatgcatgcgttggtggtaaaagtgtgggagaagatataaggaaacttgagtatggagttcatgtggtgtctggaactcctggccgagtttgtgacatgatcaaaaggagaacattgcgcacgagagctatcaagatgctagttcttgatgaatctgatgaaatgttgagcagagggtttaaagatcaaatttatgatgtgtatagatatctcccacccgaccttcaggtttgcttgatttctgctacccttcctcatgaaatactggagatgacaaacaaattcatgacagatccagtaaggatccttgtaaaacgtgatgaattgacattggagggcatcaaacaattttttgttgccgttgaaagggaggaatggaagtttgataccctgtgtgatctttatgataccctcactatcactcaagctgttatattctgtaacactaagcgaaaggtggactggttaactgaaaaaatgcgtaacaataatttcactgtctcatcaatgcatggtgacatgcctcagaaagaaagagatgctattatgggagaatttcgtgctggaacaacccgtgtactaataacaactgatgtttgggcccgtggtcttgatgtacagcaggtttctctagttatcaattatgaccttccaaataatcgtgagctttacattcatcgaattggccgttctggacgttttggaagaaagggtgttgcgataaattttgtgaagagcgatgacatcaagatcttgagagacattgaacaatactacagtactcagattgatgaaatgccaatgaatgttgctgatcttatataatttgtcacgtggtgtgctggatggagtggatttgtcatatcttgtggtagggagtagtgtttgaatgtggtttcttgctatggaatgcattcgtgatgctcttgtacacttttgacttttggtcaaattagaatttttaccttagtgttgactgtaccagaggtagtgtttttctttgctgatgaggttgagaattgagattaatgtgtaaattgtgttgagttgttttatctattgtatcactcttgatattgaatttgtaattttatgcttcaaatggcaggtgatatcttgacttggtttttgataaaaaaaaaaaaaaaa

SEQ ID NO: 5226 - protein, 406 aa, Glycine max
  misc_feature: Ceres CLONE ID no. 1045405
  misc_feature: Ceres CDNA ID no. 35383329
  misc_feature (291)..(367): Pfam Name: Helicase_C PFAM Desc: Helicase conserved C
  misc_feature (56)..(223): Pfam Name: DEAD PFAM Desc: DEAD/DEAH box helicase
  misc_feature: Homolog of GI Number: 15215678 NR Desc: AT3g19760/MMB12_21
  misc_feature: Homolog of GI Number: 24645031 NR Desc: CG7483
  misc_feature: Homolog of GI Number: 66845729 NR Desc: DEAD/DEAH box helicase
  misc_feature: Homolog of GI Number: 9294443 NR Desc: RNA helicase
  misc_feature: Homolog of GI Number: 15230945 NR Desc: eukaryotic translation initiation factor 4A
  misc_feature: Homolog of GI Number: 2443810 NR Desc: eukaryotic translation initiation factor XeIF
  misc_feature: Homolog of GI Number: 19699 NR Desc: nicotiana eukaryotic translation initiation factor 4A
  misc_feature: Homolog of GI Number: 55297606 NR Desc: putative nicotiana eukaryotic translation initiation factor 4A
  misc_feature: Homolog of GI Number: 34896594 NR Desc: putative translation initiation factor
  misc_feature: Homolog of GI Number: 41055130 NR Desc: similar to DEAD
MATTSVVPANRRRAANPAEEMDFETTEGVKAIASFEEMGIKDDLLRGIYQYGFEKPSAIQQRAVTPIIQGRDVIAQAQSGTGKTSMIALTVCQVVDTSVREVQALILSPTRELASQTEKVILAIGDFINIQAHACVGGKSVGEDIRKLEYGVHVVSGTPGRVCDMIKRRTLRTRAIKMLVLDESDEMLSRGFKDQIYDVYRYLPPDLQVCLISATLPHEILEMTNKFMTDPVRILVKRDELTLEGIKQFFVAVEREEWKFDTLCDLYDTLTITQAVIFCNTKRKVDWLTEKMRNNNFTVSSMHGDMPQKERDAIMGEFRAGTTRVLITTDVWARGLDVQQVSLVINYDLPNNRELYIHRIGRSGRFGRKGVAINFVKSDDIKILRDIEQYYSTQIDEMPMNVADLI

SEQ ID NO: 5227 - DNA, 1307 bp, Glycine max
  misc_feature: Ceres CLONE ID no. 1045553
  misc_feature: Ceres CDNA ID no. 40351566
  CDS (59)..(970): REFERENCED BY SEQ ID NO: 5228
agagtgaagagttgttgtgagaaggatgaagaatgaaattgaaaagtgaagtttagagatggaagaagaaaaagcagcggcgtactacgacgagctggcccgtaagggcgagggagctgcgaggttcaagcaaggtctaggcttttcctcttcagcaccaaacgacgacgttccaaaaccctcctcctccttcctctccaaattcgtcaaagcctcctccgagtcggagaagcaagcgcagctccaatccatccacgacaagctcaagaaaaatccctcttccgagtctagggtttcgagcagcgacagaagcaggagcagagaaaaacgtaggaaaaggagcagaagcggagatagatacagggaaacgcggaggcgaagcaggagtagagagagacatagggatagtgaaagagggagacggaggagtagaagcgtttctcctcgcaagcaacgcaggtcggagaaagacgcgaattatagagggaaagtcagtgaaacgaagaaagggaagaatgctgagattgattattccaagcttattcaaggttatgaccgcatgtcatctgctgaaagagtcaaagccaagatgaagcttcagctttctgaaactgttgcacaggattcagaaaagggtgtgggctgggagcgatttgagtttaacaaggatgcccctcttgatgatgaagaagttgaagttgctgaagatgacgcatccttagtcaagcacattggccaaagtttcagattttctgcagttgaggcaagaagggaggagcaaatacaagctgctcacgaggaagctatgtttggtgctacagcacttctgcctcccaccagtacagacagtgagcctgaaagggagaatgagaaggaggctgataaaaaagaactggttgcaagccttttaagtgaaacagtgctggccaagcaaaaggggtcttggcgtgatcgggttcgtcaagcttagaatttgcacccttaaagttgatgctgatgatagaaaagttggctgaatgctgcatggagttgagctttaaccatgtctaaagcattcaattttgcattgctcggtctctatatggtgtgagatgggctttaaccatgtatactacttgtatcaggttcctatgcaattgccattattgtcaagcctacaatatcactagtgaggtaggctgtgtgttactgtttatcgtcttcagagaggaaagcaggatgatgtgtgaaacgccatttgtcttttgtgtaatgtcagtttcataattaaatatttaaagggaaagcttgcaaaaaaaaaaaaaaaa

SEQ ID NO: 5228 - protein, 303 aa, Glycine max
  misc_feature: Ceres CLONE ID no. 1045553
  misc_feature: Ceres CDNA ID no. 40351566
MEEEKAAAYYDELARKGEGAARFKQGLGFSSSAPNDDVPKPSSSFLSKFVKASSESEKQAQLQSIHDKLKKNPSSESRVSSSDRSRSREKRRKRSRSGDRYRETRRRSRSRERHRDSERGRRRSRSVSPRKQRRSEKDANYRGKVSETKKGKNAEIDYSKLIQGYDRMSSAERVKAKMKLQLSETVAQDSEKGVGWERFEFNKDAPLDDEEVEVAEDDASLVKHIGQSFRFSAVEARREEQIQAAHEEAMFGATALLPPTSTDSEPERENEKEADKKELVASLLSETVLAKQKGSWRDRVRQA

SEQ ID NO: 5229 - DNA, 1156 bp, Glycine max
  misc_feature: Ceres CLONE ID no. 1045565
  misc_feature: Ceres CDNA ID no. 36582166
  CDS (52)..(924): REFERENCED BY SEQ ID NO: 5230
aaaacccaaaacctcttcttcttactctcttacgttaattcttcgttgtctatgatggcattggatatgattgatgttgttcccaggacgaggatggaagaagaaaatatagcaatacaagaagcagcttccgctgggttaaagagcatggagcatctcattcgtctcctttctccttcttcttctcttcacaacaaccttaataatctcaatctcaaccacctcgactgctccgaaatcaccggcttcactgtctccaagttcaaacaagtcatcaaccttctcaaccgcaccggccacgcccgcttccgccgctctccaccccaagcccaagcccaagcccaaactaatcctcaaccacaacctcagatccaacaacaagggttcagtttagatttcgtgaagcccaccattctaaactcaaagcccatcaacaaagacgaaactttgactctttcaacaacctcttcttccttcatgtcctccgtcaccaacgacgccagcgtctccaacggcaagatcggacctttcctccctccctccgccgccaaaccccctctctcctccgcccaccggaaaaagtgccgcgacgccgccgcagcactctccgccaaaccctcctgccactgctccaagaaaaggaaatcacgcgtgaaacgaacgattcgggtgccggcgataagctcaaagatcgcagatatcccaccggacgagtattcgtggagaaaatacggtcaaaaaccgatcaagggctcaccttaccctcgagggtactacaagtgcagcaccgtgagagggtgtccggcgaggaagcacgtggagcgagcgcaggatgaccccaagatgctaatagtgacttacgagggtgagcaccgtcacgtgctgccgttaacttccgctgccggcgttagtttcggccattgagttaatcgacggcgtcttttggaaacttggcgggggacgttaaatgagcgtcggatcgtgaagtaacggcggatgcgaacaaggatcgattcggttcgaggacggaaaaagaaaagtggcaactaaagtcaactttcgcgttgtggaatgattttgttgacgaggacttttgtgtaaatttgaccccaagtaaagtagtgcaggtctcaaagaatgaaaaaaaaaaaaaaaa

SEQ ID NO: 5230 - protein, 285 aa, Glycine max
  misc_feature: Ceres CLONE ID no. 1045565
  misc_feature: Ceres CDNA ID no. 36582166
  misc_feature (213)..(273): Pfam Name: WRKY PFAM Desc: WRKY DNA
  misc_feature: Homolog of GI Number: 4760596 NR Desc: DNA
  misc_feature: Homolog of GI Number: 45479880 NR Desc: WRKY transcription factor 11
  misc_feature: Homolog of GI Number: 45479882 NR Desc: WRKY transcription factor 11
  misc_feature: Homolog of GI Number: 30102628 NR Desc: At2g24570
  misc_feature: Homolog of GI Number: 25348152 NR Desc: probable WRKY
  misc_feature: Homolog of GI Number: 50928537 NR Desc: OSJNBb0015N08.8
  misc_feature: Homolog of GI Number: 4894963 NR Desc: DNA
  misc_feature: Homolog of GI Number: 10798760 NR Desc: WRKY transcription factor NtEIG
  misc_feature: Homolog of GI Number: 83630935 NR Desc: WRKY65
  misc_feature: Homolog of GI Number: 83630939 NR Desc: WRKY82
MIDVVPRTRMEEENIAIQEAASAGLKSMEHLIRLLSPSSSLHNNLNNLNLNHLDCSEITGFTVSKFKQVINLLNRTGHARFRRSPPQAQAQAQTNPQPQPQIQQQGFSLDFVKPTILNSKPINKDETLTLSTTSSSFMSSVTNDASVSNGKIGPFLPPSAAKPPLSSAHRKKCRDAAAALSAKPSCHCSKKRKSRVKRTIRVPAISSKIADIPPDEYSWRKYGQKPIKGSPYPRGYYKCSTVRGCPARKHVERAQDDPKMLIVTYEGEHRHVLPLTSAAGVSFGH

SEQ ID NO: 5231 - DNA, 1232 bp, Glycine max
  misc_feature: Ceres CLONE ID no. 1045587
  misc_feature: Ceres CDNA ID no. 25892485
  CDS (33)..(749): REFERENCED BY SEQ ID NO: 5232
aatagattgatgttttgttggatctgcctgtaatggcctctagaggaactggaacgctgattttggtttgtctcttatggcttttcttcctatgcgccaccatagctttcttgcagctcaacttcgtagacaaaggaaccaccaacaacaacccttcctctcgcagtagtaacttcatcgcaactcaacagcatagcgctgatacccctttggaacaggatttggagggtgtcacccacaaggtgtattttgatattcagatccatggcaaattagcgggtcgcatagtcatgggcctttatgggaacacagtaccgaaaactgcagaaaactttcgagcgctttgtacaggagagaaaggagtgggaagaagtgggaagtctcttcattataaagggagcacattccataggattataccgagctttatggtccaagggggtgatttcacccgtggtgatggaagaggtggagaatcaatctatggtgataagtttgctgatgaaaactttaagctgaagcataccggaccgggatacttatccatggcaaattctggggaagacaccaatggctcccagttcttcattacaacagttaaaaccagctggctggatggacgccatgtcgtatttggcaaggtactttccggtatggatgttttgtacaagattgaagcagaaggaagtgaaagcggctcgccaaagaacaaggttgtcatattagacagtggagaattaacttcatgacatggtttatacaagttgagattgattccacagccatgattcacaaattcggtgtgcatacttcatcatttagtgaatgaataagtttgcagatgttcgtgtaatttaaggctatattgatgctattttgcttgtctacactagtcttgctcctagggaaggagttttattagggattgccagagtgggtactcattaacaatatacatcaggctgaagtgcgttttctgaactatttttttttttttttaaatgtagtaggtacgaggataaattatttattcaagtgcatcatataccatgtcttttgctacattttccacttccaccactgcaatttaaatccgaagtacaaatggcccattataaaataaaataatataaacaaaacgttctttttctttctcctgtgaaaaaggcagatgccatcattatccagatttatcacaaatacgacattgcactccaaaaaaaaaaaaaaaa

SEQ ID NO: 5232 - protein, 238 aa, Glycine max
  misc_feature: Ceres CLONE ID no. 1045587
  misc_feature: Ceres CDNA ID no. 25892485
  misc_feature (70)..(236): Pfam Name: Pro_isomerase PFAM Desc: Cyclophilin type peptidyl
  misc_feature: Homolog of GI Number: 53792607 NR Desc: putative cyclophilin
  misc_feature: Homolog of GI Number: 53792606 NR Desc: putative cyclophilin
  misc_feature: Homolog of GI Number: 21554366 NR Desc: cyclophilin ROC7
  misc_feature: Homolog of GI Number: 23197720 NR Desc: cyclophilin
  misc_feature: Homolog of GI Number: 2443755 NR Desc: cyclophilin
  misc_feature: Homolog of GI Number: 21554007 NR Desc: cyclophilin
  misc_feature: Homolog of GI Number: 21618029 NR Desc: cyclophilin
  misc_feature: Homolog of GI Number: 32401384 NR Desc: cyclophilin
  misc_feature: Homolog of GI Number: 56694218 NR Desc: putative cyclophilin
  misc_feature: Homolog of GI Number: 82621146 NR Desc: cyclophilin ROC7
MASRGTGTLILVCLLWLFFLCATIAFLQLNFVDKGTTNNNPSSRSSNFIATQQHSADTPLEQDLEGVTHKVYFDIQIHGKLAGRIVMGLYGNTVPKTAENFRALCTGEKGVGRSGKSLHYKGSTFHRIIPSFMVQGGDFTRGDGRGGESIYGDKFADENFKLKHTGPGYLSMANSGEDTNGSQFFITTVKTSWLDGRHVVFGKVLSGMDVLYKIEAEGSESGSPKNKVVILDSGELTS

SEQ ID NO: 5233 - DNA, 1184 bp, Glycine max
  misc_feature: Ceres CLONE ID no. 1045593
  misc_feature: Ceres CDNA ID no. 40351567
  CDS (55)..(1089): REFERENCED BY SEQ ID NO: 5234
aacttgtcggggtttggatttttttcattccgcataggttccgttttccaaacaatgagtttgagtatgagcttgtgcggtaattacagtcttcagcttcaaaatcgcagaatcgtaagctgcaatcttcaccaggatggcaggcatattgttcccatcaatacgcaccaaaaaccttccaaacctgaaaagtgtcttcggtccaaatggaagattaatggcaataacattgggacatgcattggagtcatgacagtggcacacttggttgctccagtcgctgcaaaagctgaagtggctgcttctatttatgctttggctgatggaagcctcggtgactggtttggaggctttctattttcagctggacagcaggccaatgaagctgttcagggccaattaacctctctcagtttcactagtttggctgtaatttatggggctgggcttgttaccagcctttctccctgtacacttagtgtcttaccactgacccttggttacattggggcatttggctctggcaaaagcagagcacaggttgtaggagattccattgcattctccttaggccttgcaaccacgttagcactgttgggtgtaggagcttcatttgcaggaaaggcttatggacagattggccaaggattacctttggcagcttctggtttggctataattatgggtctgaatcttcttgagatcattgaattacggctcccctcattctttgacagttttgatccacgtgcagcagctgccaatttcccatccagtgtgcaagcatacctcgccgggcttacatttgccttagctgcctcaccttgtagtacacctgtcttggccacccttctgggatatgttgctgcatccaaggacccggtgattggaggcagcttacttttaacatacacaactggctatgtttctcctttactcttggctgcttcttttgctggagcactacagagcttgctctcattccgcaagttctcggcatggatcaatcctataagcggagcaatgctgttaggtggtggtgtatatacgttcttagataggctgttcccagtcacaatggtgatgtagaaaatctcttggctcttaacatgctgtgatattttacattaacagttcaatgtatatatgtcatacaagtattcaattcaaaaaaaaaaaaaaaa

SEQ ID NO: 5234 - protein, 344 aa, Glycine max
  misc_feature: Ceres CLONE ID no. 1045593
  misc_feature: Ceres CDNA ID no. 40351567
  misc_feature (127)..(334): Pfam Name: DsbD PFAM Desc: Cytochrome C biogenesis protein transmembrane region
MSLSMSLCGNYSLQLQNRRIVSCNLHQDGRHIVPINTHQKPSKPEKCLRSKWKINGNNIGTCIGVMTVAHLVAPVAAKAEVAASIYALADGSLGDWFGGFLFSAGQQANEAVQGQLTSLSFTSLAVIYGAGLVTSLSPCTLSVLPLTLGYIGAFGSGKSRAQVVGDSIAFSLGLATTLALLGVGASFAGKAYGQIGQGLPLAASGLAIIMGLNLLEIIELRLPSFFDSFDPRAAAANFPSSVQAYLAGLTFALAASPCSTPVLATLLGYVAASKDPVIGGSLLLTYTTGYVSPLLLAASFAGALQSLLSFRKFSAWINPISGAMLLGGGVYTFLDRLFPVTMVM

SEQ ID NO: 5235 - DNA, 1026 bp, Glycine max
  misc_feature: Ceres CLONE ID no. 1045746
  misc_feature: Ceres CDNA ID no. 29191831
  CDS (85)..(699): REFERENCED BY SEQ ID NO: 5236
aacgagaaataccgtgacactgcaacagagtgagagaaattgcaggcggcggcacagaggggaagtagtagtaaataaggatcaatggcggttcctgggaggcgcaacggcatcaacgacgacgaagaggagttagacgacaatgcccttttcgaagaacaaggtgtcgtcgaagacgacaccgatacccctcctcacctccgcgacctctccgccgccgctcaaatcggcgacgcccacgccctccgtctcgctcttgataacttgactggtagtattgatgagccagtggaggatggggatacggctcttcatttgacatgtttatatggccatttggcttgtgtccagctgctaatagaaagaggagcaaacattgaggctaaggatgaagagggtgctattcctttgcacgatgcttgtgcaggaggatttactgagatagtccagctgctgcttaacagagcaaatgatgcagaacatataaagagaatgctagaatcagttgattctgagggtgatactcctctccatcacgctgcaagaggtgagcatattgatgtaattaggttgctgctgtctaatggcgcatctcccacaaaggcaaacttatacgggaaggcccctgcggatttgcctgaacaggaagatgctcggaggctgcttgaagctgcagctcttgccatggcatgccagtagcatttcagtagaaatatttagttccattttgacagagatgctacactttttggaccataaaatctgtatttcatacactactcttttttcgaagttcaaaaatcaaaatgatttattagaggagcaccataggaagttttaactctggagacagataaaaatgaggattcccggattacttatagtggggcaagcttgtttgttttcgttactttgcttaagtgaaatatatttactcttcaacatgtcagtgaactatgactggatagttatacttgtcgtttaattatcatataagtttaattttgcttaaaaaaaaaaaaaaaa

SEQ ID NO: 5236 - protein, 204 aa, Glycine max
  misc_feature: Ceres CLONE ID no. 1045746
  misc_feature: Ceres CDNA ID no. 29191831
  misc_feature (104)..(127): Pfam Name: Ank PFAM Desc: Ankyrin repeat
  misc_feature: Homolog of GI Number: 51767073 NR Desc: RIKEN cDNA 2900001A12
  misc_feature: Homolog of GI Number: 28373837 NR Desc: Chain A
  misc_feature: Homolog of GI Number: 61831066 NR Desc:  similar to GAC
  misc_feature: Homolog of GI Number: 28274848 NR Desc: ankyrin repeat protein E3_5
  misc_feature: Homolog of GI Number: 55630198 NR Desc:  similar to Tankyrase 1
  misc_feature: Homolog of GI Number: 28274854 NR Desc: ankyrin repeat protein E4_8
  misc_feature: Homolog of GI Number: 4557349 NR Desc: BRCA1 associated RING domain 1
  misc_feature: Homolog of GI Number: 15991722 NR Desc: BRCA1
  misc_feature: Homolog of GI Number: 12018308 NR Desc: BRCA1 associated RING domain 1
MAVPGRRNGINDDEEELDDNALFEEQGVVEDDTDTPPHLRDLSAAAQIGDAHALRLALDNLTGSIDEPVEDGDTALHLTCLYGHLACVQLLIERGANIEAKDEEGAIPLHDACAGGFTEIVQLLLNRANDAEHIKRMLESVDSEGDTPLHHAARGEHIDVIRLLLSNGASPTKANLYGKAPADLPEQEDARRLLEAAALAMACQ

SEQ ID NO: 5237 - DNA, 1283 bp, Glycine max
  misc_feature: Ceres CLONE ID no. 1046167
  misc_feature: Ceres CDNA ID no. 25446488
  CDS (126)..(1106): REFERENCED BY SEQ ID NO: 5238
aaaaaaagaaagagctaacgcaacccaaacccaaagtatcaatctcctctacttccatttccagtggtcactcactcagccactgtgcttcttcttcttctctttctccctctctcctcttcccaatgccctctctccaccttctccccggcgccaccaccgcccccaactccacattcctcctccgcccccattcccctctcctcccctccaaaaccctaacccccaaaaaacccaaacccaaaccccccagtgccctcctccagtggaaccgcaagcccgagctctccggctccatcccgcgcgtcaccgtcattacctccggaaagggcggcgtgggcaagaccaccaccaccgccaacatcggcctctccctcgcccgcctgggcttctccgtggtcgccatcgacgccgacgtcggcctccgcaacctcgacctcctcctcggcctcgagaaccgcgtcaactacaccgtcatcgaggtcctcaacggcgactgccgcctcgaccaagccctcgtccgcgacaagcgctggtccaacttcgaactcctctgcatctccaaaccccgctccaagctccccctcggcttcggcggtaaagccctcacctggctcgtggacgcgctgaaagcgcgtccacagggctcccctgacttcatcctcatcgattgccccgccggcatcgacgccggcttcatcaccgccatcactcccgccaacgaggccgtcctcatcaccacccccgacatcaccagcctccgcgacgccgaccgcgtcaccggcctcctcgaatgcgacggaatccgggacatcaagatgatcgtcaaccgggttcgaaccgatatgataaaaggagaagacatgctgtcggtgttggacgtgcaagaaatgttagggttgcccttgcttggggctattcctgaggacactgaggttattagaagcaccaatagaggctaccctcttgtgctcaacaagcctcccactctggctggcttggcgttcgaacaagccgcttggaggctcgtggagcaggatagcatgcaggccgtggtggtggaagaacaacccaaacgagggtttttctccttttttggtgggtaggttttaaacaaggttatgcataatagtgtgtatagctagttagttggttgggttagtgcatgtttggatgagggttgacaatattgattttggttaaaattgattttgaagtcatcttatttatgtttttattatagcatcaattctgaacttctaacatgaaaaaaaaaaaaaaaa

SEQ ID NO: 5238 - protein, 326 aa, Glycine max
  misc_feature: Ceres CLONE ID no. 1046167
  misc_feature: Ceres CDNA ID no. 25446488
  misc_feature (62)..(273): Pfam Name: CbiA PFAM Desc: CobQ/CobB/MinD/ParA nucleotide binding domain
  misc_feature: Homolog of GI Number: 31711804 NR Desc: At5g24020
  misc_feature: Homolog of GI Number: 71089839 NR Desc: plastid division regulator MinD
  misc_feature: Homolog of GI Number: 71089843 NR Desc: plastid division regulator MinD
  misc_feature: Homolog of GI Number: 46917354 NR Desc: plastid division site determinant MinD
  misc_feature: Homolog of GI Number: 46917350 NR Desc: plastid division site determinant MinD
  misc_feature: Homolog of GI Number: 58430431 NR Desc: plastid division site determinant MinD
  misc_feature: Homolog of GI Number: 9971822 NR Desc: minD
  misc_feature: Homolog of GI Number: 34897748 NR Desc: putative minD
  misc_feature: Homolog of GI Number: 71089841 NR Desc: plastid division regulator MinD
  misc_feature: Homolog of GI Number: 7259572 NR Desc: septum
MPSLHLLPGATTAPNSTFLLRPHSPLLPSKTLTPKKPKPKPPSALLQWNRKPELSGSIPRVTVITSGKGGVGKTTTTANIGLSLARLGFSVVAIDADVGLRNLDLLLGLENRVNYTVIEVLNGDCRLDQALVRDKRWSNFELLCISKPRSKLPLGFGGKALTWLVDALKARPQGSPDFILIDCPAGIDAGFITAITPANEAVLITTPDITSLRDADRVTGLLECDGIRDIKMIVNRVRTDMIKGEDMLSVLDVQEMLGLPLLGAIPEDTEVIRSTNRGYPLVLNKPPTLAGLAFEQAAWRLVEQDSMQAVVVEEQPKRGFFSFFGG

SEQ ID NO: 5239 - DNA, 1236 bp, Glycine max
  misc_feature: Ceres CLONE ID no. 1046303
  misc_feature: Ceres CDNA ID no. 40351568
  CDS (160)..(984): REFERENCED BY SEQ ID NO: 5240
atgcaagttaaacaaacaactgcaagggaaataggggcctaactttatatatctgcgtgagtgagtgcgtcatttctttctttctctgcttccctaaccaactgaaccagcagcaacatttgcgcaaatcgaaattgattctctgccacttaacctaaaatggaaatctttccgattcccgccgaatcctacactctcggcttcatcggcgccggaaaaatggccgagtccattgcccgaggcgccgtccgctccggcgtcctgccgccttctcgcattcggaccgccgtccacttcaacctcgcccgccgtggcgccttcgagtccttcggcgtcaccgttctcccttcaaacgacgacgtcgttcgcgaaagcgacgtcgtcgttttgtcggtcaaacctcaattagtgaaagacgtggtgtcgaaattgacgccgcttttgacgaagaacaagcttttggtttcggtcgctgctggtaccaaattgaaagatcttcaggaatgggctgggaacgacagatttataagagtgatgcctaataccccagcagctgttggccaggcagcatctgtaatgagcttggggggatctgcaacggaagaagatggaaatattatagcccaattatttgggtcaattggcaaaatatggaaagctgaggaaaagtattttgatgcaataactggcctgagtggcagtggtcctgcttatgtttatttagcaatagaggctttggctgatggaggagtagcagctggtttaccacgtgatctttcattaagtctagcttctcaaactgtattaggggcagcatcaatggtctcccagactgggaagcacccgggacagctcaaagatgacgttacttctccaggtgggacaacaattacgggcattcatgagttagaaaatggtgggttccgtggaacactgatgaatgctgttgttgctgctgctaagcgcagccgagagctttcctgaatcaagagattaggattctactttttttttagaccaaaatctgatttcggtcgaattttcagtcactattatgagaacttggggctcttctttgagaggagtaaacaagaatgtttggccataacagtcttttcgagctagcatcatgaatgcatccgagtctatatgagaacttgaagtttccttgcaaaagaagagtactagcagtaaaaataaaataaaaccacttggccactaaaaaaaaaaaaaaaa

SEQ ID NO: 5240 - protein, 274 aa, Glycine max
  misc_feature: Ceres CLONE ID no. 1046303
  misc_feature: Ceres CDNA ID no. 40351568
  misc_feature: null
  misc_feature: Useful for making plants with modulated drought sensitivity
  misc_feature (12)..(258): Pfam Name: F420_oxidored PFAM Desc: NADP oxidoreductase coenzyme F420
MEIFPIPAESYTLGFIGAGKMAESIARGAVRSGVLPPSRIRTAVHFNLARRGAFESFGVTVLPSNDDVVRESDVVVLSVKPQLVKDVVSKLTPLLTKNKLLVSVAAGTKLKDLQEWAGNDRFIRVMPNTPAAVGQAASVMSLGGSATEEDGNIIAQLFGSIGKIWKAEEKYFDAITGLSGSGPAYVYLAIEALADGGVAAGLPRDLSLSLASQTVLGAASMVSQTGKHPGQLKDDVTSPGGTTITGIHELENGGFRGTLMNAVVAAAKRSRELS

SEQ ID NO: 5241 - DNA, 1498 bp, Glycine max
  misc_feature: Ceres CLONE ID no. 1046368
  misc_feature: Ceres CDNA ID no. 24766054
  CDS (72)..(1103): REFERENCED BY SEQ ID NO: 5242
atataaaaataaattaaaaatatcttttaaaaaaattgcagtggcagcacacacatctttgtgtttcaaaaatggaacctaatgacaaccaactcacctctttcttccaccaccaccaccaacagcaccaacaccaccagccgccgccaccaccgcagaccacggcgtctccgaccaacgggctcttgccgaacgcggatgggtcccacatactttacccccactctgtggcgtccgctgtttcgtcgcagcttgaaccggcgaagcggaagcgcgggcggccgaggaagtacggaacgccggagcaagctctggccgcgaagaaagccgctacgacgttgtctcattcgttctctgtggacaagaagccccactccccgacgttcccttcctccaagaaatcccattccttcgctctaggcaatgcagggcaagggttcactccgcatgtcatttctgttgctgctggtgaggatgttggccagaaaattatgttatttatgcaacaaagtaggcgtgagatgtgtattctgtctgcatctggttccatctctaatgcctctcttcgccagccagcaacctcaggaggcagcattgcatatgagggtcggtttgagattatttcacttactggttcttatgtccgtaatgaacttggaactcgaactggtggtctcagtgtatgcttatctaatactgatggacaaatcataggtggtggagttggtgggccgcttaaagcagctggtccagttcaggtcatcgttggaacattctttattgacaacaagaaggatactggtgctggtgttaaaggtgacatctctgccagcaagttgccatctccagttggtgaaccggtatcaagtttaggtttccgccaatcagttgactctcccagtggtaatccaatccggggaaatgatgagcatcaagctatggggggaagtcatttcatgattcaacagcttggtttgcatgggacgcctccccggtccacagactggggtcatccggattcaagaaatactggttttgagttgacaggtcatggggcgcaccagtctcctgagaatggaggctatgaacaaattcccgattgaagaaccaagatggcttttggatttgatagcagtgatgaatttgcggtagatgtatgatatctctacataccaccagtctttgtcacgtgatgctgtttatagtatgcaccattcattaaggatcgcggcttctgaaaattaatactcgtgcatctccttgaaaatattgttctgcctcgtttactgatgttgtatttataaatcactaaatcagggctgcttcatttttgcgggcctgttagtttataccgggataaatataatagatatatgcttcctagattagctaatctattgtggactatattttccttccattttcaaggtgcagtcttaatattgttcaaaattctatcaagcatatattattatggttcttaaaaaaaaaaaaaaaa

SEQ ID NO: 5242 - protein, 343 aa, Glycine max
  misc_feature: Ceres CLONE ID no. 1046368
  misc_feature: Ceres CDNA ID no. 24766054
  misc_feature: Homolog of GI Number: 30679188 NR Desc: DNA
  misc_feature: Homolog of GI Number: 4165183 NR Desc: SAP1 protein
  misc_feature: Homolog of GI Number: 30679183 NR Desc: DNA
  misc_feature: Homolog of GI Number: 79596510 NR Desc: DNA binding
  misc_feature: Homolog of GI Number: 14326504 NR Desc: At2g33620/F4P9.39
  misc_feature: Homolog of GI Number: 20196849 NR Desc: AT
  misc_feature: Homolog of GI Number: 2598227 NR Desc: AT
  misc_feature: Homolog of GI Number: 25408293 NR Desc: AT
  misc_feature: Homolog of GI Number: 37537056 NR Desc: putative AT
  misc_feature: Homolog of GI Number: 21387187 NR Desc: putative AT
MEPNDNQLTSFFHHHHQQHQHHQPPPPPQTTASPTNGLLPNADGSHILYPHSVASAVSSQLEPAKRKRGRPRKYGTPEQALAAKKAATTLSHSFSVDKKPHSPTFPSSKKSHSFALGNAGQGFTPHVISVAAGEDVGQKIMLFMQQSRREMCILSASGSISNASLRQPATSGGSIAYEGRFEIISLTGSYVRNELGTRTGGLSVCLSNTDGQIIGGGVGGPLKAAGPVQVIVGTFFIDNKKDTGAGVKGDISASKLPSPVGEPVSSLGFRQSVDSPSGNPIRGNDEHQAMGGSHFMIQQLGLHGTPPRSTDWGHPDSRNTGFELTGHGAHQSPENGGYEQIPD

SEQ ID NO: 5243 - DNA, 1223 bp, Glycine max
  misc_feature: Ceres CLONE ID no. 1046515
  misc_feature: Ceres CDNA ID no. 24766056
  CDS (129)..(905): REFERENCED BY SEQ ID NO: 5244
atatatgtattgcgcgcaattcagatctagcttttgcacaatgcaagttctataggctcgtttggttttgccgattagtgtttactgaaacaacgttttttgtgatatcgagaaaaaaaaaaagagtgatgtcgaggagaccggggaatcctactagaaggttcggtgacaatggcggtggattgttctcttcgaaatctaggtcgccaccggttttgtctattgcgcttgtaattgtgggaggtttgtttctcattggctatatgtatagaggctcaggtggatctagcagccgtatagattctgttagcagggttgaaggtgattatttgtgcagtggagaggtccaacaagcaattccccttttacagaaagcatatggagatagcatgcataaagttttgcatgttggtcctgatacttgttatgtggtctctaaattgctgaaggaggatgaaactgacgcctggggaatagaaccatatgatatagaggatgctgataataattgcaaagcacttatacgtagaggcagtgtgcgtgtgtctgatatcaagtttcctcttccatacaggccaaaatctttctctcttgtaattgtttcagatgctctggattacctgtctcccagatacctcaataaaactcttccagatttggtgagagtagcatctgatggtgtagtgatatttactggttttcccaccactcaaaaggccaaggtagcggatgtttctaaatttggaaaagcggccaagatgaggagttcatcctggtgggtcaagtttttcctccagattaacttagaggagaatgaagctgctgttaagaagtttgaactggcttcatccaagagttcatatgttccgaaatgccagatattccacttgaagtcactccattgacttgtgggatgattcagcattggagctctgttgctgcttctccattttcatttaaaacactttcttctctataaaggtaatttaattcttggaaatatactcgccatagatggtgtatcatttttgttgatagatttttattctttgaattccagcccctgactgtaaaagacacatcaatttagtatttttactaaattattagttgaattaggcaatctataagtaagtcgcagtgattgttgtgcgaaagtaatattacttcttttgttgagatataaagataaaaattaaatgtcatcaaaaaaaaaaaaaaaa

SEQ ID NO: 5244 - protein, 258 aa, Glycine max
  misc_feature: Ceres CLONE ID no. 1046515
  misc_feature: Ceres CDNA ID no. 24766056
MSRRPGNPTRRFGDNGGGLFSSKSRSPPVLSIALVIVGGLFLIGYMYRGSGGSSSRIDSVSRVEGDYLCSGEVQQAIPLLQKAYGDSMHKVLHVGPDTCYVVSKLLKEDETDAWGIEPYDIEDADNNCKALIRRGSVRVSDIKFPLPYRPKSFSLVIVSDALDYLSPRYLNKTLPDLVRVASDGVVIFTGFPTTQKAKVADVSKFGKAAKMRSSSWWVKFFLQINLEENEAAVKKFELASSKSSYVPKCQIFHLKSLH

SEQ ID NO: 5245 - DNA, 741 bp, Glycine max
  misc_feature: Ceres CLONE ID no. 1046666
  misc_feature: Ceres CDNA ID no. 40351569
  CDS (268)..(558): REFERENCED BY SEQ ID NO: 5246
atataatactaacccggcctgggtcacttgactccggcacaaggaaagctgcttcttctttgcaaaggcggcgaggcaccaacgctctctagctccggtctctttgtattttgagtttattacagaattaaaaactagcatagggaaagttctactaaaaaaattcgaagtagtttccacaacatgcaatataagcagcatcaggagatattttgttccttgcatatacttgattccatcctactagccaattaggtagataacacaatgtcgctgaggcgtttcttaggctattctgatggtgaggtcatgaggtctgatgcaaaaccttgttccaggctaatgaggcacacagctgcaatctttagtgttggtggagcattaggattttgggtcctttgccgaatgcactatggtcctcgaattacaaatcctaggagtcttcgttgggcagcatgtggagctgtaactgcgagctcaggcacggctttgctggttcgtttgtttagtcctgaatgtgagccccagaatatagctgcttatgacaataaaaactaactggtgttgtcaccccctttctttttcccctactgataacatcataatatacttgatgaggtaggttgcaattatctcgcatgtgtaagttttatggtatggatgacattttctggcacatcactaagggaaaatttggctaattaatccaactattcttagatgctaaaaaaaaaaaaaaaa

SEQ ID NO: 5246 - protein, 96 aa, Glycine max
  misc_feature: Ceres CLONE ID no. 1046666
  misc_feature: Ceres CDNA ID no. 40351569
MSLRRFLGYSDGEVMRSDAKPCSRLMRHTAAIFSVGGALGFWVLCRMHYGPRITNPRSLRWAACGAVTASSGTALLVRLFSPECEPQNIAAYDNKN

SEQ ID NO: 5247 - DNA, 908 bp, Glycine max
  misc_feature: Ceres CLONE ID no. 1046782
  misc_feature: Ceres CDNA ID no. 36517518
  CDS (119)..(664): REFERENCED BY SEQ ID NO: 5248
atcaacttttctatgtgtggaacattcacttgcgtgttgattccagggagtttcttattggatgtttgctaattatctcattcttgtggctctgctccttcttcttttgaattaagagatggggttgtctttcaccaagctttttagccggctctttgccaagaaagagatgcgtattctcatggtaggtcttgatgctgctggtaagactaccatcttgtacaagctcaagctgggagaaattgtcacaaccattcccacaattggatttaatgtggagactgtggaatataagaatattagctttactgtatgggatgtgggtggccaagataagattcgtcctttatggagacactacttccaaaacactcaggggcttatctttgttgtggatagcaatgatcgtgaccgtgttgttgaggctagagatgagctccaccggatgttgaatgaggatgagttgagagatgctgttctcctggtatttgccaacaaacaagatcttccaaatgctatgaatgctgcagaaatcacagacaagcttggtcttcattctcttcgccaacgccactggtatatccagagcacatgtgctacctctggggaaggactatatgaaggactggagtggctctccaacaatatagctaacaaggcttagggacattttgtggaatgccgctatttcttgcttattatattatgaggttgatgggttgctgcttctcttatatagcattataatatatatatatattttactcttttaagtcttttctttttctttatttaggtgtttgatactatatcatagcaatcgtattgaatcctgtagaatttttaaataattaatgaattacaaactatacatgacgcgatcatgcttttcaaaaaaaaaaaaaaaa

SEQ ID NO: 5248 - protein, 181 aa, Glycine max
  misc_feature: Ceres CLONE ID no. 1046782
  misc_feature: Ceres CDNA ID no. 36517518
  misc_feature: null
  misc_feature: Useful for making plants with altered Lignin content
  misc_feature: Useful for making plants with altered alkaloid content
  misc_feature: Homolog of GI Number: 77812440 NR Desc: ADP ribosylation factor 002
  misc_feature: Homolog of GI Number: 11131026 NR Desc: ADP
  misc_feature: Homolog of GI Number: 47026845 NR Desc: ADP
  misc_feature: Homolog of GI Number: 50511366 NR Desc: ADP
  misc_feature: Homolog of GI Number: 37791223 NR Desc: ARF
  misc_feature: Homolog of GI Number: 34909214 NR Desc: putative ADP
  misc_feature: Homolog of GI Number: 39653273 NR Desc: ADP
  misc_feature: Homolog of GI Number: 29028258 NR Desc: ADP
  misc_feature: Homolog of GI Number: 77999271 NR Desc: ADP
MGLSFTKLFSRLFAKKEMRILMVGLDAAGKTTILYKLKLGEIVTTIPTIGFNVETVEYKNISFTVWDVGGQDKIRPLWRHYFQNTQGLIFVVDSNDRDRVVEARDELHRMLNEDELRDAVLLVFANKQDLPNAMNAAEITDKLGLHSLRQRHWYIQSTCATSGEGLYEGLEWLSNNIANKA

SEQ ID NO: 5249 - DNA, 1579 bp, Glycine max
  misc_feature: Ceres CLONE ID no. 1046904
  misc_feature: Ceres CDNA ID no. 25891034
  CDS (189)..(1319): REFERENCED BY SEQ ID NO: 5250
aaaacccaatccccaacccgtaactaaccgcgctagagtcaatagagaaaaaagtcatctttctattgtgggatacaatttgctatctcgctcttcaatttggacaactaaaacaggatcaaaagtctatattaatctcacttatcccttcgagagaagtcactggaagaagtgattccacagcttggatgaataactcagggacacccaagtcttcaagttctgaattggatcttgatcgacccaacattgaggattacctcccttcagggtccaccattcaacaagaacctcatggaaagcttttcctgcatgatttgctcaatatttctcctactttgtctgaggctgcaggtgctattgtagatgactcattcacaagatgcttcaagtcaaatcctccagaaccatggaattggaatgtttatttgtttcctttgtggtgttttggagttgtgattcgatacttgattctgttcccaatcagggttatagggttaacaataggatggataatatttctttcatccttcattccggtgcacttcctattgaaaggacatgacaagttaaggagaagtattgagaggtctttggtagagatgatgtgcagtttctttgttgcatcttggactggggttgttaagtatcatggacccaggcctagcaggagaccaaagcaggtttttgtagccaaccatacttccatgattgatttcattatcttagaacagatgactgcttttgctgttattatgcagaagcatcctggatgggttggattattgcagagtaccattttggagagtctaggatgcatctggttcaaccgtacagaggcaaaggatcgggaaatagtagcaaggaaattgagggatcatgtccagggagctgataacaacccccttctcatatttcctgaaggaacttgtgtaaataatcactatacagtcatgttcaagaagggtgcatttgaacttggctgcacagtttgcccagttgcaatcaagtacaataagatttttgtagatgctttttggaatagtcgaaagcaatcattcactatgcatctgttgcagctaatgacgtcttgggcagttgtttgtgatgtttggtacttggagccacaaaatctgaagccaggagagacgcctattgagttcgcagagagggtgagagacataatctcagttcgtgctggccttaaaaaggttccttgggatggatatctgaagtattctcgtcctagcccaaagcatagagaaaggaagcaacagaactttgctgagtcagtgctgcggcgatgggaggaaaagtgatgtgtacctttatgtggtgttgttcttaattattcttagtaatgccattcttcgacccctttttttcttttgttttgtcattgctactatttatttttacacttttattaagatatgcatatatcactcagtaacaaagttgtccagtaattttttccatggatggatgttgtcttgtacaaactgttgagaactagatctttaattaaggatgaaatttatgctaatgttaaataaattagtcaaaaaaaaaaaaaaaa

SEQ ID NO: 5250 - protein, 376 aa, Glycine max
  misc_feature: Ceres CLONE ID no. 1046904
  misc_feature: Ceres CDNA ID no. 25891034
  misc_feature (151)..(274): Pfam Name: Acyltransferase PFAM Desc: Acyltransferase
  misc_feature: Homolog of GI Number: 50938011 NR Desc: putative 1
  misc_feature: Homolog of GI Number: 28828546 NR Desc: similar to Oryza sativa
  misc_feature: Homolog of GI Number: 29247599 NR Desc: GLP_302_47616_48917
  misc_feature: Homolog of GI Number: 74002146 NR Desc:  similar to CG3209
  misc_feature: Homolog of GI Number: 24762545 NR Desc: CG3209
  misc_feature: Homolog of GI Number: 68368581 NR Desc:  similar to putative lysophosphatidic acid acyltransferase
  misc_feature: Homolog of GI Number: 51261967 NR Desc: MGC81856 protein
  misc_feature: Homolog of GI Number: 17567975 NR Desc: lysophosphatidic acid acyltransferase
  misc_feature: Useful for making plants with increased biomass and foliage
  misc_feature: Useful for making shorter plants
  misc_feature: Useful for making smaller plants
  misc_feature: Useful for modifying plant structure
MNNSGTPKSSSSELDLDRPNIEDYLPSGSTIQQEPHGKLFLHDLLNISPTLSEAAGAIVDDSFTRCFKSNPPEPWNWNVYLFPLWCFGVVIRYLILFPIRVIGLTIGWIIFLSSFIPVHFLLKGHDKLRRSIERSLVEMMCSFFVASWTGVVKYHGPRPSRRPKQVFVANHTSMIDFIILEQMTAFAVIMQKHPGWVGLLQSTILESLGCIWFNRTEAKDREIVARKLRDHVQGADNNPLLIFPEGTCVNNHYTVMFKKGAFELGCTVCPVAIKYNKIFVDAFWNSRKQSFTMHLLQLMTSWAVVCDVWYLEPQNLKPGETPIEFAERVRDIISVRAGLKKVPWDGYLKYSRPSPKHRERKQQNFAESVLRRWEEK

SEQ ID NO: 5251 - DNA, 1415 bp, Glycine max
  misc_feature: Ceres CLONE ID no. 1046910
  misc_feature: Ceres CDNA ID no. 40351570
  CDS (94)..(1086): REFERENCED BY SEQ ID NO: 5252
gtcccatctccgtttcgtaactttcggttcctcccattttccggttcaataaattaaattaaaaaaaccgaaccggcggatctcggtggtttcatggaggctcatggcggagggctccgtcgcatccttgtgctcgccttctgcgtcgccggaatctggtccgcgtacatctaccaaggcgttcttcaggaaaatgtgtcgacgaagcgattcaacggtgaaaggttcgagcaccttgcgtttctgaacttggcgcagaatgttgtgtgtttaatctggtcgtttatcatgataaagatgtgggctagtggaaattctggtggtgctccttggtggagttattggagcgctggaattaccaacaccattggtcctgctatgggaattgaagctttgaagtatattagttaccctgctcaggtgctggcaaagtcctccaaaatgattccagttatgctgatgggtactctggtatatggtataagatacacttttccagaatacctttgtactttccttgttgctggaggggtatcaacatttgcacttctaaagactagctctaagactatcagcaagctggcacatccaaatgctccccttggatatgggttgtgtttcctgaaccttgcttttgatggatttaccaatgcaacccaggattctttaaaagcaaggtatccaaaaacaagtgcttgggatattatgctgggcatgaatttatggggaaccatatataatatgatttacatgtttggatggccccatgccagtggatttgaggcagttcgcttttgccaacatcatccagaggcagcatgggatatttttctctactgctgctgtggtgctgtgggccaaaatttcatcttcttgactataagccggtttggttctttggctaacactaccatcactaccacccgcaaatttgtaagcattgtggtatcttctctattgagtggaaatcccctctcaacaaagcaatgggggtgtgtttccatggtgttctcaggattgtcttaccagatctacctcaagtggcagaagttgcagagattgcagaagaaaagaaaagccatgtgaagcccatcagcaattttgaagtcaaaacgataatactatcgtagttaatttgcccttactaaaatcttgaaggttcaatgaaccagatttaggcttatgcaaaagaatatttgtaattttaattgaacagatactttttgagaagaacaaagctgagaagtttagatcccattctctcattcattgtgccaatatttagttgcctgtattctactgaagagctagatttagttttatagcataacactaggggaaagctatactctctgtaaacatgattttcagattatctcattgtctctggtttgtaaagaaaaaaaaaaaaaaaa

SEQ ID NO: 5252 - protein, 330 aa, Glycine max
  misc_feature: Ceres CLONE ID no. 1046910
  misc_feature: Ceres CDNA ID no. 40351570
MEAHGGGLRRILVLAFCVAGIWSAYIYQGVLQENVSTKRFNGERFEHLAFLNLAQNVVCLIWSFIMIKMWASGNSGGAPWWSYWSAGITNTIGPAMGIEALKYISYPAQVLAKSSKMIPVMLMGTLVYGIRYTFPEYLCTFLVAGGVSTFALLKTSSKTISKLAHPNAPLGYGLCFLNLAFDGFTNATQDSLKARYPKTSAWDIMLGMNLWGTIYNMIYMFGWPHASGFEAVRFCQHHPEAAWDIFLYCCCGAVGQNFIFLTISRFGSLANTTITTTRKFVSIVVSSLLSGNPLSTKQWGCVSMVFSGLSYQIYLKWQKLQRLQKKRKAM

SEQ ID NO: 5253 - DNA, 1202 bp, Glycine max
  misc_feature: Ceres CLONE ID no. 1047014
  misc_feature: Ceres CDNA ID no. 40351571
  CDS (130)..(990): REFERENCED BY SEQ ID NO: 5254
attcagttccaaaggatacataaccatcaagtttcagttccaaacaaaacccatcaaagtctttctccctcagtgatcatatattcattcagttctatacaaaatcctcaaaaactcttcctctctgccatgaccatggaatacagaaccttagaactcaacatcatatccgcaaaggacatcaagaatgttaatctcttctccaagatggacgtatacgccgccgtttcgctctccggtgaccctctccaccctcagggcgccaccacccacgtccacaaagacgccggcagcaaccccacgtggaactaccccgtgaaattctctgtcaacgaatcgctggcgaaggaaaatcgtttatctcttgagatcaagctcatctccgaccgcaccctcggcgacaccgtcatcggcaccgtccatgttcctctcagggaactcctggataaccccggcgatgacagctccttccgccaagtcagttatcaggtgatgaagcaatcaagaaaatccaagggatccttgaatttctcctacaaattcggcgaacatgttcccgccccggccgccaagacacccaaagcggccaaggcgggacaagagccggtgatggcttatcctcctgctggggcgggatccagttcgatgccctatggtacgccacaccctcccccgccgcagcaatatgcggcgacgggatatgggtatccacctcagcaggtgcatggtggatacccacctcaagcagcatatgggtacccacctcagaccggttatggatacccacaacagtcgggttatggatatccacaacaatccggatatgggtacccacctcaggctcagaaaccaaagaagaacaaatttggaatgggattgggagcaggattgcttggtggtgccttgggtggaatgttgatcggagacatggtatctgatgctgctgaatatgatgcgggctttgatgatgctggtggatttgatttttaattttcagtttttcaatcaaccctgtatttttttttttcttttatatttctggatttcactttttgcctttttcggttgcgtaatgatgttctatgagattgcttattagtatttgtttcagatacctctcattacctgactctgtatttaactgctatgatataaagtataacatacagcctgtgatttcctcgctaaaaaaaaaaaaaaaa

SEQ ID NO: 5254 - protein, 286 aa, Glycine max
  misc_feature: Ceres CLONE ID no. 1047014
  misc_feature: Ceres CDNA ID no. 40351571
  misc_feature (8)..(98): Pfam Name: C2 PFAM Desc: C2 domain
MTMEYRTLELNIISAKDIKNVNLFSKMDVYAAVSLSGDPLHPQGATTHVHKDAGSNPTWNYPVKFSVNESLAKENRLSLEIKLISDRTLGDTVIGTVHVPLRELLDNPGDDSSFRQVSYQVMKQSRKSKGSLNFSYKFGEHVPAPAAKTPKAAKAGQEPVMAYPPAGAGSSSMPYGTPHPPPPQQYAATGYGYPPQQVHGGYPPQAAYGYPPQTGYGYPQQSGYGYPQQSGYGYPPQAQKPKKNKFGMGLGAGLLGGALGGMLIGDMVSDAAEYDAGFDDAGGFDF

SEQ ID NO: 5255 - DNA, 832 bp, Glycine max
  misc_feature: Ceres CLONE ID no. 1047036
  misc_feature: Ceres CDNA ID no. 25445660
  CDS (110)..(724): REFERENCED BY SEQ ID NO: 5256
acaggtaaatgtttcatctttatgcttatcacttccttaggacgctcgtttaagcttcttctatgttttgaaagcttgctacgtcagctgatttcccctttctccaggaatggcttatgttccacatggaaatgcaaatttcaactctttattcctaaaatttgcaatttctcatgtgggtatttcttctttgcccttcttgcacccgggactgaaatcttgtacagtcttcaacagaggaacactcattcgccagtgtttaaatggaaagcggaatttttctctatcagaaaagcgatttaattgcaagttttcaaagaaagacagattctttatccctagaagtagtagttcttctaactctagtggaagtacggatgaaccctctaatgagacagagaagacaccatttggatatacaaggaaagatgtcctattaattggacttggagttactttacttggcattggcttaaaaagtggactggagtttgttggagttgactcactgcaagcaggaaatgtagttcagctagtgctggttttgggccttacagttgggtggatctcaacatatatcttcagagtttcaaacaaggaaatgacatatgcacagcaactacgtgattatgaaagcaaagtgatggagaagcggttagagtccttaacagaagcagagctacaagcactgcttgaagaagttgaggaagagaagagtcgctagctagtggtacacaggtgaattggagtagcttgtttgtatatatacactgaaatgaagttttgccaaagtaattgaaacagaaatttcaacccaaaaaaaaaaaaaaaa

SEQ ID NO: 5256 - protein, 204 aa, Glycine max
  misc_feature: Ceres CLONE ID no. 1047036
  misc_feature: Ceres CDNA ID no. 25445660
  misc_feature: Homolog of GI Number: 23124895 NR Desc: COG0477: Permeases of the major facilitator superfamily
MAYVPHGNANFNSLFLKFAISHVGISSLPFLHPGLKSCTVFNRGTLIRQCLNGKRNFSLSEKRFNCKFSKKDRFFIPRSSSSSNSSGSTDEPSNETEKTPFGYTRKDVLLIGLGVTLLGIGLKSGLEFVGVDSLQAGNVVQLVLVLGLTVGWISTYIFRVSNKEMTYAQQLRDYESKVMEKRLESLTEAELQALLEEVEEEKSR

SEQ ID NO: 5257 - DNA, 1137 bp, Glycine max
  misc_feature: Ceres CLONE ID no. 1047071
  misc_feature: Ceres CDNA ID no. 25891387
  CDS (108)..(929): REFERENCED BY SEQ ID NO: 5258
agcgagcgagatctttgtctcttctcttgcttccttcttcaattcatctccgaaccgcgtttctctttttgactcttcccctctctctttctctctactcagtaagaatgtatactaatattggtatgccaccgggggtacctcagcatcatcctcaacctccaatgagctcgcaacctaatctgttcgggaatgcatttaattcttctggttcaggactcattcgaggtggattgggtgcgtatggagaaaaaatattaggatcaagctctgagtacgtccaaagcaatataagccggtatttctctgatccccaatactactttcaagtgaatgaccactatgttaagaacaagttaaaggtcgtgctgttcccattcttgcaccggggtcattggactaggattactgaaccagtgggaggtaggctctcttataaacctccaatttatgacataaatgctcctgacttgtacattccattaatggcatttggtacctatgttgttcttgctggcatctcattgggtcttcgtggaaagtttagtcctgaagctttgaactggttatttatcaagggattggttggttggtttatgcaaacagcactgcttaaagttactttactttcattaggcagtggggaagcacctctattggacattatagcgtacgccgggtacacttttcctggcttgtgtttggctgtttctggaagaataatatggagttactcctactactttctgatgctgtggacctgcttatgtatggcagtgtacttggttaaaacaatgaagagagtcctttttgcagaagttaggagttatgattcaagcaaacaccactatctcttgctcctcattgctttggctcagttcccattgttcacatggcttggaaacattactgtcaattggctaatatagagtgatagcatttacactgtacttggaagcacttggtgattttttttggttaactttggagaacagtaatacatgggcttctgttttttttagtactttattttctgcatggacgattaccctgactcaccattaagttgggtttttttatgggtcacttttgataatggttctcgacggattctagccagcaaaaaaaaaaaaaaaa

SEQ ID NO: 5258 - protein, 254 aa, Glycine max
  misc_feature: Ceres CLONE ID no. 1047071
  misc_feature: Ceres CDNA ID no. 25891387
  misc_feature (19)..(246): Pfam Name: Hrf1 PFAM Desc: Hrf1 family
  misc_feature: Homolog of GI Number: 30695009 NR Desc: integral membrane HRF1 family protein
  misc_feature: Homolog of GI Number: 33589682 NR Desc: At3g59500
  misc_feature: Homolog of GI Number: 9755388 NR Desc: F17F8.24
  misc_feature: Homolog of GI Number: 50930107 NR Desc: OSJNBa0019G23.6
  misc_feature: Homolog of GI Number: 51090829 NR Desc: putative yip1 interacting factor
  misc_feature: Homolog of GI Number: 72009661 NR Desc:  similar to Yip1 interacting factor homolog B isoform a
  misc_feature: Homolog of GI Number: 58376264 NR Desc: ENSANGP00000019342
  misc_feature: Homolog of GI Number: 62388883 NR Desc: Yip1 interacting factor homolog B isoform a
  misc_feature: Homolog of GI Number: 62388885 NR Desc: Yip1 interacting factor homolog B isoform b
  misc_feature: Homolog of GI Number: 49118634 NR Desc: LOC443676 protein
MSSQPNLFGNAFNSSGSGLIRGGLGAYGEKILGSSSEYVQSNISRYFSDPQYYFQVNDHYVKNKLKVVLFPFLHRGHWTRITEPVGGRLSYKPPIYDINAPDLYIPLMAFGTYVVLAGISLGLRGKFSPEALNWLFIKGLVGWFMQTALLKVTLLSLGSGEAPLLDIIAYAGYTFPGLCLAVSGRIIWSYSYYFLMLWTCLCMAVYLVKTMKRVLFAEVRSYDSSKHHYLLLLIALAQFPLFTWLGNITVNWLI

SEQ ID NO: 5259 - DNA, 1373 bp, Glycine max
  misc_feature: Ceres CLONE ID no. 1047140
  misc_feature: Ceres CDNA ID no. 36706304
  CDS (129)..(1034): REFERENCED BY SEQ ID NO: 5260
gaggatccaaacgccttattcttaaagcgacaccacatagtattatagtgagtagtgtgccttctctctctctctctctctctctctctctctctctgtgtgttgcgttttgtgaaatcttattcgacatggcgtcacgggacaacaagaaggcgtcgagcagccgagccggcagaattcgcaccctctccgatctgaaccgtccctccgccgattccgacagcgactccgatggccctcaggagtactacaccggcggcgaaaagagtggaatgcttgtccaggatccttcaaagggaaatgatgtggatgaaattttcaatcaagctaggcaacttggggctgttgaaaggcctcttgatcagcttcaggagcctccaaggtcaactagctttactggaactggcaggttactctcgggggaaactacacgatctactaataatcagcaacctgaggctgttgttcataacattgttttctggagtaatggtttcactgtaaatgatggaccattgaggagtttggacgatcctgaaaatgcctcatttttagagagcataaaaaaatctgagtgtcccaaagagcttgagcctgaagataggaggtcatctgttaatgttaatctcatacggaggaatgagaactatcgtgaacccgaaaagcagcatgttgcatttcagggagtgggaagaactcttggaagcagctctacatcaatggctcctgaccctcctgctgcctcaacacctcccaacacagcaccaactccttctgctggcctggtagttgatcaatcattgccatcaacctcaatacaactcaggttggctgacggaacccgcttgatatcacattttaattaccaccacacaatcagcgacattcgtgccttcattgatgcatctagacctgggggtcggcagaattatcaacttcagttgatgggtttccccccaaagattctagctgatgaaactcagactatagagcaggcaggactggcaaattcagttgtcatacagaaattttagcaaattgctgcttcatgcgattagtcattgctggctaaatgctgcatggaagggatccagttttattaggggcttctagacgtgaggtactgttatttacaaaaacagataggaaacccccctaatgttggggggacattttcttttgttgctcaaagtttaccaagtatttgctttaggaccagttggatggcttagctttggacctatttcatgttatgatgattgtgttgtgtgtcctctttctggctgggcctagtgactgaacttgataatatattgaacacttcactgaaatgcaggatagccgtaagtcacacgtcaaaaaaaaaaaaaaaa

SEQ ID NO: 5260 - protein, 301 aa, Glycine max
  misc_feature: Ceres CLONE ID no. 1047140
  misc_feature: Ceres CDNA ID no. 36706304
  misc_feature (116)..(189): Pfam Name: SEP PFAM Desc: SEP domain
  misc_feature (224)..(301): Pfam Name: UBX PFAM Desc: UBX domain
  misc_feature: Homolog of GI Number: 21689865 NR Desc: putative membrane trafficking factor
  misc_feature: Homolog of GI Number: 13123657 NR Desc: phosphatase
  misc_feature: Homolog of GI Number: 31249692 NR Desc: putative phosphatase
  misc_feature: Homolog of GI Number: 15292665 NR Desc: putative phosphatase
  misc_feature: Homolog of GI Number: 13123659 NR Desc: phosphatase
  misc_feature: Homolog of GI Number: 50924870 NR Desc: OSJNBa0060P14.10
  misc_feature: Homolog of GI Number: 51535897 NR Desc: phosphatase
  misc_feature: Homolog of GI Number: 15233121 NR Desc: UBX domain
  misc_feature: Homolog of GI Number: 55650584 NR Desc:  similar to p47 protein isoform a
  misc_feature: Homolog of GI Number: 20149635 NR Desc: p47 protein isoform a
MASRDNKKASSSRAGRIRTLSDLNRPSADSDSDSDGPQEYYTGGEKSGMLVQDPSKGNDVDEIFNQARQLGAVERPLDQLQEPPRSTSFTGTGRLLSGETTRSTNNQQPEAVVHNIVFWSNGFTVNDGPLRSLDDPENASFLESIKKSECPKELEPEDRRSSVNVNLIRRNENYREPEKQHVAFQGVGRTLGSSSTSMAPDPPAASTPPNTAPTPSAGLVVDQSLPSTSIQLRLADGTRLISHFNYHHTISDIRAFIDASRPGGRQNYQLQLMGFPPKILADETQTIEQAGLANSVVIQKF

SEQ ID NO: 5261 - DNA, 1283 bp, Glycine max
  misc_feature: Ceres CLONE ID no. 1047194
  misc_feature: Ceres CDNA ID no. 29191748
  CDS (152)..(787): REFERENCED BY SEQ ID NO: 5262
gtgggctgagttgaacagagatttaggcagcccgaaccgacgatgttgtttttaactgacagcagcacaaagcgaacactaacactaacgtgaaacgcgttgcggtgtcggaaaatcaccctcacctgatcactgtggaagtctctaggtgatggccggttcagaacctgttagggcagagggagagactatggctgtggatgctgccccaaggaagccccggattctacttgctgctagtgggagtgttgctgctgtcaaatttgcaaatctttgtcactgtttctctgaatgggcagatgtaagagcagtttccacaagtgcatctttgcatttcattgatagagcagcaatgcccaaggatgtaattctatacacggatgacaatgaatggtctagttggaagaaattaggtgatagcgtgcttcacattgagcttcgcaaatgggctgatatcatggtcatcgctccattatcagcaaacacccttggcaagattgctggagggttgtgtgacaatctactgacatgcatcgttcgagcctgggactacagcaagccattctttgttgcaccagccatgaacacttttatgtggaacaatcctttcacagagcggcatctcatctccattgatgagcttggcatttctctcatcccacctgttacaaagaggttagcttgtggggattatggcaatggtgccatggctgaaccctctaccatttactcaactgtaaggctcttctatgagtcaaaggctcagcaaggtaatggtgatatctgacaatgttgacaatcagaaacaagtatgaatggtgtgctaggacttgtcttgatcccttgttttattgtatttgtatttctcttacatctagtctgataataggtggcatgttttatttaggacaaaatttagatgcagttgcttaggtgcttttggtgctgtgctctaattagaaatggagtttctcctttgtaatttgcaaaataaaggtttgtattaatacttatatcagcatagtttaaaactccaattataattggagaacaccaccaaaaacacctgaaaaactgcatctagatttttttcctgatatttattgtagagggaatgtgctgcagactcctttatgcctcgtagagtgatgcttgtatactttcattagtcaccggactagttggtgtaggatcttatacacccttggatatgtgcccatgtagcatcatttcatgtgcaattttagaaacactaaattgtttcgccaaaaaaaaaaaaaaaa

SEQ ID NO: 5262 - protein, 211 aa, Glycine max
  misc_feature: Ceres CLONE ID no. 1047194
  misc_feature: Ceres CDNA ID no. 29191748
  misc_feature: The plant flowers significantly late compared to wild-type.
  misc_feature: Useful for making plants with modulated flowering time
  misc_feature (23)..(143): Pfam Name: Flavoprotein PFAM Desc: Flavoprotein
  misc_feature: Homolog of GI Number: 52218792 NR Desc: At3g18030
  misc_feature: Homolog of GI Number: 28948674 NR Desc: Chain A
  misc_feature: Homolog of GI Number: 2047324 NR Desc: HAL3B protein
  misc_feature: Homolog of GI Number: 8778701 NR Desc: T1N15.24
  misc_feature: Homolog of GI Number: 51090974 NR Desc: putative HAL3B
  misc_feature: Homolog of GI Number: 72089189 NR Desc:  similar to CG30290
  misc_feature: Homolog of GI Number: 12583571 NR Desc: putative halotolerance protein HAL3 homolog
  misc_feature: Homolog of GI Number: 45188030 NR Desc: ADR156Cp
  misc_feature: Homolog of GI Number: 19115217 NR Desc: thymidylate synthase
MAGSEPVRAEGETMAVDAAPRKPRILLAASGSVAAVKFANLCHCFSEWADVRAVSTSASLHFIDRAAMPKDVILYTDDNEWSSWKKLGDSVLHIELRKWADIMVIAPLSANTLGKIAGGLCDNLLTCIVRAWDYSKPFFVAPAMNTFMWNNPFTERHLISIDELGISLIPPVTKRLACGDYGNGAMAEPSTIYSTVRLFYESKAQQGNGDI

SEQ ID NO: 5263 - DNA, 1210 bp, Glycine max
  misc_feature: Ceres CLONE ID no. 1047241
  misc_feature: Ceres CDNA ID no. 25447433
  CDS (135)..(932): REFERENCED BY SEQ ID NO: 5264
gtgttcagtttaacaaaccgatcaagctgtcgtgtggtgtacccactgatctgtaaccgtggtctcgacaacaacaacaacaacaacactattgttcagaacataaaagatcccaaataacaagaccacacaccatgagtgtcatcgacattctcaccagagttgattccatttgcaaaaagtacgacaaatacgacgtcgaaaagcaaagggactccaatctctccgccgacgatgcattcgccaaactctacgcctccgtcgacgccgacatcgaggccttacttcagaaagcagaaaccgctgacaaggagaaaagtaaggcatccactgtagcgatcaatgccgagattcgtcgaaccaaggctagattgttggaggaggttcccaagttgcagagattggctatgaaaaaggtaaaggggctttcatcacaagaatttgctgcccgaaatgatttggctcttgcattgccggataggattcaagctatcccagatggggcccctgcagcacccaaacaaactggaagttgggcagcttcagcttcacgtcctggaattaaatttgattcagatgggaaatttgatgatgaatacttccaacaaactgaagaatcaagtcgattcaggcaagagtacgaaatgcgtaaaatgaaacaggatcaaggtttggatatgattgcagaaggattggatactttgaaaaacatggcacatgatatgaatgaggaactggatagacaagttccactgatggatgagatcgatactaaggtggacagggcatcttctgaccttaaaaataccaatgttagacttagagacacagtgaaccagcttcgatccagtcggaacttttgtattgatattgttttgttgattataattttgggaattgctgcttatttgtacaatgtgctaaagaaatgatacggcatagaagaccatgggatcaatttgtatggcttatctgtatttcttgtattttcttcgtaatatagtggtgtagctcgcgtctgatttttttaaaactatattttggaacttgtcttgctacttgagagatgcacttgtcctttataaaccgactctatatgccgctatattatgtcaaactgtatagatttgtacttgtgtaacatactaattcaatgtttgccttgaggatatttcaagtaatctattttcatttaaaaaaaaaaaaaaaa

SEQ ID NO: 5264 - protein, 265 aa, Glycine max
  misc_feature: Ceres CLONE ID no. 1047241
  misc_feature: Ceres CDNA ID no. 25447433
  misc_feature (175)..(237): Pfam Name: SNARE PFAM Desc: SNARE domain
  misc_feature: Homolog of GI Number: 50932687 NR Desc: putative syntaxin 71
  misc_feature: Homolog of GI Number: 13811650 NR Desc: syntaxin of plants 72
  misc_feature: Homolog of GI Number: 13811652 NR Desc: syntaxin of plants 73
  misc_feature: Homolog of GI Number: 56784987 NR Desc: anti
  misc_feature: Homolog of GI Number: 50899600 NR Desc: syntaxin 71
  misc_feature: Homolog of GI Number: 34911252 NR Desc: putative anti
  misc_feature: Homolog of GI Number: 71744338 NR Desc: syntaxin
  misc_feature: Useful for making plants with increased biomass and foliage
MSVIDILTRVDSICKKYDKYDVEKQRDSNLSADDAFAKLYASVDADIEALLQKAETADKEKSKASTVAINAEIRRTKARLLEEVPKLQRLAMKKVKGLSSQEFAARNDLALALPDRIQAIPDGAPAAPKQTGSWAASASRPGIKFDSDGKFDDEYFQQTEESSRFRQEYEMRKMKQDQGLDMIAEGLDTLKNMAHDMNEELDRQVPLMDEIDTKVDRASSDLKNTNVRLRDTVNQLRSSRNFCIDIVLLIIILGIAAYLYNVLKK

SEQ ID NO: 5265 - DNA, 1220 bp, Glycine max
  misc_feature: Ceres CLONE ID no. 1047325
  misc_feature: Ceres CDNA ID no. 25891388
  CDS (198)..(992): REFERENCED BY SEQ ID NO: 5266
aattttaggaacactcctctggttcaataggaatgaagggaagtaaataaacgacactcacactatactaaagaatttcgtttcgtttgtacaaaacaaaagctagcaccgttctgcggcggtcccctccgtcatcgtctttacagagcttccccggtgaccacaatcgccattcgccgccgcagacgacggcgctcatggctcagccgccgttcgatccgttctacctttaccaacatgatgagcagagcaacatcaacacgctatttgtctccggtctaccagacgacgtgaaggcgcgtgagattcacaacctcttccgccgctgccccggcttcgactcctgccaactcaagtacaccggccgcgccaaccaggtcgtagcgtttgccacgtttttcaaccaccaatcggcaatggcagcgttgcacgccttgaatggtgtgaaatttgatcctcaaactggatctgttttacatattgaacttgccaggtcaaactctaggaggaagcgtaaaccaggtagtggagcctacgtggttatagataaaaggtccaaaggagagcctgatcttcagggatcatcaagtgaggacggtgacagcgaccctgatgaaccatcagacagtggcgacaaccagggtgatttagcaatcatgacaagtgatgaaacggctgttggttctgacaatgctgtatctgtggagcaacatggaaagggcagtactggaggactgtgttccactctctttatcgcaaatcttggtccaaattgcactgaagatgaattgaagcaggctttttctgcatatactggattcaacatggtcaaaatgcgttccagaggaggaatgcctgttgcatttgttgattttgaggaaactcaccaagctgctaaagtcatggaggagcttcagggaagcttgctgccgtcatcagatcggggtggcatgcatatagaatatgcaaggtctaaaatgaggaagcgttaggagaaacgggagctagacagtttctggataatttggttgttcgatactgagtagtcgcaagtcacaacttgtagggaaagattgggaatgtggccaatcttgcaaagtgattactgtatatgttgttttggttatgcctataaggctagaaccatgaactatgttgggagttaaaaaaattcagaaggttacaaaatgtttgcccctatcggtagtaaaaaaaaaaaa

SEQ ID NO: 5266 - protein, 264 aa, Glycine max
  misc_feature: Ceres CLONE ID no. 1047325
  misc_feature: Ceres CDNA ID no. 25891388
  misc_feature (23)..(92): Pfam Name: RRM_1 PFAM Desc: RNA recognition motif.
  misc_feature: Homolog of GI Number: 15231331 NR Desc: RNA
  misc_feature: Homolog of GI Number: 62321263 NR Desc: putative RNA
  misc_feature: Homolog of GI Number: 55775434 NR Desc: RNA
  misc_feature: Homolog of GI Number: 17508419 NR Desc: MEChanosensory abnormality MEC
  misc_feature: Homolog of GI Number: 1370048 NR Desc: mec
  misc_feature: Homolog of GI Number: 50942933 NR Desc: putative mec
  misc_feature: Homolog of GI Number: 52077025 NR Desc: RNA
  misc_feature: Homolog of GI Number: 56317942 NR Desc: CG31243
  misc_feature: Homolog of GI Number: 51703926 NR Desc: MGC84222 protein
  misc_feature: Homolog of GI Number: 4324639 NR Desc: RRM
MAQPPFDPFYLYQHDEQSNINTLFVSGLPDDVKAREIHNLFRRCPGFDSCQLKYTGRANQVVAFATFFNHQSAMAALHALNGVKFDPQTGSVLHIELARSNSRRKRKPGSGAYVVIDKRSKGEPDLQGSSSEDGDSDPDEPSDSGDNQGDLAIMTSDETAVGSDNAVSVEQHGKGSTGGLCSTLFIANLGPNCTEDELKQAFSAYTGFNMVKMRSRGGMPVAFVDFEETHQAAKVMEELQGSLLPSSDRGGMHIEYARSKMRKR

SEQ ID NO: 5267 - DNA, 881 bp, Glycine max
  misc_feature: Ceres CLONE ID no. 1047334
  misc_feature: Ceres CDNA ID no. 25445661
  CDS (163)..(675): REFERENCED BY SEQ ID NO: 5268
cttctctagtcacttccaacacttattcaatttttatctttcttttgctctttgtgcattataatcttctcttgtcattacaacccccccgttactcaaatcagaaactctcatttgaagctaacaaacaacaaagatcaacggatctatctaccttcagtcatggtgttttctttcaaccaacgcttctgggtttcttcttcgcttctcctcctcgcggtcctctctgtttcttctctcactcccactttcctttctgacaccgttttcgattctcaaccagcgcataccggtcggaaccttcttcaggctaaaaagggttgttctgtgaatttcgagtttttaaactacacagtaatcacaagcaaatgcaaaggaccccggtaccctcccaaagaatgttgtggggcttttaaagaatttgcttgcccttatgccgatgtattaaatgatttaacgaatgagtgtgcatcaaccatgtttagttacattaatctctatggaaaataccctcctggcctctttgctagtgagtgtcgtgaaggaaagtttggtcttgcttgtcctgcagtgccaccatcagcagtatcagcagatgacactgcaaatcaagctgtacactgtccgtctctattgttgatgctcatagcctgcttcttaatcttgttattctgatatgtttctatacacaacttcattctttttctctcaatattgatgtataatcagttaccatttttttatatgtggtgtgtgaattactttttgcgcaaaaacaaaaaattggctatgtgcctggtagtttaaggagagttctattgatcaatttatgtaatgaaattacgtttgccaagtgagccttagtaaaaaaaaaaaaaaaa

SEQ ID NO: 5268 - protein, 170 aa, Glycine max
  misc_feature: Ceres CLONE ID no. 1047334
  misc_feature: Ceres CDNA ID no. 25445661
  misc_feature: Homolog of GI Number: 3868853 NR Desc: GPI
  misc_feature: Homolog of GI Number: 50725513 NR Desc: putative GPI
  misc_feature: Homolog of GI Number: 38603910 NR Desc: At4g28280
  misc_feature: Homolog of GI Number: 54291507 NR Desc: putative GPI
  misc_feature: Homolog of GI Number: 54291508 NR Desc: putative GPI
  misc_feature: Homolog of GI Number: 50926113 NR Desc: OSJNBa0029H02.11
MVFSFNQRFWVSSSLLLLAVLSVSSLTPTFLSDTVFDSQPAHTGRNLLQAKKGCSVNFEFLNYTVITSKCKGPRYPPKECCGAFKEFACPYADVLNDLTNECASTMFSYINLYGKYPPGLFASECREGKFGLACPAVPPSAVSADDTANQAVHCPSLLLMLIACFLILLF

SEQ ID NO: 5269 - DNA, 1343 bp, Triticum aestivum
  misc_feature: Ceres CLONE ID no. 1047335
  misc_feature: Ceres CDNA ID no. 25892240
  CDS (173)..(1090): REFERENCED BY SEQ ID NO: 5270
gttcgctcgttcgctggacgacctgctctcgctcccgactcccctgaagcaaccgccggcggcggcggcggttcccaggggatttaggagctcaaatttcggtggtgccaagataggagcctgaggtggtcaacaaagaacacttaaaagctgacgttacgtaattggaacaatgcctcctcataagatagagactgggcaccaggatgtggtgcatgacatcgcgatggattactacgggaagcgcctcgccactgcatcctctgataacacaataaagatcattggcgtaagtggcagctcgcagcagcaacttgctactttgagcggacaccagggcccagtttggcaagtcgcgtgggctcatcctaagtatggttccatgcttgcatcctgcagctatgatgggcgggttataatatggaaagaagggggcaaacctgatgagtggacacaggctcacactttcactgagcacaagtcttctgtaaattccattgcttgggcgcctcatgaactcggcatctgcttggcttgtggttcatctgatgggaacatttcagtcttcacagctcgttctgatggtgggtgggagacgacgcgcatcgaccaggctcatccagtgggcgtgacctctgtttcctgggctccagcgatggcccctggtgccctaatcagcccagggccttctgggcagtttgagtatgttcagaaacttgcttctggtggctgtgacaacactgtcaaggtgtggaagctcaccaacgggagctggaggatggactgcttcccagcccttcagatgcacagggactgggtgagagacgtcgcctgggctccaaacctaggcctcccaaagtccacaatcgccagcgcctctcaggatggaactgttgtcatctggacagcgccgaaagaaggcgagcaatgggaaggcagggttctgaatgatttcagaacccctgtttggagggtgtcgtggtcgctgacaggaaacatactggcggtctctgatggcaacaacaatgtgaccctgtggaaagaagctgtggacggtgaatggcagcaagtgactaccgtcgagccatagatgtttcgtgttctaccgctagctgcatttaccgctatcataataacaaatgtagtctgtctttattttatctgtatggcttcgattacaaatggtaacttcccgtgattgttacttaggctgttgcctgtgacaagcttttttcttggtcaaaaagcagataatttggaacttgtatcccaattggactcatgtatggttacgaagacttttgcctggccaggcagctgtgatttgaaaaaaaaaaaaaaaa

SEQ ID NO: 5270 - protein, 305 aa, Triticum aestivum
  misc_feature: Ceres CLONE ID no. 1047335
  misc_feature: Ceres CDNA ID no. 25892240
  misc_feature (2)..(39): Pfam Name: WD40 PFAM Desc: WD domain
  misc_feature: Homolog of GI Number: 51963858 NR Desc: PREDICTED OSJNBa0081C13.10 gene product
  misc_feature: Homolog of GI Number: 83283979 NR Desc: protein transport SEC13
  misc_feature: Homolog of GI Number: 21593236 NR Desc: transport protein SEC13
  misc_feature: Homolog of GI Number: 50935451 NR Desc: putative Sec13p
  misc_feature: Homolog of GI Number: 50754630 NR Desc:  similar to Sec13l1 protein
  misc_feature: Homolog of GI Number: 47086987 NR Desc: zgc:63980
  misc_feature: Homolog of GI Number: 57100900 NR Desc:  similar to Plasma membrane calcium
  misc_feature: Homolog of GI Number: 55619799 NR Desc:  similar to SEC13
  misc_feature: Homolog of GI Number: 46441998 NR Desc: likely COPII vesicle coat component
  misc_feature: Homolog of GI Number: 21239233 NR Desc: putative nucleoporin protein SEH1B
  misc_feature: Useful for making bigger plants
MPPHKIETGHQDVVHDIAMDYYGKRLATASSDNTIKIIGVSGSSQQQLATLSGHQGPVWQVAWAHPKYGSMLASCSYDGRVIIWKEGGKPDEWTQAHTFTEHKSSVNSIAWAPHELGICLACGSSDGNISVFTARSDGGWETTRIDQAHPVGVTSVSWAPAMAPGALISPGPSGQFEYVQKLASGGCDNTVKVWKLTNGSWRMDCFPALQMHRDWVRDVAWAPNLGLPKSTIASASQDGTVVIWTAPKEGEQWEGRVLNDFRTPVWRVSWSLTGNILAVSDGNNNVTLWKEAVDGEWQQVTTVEP

SEQ ID NO: 5271 - DNA, 1134 bp, Triticum aestivum
  misc_feature: Ceres CLONE ID no. 1047351
  misc_feature: Ceres CDNA ID no. 40351572
  CDS (125)..(826): REFERENCED BY SEQ ID NO: 5272
acatctctgtccaaatcgccgtgatccagctagcttacacagaagggcgattcgatcgaggccgccgccccgccgccgccgccgccggagacgatcccctgcagtcagttagttaagctacaaaatggcctcgctggacaccgtcagaggagatcttggcctggttgttttgtacctaagcaaggctgaggcaagagataagatctgtagagctatacaatatggatccaagttcctgagcaacggacaaccaggacctgcacagaatgtcgacaaatcaactagtctagctcggaaagttttccgactgtttaagtttgttaatgatctccaagctctgattagcccccctgccaaaggaactccacttccgctgatcttacttggaaagtcgaagaacgcgatgctgtcaactttcctctttctggaccaaattgtttgggctgggagaacaggagtatacaagaacaaggagcgagcagagtttcttggcaggatagcattttattgctttctcggatccaatacctgtactactatcatcgagctagccgagcttcagcggctttccaaatcgatgaagaagttagagaaggacctcaagcaccaagagctgtacaagaacgagcagtatcggatgaagctgaagaagtccaacgagaggctgctcgccctcatcaaatcgagcctcgacatagtcgtcgccgtggggctgctgcaactggcaccaaaaaaggtcactcctcgcgtcacgggtgcgtttgggttcgctagctcgctcatcgcctgttaccagttgcttccagccccagccaaatccaagtgatctgcctgcccacctcgggccaggcagctggtgcattgattggtgaaacggcggttgctgtcgccccttgttgtcgctgatactgataagaaataaatctggaccgaactgtccgtccccgtaggatataaccaaggattattgctgtgcatgctggcattgccgagggccatctcatagcctggttgatctgccttgccttagacttgatcatgtagcacgcttgtatttgtatggtccggtgtgccactatcatactacaactgttgcgaaataattagaaatttcatacaaaaaaaaaaaaaaaa

SEQ ID NO: 5272 - protein, 233 aa, Triticum aestivum
  misc_feature: Ceres CLONE ID no. 1047351
  misc_feature: Ceres CDNA ID no. 40351572
  misc_feature (11)..(226): Pfam Name: PEX11 PFAM Desc: Peroxisomal biogenesis factor 11
MASLDTVRGDLGLVVLYLSKAEARDKICRAIQYGSKFLSNGQPGPAQNVDKSTSLARKVFRLFKFVNDLQALISPPAKGTPLPLILLGKSKNAMLSTFLFLDQIVWAGRTGVYKNKERAEFLGRIAFYCFLGSNTCTTIIELAELQRLSKSMKKLEKDLKHQELYKNEQYRMKLKKSNERLLALIKSSLDIVVAVGLLQLAPKKVTPRVTGAFGFASSLIACYQLLPAPAKSK

SEQ ID NO: 5273 - DNA, 773 bp, Triticum aestivum
  misc_feature: Ceres CLONE ID no. 1047389
  misc_feature: Ceres CDNA ID no. 36582701
  CDS (84)..(578): REFERENCED BY SEQ ID NO: 5274
agcgccgcacacactccccccgcccgccgccgccgccgcacagccgcagggagagaaggcaaggaggaggaaggaaggggaagatgccggcggggcacgggctgcggtcgcggacgcgcgacctgttcgcgcggcccttccgtaagaaggggtacatcccgctcaccacctacctgcgcacctacaaggtcggggagcacgtcgacgtcaaggtgaacggcgccgtccacaagggcatgccgcacaagttctaccacggccgcaccggccgcgtctggaacgtcaccaagcgcgccatcggcgtcgagatcaacaagcaggtcggcaacaggatcatcaagaagaggatccatgtgcgtgtggagcacgtgcagccatccaggtgcaacgaggagttcctccagaggaaactcaacaatgacaagctgaaggcggaggccaaggcgcgtggcgaggtcatcagcacgaagaggcagccagcagggcccaagcctgggttcatggtggagggcaccaccatcgagacggtcacccccatcccgtacgacgtcgtcaacgatctcaagggtggttactagagcgcttgtttcctgagcagaagcttgagccagttcttagtatctatgcttgttcccaatgttttggtactgagtagttctctttttgctccgccgagtgtgaacttctctgtggttaacattaaagatttcctgtggttgatttcgttcttgacatgctgctggatatatttgcttttaaaaaaaaaaaaaaaa

SEQ ID NO: 5274 - protein, 164 aa, Triticum aestivum
  misc_feature: Ceres CLONE ID no. 1047389
  misc_feature: Ceres CDNA ID no. 36582701
  misc_feature: null
  misc_feature: Useful for making plants with modulated flowering time
  misc_feature (2)..(100): Pfam Name: Ribosomal_L21e PFAM Desc: Ribosomal protein L21e
  misc_feature: Homolog of GI Number: 32400808 NR Desc: 60s ribosomal protein L21
  misc_feature: Homolog of GI Number: 31432571 NR Desc: 60S ribosomal protein L21
  misc_feature: Homolog of GI Number: 3885884 NR Desc: 60S ribosomal protein L21
  misc_feature: Homolog of GI Number: 12321346 NR Desc: 60S ribosomal protein L21
  misc_feature: Homolog of GI Number: 3482935 NR Desc: Putative ribosomal protein L21
  misc_feature: Homolog of GI Number: 76161012 NR Desc: 60S ribosomal protein L21
  misc_feature: Homolog of GI Number: 54292803 NR Desc: ribosomal protein L21
  misc_feature: Homolog of GI Number: 45190353 NR Desc: AEL254Wp
  misc_feature: Homolog of GI Number: 15213768 NR Desc: ribosomal protein L21
MPAGHGLRSRTRDLFARPFRKKGYIPLTTYLRTYKVGEHVDVKVNGAVHKGMPHKFYHGRTGRVWNVTKRAIGVEINKQVGNRIIKKRIHVRVEHVQPSRCNEEFLQRKLNNDKLKAEAKARGEVISTKRQPAGPKPGFMVEGTTIETVTPIPYDVVNDLKGGY

SEQ ID NO: 5275 - DNA, 1315 bp, Triticum aestivum
  misc_feature: Ceres CLONE ID no. 1047391
  misc_feature: Ceres CDNA ID no. 35383330
  CDS (143)..(1123): REFERENCED BY SEQ ID NO: 5276
atcggtcagttaccagatcaacaccaacagtaaacagaaatcatttcctagcccgccaacaaaaacagacttcccattcgatccgctcacaagcttttcgatcggtttagttgttcaacaatcaacagccaacagctcccggatggccggagccacgcttctgcgccacctgggcccccgcctcttcgccgccgccgagccagcctccgggctcgccgcgagcgcgaggggcatcatgcccgccgccgcgaggatcttccccgcgcggatggccagcaccgaggccgccgccccgcatgccaaacaagaagatgatgccgcgagcccccaggcggccgcgactccagagcagcagaacaagaagcccgtggtgagctattggggcatcgagcctcggaagctcgtcaaggatgacggcacggagtggccgtggttctgcttcaggccgtgggacacgtaccggccggacacgtccatcgacgtgaccaagcaccacttgcccaaggccctggcggacaaggtggcgtacttcgttgtccgatcgctgcgcgtgccccgggacctcttcttccagcgccggcacgccagccacgcgctgctgctggagacggtggcggcggtgccgcccatggtgggcggcgtgctacttcacctgcgctcgctccgccgcttcgagcacagcggcggctggatccgggcgctcatggaggaggccgagaacgaacgcatgcacctcatgaccttcatggaggtgacgcagccccggtggtgggaacgcgcgctcgtgctcgccgcgcagggcgtcttcttcaacgcctacttcgtcggctacctcatctcccccaagttcgcgcaccgcttcgtcgggtacctcgaggaggaggccgtggagtcctatactgagtacctcaaggacctcgaggccggcttgatcgagaacacgcccgccccggccatcgccatcgactactggcgcctccccgccgacgccaggctcaaggacgtcgtcaccgccgtgcgcgccgacgaggcgcatcaccgcgacgccaaccactacgcatcggacatccattaccagggaatgacgctgaatcagacgcctgcgccgctcgggtaccactgatcagctcaatggaccatagatcgatgcctgctcagtccatcgttggtgcgtactactaccactgtcgccgatgattgttgcgcgtgcagtctgttctgtgtaaacgatgtgtgtgtatgattcttttgtgtcactttgtacccaaacatatgtctacgtaagccggtattgcttgcaaaaaaaaaaaaaaaa

SEQ ID NO: 5276 - protein, 326 aa, Triticum aestivum
  misc_feature: Ceres CLONE ID no. 1047391
  misc_feature: Ceres CDNA ID no. 35383330
  misc_feature (47)..(324): Pfam Name: AOX PFAM Desc: Alternative oxidase
  misc_feature: Homolog of GI Number: 50928461 NR Desc: OSJNBa0083N12.12
  misc_feature: Homolog of GI Number: 25989201 NR Desc: alternative oxidase AOX3 precursor
  misc_feature: Homolog of GI Number: 51860697 NR Desc: mitochondrial alternative oxidase 1b
  misc_feature: Homolog of GI Number: 51860701 NR Desc: mitochondrial alternative oxidase 1d
  misc_feature: Homolog of GI Number: 50928459 NR Desc: OSJNBa0083N12.11
  misc_feature: Homolog of GI Number: 25989199 NR Desc: alternative oxidase AOX2 precursor
  misc_feature: Homolog of GI Number: 51860695 NR Desc: mitochondrial alternative oxidase 1
  misc_feature: Homolog of GI Number: 19912725 NR Desc: alternative oxidase
  misc_feature: Homolog of GI Number: 50911823 NR Desc: alternative oxidase 1c
  misc_feature: Homolog of GI Number: 19912727 NR Desc: alternative oxidase
  misc_feature: Useful for delaying flowering time
  misc_feature: Useful for increasing chlorophyll and photosynthetic capacity
  misc_feature: Useful for making plants with increased biomass and foliage
  misc_feature: Useful for making stronger plants
  misc_feature: Useful for sterility
MAGATLLRHLGPRLFAAAEPASGLAASARGIMPAAARIFPARMASTEAAAPHAKQEDDAASPQAAATPEQQNKKPVVSYWGIEPRKLVKDDGTEWPWFCFRPWDTYRPDTSIDVTKHHLPKALADKVAYFVVRSLRVPRDLFFQRRHASHALLLETVAAVPPMVGGVLLHLRSLRRFEHSGGWIRALMEEAENERMHLMTFMEVTQPRWWERALVLAAQGVFFNAYFVGYLISPKFAHRFVGYLEEEAVESYTEYLKDLEAGLIENTPAPAIAIDYWRLPADARLKDVVTAVRADEAHHRDANHYASDIHYQGMTLNQTPAPLGYH

SEQ ID NO: 5277 - DNA, 621 bp, Triticum aestivum
  misc_feature: Ceres CLONE ID no. 1047573
  misc_feature: Ceres CDNA ID no. 25891726
  CDS (76)..(447): REFERENCED BY SEQ ID NO: 5278
actagggtttatctcctctcgccgcagcctccatcgaagccaagagaggagcagggcgaaaggaggccgtcggcgatgtcggagaagaagcgcgcccccggcccgcgcaaggacgaggtggtgacccgcgagtacactgtcaacctccacaagcgcctccatggatgcaccttcaagaagaaggcaccaaatgccatcaaggagatcaggaagtttgcacagaaggccatgggaaccaacgatgtccgcattgacgtgaagctcaacaagcacatctggagcagcggcatcaggagtgtcccgaggagagtccgtgtcaggattgcccgcaagaggaacgacgaggaggacgctaaggaggagctgtactctctggtcacagttgctgaagtcccccaggaaggtcttaaaggtttgggtaccaaggttgtggaggatgaggactaaaccccctgtctgttgtttcaatcagttagaatttaatacatatctgctgagagcatattgggaagtcttgctttagcttattgttatctactgttcatgatgttccatgacttcttgatagaagatttgagacgttggatattttgttcaagtgcttgaaaaaaaaaaaaaaaa

SEQ ID NO: 5278 - protein, 123 aa, Triticum aestivum; identical to SEQ ID NO: 3620
  misc_feature: Ceres CLONE ID no. 1047573
  misc_feature: Ceres CDNA ID no. 25891726
  misc_feature (11)..(105): Pfam Name: Ribosomal_L31e PFAM Desc: Ribosomal protein L31e
  misc_feature: Homolog of GI Number: 54290930 NR Desc: putative 60S ribosomal protein L31
  misc_feature: Homolog of GI Number: 54111529 NR Desc: putative 60S ribosomal protein L31
  misc_feature: Homolog of GI Number: 50912155 NR Desc: putative 60S ribosomal protein L31
  misc_feature: Homolog of GI Number: 50947419 NR Desc: putative 60S ribosomal protein L31
  misc_feature: Homolog of GI Number: 915313 NR Desc: ribosomal protein L31
  misc_feature: Homolog of GI Number: 7229709 NR Desc: 80S ribosomal protein L31
  misc_feature: Homolog of GI Number: 56481165 NR Desc: 60S ribosomal protein L31a
  misc_feature: Homolog of GI Number: 14423899 NR Desc: 60S ribosomal protein L31
  misc_feature: Homolog of GI Number: 21553532 NR Desc: 60S ribosomal protein L31
  misc_feature: Homolog of GI Number: 21700813 NR Desc: AT5g56710/MIK19_16

SEQ ID NO: 5279 - DNA, 1093 bp, Triticum aestivum
  misc_feature: Ceres CLONE ID no. 1047576
  misc_feature: Ceres CDNA ID no. 25891611
  CDS (47)..(913): REFERENCED BY SEQ ID NO: 5280
aaatcgcattccctctccccccgctcctcgccgccgctcgctcgccatggacgccgccaagcccgccccggcccccgcccgcccagccggcccggggctctacgccgacatcggcaagaaggccagagatctcctcaacagggactacaccacgggccagaagttcaccttcaccaccaccgccgccaacggagctactattactagttcaagcacaaagaaaaatgaagctatcttgagcgacctccagacccaggtgaagattaagaattgcacagtggatgtgaaagcaacttcagactcaagtgttgtaactacaatcactgttcctgagctgtacacaccaggcttgaagggagttctttctcttcctttcccctaccagaagtctacccctgggaaggctgaactccaatacttgcatccccatcttggcatcagcggcagtgttggcctgaatccaaaccctcttgttaacttttctggcgtcattgggactaaggcttttgctcttggtattgatgttgcatttgacactgcctctggtgacttcaccaagtacaatgctggattgagccacactaatcaagatcttactgcttcgttgaatctgaacaacaaggcaaacaccctggctgcttcctactaccaccaggtgcagcgcaccactgctgtgggagcagagatcgctcacagcttctcgagcaacgagaacaccatcaccgtcgggacgcagcacgagctggaccccctgaccaccgtgaaggggcgctacaacaacttcggcatcgcaaatgcgctcatccagcacgcgtggaggcccaagtctctcatcaccttatccactgaggtcgacaccaaggccattgagaagagccccaagttcgggctggccctgtcactcaagccctgatgtgggattggcgggtgcgttaggatgctaacattttggtactatcagctcttggtccagcgaacaaagcctggacagacagaacttgtaatgcccaactttggtgatgcgacaaacttatctgtcgttttttagcctgttctacctgagggggttttctactcaaaaaaaaaaaaaaaa

SEQ ID NO: 5280 - protein, 288 aa, Triticum aestivum
  misc_feature: Ceres CLONE ID no. 1047576
  misc_feature: Ceres CDNA ID no. 25891611
  misc_feature (15)..(281): Pfam Name: Porin_3 PFAM Desc: Eukaryotic porin
  misc_feature: Homolog of GI Number: 558650 NR Desc: Voltage dependent anion channel
  misc_feature: Homolog of GI Number: 50932487 NR Desc: voltage
  misc_feature: Homolog of GI Number: 5929932 NR Desc: voltage
  misc_feature: Homolog of GI Number: 34910590 NR Desc: putative voltage
  misc_feature: Homolog of GI Number: 50899632 NR Desc: voltage
  misc_feature: Homolog of GI Number: 34912192 NR Desc: voltage
  misc_feature: Homolog of GI Number: 5929928 NR Desc: voltage
  misc_feature: Homolog of GI Number: 558652 NR Desc: Voltage dependent anion channel
  misc_feature: Homolog of GI Number: 456672 NR Desc: voltage dependent anion channel
  misc_feature: Homolog of GI Number: 1724100 NR Desc: porin
MDAAKPAPAPARPAGPGLYADIGKKARDLLNRDYTTGQKFTFTTTAANGATITSSSTKKNEAILSDLQTQVKIKNCTVDVKATSDSSVVTTITVPELYTPGLKGVLSLPFPYQKSTPGKAELQYLHPHLGISGSVGLNPNPLVNFSGVIGTKAFALGIDVAFDTASGDFTKYNAGLSHTNQDLTASLNLNNKANTLAASYYHQVQRTTAVGAEIAHSFSSNENTITVGTQHELDPLTTVKGRYNNFGIANALIQHAWRPKSLITLSTEVDTKAIEKSPKFGLALSLKP

SEQ ID NO: 5281 - DNA, 1037 bp, Triticum aestivum
  misc_feature: Ceres CLONE ID no. 1047644
  misc_feature: Ceres CDNA ID no. 25892802
  CDS (179)..(886): REFERENCED BY SEQ ID NO: 5282
ttcccactccacgcctccttcccccctcccagatctccccaccacacggccgcgcgcaccggagaaacgtagcgagacggctgcgagtggtaaaacagcaaaaggggagaggccaccgcagctcgcgtaccggcggtgggtgggtggcggcgtccgtcacgcgtcggcgtatcaggtgatggacgctggcggcgggggcttaggcgggttccagtggaccgcggaggaggcttcgacgatcgggggcatcgcgacggtgtcgctgctgcactccttcatccccacgcactggctccccttctccatcgtcgggcgcgcccagcgctggccgctctcccgcaccctcctcgtcactgcatttggagcagtccttcatgttgtatcaaccgctcttctcgggataactgcagttactatggcaaatactatagcaggcgaggaaacagtgcataaacttgcctcgctgttgctaatatttcttggagcaggttacattctgttgtttgcgttaggaaaaggtggtcatagccatgcccataatcatccaatggagaagatggcagtcgctggtcttgtacttgtaccagcattatcaccctgtgcaactactcttccagtgtttcttgctgttggcaactcatcctcgatgatgattcttgcgatcattgtacttctcttcagtaccatcacggtgatgacgtccctggtggctctctcattttatggtgctagccagatcaagtttcactgggtggaacgctatgacaaggtcctagttggctcagtactgtgccttgttggggttctgacatatgtgttccatcaccacgatggtgacgagcattctctccatgcacacgtgcacaggaaacttgtgggtccttagaggaatctacatagttactcccaaagttcactgtgaaacagattctgttgtcctctaacctttgtacgttatgctgtataagatctgattatcaatttatctgttgggaatctacccgcctatgggtttcctaggaaaaaaaaaaaaaaaa

SEQ ID NO: 5282 - protein, 235 aa, Triticum aestivum
  misc_feature: Ceres CLONE ID no. 1047644
  misc_feature: Ceres CDNA ID no. 25892802
MDAGGGGLGGFQWTAEEASTIGGIATVSLLHSFIPTHWLPFSIVGRAQRWPLSRTLLVTAFGAVLHVVSTALLGITAVTMANTIAGEETVHKLASLLLIFLGAGYILLFALGKGGHSHAHNHPMEKMAVAGLVLVPALSPCATTLPVFLAVGNSSSMMILAIIVLLFSTITVMTSLVALSFYGASQIKFHWVERYDKVLVGSVLCLVGVLTYVFHHHDGDEHSLHAHVHRKLVGP

SEQ ID NO: 5283 - DNA, 796 bp, Triticum aestivum
  misc_feature: Ceres CLONE ID no. 1047672
  misc_feature: Ceres CDNA ID no. 25447045
  CDS (69)..(626): REFERENCED BY SEQ ID NO: 5284
aattccaacgcctcctccctcgccgctctcccttccttccgctctcatcccctccccctcccgtcgccatggccgtctccacctccacctccacgctcccactcctcttcctccaccgctccaccgcaagcccgaacccctcggcgctctccttcgcctcctccctccgcgcgtccccgctgcgctcccgcgcctccgcctccgccgccccgccagccgagaccctcgccgacgacctgccctccgacacgcccccggttggggaggggtcgggaattccgatgccgtcgtcgattggggaggatggggaggagctggcacccaaacagaagatcagaatcaagctgaggtcttactgggtgccattgatcgaggactcctgcaagcagatcattgaagctgcaaaaacaactaatgccaagaccatgggtcctgttcctctgccgaccaagaagagaatatactgtgtgctcaactctccccacgtgcacaaagattcaaggttccactttgagatccggacacaccagcggttgattgatatcatgtacccgaccgcccagacgattgactcgttgatgcagctccagcttcccgcgggggtggatgtcgaggttaagctatgatcccactagagctgaatctttaaaattctatgtcatgtaatgctcttttctgcagacttcctagttggtcgatctttttgctgtctgagacttgaaacatatgtagagcctgtaacacgaaaaaacatgttcagatatgaaatatcatgcagttaaaaaaaaaaaaaaaa

SEQ ID NO: 5284 - protein, 185 aa, Triticum aestivum
  misc_feature: Ceres CLONE ID no. 1047672
  misc_feature: Ceres CDNA ID no. 25447045
  misc_feature (88)..(183): Pfam Name: Ribosomal_S10 PFAM Desc: Ribosomal protein S10p/S20e
  misc_feature: Homolog of GI Number: 7578929 NR Desc: plastid ribosomal protein S10 precursor
  misc_feature: Homolog of GI Number: 56693625 NR Desc: 30S ribosomal protein S10
  misc_feature: Homolog of GI Number: 1276752 NR Desc: 30S ribosomal protein S10
  misc_feature: Homolog of GI Number: 45512460 NR Desc: COG0051: Ribosomal protein S10
  misc_feature: Homolog of GI Number: 23125142 NR Desc: COG0051: Ribosomal protein S10
  misc_feature: Homolog of GI Number: 16330912 NR Desc: 30S ribosomal protein S10
  misc_feature: Homolog of GI Number: 3603070 NR Desc: ribosomal protein S10
  misc_feature: Homolog of GI Number: 406274 NR Desc: ribosomal protein S10
  misc_feature: Homolog of GI Number: 62147900 NR Desc: 30S ribosomal protein s10
  misc_feature: Useful for making bigger plants
  misc_feature: Useful for making ornamental plants with modified flowers
  misc_feature: Useful for making plants with altered leaf shape eg curled leaves
  misc_feature: Useful for making plants with increased biomass
  misc_feature: Useful for making plants with increased biomass and foliage
  misc_feature: Useful for sterility
MAVSTSTSTLPLLFLHRSTASPNPSALSFASSLRASPLRSRASASAAPPAETLADDLPSDTPPVGEGSGIPMPSSIGEDGEELAPKQKIRIKLRSYWVPLIEDSCKQIIEAAKTTNAKTMGPVPLPTKKRIYCVLNSPHVHKDSRFHFEIRTHQRLIDIMYPTAQTIDSLMQLQLPAGVDVEVKL

SEQ ID NO: 5285 - DNA, 1310 bp, Triticum aestivum
  misc_feature: Ceres CLONE ID no. 1047714
  misc_feature: Ceres CDNA ID no. 25446958
  CDS (1)..(1101): REFERENCED BY SEQ ID NO: 5286
atgccgggtcttgtcccctccacctccacctcccacctcttctgccgcagcctcgccgccgccaggacgctctccgccgccgcaggacactcctcctcgtccacctcctcctcctccgtcaagatggcgcgctcggcgctggacgaggtgaccgacaccggcgccttcgaccggacgccgtccaccttccggagcttcgtgtcgagggacgcctccgcccgcttccccgcggtggcgggcaggtaccacctctacgtctcctacgcctgcccctgggcgtcccgctgcctcgcctacctcaagctcaagggcctcgaccacgccatcagcttctcgtctgtgaagcccatcttcgagcggaccagggagtccgacgaccacctggggtgggtgttcccggccagcgccggcgaggtgcccggcgccgaccccgaccccttcaacggcgccaagagcgtcagggacctgtacgagatcgcgagcaccaactacaccggcaaacccactgttcccgtgctgtgggacaagcagctgaagacggtggtgaacaacgagagcagcgagatcatccgcatgctcaactcggagttcaacggcatcgccgagaaccccgggctggacctcaacccggcgcacctccaggcctccatcgacgaggtcaacggcctcgtctacgacgccatcaacaacggcgtctacaagtgcggcttcgccaagaagcaggggccatacgacgaggccgtcacgacgctgtacgaggctctggacaagtgcgaggagatcctgggcaagcagcggtacatgtgcggcaaccagctcaccgaggccgacgtccgcctcttcgtcacgctcataagatttgacgaggtttacgccgttcacttcaagtgcaacaagaagctgctgagggagtaccccaacctgttcaactacaccaaggacatgtaccagatccccgggatcagcagcacggtgaacatggagcacatcaggaagcactactacgggagccacccctccatcaacccctacgggatcatcccccaaggccccaacgtcgactacaatgccccacatgacagggaaaggctgttcctgtaaaatgaagaaaaaaaacgccgtttgcttgtgtgcttgagggtgctgtgatttgctttgctttgcctgtgtccgaaggtgaaagtcttctttcgaataatgattcctgtctctgctgtgcgctgggagcagcatgcatgcgtgtcataaggctctctgcatccatgtcgttttcatccattaatcagatgagtggaaaaaaaaaaaaaaaa

SEQ ID NO: 5286 - protein, 325 aa, Triticum aestivum
  misc_feature: Ceres CLONE ID no. 1047714
  misc_feature: Ceres CDNA ID no. 25446958
  misc_feature (171)..(278): Pfam Name: GST_C PFAM Desc: Glutathione S
  misc_feature: Homolog of GI Number: 42566971 NR Desc: glutathione S
  misc_feature: Homolog of GI Number: 50252724 NR Desc: putative glutathione transferase
  misc_feature: Homolog of GI Number: 60466284 NR Desc: putative glutathione S
  misc_feature: Homolog of GI Number: 48782872 NR Desc: COG0435: Predicted glutathione S
  misc_feature: Homolog of GI Number: 55379032 NR Desc: glutathione S
  misc_feature: Homolog of GI Number: 22536964 NR Desc: glutathione S
  misc_feature: Homolog of GI Number: 15889536 NR Desc: AGR_C_4109p
  misc_feature: Homolog of GI Number: 50915828 NR Desc: glutathione S
  misc_feature: Homolog of GI Number: 33239702 NR Desc: Predicted glutathione S
MARSALDEVTDTGAFDRTPSTFRSFVSRDASARFPAVAGRYHLYVSYACPWASRCLAYLKLKGLDHAISFSSVKPIFERTRESDDHLGWVFPASAGEVPGADPDPFNGAKSVRDLYEIASTNYTGKPTVPVLWDKQLKTVVNNESSEIIRMLNSEFNGIAENPGLDLNPAHLQASIDEVNGLVYDAINNGVYKCGFAKKQGPYDEAVTTLYEALDKCEEILGKQRYMCGNQLTEADVRLFVTLIRFDEVYAVHFKCNKKLLREYPNLFNYTKDMYQIPGISSTVNMEHIRKHYYGSHPSINPYGIIPQGPNVDYNAPHDRERLFL

SEQ ID NO: 5287 - DNA, 789 bp, Triticum aestivum
  misc_feature: Ceres CLONE ID no. 1047715
  misc_feature: Ceres CDNA ID no. 29191525
  CDS (87)..(530): REFERENCED BY SEQ ID NO: 5288
cacaaactcagtgcactccgatccagcgcaaccgccgccaacaccacaccccgacaatccccgtcgccgaagaagtagcaagcaagatggccggaaggaagggcggcgacaggaagaaggcggtgacacgctccgtcaaggccgggctccagttccccgtcggccgcatcgggcggtacctcaagaagggccgatacgcccagcgcgtcggatccggcgcccccgtctacctcgccgctgtcctcgagtacctcgccgccgaggtcctggagctcgccggcaacgcggccaaggacaacaagaagacccgcatcatcccgcgccacctgctgctcgccgtccgcaacgaccaggagctcggcaagctgctcgccggcgtcaccatcgcccacggcggcgtcatccccaacatcaacgccgtgctgctccccaagaagtcccccgccgccgccgagaaggaggccaagtcgcccaagaagaagacctccaccaagtcccccaagaagaagaccgccgccaccaaggagtaaccgcccccatagcctggccagtgttgcttagatccatttctcatggactaagatgagaccctgtatgtaatgcctgctagtctgtagtgcccgtcagattcgtcgagcaaggatgatattgtatctgtgatttctgtgacaatggcgaaagatgcaatcatctcaatcttgtactacgaaattctctcttctagcatctgtaatttgagccatttatctaatcaagctgcgagaaattgaatcaaaaaaaaaaaaaaaa

SEQ ID NO: 5288 - protein, 147 aa, Triticum aestivum
  misc_feature: Ceres CLONE ID no. 1047715
  misc_feature: Ceres CDNA ID no. 29191525
  misc_feature (21)..(85): Pfam Name: CBFD_NFYB_HMF PFAM Desc: Histone
  misc_feature: Homolog of GI Number: 536894 NR Desc: protein H2A
  misc_feature: Homolog of GI Number: 121965 NR Desc: Histone H2A.1
  misc_feature: Homolog of GI Number: 1325968 NR Desc: histone H2A
  misc_feature: Homolog of GI Number: 536888 NR Desc: protein H2A
  misc_feature: Homolog of GI Number: 536890 NR Desc: protein H2A
  misc_feature: Homolog of GI Number: 121982 NR Desc: Histone H2A.2.2
  misc_feature: Homolog of GI Number: 121974 NR Desc: Histone H2A.2.1
  misc_feature: Homolog of GI Number: 34914498 NR Desc: putative histone H2A
  misc_feature: Homolog of GI Number: 50931693 NR Desc: putative histone H2A
  misc_feature: Homolog of GI Number: 122003 NR Desc: Histone H2A
MAGRKGGDRKKAVTRSVKAGLQFPVGRIGRYLKKGRYAQRVGSGAPVYLAAVLEYLAAEVLELAGNAAKDNKKTRIIPRHLLLAVRNDQELGKLLAGVTIAHGGVIPNINAVLLPKKSPAAAEKEAKSPKKKTSTKSPKKKTAATKE

SEQ ID NO: 5289 - DNA, 730 bp, Triticum aestivum
  misc_feature: Ceres CLONE ID no. 1047744
  misc_feature: Ceres CDNA ID no. 24766057
  CDS (66)..(311): REFERENCED BY SEQ ID NO: 5290
accaatccgaatctccgagaaagattcctttgtttcaagaactgagtaaacaaaagaaaaaaaaaatggcatcatggaagaaaacaatagcaacaccattcaagaaggcagcaacactctttaaccaaccgcagcaatcgccaagaaagggttgcggcggtggaaaaatggatgccaaagcgagggaagagcacgagagaaggatggtaagagagcttcaaggagaagtcatggcttgtggatacgacgatgttctcgtcatgtggtctattctcgacaaatctaactcctccaataacctcagttcttaaccccaaaccagacaccaaacaaatggttttcttatctgcttttgtacatatatatcaaaagtggtagcgatcacctccttctcctcctcttcttcctatagttaccctctcatgtctctttgtaaggtctagtgaactttttttcgacgaattatcgtcgagaatttagatgttgctctttcctcttttgataacccacgtgattctgttactgtgggatttttttaaaagaggaaaaaatctttcttgagttttatatcatctgcatgatatgattaggattatatttgtttaagaactcaaaaactagttctccataatgtaaaagccatgtgtattgaccgaagttgcacatgagtcaaattattaatcagaagaaataaaataattatgatattattctaaaaaaaaaaaaaaaa

SEQ ID NO: 5290 - protein, 81 aa, Triticum aestivum
  misc_feature: Ceres CLONE ID no. 1047744
  misc_feature: Ceres CDNA ID no. 24766057
MASWKKTIATPFKKAATLFNQPQQSPRKGCGGGKMDAKAREEHERRMVRELQGEVMACGYDDVLVMWSILDKSNSSNNLSS

SEQ ID NO: 5291 - DNA, 620 bp, Triticum aestivum
  misc_feature: Ceres CLONE ID no. 1047783
  misc_feature: Ceres CDNA ID no. 24766013
  CDS (64)..(372): REFERENCED BY SEQ ID NO: 5292
acagttagttcacgcagttgaagttgcaagaagcagcttgtgtgcattcctctgtagtgtgccatggctcggctctaccagctcaccgtcctctccgtcttcttcttcctgctcctcaccggcctcgtggctgccgatccgtctggagggaagaaggtcgggaagaaggtgatcatgacggtgcggtatccggctgccgactcgggggagaaggtcacgatctcgacgcacctcatcggcgagggcggggtcggcgacagccacttccatctcgacggcgacgactacgaacccatcattttcgccacgaaaaaccttgtgtcggccctggagaaggtaggagatccgcaggcctctctatccgagctgtagaagcacgtacgtgacgtgagtgagctttcacggggctcactgcatgctcagtggtggttgcatgcccagtcagtggagattggtgatggagctcctcttttctttcgtctctgcgataatacattaggcactttttattttgttgttgtgctcattcggggagcgtatcgggtggcctactatttaggctatgtatcttggattccgtcatctatttgtttttcttctgctcaaaaaaaaaaaaaaaa

SEQ ID NO: 5292 - protein, 102 aa, Triticum aestivum
  misc_feature: Ceres CLONE ID no. 1047783
  misc_feature: Ceres CDNA ID no. 24766013
MARLYQLTVLSVFFFLLLTGLVAADPSGGKKVGKKVIMTVRYPAADSGEKVTISTHLIGEGGVGDSHFHLDGDDYEPIIFATKNLVSALEKVGDPQASLSEL

SEQ ID NO: 5293 - DNA, 891 bp, Triticum aestivum
  misc_feature: Ceres CLONE ID no. 1047841
  misc_feature: Ceres CDNA ID no. 25445951
  CDS (115)..(654): REFERENCED BY SEQ ID NO: 5294
agcaagcagctgatccgagttaaccattagccaaaagtgatcttgcttttccatttcccaagagatctcagttcgtgtctgtcctccagtccagtgtttgtttgagcagcagccatggcctccaaccaggacaaggcaagctaccgcgccggcgaggccaaggcccacaccgaggagaaggccggacaggtgaccggcgcgaccaaggacaaggcgtgcgaggccaaggaccgggcgtgtgacgcgacggggaaggggcagggcgccgtggaggccacgaagcagaaggccggcgaggcagggcagaagacgtccgagacggcccaggccgccaaggaccgggccgccgagggcaaggaccagaccggcagctacctcggccgcacggccgaggcggccaagcagaaggcctccgaggcgacggggtacacgcaggacagggcctccgacgcggcgcagtacaccaaggactccgccgtcgccggcaaggacaagaccggcagcgtcctcagccaggccggcgagcaagtgaagaacgcggtggtcggcgcgaaagacgcggtggcgagcacgctggggatggggggagacagcacctccagcgaaaccaaggacgcgagcaccaccgagaccatcacaaagagccgccactagatatatacctgtcgcggttgcataatgctttctttccttttagttcctctggagctccacattcctgtggtgtgtccgagtccgtatgtcgacgtcgggcgagaatgtctgactgacgagagatgtatcttggtgttcagagttctcgttttaagttccacaaatggtgtaataataacaataataataaagtactccgtactgtaagtaatttcgtccttaaaaaaaaaaaaaaaa

SEQ ID NO: 5294 - protein, 179 aa, Triticum aestivum
  misc_feature: Ceres CLONE ID no. 1047841
  misc_feature: Ceres CDNA ID no. 25445951
  misc_feature (10)..(71): Pfam Name: LEA_4 PFAM Desc: Late embryogenesis abundant protein
  misc_feature (132)..(158): Pfam Name: CAP160 PFAM Desc: CAP160 repeat
  misc_feature: Homolog of GI Number: 48596907 NR Desc: LEA protein
  misc_feature: Homolog of GI Number: 4929080 NR Desc: ABA
  misc_feature: Homolog of GI Number: 55908886 NR Desc: putative group 3 LEA protein
  misc_feature: Homolog of GI Number: 4105441 NR Desc: group 3 LEA protein
  misc_feature: Homolog of GI Number: 1235567 NR Desc: group 3 LEA
  misc_feature: Homolog of GI Number: 33342178 NR Desc: ABA inducible protein
  misc_feature: Homolog of GI Number: 25989709 NR Desc: LEA2 protein
  misc_feature: Homolog of GI Number: 25989707 NR Desc: LEA3 protein
  misc_feature: Homolog of GI Number: 25989705 NR Desc: LEA1 protein
  misc_feature: Homolog of GI Number: 29247944 NR Desc: GLP_26_54603_52153
MASNQDKASYRAGEAKAHTEEKAGQVTGATKDKACEAKDRACDATGKGQGAVEATKQKAGEAGQKTSETAQAAKDRAAEGKDQTGSYLGRTAEAAKQKASEATGYTQDRASDAAQYTKDSAVAGKDKTGSVLSQAGEQVKNAVVGAKDAVASTLGMGGDSTSSETKDASTTETITKSRH

SEQ ID NO: 5295 - DNA, 841 bp, Triticum aestivum
  misc_feature: Ceres CLONE ID no. 1047859
  misc_feature: Ceres CDNA ID no. 25402643
  CDS (107)..(616): REFERENCED BY SEQ ID NO: 5296
gcaatactccccacccactttgtccctctcctccctccccagtcgcagtcccccccggcgctcgcacgcgcccgccgatcccggatccccgatccccccctgcgcgatggcggccagcctgtggcgcgcggtgatgggctcctcctcctccccctcgtcgggcggcggcgacgacccggcggcgggcggcgtggagttctggcacggcgcggagcgcgccgggtggctgaccaagcagggcgagtacatcaagacgtggcggcggcgctggttcgtgctcaagcagggccggctcttctggttcaaggacgccgccgtcacgcgcggctccgtgccccgcgggatcatccccgtctcctcctgcctcaccgtcaagggcgccgaggacgtgctcaaccgccagttcgccttcgagctctccaccccggccgagaccatgtacttcatcgccgacgccgagaaggagaaggaggagtggatcaactccatcggccggtccatcgtccagcactcccgctccgtcaccgacgctgaggtcgttgactacgacagccgcccccagcccccgccgcagccgcagcccaagaagagcgaggccagcgagctgtcagagtaagatcgcggtgaactccgtcgccctctctcgatatgactctgttgtatcagcttatgtgattgtgaattcgtgtttttgtttcttatttattgactgtattgtgtatattattgactgctgtctgggaataattgggtttcagtgtatagctcattgacactttggatcgatcacatgttataatttccaaaaattggtggtcgtctccgaaaaaaaaaaaaaaaa

SEQ ID NO: 5296 - protein, 169 aa, Triticum aestivum
  misc_feature: Ceres CLONE ID no. 1047859
  misc_feature: Ceres CDNA ID no. 25402643
  misc_feature (35)..(133): Pfam Name: PH PFAM Desc: PH domain
  misc_feature: Homolog of GI Number: 56785356 NR Desc: pleckstrin homology
  misc_feature: Homolog of GI Number: 21536721 NR Desc: AtPH1
  misc_feature: Homolog of GI Number: 9759096 NR Desc: AtPH1
  misc_feature: Homolog of GI Number: 56785355 NR Desc: pleckstrin homology
  misc_feature: Homolog of GI Number: 46227285 NR Desc: AtPH1 like protein with a pleckstrin homology
  misc_feature: Homolog of GI Number: 12018147 NR Desc: vegetative cell wall protein gp1
  misc_feature: Homolog of GI Number: 7268661 NR Desc: extensin
  misc_feature: Homolog of GI Number: 41400384 NR Desc: plus agglutinin
  misc_feature: Homolog of GI Number: 60678627 NR Desc: plus agglutinin
MAASLWRAVMGSSSSPSSGGGDDPAAGGVEFWHGAERAGWLTKQGEYIKTWRRRWFVLKQGRLFWFKDAAVTRGSVPRGIIPVSSCLTVKGAEDVLNRQFAFELSTPAETMYFIADAEKEKEEWINSIGRSIVQHSRSVTDAEVVDYDSRPQPPPQPQPKKSEASELSE

SEQ ID NO: 5297 - DNA, 1033 bp, Triticum aestivum
  misc_feature: Ceres CLONE ID no. 1047932
  misc_feature: Ceres CDNA ID no. 24766014
  CDS (118)..(774): REFERENCED BY SEQ ID NO: 5298
gtcaacaattcatcgttgagacacgactcgaggcaccaaaacgccacacttcttctcgaaacatccatccagcctcgtcgccggcgacctcacccgccgccgcagccgccgccgaagatgccggtcagggtggtcgacaccgccaccccttcctcgcagtcctcatcaggacaagaggcaaatgctgtgcagccgtctcctcctagctgctcactcttaactgctggaagatgttttgcaggaactcagaatgtttcaagtttacaaaaagatgaagcatggaaagtcaatgttcgtatccatggttgtgatattgaacagggttatttatgtggaacaatggaggcacttaatgttcccttagccgacacacctgtggtgacattctgggagggggagatagtagatgctaaaaattataccttttttactggcaagtgggaggcatcagcagaggatgatgtaagacactggtccaagttcccatcatttacccctcttctgagtcagattgaggcagatggtggcaagtctgtggaccttagcaactatccttatatatttatgagatggaaagagcagtactttgttaatgtgggagtggactgcgggttgaccatagctggtttctattacgtctgcttttcttgtagcgatggatccattagtggcttttattacgacccaaacagcagtccatttcagaagcttgaattgaagtgcaccaacgagaaacaatctgggttcaccttttcttcgtatgagctgcagtgacatgcatgacgctattaattgaagtggcagagattaacgggcgaacttcctgtgcttgccaatatgaacatatactgtgtgtgtattgaacccgtagttcctgatgttcctttgaaatagttgagatgttatgtatgtatggttgtgccagaccaaacaattatgtaacttatccttttgcaatctcagtattctgggaaaaaagtatcaatttgtttattttatcgaaagttcgcctgtgttaaaaaaaaaaaaaaaa

SEQ ID NO: 5298 - protein, 218 aa, Triticum aestivum
  misc_feature: Ceres CLONE ID no. 1047932
  misc_feature: Ceres CDNA ID no. 24766014
  misc_feature: Homolog of GI Number: 34895748 NR Desc: P0024G09.20
  misc_feature: Homolog of GI Number: 38014208 NR Desc: C17orf39 protein
  misc_feature: Homolog of GI Number: 76644084 NR Desc:  similar to Protein C17orf39 homolog
  misc_feature: Homolog of GI Number: 34870809 NR Desc: similar to RIKEN cDNA 4933439F18
  misc_feature: Homolog of GI Number: 34328469 NR Desc: RIKEN cDNA 4933439F18
  misc_feature: Homolog of GI Number: 31203721 NR Desc: ENSANGP00000015573
  misc_feature: Homolog of GI Number: 51012687 NR Desc: YGR066C
  misc_feature: Homolog of GI Number: 71064051 NR Desc: Ygr066cp
  misc_feature: Homolog of GI Number: 45187543 NR Desc: ADL330Wp
MPVRVVDTATPSSQSSSGQEANAVQPSPPSCSLLTAGRCFAGTQNVSSLQKDEAWKVNVRIHGCDIEQGYLCGTMEALNVPLADTPVVTFWEGEIVDAKNYTFFTGKWEASAEDDVRHWSKFPSFTPLLSQIEADGGKSVDLSNYPYIFMRWKEQYFVNVGVDCGLTIAGFYYVCFSCSDGSISGFYYDPNSSPFQKLELKCTNEKQSGFTFSSYELQ

SEQ ID NO: 5299 - DNA, 601 bp, Triticum aestivum
  misc_feature: Ceres CLONE ID no. 1047941
  misc_feature: Ceres CDNA ID no. 40351573
  CDS (183)..(389): REFERENCED BY SEQ ID NO: 5300
acttccatccaggcagttcacgcttttttgcagaaaagtttataaaagaagccatccgcgaaacccacccgcacaaatccaaacagcattcgcccgtcggcatccccttccccttcccctcacgcgcgcgacctcgtcgtcgtcgtcgtctcggagatctcgccttcccgccggcagcagccatggacgccgtcgactccgtggaccccctccgcgagttcgccaaggacagcgtccgcctcgtcaagcgctgccacaagcccgaccgcaaggagttcaccaaggtggcggcgcggacggcgatcgggttcgtcgtcatggggttcgtcggcttcttcgtcaagctcatcttcatccccatcaacaacatcatcgtcggctccggctaggttggaggacgggatgacaggatgcggggatagtgtgatgccggcagttgagcctgcggtgtgtcgaagtaggcgcccaaagtttgttctgaagttgttgttaaagacctgatttgtgagaaattgtcaccagcttcatcctcgtaatgagtatagatcttgaaacagcgagccataaagtttatgttttgtcatgaaaaaaaaaaaaaaaa

SEQ ID NO: 5300 - protein, 68 aa, Triticum aestivum
  misc_feature: Ceres CLONE ID no. 1047941
  misc_feature: Ceres CDNA ID no. 40351573
  misc_feature (9)..(65): Pfam Name: SecE PFAM Desc: SecE/Sec61
MDAVDSVDPLREFAKDSVRLVKRCHKPDRKEFTKVAARTAIGFVVMGFVGFFVKLIFIPINNIIVGSG

SEQ ID NO: 5301 - DNA, 881 bp, Triticum aestivum
  misc_feature: Ceres CLONE ID no. 1047949
  misc_feature: Ceres CDNA ID no. 25446489
  CDS (99)..(671): REFERENCED BY SEQ ID NO: 5302
ccatccaccgctcgaactgtcttgcgaaaatttcacgcgcgctcagcacaagtagcagtttcagtttcagtttcagagctccgcttcagttagccaccatgcctgccctcgccaagcccgccgccgcggcaccgaagccgaagccctccgccgccaagccgaagaaggatgccgccggcccttcccacccggcctacttcgagatgatcaaggaggcgatcgcggcgctcaaggacaggaccgggtccagctcggtcgccatcggcaagtacatcgaggagaagcacggcaagtccctcccggccaacttcaataagatgctctccgtccagctccggtcgtccgccgccaagggcaagctcgtcaaggtcaaggcctcctacaagctctcagacgccgccaagaaggacgcgcccaagcccaagcccaaggccaagcccgccgcccccaaggccgcggcgaagcccgccaaggacgccgccaagcccaagaagaaggcggccgtgaagcccaagaaggccgccgccgccgctggcacgaagcgcaaggcgcccgagaagaagacgctggtcgccaaggccaagaagtcgcccgcggccaaggccaaggcgaagccgaagaccgtccggtccccggccgccaagaagggccgcaaggtcgccgccgcttgatctgttccgatggcacgatgggttttagttgttcttggtgtgtttgtcttcagggtatgtacaaaatggatgcctcatcctccctgatttaggtctcgattctgctaggcagtttctatgtatcgtgtgtggtgtttaattatatgaaattgctaggtttcgggagatgaaatgaacttgcagatttattactcaaaaaaaaaaaaaaaa

SEQ ID NO: 5302 - protein, 190 aa, Triticum aestivum
  misc_feature: Ceres CLONE ID no. 1047949
  misc_feature: Ceres CDNA ID no. 25446489
  misc_feature (29)..(99): Pfam Name: Linker_histone PFAM Desc: linker histone H1 and H5 family
  misc_feature: Homolog of GI Number: 22135471 NR Desc: histone H1
  misc_feature: Homolog of GI Number: 50921921 NR Desc: OSJNBb0018J12.6
  misc_feature: Homolog of GI Number: 5230788 NR Desc: histone H1 WH1A.3
  misc_feature: Homolog of GI Number: 14916992 NR Desc: Histone H1
  misc_feature: Homolog of GI Number: 5230781 NR Desc: histone H1 WH1A.1
  misc_feature: Homolog of GI Number: 5230790 NR Desc: histone H1 WH1A.4
  misc_feature: Homolog of GI Number: 2623960 NR Desc: histone H1
  misc_feature: Homolog of GI Number: 7439656 NR Desc: histone H1
  misc_feature: Homolog of GI Number: 5230785 NR Desc: histone H1 WH1B.1
  misc_feature: Homolog of GI Number: 11558848 NR Desc: histone H1
MPALAKPAAAAPKPKPSAAKPKKDAAGPSHPAYFEMIKEAIAALKDRTGSSSVAIGKYIEEKHGKSLPANFNKMLSVQLRSSAAKGKLVKVKASYKLSDAAKKDAPKPKPKAKPAAPKAAAKPAKDAAKPKKKAAVKPKKAAAAAGTKRKAPEKKTLVAKAKKSPAAKAKAKPKTVRSPAAKKGRKVAAA

SEQ ID NO: 5303 - DNA, 1195 bp, Triticum aestivum
  misc_feature: Ceres CLONE ID no. 1047963
  misc_feature: Ceres CDNA ID no. 40351574
  CDS (85)..(945): REFERENCED BY SEQ ID NO: 5304
aaaacacaccacacaccacagcaccacccgccacctcaacgcacgcaaaggccgaggaggacaagctaggaggagcgagcagccatggcttcgtcggtggccgccgcggcgagcacgttcctcgggacccggctggcggacccggcgccgcagaacgggcgcatcgtggcgcggttcggcttcggcaagaagaaggccccgccgaagaaggccaaggcgcccccgaccaccgaccggccgctgtggttccccggcgcgcaggcgcccgagtacctcgacggcacgctcgtcggcgactacggcttcgaccccttcggcctcgggaagcccgcggagtacctgcagtacgacgtggactccctggaccagaacctggcccagaacctggcgggcgagatcatcggcacccggttcgaggacgccgacgtcaagtccaccccgttccagccctacgccgaggtgttcggcctccagaggttccgcgagtgcgagctcatccacggccgctgggccatgctcgccaccctcggcgccctcaccgtcgagtggctcaccggcgtcacctggcaggacgccggcaaggtggagctggtggacgggtcgtcgtacctggggcagccgctgccgttcacgctcaccacgttgatctggatcgaggtgctggtgatcgggtacatcgagttccagcgcaacgcggagctggacccggagaggaggctctaccccggtggctcctacttcgacccgctgggactcgcggcggacccggtgaagaaggagactctgcagctggcggagatcaagcacgcccgcctcgccatggtcgccttcctcggcttcgccgtgcaggccgccgccaccggcaaggggccactcaacaactgggccacccacctcagcgacccgctgcacaccaccatcttcgacaccttcggctcctcttaagtggtcggtggtcgagcaatttctgtcagctcagctgcaaaatggacgaacgcgcgtcagtgtacgaacgtgctttggttttgtatgacgagtgatggatgagagggtatcgcaaagatcctttgttgattaatgcaggtctgatcacataggagagctgctgggacttggtgatttgtaaaatatgaaccaatggtgacttaatgcatccacttgtacatcaaaaaaaaaaagaaaaaaaaaaaaaaaa

SEQ ID NO: 5304 - protein, 286 aa, Triticum aestivum
  misc_feature: Ceres CLONE ID no. 1047963
  misc_feature: Ceres CDNA ID no. 40351574
  misc_feature: null
  misc_feature: Useful for making plants with modulated biomass
  misc_feature: Useful for making plants with modulated drought sensitivity
  misc_feature: Useful for making plants with modulated phosphate use efficiency
  misc_feature (59)..(257): Pfam Name: Chloroa_b PFAM Desc: Chlorophyll A
MASSVAAAASTFLGTRLADPAPQNGRIVARFGFGKKKAPPKKAKAPPTTDRPLWFPGAQAPEYLDGTLVGDYGFDPFGLGKPAEYLQYDVDSLDQNLAQNLAGEIIGTRFEDADVKSTPFQPYAEVFGLQRFRECELIHGRWAMLATLGALTVEWLTGVTWQDAGKVELVDGSSYLGQPLPFTLTTLIWIEVLVIGYIEFQRNAELDPERRLYPGGSYFDPLGLAADPVKKETLQLAEIKHARLAMVAFLGFAVQAAATGKGPLNNWATHLSDPLHTTIFDTFGSS

SEQ ID NO: 5305 - DNA, 797 bp, Triticum aestivum
  misc_feature: Ceres CLONE ID no. 1048066
  misc_feature: Ceres CDNA ID no. 40351575
  CDS (88)..(570): REFERENCED BY SEQ ID NO: 5306
acttataaaaaagacaattagggatctccttatctcctccacttcatctcgcttctctcaaatctcctctcgcctttcctcacaaacatgtcgacgaagaagatcgtgttgaagagctccgatggcgagtctttcgaggtcgacgaggccgtggctctcgagtctcagaccatagcccacatggtcgaagacgactgcgtcgacaacggagtcccgcttcccaacgtcacgagcaagatcctcgccaaggtgattgagtactgcaagaagcacgtcgacgctgctgcttccaagagcgaggccgtcgatggcggtggctcctccgacgatgacctcaaggcttgggatgctgagtttatgaagatcgatcaagctaccctctttgagctcatcctggctgctaattatctgaacatcaagaaccttctcgacctgacatgccagacagtggctgacatgatcaagggcaagactccggaggagattcgcacgaccttcaacatcaagaacgacttttcaccagaggaagaagaggaggtgcgcagggagaaccaatgggcttttgaatgatgcgtgagagagtgggagagatcgttgaagcaaaccaaccagtttcttgctttatgttgttgccttttttttttttatctctgtggatgatcagtgtggatgatgatgactttgtttctctgctattttccttttgaacttcatgactatcaagtaccaatgttggatttgtgcttttcatgttttaaagattgaggttggtttgccttgcaaaaaaaaaaaaaaaa

SEQ ID NO: 5306 - protein, 160 aa, Triticum aestivum; identical to SEQ ID NO: 5012
  misc_feature: Ceres CLONE ID no. 1048066
  misc_feature: Ceres CDNA ID no. 40351575
  misc_feature (4)..(64): Pfam Name: Skp1_POZ PFAM Desc: Skp1 family
  misc_feature (83)..(160): Pfam Name: Skp1 PFAM Desc: Skp1 family

SEQ ID NO: 5307 - DNA, 1146 bp, Triticum aestivum
  misc_feature: Ceres CLONE ID no. 1048067
  misc_feature: Ceres CDNA ID no. 25445648
  CDS (1)..(789): REFERENCED BY SEQ ID NO: 5308
gaaccccgagccgagccgagcacaccaaaaaggagaggaggaggaagaagaagccagagagtcgcgcggctagagagaaagactcgagcttttctcgctttcgatcggctccatggcgaggtggacggtgcagccgcgcgggattatcctgctggtggcgctcctcgcggtgaccgtggcggacgacagcggcgagaagtgcacgggcgggtgcgggaacccgtgcggcatcccgtgcacctactccagcccaccgccgccggagccggcgctgcccccgcccgtctactacccgccgccggcgcccgtgtactcgccgccgccgcccgaggccgtctacccgccgcccacgcccgactgcccgccgccccccaccgaggggtacacgcccgcgccctacacccccacgccgtccacgccgtccggcgggtacaccccggcgacgccctccggcgggtacaaccccaccccgtccgagggcgggtacaaccccacgccgtccgggtggttcacgccgcccaacttgccgtcgtacctcaccccgccggggccgctctacccgcaggaccccgggttccggcccaacgacgcgccgggcctctccgcggcgtggggcgcggccgcgatcgctgccgtcgcggtcgccggagcactggccttgtgatcgccaccgaccgacgcaccgatcgcgccgtgccaaggtacacgcgcgtgcgcgtcgccggaaggcatggggctagcagctgcaccgttcgaccgatcgatccatggagcaggccaccgtggtgaccaggcgcgcgaagagcatgcatggccggcgtacgtttcaattgatttccgttgattccgtgttgataataagtaaggttataagtaaggttaggggaagaagcaggtcgatcgatgtcggtgttaataatttttttgagtttttcattggtgctgtgctcatgttcatcctgctgctcatcgcgaggccggcagatgaaccgttcttgtcatgtacgtaagttgggtctcgttttccactttggtgagtcaatcataggaaggagggaaggagaaagatggatgttcatcgatcaggctatgtgataccgatacacattatatatgtctctgattactcgaaaaaaaaaaaaaaaa

SEQ ID NO: 5308 - protein, 183 aa, Triticum aestivum
  misc_feature: Ceres CLONE ID no. 1048067
  misc_feature: Ceres CDNA ID no. 25445648
  misc_feature: Homolog of GI Number: 34894208 NR Desc: P0439B06.25
  misc_feature: Homolog of GI Number: 5821145 NR Desc: RNA binding protein
  misc_feature: Homolog of GI Number: 47124032 NR Desc: SRRM2 protein
  misc_feature: Homolog of GI Number: 5821143 NR Desc: RNA binding protein
  misc_feature: Homolog of GI Number: 6649242 NR Desc: splicing coactivator subunit SRm300
  misc_feature: Homolog of GI Number: 19923466 NR Desc: splicing coactivator subunit SRm300
  misc_feature: Homolog of GI Number: 71891780 NR Desc: KIAA0324 protein
  misc_feature: Homolog of GI Number: 12248386 NR Desc: extensin 4
  misc_feature: Homolog of GI Number: 4584539 NR Desc: extensin
  misc_feature: Homolog of GI Number: 4033606 NR Desc: Extensin
MARWTVQPRGIILLVALLAVTVADDSGEKCTGGCGNPCGIPCTYSSPPPPEPALPPPVYYPPPAPVYSPPPPEAVYPPPTPDCPPPPTEGYTPAPYTPTPSTPSGGYTPATPSGGYNPTPSEGGYNPTPSGWFTPPNLPSYLTPPGPLYPQDPGFRPNDAPGLSAAWGAAAIAAVAVAGALAL

SEQ ID NO: 5309 - DNA, 438 bp, Triticum aestivum
  misc_feature: Ceres CLONE ID no. 1048110
  misc_feature: Ceres CDNA ID no. 40351576
  CDS (46)..(210): REFERENCED BY SEQ ID NO: 5310
accgacaatttctcgatcaaaagtttcgatttttagcaagcagcgatggcgaagagtgtgatctcaatggaccagctgaaagctttgtggcactctgaggtccacgatgaacgaaagtgggctgctaacatgaaacttgtaagagcacttggggtgtttgcaggaggagtcttcctcatgcgcaactttggtgatctcatggctgtctgaagaagaaacctgataactatggaggagagcatctcttagtttttcactttctcagttttttgtatttttttttcaatgtctctctatagaataaggaatggttttagtttctgatttcaccagtgtgatatcaaaatatctcagttgaagttttgttattgttttcagtgactgtgattcttatgttatgctaaagagtttacttttcatgcaaaaaaaaaaaaaaaa

SEQ ID NO: 5310 - protein, 54 aa, Triticum aestivum
  misc_feature: Ceres CLONE ID no. 1048110
  misc_feature: Ceres CDNA ID no. 40351576
MAKSVISMDQLKALWHSEVHDERKWAANMKLVRALGVFAGGVFLMRNFGDLMAV

SEQ ID NO: 5311 - DNA, 1078 bp, Triticum aestivum
  misc_feature: Ceres CLONE ID no. 1048284
  misc_feature: Ceres CDNA ID no. 25445502
  CDS (99)..(914): REFERENCED BY SEQ ID NO: 5312
catcacaacacaaacaggagtagtactactactccagtctccggcgagtacataccctacaggtccaacaaggttcatagacgacctgtagcgccaatatggctggcgtctccagcaatgccattgcctttgtggcactcctctccgtgctcttcacgggcgtccgttctgcggtcaactacgacaccgccgtagctagatcctacaactccggctggctccccgccaaggccacctggtacggggcgcccaacggcgccggccccgacgacaacggtggtgcttgcggcttcaagaacgtgaaccagtacccaatctcctccatgggggcatgcggtaacgagcctattttcgccggcggcgagggctgtggcatgtgctacgagattaagtgcgactactccaacaacccttcctgctccggccagccgaggaggatcgtcatcaccgacatgaactactaccccgtggccaggtaccacctcgacctcagtggcaccgcattcggctccatggccaggtacggcctcaacgaccggctccgccacgccggcatcatcgacatgcagttcaggagggtgccctgcaacttcccgggtatgaaggtgaccttccacgtccagcgtgtctccaaccccaactatctcgcggtgctcgtggagtacgcgaacgtggacgggaccgtggtgcggatggagctcatgcagaccatcaacggccgcccgacgggctactatcaggatatgcgccgctcgtggggctccatctggcggatggacaccaaccgcccgctgcaggggccattcgccatccgcatcaccagcgataccggaaagacgctggtggccaacaatgccatcccggcttattggcagccggaccatgcctactggtccaacctccagttctattgattggcttacgtgcgtacttctccgatcgatgccgagttaatcattttggtgtcatcagcatgatccctatttgtgaggatctaatggttttaagttattgccaggcactatctactttcaagcgttaacaagcgtgttaactgtcgccaaaaaaaaaaaaaaaa

SEQ ID NO: 5312 - protein, 271 aa, Triticum aestivum
  misc_feature: Ceres CLONE ID no. 1048284
  misc_feature: Ceres CDNA ID no. 25445502
  misc_feature (170)..(255): Pfam Name: Pollen_allerg_1 PFAM Desc: Pollen allergen
  misc_feature (77)..(158): Pfam Name: DPBB_1 PFAM Desc: Rare lipoprotein A
  misc_feature: Homolog of GI Number: 51242717 NR Desc: beta
  misc_feature: Homolog of GI Number: 44894812 NR Desc: expansin EXPB10
  misc_feature: Homolog of GI Number: 4099919 NR Desc: pollen allergen homolog
  misc_feature: Homolog of GI Number: 44894808 NR Desc: expansin EXPB8
  misc_feature: Homolog of GI Number: 51242715 NR Desc: beta
  misc_feature: Homolog of GI Number: 37536756 NR Desc: beta
  misc_feature: Homolog of GI Number: 37536758 NR Desc: beta
  misc_feature: Homolog of GI Number: 2224915 NR Desc: beta
  misc_feature: Homolog of GI Number: 14193771 NR Desc: beta
  misc_feature: Homolog of GI Number: 51242713 NR Desc: beta
  misc_feature: Useful for making plants with increased biomass
MAGVSSNAIAFVALLSVLFTGVRSAVNYDTAVARSYNSGWLPAKATWYGAPNGAGPDDNGGACGFKNVNQYPISSMGACGNEPIFAGGEGCGMCYEIKCDYSNNPSCSGQPRRIVITDMNYYPVARYHLDLSGTAFGSMARYGLNDRLRHAGIIDMQFRRVPCNFPGMKVTFHVQRVSNPNYLAVLVEYANVDGTVVRMELMQTINGRPTGYYQDMRRSWGSIWRMDTNRPLQGPFAIRITSDTGKTLVANNAIPAYWQPDHAYWSNLQFY

SEQ ID NO: 5313 - DNA, 853 bp, Triticum aestivum
  misc_feature: Ceres CLONE ID no. 1048590
  misc_feature: Ceres CDNA ID no. 25892804
  CDS (3)..(629): REFERENCED BY SEQ ID NO: 5314
ctcctccgctgatcctcccaagtcccaaacccgcgccccgaatctgctgccgccgctgcgtccgtgtcggctttgccccgccggtgaagatgctgtcgaggatctcccgccttggcgtccacgccctgaaccgggcgaggctaggtcaaaagtcagtaacttcaaggaatcaggaagaacccatcagagcctgtatgaactatgtgggtaatcattctctatgttccgccacggaagctaaagtcagtgacaggagcgaacagccgaaagctaagatatctgtgacatttgttgataaggatggcgatgaaacggttatcaatgttcctattgggatgtcaatgctggaagctgctcatgagaatgacatagaacttgaaggagcatgtgagggctctcttgcatgttctacctgtcatgtgattgtaacggacgtagactactataacaaattggaagatcctgaagatgaggaaaacgatatgctggaccttgcttttgggcttacagaaacatctcgccttggttgccaagtaattgcaagccctgaacttgatggcataagattagcactgccagcagctaccagaaattttgctgttgatgggcatgtcccgaaaccacactgactaagcactgggttggtggcagtactgcattcttctctcacaagtactctctccgttctgaattacttgtcttggatttgtctagatacggatgtatctagacggagggagtagttgatttttctcgttgacatttccgatgtttacagatgctgaaacgttgtttttgtcccccactgcatttgagaaggaacgaaagtgaccgatcaaaaaaaaaaaaaaaa

SEQ ID NO: 5314 - protein, 179 aa, Triticum aestivum
  misc_feature: Ceres CLONE ID no. 1048590
  misc_feature: Ceres CDNA ID no. 25892804
  misc_feature (68)..(153): Pfam Name: Fer2 PFAM Desc: 2Fe
  misc_feature: Homolog of GI Number: 51091333 NR Desc: putative ferredoxin precursor
  misc_feature: Homolog of GI Number: 50933753 NR Desc: putative ferredoxin
  misc_feature: Homolog of GI Number: 28192429 NR Desc: adrenodoxin
  misc_feature: Homolog of GI Number: 37653251 NR Desc: ferredoxin precursor
  misc_feature: Homolog of GI Number: 17481347 NR Desc: MFDX2
  misc_feature: Homolog of GI Number: 21553832 NR Desc: MFDX2 precursor
  misc_feature: Homolog of GI Number: 50933755 NR Desc: putative ferredoxin
  misc_feature: Homolog of GI Number: 28262177 NR Desc: ferredoxin
  misc_feature: Homolog of GI Number: 13235441 NR Desc: adrenodoxin precursor
  misc_feature: Homolog of GI Number: 65305539 NR Desc: adrenodoxin
  misc_feature: Useful for making taller plants and plants with longer inflorescences
MLSRISRLGVHALNRARLGQKSVTSRNQEEPIRACMNYVGNHSLCSATEAKVSDRSEQPKAKISVTFVDKDGDETVINVPIGMSMLEAAHENDIELEGACEGSLACSTCHVIVTDVDYYNKLEDPEDEENDMLDLAFGLTETSRLGCQVIASPELDGIRLALPAATRNFAVDGHVPKPH

SEQ ID NO: 5315 - DNA, 801 bp, Triticum aestivum
  misc_feature: Ceres CLONE ID no. 1048632
  misc_feature: Ceres CDNA ID no. 24766015
  CDS (77)..(514): REFERENCED BY SEQ ID NO: 5316
acaccacaccatcttcatcccccctcacatcccacacctccacacgttcgaaccaccaccaccagaagcagcacccatggcacccaaggcggcagagaagaagctggcgccggccacggcagagaagacgacggcggggaagaagcccaaggcggagaagcgggcgccggcgaccaaggaggccggcggcgagggcaagacgaggggccggaagaagggcagcaaggccaagaagggcgtggagacgtacaagatctacatcttcaaggtgctcaagcaggtgcacccggacgtcggcatctcctccaaggccatgtccatcatgaactccttcatcaacgacatcttcgagaagctcgccggggagtccgccaagctggcgaggtacaacaagaagcccaccatcacgtcccgggagatccagacctccgtccgcctcgtcctccccggggagctcgccaagcacgccgtctccgagggcaccaaggccgtcaccaagttcacatcatcctaggctggcttcgtcgtcgtcgtttcatgagttgatggcggcaggcatcgtgtatgtagttggcagtagtatgatgttacaacctttgtaagaattgtgctgcttgcttgtgggactgaagaaacagtgatgttgctgtttaaatcaatgttcgtgtgtgcttgcgtgtcgcttcagagttcagactgactcctcttgatgccatttgtttatgtcagcaagtttctaccgtgatagtttatctagtaattttaatttgctgtcattttatctgaaaaaaaaaaaaaaaa

SEQ ID NO: 5316 - protein, 145 aa, Triticum aestivum
  misc_feature: Ceres CLONE ID no. 1048632
  misc_feature: Ceres CDNA ID no. 24766015
  misc_feature: No seed is being produced by the plant
  misc_feature: The plant flowers significantly late compared to wild-type.
  misc_feature: Useful for biocontainment applications
  misc_feature: Useful for making plants with modulated flowering time
  misc_feature (52)..(124): Pfam Name: Histone PFAM Desc: Core histone H2A/H2B/H3/H4
  misc_feature: Homolog of GI Number: 122033 NR Desc: HISTONE H2B.2
  misc_feature: Homolog of GI Number: 34895900 NR Desc: putative histone H2B
  misc_feature: Homolog of GI Number: 21801 NR Desc: histone H2B
  misc_feature: Homolog of GI Number: 34895838 NR Desc: putative histone H2B
  misc_feature: Homolog of GI Number: 34895896 NR Desc: putative histone H2B
  misc_feature: Homolog of GI Number: 34895888 NR Desc: putative histone H2B
  misc_feature: Homolog of GI Number: 34895832 NR Desc: putative histone H2B
  misc_feature: Homolog of GI Number: 577825 NR Desc: H2B histone
  misc_feature: Homolog of GI Number: 22325 NR Desc: H2B histone
  misc_feature: Homolog of GI Number: 34895904 NR Desc: putative histone H2B
MAPKAAEKKLAPATAEKTTAGKKPKAEKRAPATKEAGGEGKTRGRKKGSKAKKGVETYKIYIFKVLKQVHPDVGISSKAMSIMNSFINDIFEKLAGESAKLARYNKKPTITSREIQTSVRLVLPGELAKHAVSEGTKAVTKFTSS

SEQ ID NO: 5317 - DNA, 1017 bp, Triticum aestivum
  misc_feature: Ceres CLONE ID no. 1048898
  misc_feature: Ceres CDNA ID no. 25400744
  CDS (170)..(646): REFERENCED BY SEQ ID NO: 5318
ctaaccctgcagccgccgccccgtccatgttctgatcggcttcgctaccctcgtcgcgccgcgcgccgccgccgccgccctgcgctgtccgctgcatctccggctcgccgcgtggtacgcctccggtcccgcgtgctctccgaggtgtcatgtgtgctggtaaacagaaatgtgtagagcgctattcagtactgatgtttattggagcctagcattgctggggcatattaaggtctaccttcactcagggacaatcctttccggcttcgggttcctgcctcagtgtaagaaaccagtgagaatggtcgtccctccaccagacagggccgctaggatcgtcggttttctcaagccctaccttttgaggatgcatttctcgaacaagtatgtaaccgcccaggtcatccataccccaacagcaaccgtcgcgtgttctgcaagctcgcaggagaagctgctgagaccgaacttggagtcgacccgtgacgtctctgccgcggcaaagattgggaagctgctgggcgagcgcctgctgctcaaagggatacctgccgtgtccatccacatgaagagagagcagaagtaccacgggaaagtcaaggccgttattgattccgtcagagaatctggtgtgaagctgttgtgatggtgaaaacgtagagctcgtcttagcatttgcgcagtcttgagctgtatttctgatgtttggactgattcacagcaacttctctgttcatgaatttggcgctaaacgaacgtttgtccgggactccaggtcaataaagggactctgttgtaggagctcgaactgataatctgcagtagcactttttattttttgaaacaaatctgcagtagcacttgatgactcgaggataaacagcctgttatgtttctcctctccgaaatgtaacggagattattgggctggagatattccggacttggttgcctgtgatgctaaatttggtattcaagactgtttaatggagcggatgctcaaaaaaaaaaaaaaaa

SEQ ID NO: 5318 - protein, 114 aa, Triticum aestivum; identical to SEQ ID NO: 2310
  misc_feature: Ceres CLONE ID no. 1048898
  misc_feature: Ceres CDNA ID no. 25400744
  misc_feature (24)..(113): Pfam Name: Ribosomal_L18p PFAM Desc: Ribosomal L18p/L5e family
  misc_feature: Homolog of GI Number: 50917923 NR Desc: putative ribosomal protein L18
  misc_feature: Homolog of GI Number: 27904926 NR Desc: 50S ribosomal protein L18
  misc_feature: Homolog of GI Number: 1044980 NR Desc: ribosomal protein L18
  misc_feature: Homolog of GI Number: 1208546 NR Desc: ribosomal protein L18
  misc_feature: Homolog of GI Number: 68548618 NR Desc: Ribosomal protein L18
  misc_feature: Homolog of GI Number: 28897047 NR Desc: ribosomal protein L18
  misc_feature: Homolog of GI Number: 34105475 NR Desc: 50S ribosomal protein L18
  misc_feature: Homolog of GI Number: 32475074 NR Desc: 50S ribosomal protein L18

SEQ ID NO: 5319 - DNA, 1094 bp, Triticum aestivum
  misc_feature: Ceres CLONE ID no. 1048919
  misc_feature: Ceres CDNA ID no. 25891039
  CDS (92)..(820): REFERENCED BY SEQ ID NO: 5320
accaaagccctctccctcgccctcgccgccgccgccgccgcagcctgcgcggagctcgaagcgggagtggagagggcaaaacagaaccgcgatggagtacgtcaaccctctcaccggcttccgcgtcgacggccgccgccccaacgagatgcggcagctcaagggcgaggtcggcgtcgtctccagggccgacggctcggcgctcttcgagatgggcaacaccagggtcatcgccgcggtctacggacctcgagagatccaaaacaggagtcagcaacaaaatcgtaaagaggctttggtgcgttgtgagtatagaatggcagaatttagcactggggatcgaaggagaaagccaaaaggtgacaggcgatcaacagaaatttctcttgttattcgacaaacaatggaggcaagcatattaacacatttaatgccacactcacagattgacatatttgtccaagttcttcaagctgatggtggaaccaggtccgcatgcatcaatgctgcaacactagcacttgcagatgctgggattccaatgcgagacatagtcacatcttgcagtgctgggtacctgtgttctactcctttgcttgatctgaactatatagaagacagcgctggaggcgcggatgtcaccgttggcattcttgcaaagatggacaaagtgactcttctgcagatggacgcgaaactaccaatggatacatttgagactgtgatggaccttgcaactgaagggtgcaaagcgatcgcaacctacatccgagaggtgctattggagaacacgaagcagctggagtgtcagcgaggctagttaaacctagccggcggaggccattaaacgagagcctgtagcacttgaaggcgggtctgttgtgtaacgctgattgatggcttatctgcctagcagagctagcattgagagaaaattgacacttaacctgtcaaagattgatggaccatcatattccctcctaacgtaaatgctgtagcgcacaggagatgacatcttgattatgtgaaactttgatgttgaacttggtaaaaaaaaaaaaaaaaaaaaaaaaaaaaaaaaaaaaaaaaaaaaa

SEQ ID NO: 5320 - protein, 242 aa, Triticum aestivum
  misc_feature: Ceres CLONE ID no. 1048919
  misc_feature: Ceres CDNA ID no. 25891039
  misc_feature (153)..(218): Pfam Name: RNase_PH_C PFAM Desc: 3' exoribonuclease family
  misc_feature (19)..(150): Pfam Name: RNase_PH PFAM Desc: 3' exoribonuclease family
  misc_feature: Homolog of GI Number: 28973161 NR Desc: putative exonuclease RRP41
  misc_feature: Homolog of GI Number: 50899014 NR Desc: putative ribonuclease PH
  misc_feature: Homolog of GI Number: 62858329 NR Desc: LOC549190
  misc_feature: Homolog of GI Number: 57095694 NR Desc:  similar to putative exosome complex exonuclease RRP41
  misc_feature: Homolog of GI Number: 29611663 NR Desc: exosome complex exonuclease RRP41
  misc_feature: Homolog of GI Number: 33411774 NR Desc: putative exosome complex exonuclease RRP41
  misc_feature: Homolog of GI Number: 34866849 NR Desc: similar to putative exosome complex exonuclease RRP41
  misc_feature: Homolog of GI Number: 41152247 NR Desc: putative exosome complex exonuclease RRP41
  misc_feature: Homolog of GI Number: 46142152 NR Desc: COG0689: RNase PH
MEYVNPLTGFRVDGRRPNEMRQLKGEVGVVSRADGSALFEMGNTRVIAAVYGPREIQNRSQQQNRKEALVRCEYRMAEFSTGDRRRKPKGDRRSTEISLVIRQTMEASILTHLMPHSQIDIFVQVLQADGGTRSACINAATLALADAGIPMRDIVTSCSAGYLCSTPLLDLNYIEDSAGGADVTVGILAKMDKVTLLQMDAKLPMDTFETVMDLATEGCKAIATYIREVLLENTKQLECQRG

SEQ ID NO: 5321 - DNA, 644 bp, Glycine max
  misc_feature: Ceres CLONE ID no. 1049020
  misc_feature: Ceres CDNA ID no. 36707071
  CDS (57)..(410): REFERENCED BY SEQ ID NO: 5322
ccccccattactcacttttcatccttcgatcatacacttagttgcttccaattaagatggttctgctagagaagctctgggatgatgttgtggctggccctcaacctgagcgtggccttggcaagctcagaaaactcaccaccctcaaaactattgatgaaggagaaagtagcaagctgcagaagacgttgtcgatgccgtcgacaccaacaaccccgatgactccgacgactccaacgacaccgggatcggcccgtaaagctgacaacgtttggaggagcgtcttccatcctgggagcaactccgccacaaagaccatcggtgctcagatgtttgacaaaccacttcccaacactcccactgtctatgactggctgtacagtggggagaccagaagcaggcaccgctgaagctgaagtctttagctaagatgaccgtgggttgcatgtaaatattgtcgtttttcgttaagcatctgccacgtttgcagctactattactattatgtgtcgggaatttattgctccgttgctgactcaaacataatattactagcgtgtttggtttttttgagcaagtgaatgtaaaaatgctaaataattcgttagtatgctaagttttgtaagccaaaaaaaaaaaaaaaa

SEQ ID NO: 5322 - protein, 117 aa, Glycine max
  misc_feature: Ceres CLONE ID no. 1049020
  misc_feature: Ceres CDNA ID no. 36707071
  misc_feature (7)..(117): Pfam Name: Auxin_repressed PFAM Desc: Dormancy/auxin associated protein
  misc_feature: Homolog of GI Number: 11386111 NR Desc: auxin
  misc_feature: Homolog of GI Number: 62526583 NR Desc: auxin
  misc_feature: Homolog of GI Number: 71040687 NR Desc: auxin
  misc_feature: Homolog of GI Number: 2605887 NR Desc: dormancy
  misc_feature: Homolog of GI Number: 58700653 NR Desc: auxin
  misc_feature: Homolog of GI Number: 22573 NR Desc: 12.5 kDa protein
  misc_feature: Homolog of GI Number: 45738252 NR Desc: auxin
  misc_feature: Homolog of GI Number: 9795604 NR Desc: dormancy
  misc_feature: Homolog of GI Number: 7488618 NR Desc: dormancy
  misc_feature: Homolog of GI Number: 45758711 NR Desc: auxin
MVLLEKLWDDVVAGPQPERGLGKLRKLTTLKTIDEGESSKLQKTLSMPSTPTTPMTPTTPTTPGSARKADNVWRSVFHPGSNSATKTIGAQMFDKPLPNTPTVYDWLYSGETRSRHR

SEQ ID NO: 5323 - DNA, 778 bp, Glycine max
  misc_feature: Ceres CLONE ID no. 1049218
  misc_feature: Ceres CDNA ID no. 35383331
  CDS (33)..(437): REFERENCED BY SEQ ID NO: 5324
aaagtcttgtcttctctagctccaattcaaccatggcttcgagactcacggtaacagccttggtgctgatagctttggcaacagtttctctccaaacctcagcttcatcagtgggtaaattcatcgacgaaaccatcacttcccacaagatcgtcattttttccaagacctattgcccgtactgtagaagggcaaaagctgttttcaaagagttgaaccaagttccacatgttgttgagctcgacgagagagaggatggttcaaagattcaggatatcatgattaatattgttgggaggcgtactgtgccacaagttttcattaatggaaaacaccttggaggctcagatgacaccgttgaagcttatgagagtggacatctgcataaacttctaggaattgagacaaaggatcatgatgatcacgatgatctctgaatcaggttgttaattaaggggaaactatgtcgcaaagctgcaacggtattctgtgacagtatgaaatctttacatatcaagacacggtgacattacattttggcgcagctaaagttttcatttacatgtaatgcgatggatagtttttcaattatcacaggaatgcaccccttaccccatttccaccttgttttgtactgaacatgctcagataggtaccccatcacatcaattagcttgtattttaattctatccctattttacattgtttggaatggagtggttattcattctattatgtttggtgcatagagtcatcttttgaaaaaaaaaaaaaaaa

SEQ ID NO: 5324 - protein, 134 aa, Glycine max
  misc_feature: Ceres CLONE ID no. 1049218
  misc_feature: Ceres CDNA ID no. 35383331
  misc_feature (39)..(121): Pfam Name: Glutaredoxin PFAM Desc: Glutaredoxin
  misc_feature: Homolog of GI Number: 19548658 NR Desc: glutaredoxin
  misc_feature: Homolog of GI Number: 6735386 NR Desc: glutaredoxin
  misc_feature: Homolog of GI Number: 21536938 NR Desc: glutaredoxin
  misc_feature: Homolog of GI Number: 52077363 NR Desc: putative glutaredoxin
  misc_feature: Homolog of GI Number: 20465465 NR Desc: putative glutaredoxin protein
  misc_feature: Homolog of GI Number: 50911236 NR Desc: putative glutaredoxin I
  misc_feature: Homolog of GI Number: 2995953 NR Desc: glutaredoxin I
  misc_feature: Homolog of GI Number: 54642245 NR Desc: GA19906
  misc_feature: Homolog of GI Number: 33519160 NR Desc: glutaredoxin
  misc_feature: Homolog of GI Number: 50539868 NR Desc: zgc:92698
MASRLTVTALVLIALATVSLQTSASSVGKFIDETITSHKIVIFSKTYCPYCRRAKAVFKELNQVPHVVELDEREDGSKIQDIMINIVGRRTVPQVFINGKHLGGSDDTVEAYESGHLHKLLGIETKDHDDHDDL

SEQ ID NO: 5325 - DNA, 551 bp, Glycine max
  misc_feature: Ceres CLONE ID no. 1049272
  misc_feature: Ceres CDNA ID no. 40041389
  CDS (80)..(403): REFERENCED BY SEQ ID NO: 5326
atccaaagcttcttcagttattcatctgcttactaaaatttcttccattcttagctttgttcaatcaaagttttttaagatggcccagagaaatgttactgctaattcttcttttgaaaggactagcttgccttccctagatcaaaagttggccatggccaagcgctgctctcatgagggtgtgatggcaggagcaaaagcagctgttgttgctactattgctactgccataccaactctggctagtgtaaggatgcttccttgggcaagagccaatctcaatcactctgctcaagctctcataatttccacagtggcgggagcagcatatttcatagtagctgacaagactgtcttggcaactgctagaaagaactccttcaaccgaccctctaatgcatgaattccaaatggataatttggattttggattcggcttcactacgttgggctatcttagcattgacccaatcatcggacttatcatatatgtaaatgtaattatgtatcgataataaagaagagtttgcattccaaaaaaaaaaaaaaaa

SEQ ID NO: 5326 - protein, 107 aa, Glycine max
  misc_feature: Ceres CLONE ID no. 1049272
  misc_feature: Ceres CDNA ID no. 40041389
  misc_feature (22)..(100): Pfam Name: ENOD93 PFAM Desc: Early nodulin 93 ENOD93 protein
  misc_feature: Homolog of GI Number: 218262 NR Desc: early nodulin
  misc_feature: Homolog of GI Number: 4731119 NR Desc: root
  misc_feature: Homolog of GI Number: 50948739 NR Desc: putative early nodulin
  misc_feature: Homolog of GI Number: 50948751 NR Desc: putative early nodulin
  misc_feature: Homolog of GI Number: 50948737 NR Desc: putative early nodulin
  misc_feature: Homolog of GI Number: 50948753 NR Desc: putative early nodulin
  misc_feature: Homolog of GI Number: 4809191 NR Desc: early nodulin
  misc_feature: Homolog of GI Number: 50948749 NR Desc: putative early nodulin
  misc_feature: Homolog of GI Number: 50948755 NR Desc: putative early nodulin
  misc_feature: Homolog of GI Number: 6688816 NR Desc: Enod93 protein
MAQRNVTANSSFERTSLPSLDQKLAMAKRCSHEGVMAGAKAAVVATIATAIPTLASVRMLPWARANLNHSAQALIISTVAGAAYFIVADKTVLATARKNSFNRPSNA

SEQ ID NO: 5327 - DNA, 618 bp, Glycine max
  misc_feature: Ceres CLONE ID no. 1049304
  misc_feature: Ceres CDNA ID no. 36705437
  CDS (64)..(396): REFERENCED BY SEQ ID NO: 5328
tagttgctcttttctccctctccgcatacactctgctcgcagggtttctccaccaagagggaaatggctcccaaaccgcctagtacgggtctgtttgttggactgaacaagggtcacgtcgtcaccaagaaggaattgcctccacgcccctcagatcgtaaggggaaaacaagcaagagggtgcactttgtgaggaacctcataagagaggtagccggttttgcaccctatgaaaagcgtataactgagttgctgaaggttgggaaggataagagggcactgaaggttgcaaagagaaagctcggaacacacaaacgcgcaaagaagaagcgtgaggaaatgtccagtgttctcaggaagatgagggctggtggtgctggagacaagaagaaataagtcttatttactgttttccagattcactagatggacctgtgtattgatggacgagctttcatatttttgctttggttcaattagtttacttcaagattttgtttgagaaatatgttttgcttaactgagacatgatttatggaagaagctagattggattattttctgttttactagaaatgagagttataatcctttttcaagggaaaaaaaaaaaaaaaa

SEQ ID NO: 5328 - protein, 110 aa, Glycine max; identical to SEQ ID NO: 4624
  misc_feature: Ceres CLONE ID no. 1049304
  misc_feature: Ceres CDNA ID no. 36705437
  misc_feature (5)..(103): Pfam Name: Ribosomal_L36e PFAM Desc: Ribosomal protein L36e
  misc_feature: Homolog of GI Number: 57471698 NR Desc: ribosomal protein L36
  misc_feature: Homolog of GI Number: 34908154 NR Desc: putative 60S RIBOSOMAL PROTEIN L36
  misc_feature: Homolog of GI Number: 50931673 NR Desc: putative 60S ribosomal protein L36
  misc_feature: Homolog of GI Number: 56182368 NR Desc: putative 60S ribosomal protein L36
  misc_feature: Homolog of GI Number: 12642884 NR Desc: putative 60S ribosomal protein
  misc_feature: Homolog of GI Number: 20148501 NR Desc: 60S ribosomal protein L36
  misc_feature: Homolog of GI Number: 21592383 NR Desc: 60S ribosomal protein L36
  misc_feature: Homolog of GI Number: 1276967 NR Desc: putative ribosomal protein
  misc_feature: Homolog of GI Number: 17865758 NR Desc: 60S ribosomal protein L36
  misc_feature: Homolog of GI Number: 21554932 NR Desc: 60S RIBOSOMAL PROTEIN L36 homolog

SEQ ID NO: 5329 - DNA, 886 bp, Glycine max
  misc_feature: Ceres CLONE ID no. 1049399
  misc_feature: Ceres CDNA ID no. 35383332
  CDS (52)..(720): REFERENCED BY SEQ ID NO: 5330
gtacacagcctcaacaaccctaacgcgtgcagagcagagagagacgcagccatggggcgaagacccgcgaggtgttataggcaaattaagaacaaaccataccccaagtcacggttttgccgtggtgttcctgatcccaagatcaggatttacgatgttggtatgaagaagaagggtgttgatgaatttcctttctgtgtccatctggttagttgggagaaggaaaacgtttctagtgaggccctggaagctgctcgtattgcttgcaacaagtacatggccaaatttgctggaaaggatgctttccacttgagagtcagggtgcacccattccatgttcttaggatcaacaagatgctttcgtgtgccggagctgataggctccaaactggaatgagaggtgcttttggaaagccacagggtacttgtgctagagtggctattggacaggtccttctttctgtccgctgcaaggacagcaacagccatcatgcccaggaggcccttcgccgtgccaagttcaagttccctggtcgtcaaaagattattgttagcaggaaatggggcttcaccaagtttagccgttctgattatctcaagttcaagtcagagaatagaattgtgcccgatggtgtgaatgctaagcttcttggttgccatggaccattggccaaccgtgaacccggaagggcctttttggatactgctactggttcttagtctgtttgttaatttggaaatactagactttggattactttagttttgcaagagtgaatttgagttattgtcagaacattccaattacttaaattgtttgcgaacctcttcaatttggttattttaatgttatattttgttatgatgcacaaaaaaaaaaaaaaaa

SEQ ID NO: 5330 - protein, 222 aa, Glycine max; identical to SEQ ID NO: 2532
  misc_feature: Ceres CLONE ID no. 1049399
  misc_feature: Ceres CDNA ID no. 35383332
  misc_feature (1)..(176): Pfam Name: Ribosomal_L10e PFAM Desc: Ribosomal L10
  misc_feature: Homolog of GI Number: 5917743 NR Desc: 60S ribosomal protein L10
  misc_feature: Homolog of GI Number: 68449756 NR Desc: 60S ribosomal protein L10
  misc_feature: Homolog of GI Number: 77999313 NR Desc: 60S ribosomal protein L10
  misc_feature: Homolog of GI Number: 2500354 NR Desc: 60S ribosomal protein L10
  misc_feature: Homolog of GI Number: 6984130 NR Desc: 60S ribosomal protein L10
  misc_feature: Homolog of GI Number: 11036950 NR Desc: QM
  misc_feature: Homolog of GI Number: 50313215 NR Desc: QM family protein
  misc_feature: Homolog of GI Number: 49861132 NR Desc: QM
  misc_feature: Homolog of GI Number: 21592869 NR Desc: putative 60s ribosomal protein L10
  misc_feature: Homolog of GI Number: 23397080 NR Desc: putative tumor suppressor
  misc_feature: Useful for making shorter plants

SEQ ID NO: 5331 - DNA, 810 bp, Glycine max
  misc_feature: Ceres CLONE ID no. 1049413
  misc_feature: Ceres CDNA ID no. 35383333
  CDS (36)..(650): REFERENCED BY SEQ ID NO: 5332
ctagttcttcgctactgcgactgcgcttcagcacaatgggtgcctacaagtatgtttcggagctatggcgcaagaagcagtctgatgttatgagattcttgcagcgggtgaggtgctgggagtatcgccagcaaccttctattgtccgtttgacaaggtctactcgcccagataaggctcgtcgcttgggtttcaaggctaagcagggttacgtgatttaccgtgttcgcgtacgaaggggtggccgtaagagaccagttccaaagggtattgtttatggtaagcccaccaaccaaggtgttactcaactgaaatttcaacgcagcaagaggtctgttgccgaggagagagccggaaggaagttgggtggcctcagggttctcaattcatactgggtgaatgaggactccacttacaaatattttgaggtcattctggtggatgttgcccacactgctgtaagaaatgatccaagaatcaactggctctgcaatccagtccataaacacagggaactgcgtggcctcacttctgctgggaaaagcaataggggtttacgtggcagaggacatctctaccacaaaaatcgtccatcacgcagggcaacctggaagagaaacaataccctctcccttcgtcgctaccgttgattttgttgcagttatcgtatgttgcttcattttctgagtatttggaggaaaatcgtcagttttggatccctgaatcatgccttttttccccgataatgtctttagtactaaaacagcagagattaatgatgtaagttttttaccaaaaaaaaaaaaaaaa

SEQ ID NO: 5332 - protein, 204 aa, Glycine max; identical to SEQ ID NO: 3314
  misc_feature: Ceres CLONE ID no. 1049413
  misc_feature: Ceres CDNA ID no. 35383333
  misc_feature (2)..(193): Pfam Name: Ribosomal_L15e PFAM Desc: Ribosomal L15
  misc_feature: Homolog of GI Number: 23505795 NR Desc: At4g16720/dl4385c
  misc_feature: Homolog of GI Number: 21689875 NR Desc: putative 60S ribosomal protein L15
  misc_feature: Homolog of GI Number: 7268491 NR Desc: ribosomal protein
  misc_feature: Homolog of GI Number: 34896990 NR Desc: ribosomal protein L15
  misc_feature: Homolog of GI Number: 14585879 NR Desc: ribosomal protein L15
  misc_feature: Homolog of GI Number: 48596903 NR Desc: ribosomal protein
  misc_feature: Homolog of GI Number: 2982318 NR Desc: probable 60S ribosomal protein L15
  misc_feature: Homolog of GI Number: 3608479 NR Desc: ribosomal protein L15
  misc_feature: Homolog of GI Number: 2982249 NR Desc: probable 60S ribosomal protein L15
  misc_feature: Homolog of GI Number: 50878349 NR Desc: putative 60s ribosomal protein L15
  misc_feature: Useful for decreasing plant size
  misc_feature: Useful for making plants with increased biomass
  misc_feature: Useful for making shorter plants
  misc_feature: Useful for sterility
  misc_feature: Useful for sterility

SEQ ID NO: 5333 - DNA, 579 bp, Glycine max
  misc_feature: Ceres CLONE ID no. 1049503
  misc_feature: Ceres CDNA ID no. 35383334
  CDS (33)..(395): REFERENCED BY SEQ ID NO: 5334
agttctaggtttcactcccattaacagcaaccatggtgcagaggctcacttatcgcaagcggcatagttatgctaccaaatccaaccagcaccgggttgttaagacccctggagggaagttggtgtaccagaccactaagaagagagcaagtggacctaagtgccctgtcactggcaagaggatccaagggattccacacttgagacctgctgaatacaagaggtctagattgcctcggaaccgcaggaccgtaaaccgagcctacggaggtgttttatcaggaggagctgttagagaaaggattattcgtgctttcctggttgaagagcaaaaaattgtgaaaaaggtattgaagatccagaaggcaaaagaaaagcaggcatcaaagagttaagctgttgagtgattcatgagtgcaaaaaatatcttatcgttaaaatttgtgctaaagaattttgattttgaatggtgttaactatgaatgtgaaacttaatttgaaatttattttatgatttctgtgctttttggtagcttatttaatgaaatttattttatggtgttaaaaaaaaaaaaaaaa

SEQ ID NO: 5334 - protein, 120 aa, Glycine max; identical to SEQ ID NO: 3222
  misc_feature: Ceres CLONE ID no. 1049503
  misc_feature: Ceres CDNA ID no. 35383334
  misc_feature (5)..(103): Pfam Name: Ribosomal_L34e PFAM Desc: Ribosomal protein L34e
  misc_feature: Homolog of GI Number: 47824936 NR Desc: Ribosomal protein L34e
  misc_feature: Homolog of GI Number: 2119150 NR Desc: ribosomal protein L34
  misc_feature: Homolog of GI Number: 1076636 NR Desc: ribosomal protein L34
  misc_feature: Homolog of GI Number: 21436403 NR Desc: putative 60S ribosomal protein L34
  misc_feature: Homolog of GI Number: 21594659 NR Desc: 60s ribosomal protein L34
  misc_feature: Homolog of GI Number: 13194822 NR Desc: putative 60S ribosomal protein L34
  misc_feature: Homolog of GI Number: 20259165 NR Desc: putative 60S ribosomal protein L34
  misc_feature: Homolog of GI Number: 50941301 NR Desc: putative ribosomal protein L34
  misc_feature: Homolog of GI Number: 50946109 NR Desc: putative ribosomal protein
  misc_feature: Homolog of GI Number: 57471712 NR Desc: ribosomal protein l34

SEQ ID NO: 5335 - DNA, 957 bp, Glycine max
  misc_feature: Ceres CLONE ID no. 1049585
  misc_feature: Ceres CDNA ID no. 24766621
  CDS (217)..(699): REFERENCED BY SEQ ID NO: 5336
attttgtctcctttcgcggtggcttcctcttatttttttctttctctctctctttctcactcttatatcctttccgagttccgactctgttaatcattctccgttaagattctttcttctttcctctttccactcttggtcttatcttcttcacaatcccacaaccactccttgttataaatcagattttttttttctcttcttacagatccaaacatggccgaagaacaccgatgccaagctcccgaaggtcacagactctgctccaacaactgcggcttcttcggtagccccgccacaatgaatctctgttccaaatgctacagagacatccgtttgaaggaagaagaacaagccaaaactaaatccacaatcgaaaccgctctttctggatcttcctccgccaccgtcgccgttgcctccgccgtggattctcttccggcgccggttgaatccctccctcaaccgtcggtggtgagttcgccagatgtggccgcaccggttcaggcgaaccggtgcggcgcgtgtaggaagcgcgtgggattgactgggtttaagtgcaggtgcggaaccacgttttgtgggactcaccggtaccccgagaaacacgcgtgtggcttcgatttcaaggcggtggggagagaggagatagcacgggcgaatcccgtgatcaaaggcgagaagctacggaggatttaatctgcaccgttgatatgatgatcgaagcgattagggtgagttgatcaggaccgtccgtcgtgggccgttgatacgaacctatttcgagcgtgtgtaagaaaaaaaaaatctattagttatgacgacattgggaagggttgaataagtcatattttggaggctttgctttgtgtttgttcattaaaaatggaaaatgttaggtccacccacgttcggaaattgaggggtttgtttagaattgcaaaaaaaaaaaaaaaa

SEQ ID NO: 5336 - protein, 160 aa, Glycine max; identical to SEQ ID NO: 3176
  misc_feature: Ceres CLONE ID no. 1049585
  misc_feature: Ceres CDNA ID no. 24766621
  misc_feature (101)..(141): Pfam Name: zf PFAM Desc: AN1
  misc_feature (13)..(37): Pfam Name: zf PFAM Desc: A20
  misc_feature: Homolog of GI Number: 7669954 NR Desc: zinc finger
  misc_feature: Homolog of GI Number: 18377546 NR Desc: zinc finger
  misc_feature: Homolog of GI Number: 50909195 NR Desc: putative multiple stress
  misc_feature: Homolog of GI Number: 38566602 NR Desc: At1g12440
  misc_feature: Homolog of GI Number: 8778645 NR Desc: F5O11.17
  misc_feature: Homolog of GI Number: 60202503 NR Desc: zinc finger protein
  misc_feature: Homolog of GI Number: 41350259 NR Desc: putative zinc finger protein ZmZf
  misc_feature: Homolog of GI Number: 57899571 NR Desc: zinc finger protein 216
  misc_feature: Homolog of GI Number: 50946101 NR Desc: putative zinc finger protein
  misc_feature: Homolog of GI Number: 37548823 NR Desc: multiple stress
  misc_feature: Useful for making plants with increased biomass and foliage

SEQ ID NO: 5337 - DNA, 794 bp, Glycine max
  misc_feature: Ceres CLONE ID no. 1049707
  misc_feature: Ceres CDNA ID no. 36517512
  CDS (186)..(509): REFERENCED BY SEQ ID NO: 5338
aatcccaaataatccgaccctaccccgacccctagcacaaaagtctaaactgtgcgttttgttggttgggtgcgttaggggtttcttattttttatcccaatcacttccgtcagtggttcctgcccataaccttttcgggtgattgttcttcttcgctcacccacgcacgcgttacgctgaaggcatgaatgcgttcaaggcatataaggcctgtgtgccaattgcttggagccccaatatctatataactctagttaggggtattccggggaccaggaggctccataggcgcactttggaagcacttcgcttgcgcaaatgcaatcgaactgtcatgcgatggaacacacctacagttaggggaatgctccaacaggtcaagaggttagttgttatcgagacagaggaaatgtacaaggcacgcaagcagcaggaggaagcacacagagctctacggcctccgttggtcataagccacaagcctccctcggttactgatgctttataaagtcttctgcgttcttaaagatattatcttcttgctactaaaactatctaatgccattgtttaaagctttggtctcaaatggactaaattttgctttcaagaacatgtcatagtttgattctatgattctgtagtgttttctactgataacattagtcaaattcaggcctctgctcatgaaacctggctagtagcaagtgttcatttatttatattctttagtttgggaatatttataatttattccataattgccttttctcttttggaaaaaaaaaaaaaaaa

SEQ ID NO: 5338 - protein, 107 aa, Glycine max
  misc_feature: Ceres CLONE ID no. 1049707
  misc_feature: Ceres CDNA ID no. 36517512
  misc_feature (19)..(69): Pfam Name: Ribosomal_L30 PFAM Desc: Ribosomal protein L30p/L7e
  misc_feature: Homolog of GI Number: 50940403 NR Desc: ribosomal protein L30p family
  misc_feature: Homolog of GI Number: 54291078 NR Desc: ribosomal protein L30p
MNAFKAYKACVPIAWSPNIYITLVRGIPGTRRLHRRTLEALRLRKCNRTVMRWNTPTVRGMLQQVKRLVVIETEEMYKARKQQEEAHRALRPPLVISHKPPSVTDAL

SEQ ID NO: 5339 - DNA, 958 bp, Glycine max
  misc_feature: Ceres CLONE ID no. 1049981
  misc_feature: Ceres CDNA ID no. 40041390
  CDS (97)..(624): REFERENCED BY SEQ ID NO: 5340
actcacttgtcactcgtcactctgccacttcttcgtcggtgtcaaactcacacaaactcagcattcaaaaccctcttcctgcgccaccgccggaaaatggaggcggtgggttcgagactcagccgcgcctcctcccgctacggcgcccccaccgtgttcagcggccccgtcagaaagtggaagaagaagtgggtccacgtcaccccctcttccttacccaacaacagctctcactctcacactaacaactccaccaccaccagcagcgcttcctctcgcctcctccttcgccgttggactcccgccaccgtcgacgacgccgccggagccgtctccgacgagcctccccgaagaaagttccgttacacccctgttgttgtcctagaagaacagaaaaagatgaatgttgtgaaggctgaacatgaacccacaattgagactgaccaattggctgctaggaagacaaatgtgactcatgagatgcagggaaaactgaacatgaatgaaatgttggaggaaaccaaggattcaaacattggtaatttagatcttggttcagacttccaaagcaacaccggtggaaacagccagaacagtgatgctcaattggaaaatagtatgtaatgggtggtccatgaacttggtatctgtaagtaggaaatcaagctgttaggcagtgaagtgttcattcaagaaatactaagctagtatatattacctgttatcaccgtacatcttaccattctatattgacttataatgtagttagccataatcttgtgtatagttagcacttaactagtgctgcctataggaatgataagtaactagttttgatcagcataggataatcagttgtattttgtgatggaacatatgcatgatgtgatgctactaaggagctgagtatatatttttaaatataaaagctcaatatgctcccaaaaaaaaaaaaaaa

SEQ ID NO: 5340 - protein, 175 aa, Glycine max
  misc_feature: Ceres CLONE ID no. 1049981
  misc_feature: Ceres CDNA ID no. 40041390
  misc_feature: Homolog of GI Number: 42570779 NR Desc: arabinogalactan
  misc_feature: Homolog of GI Number: 13265426 NR Desc: At2g14890
  misc_feature: Homolog of GI Number: 12642860 NR Desc: putative proline
MEAVGSRLSRASSRYGAPTVFSGPVRKWKKKWVHVTPSSLPNNSSHSHTNNSTTTSSASSRLLLRRWTPATVDDAAGAVSDEPPRRKFRYTPVVVLEEQKKMNVVKAEHEPTIETDQLAARKTNVTHEMQGKLNMNEMLEETKDSNIGNLDLGSDFQSNTGGNSQNSDAQLENSM

SEQ ID NO: 5341 - DNA, 591 bp, Glycine max
  misc_feature: Ceres CLONE ID no. 1050114
  misc_feature: Ceres CDNA ID no. 36699544
  CDS (1)..(369): REFERENCED BY SEQ ID NO: 5342
attagccacccacttcatttacctgctccactgttacccgtccatcaccttccagccgcttccttccccatccgtccccggcgtcactgtcgactcgtacagagtagcgagttcgtcgtctcgggcgaaatcaggatgagcgaccccaagtacgcctacccctaccccgcgcaaggttactaccagggggggccataccaggggcagggcggcccgtaccaggggccgccggtgatggcgccaccgcagtacgccgcgctgccgccgcgcgcccagcccagcttcctcgaaggctgtttggctgcgctttgctgctgctgcctgatcgacgagtgctgctgcgacccctccatcatcttcgtcggctagatcagccggccaagcccggcatgcgtcaactgtacaaagagatggcctcaaggatattatttaccacgttgttgccacgctatatatgatgatctctctctatatatgtatgcatgtattcgcttattattgttatctcactacggtgctgcctacctgtgtaactcgaatccatcagtaacaaaggctttatgatcttaccatccaaaaaaaaaaaaaaaa

SEQ ID NO: 5342 - protein, 77 aa, Glycine max
  misc_feature: Ceres CLONE ID no. 1050114
  misc_feature: Ceres CDNA ID no. 36699544
  misc_feature: Homolog of GI Number: 50919167 NR Desc: unknow protein
  misc_feature: Homolog of GI Number: 8515092 NR Desc: adhesive/proline
  misc_feature: Homolog of GI Number: 50938779 NR Desc: adhesive/proline
  misc_feature: Homolog of GI Number: 42565788 NR Desc: proline
  misc_feature: Homolog of GI Number: 8698728 NR Desc: Contains weak similarity to GATA
  misc_feature: Homolog of GI Number: 34910048 NR Desc: P0413G02.25
MSDPKYAYPYPAQGYYQGGPYQGQGGPYQGPPVMAPPQYAALPPRAQPSFLEGCLAALCCCCLIDECCCDPSIIFVG

SEQ ID NO: 5343 - DNA, 575 bp, Glycine max
  misc_feature: Ceres CLONE ID no. 1050389
  misc_feature: Ceres CDNA ID no. 29191667
  CDS (74)..(433): REFERENCED BY SEQ ID NO: 5344
ctctagtgcccccgtctcttcctcctctctccgcatcgctgcgttttccgaatcgaaaggtacgtaagtaacaatggtggaggccaagggtaggaaagaggaggtcgtcactcgagagttcaccatcaacctccacaaacgcttgcatggctgcacattcaagaagaaggctcctaaagcaattaaggagataaggaagtttgctcagaaagcgatggggacgaatgatgtgagagtggatgtgaagctgaacaaggctgtgtggagccaggggattcggagcgtcccgaggaggattagggttcgcattgcccgaaagaggaacgacgatgaggatgcaaaggaagagctatattcccttgttactgttgtcgaaatccccaaggatgagctcaaaggtttgggaaccaaggttattgatgatgaagattgattatgtattgcttacatatctgttttattttatagttgatgcagatttgcgaatatcttttattttgttgagacattggagatattttagtttgataatatcgattgccttcctctgttttgattcaaaaaaaaaaaaaaaa

SEQ ID NO: 5344 - protein, 119 aa, Glycine max
  misc_feature: Ceres CLONE ID no. 1050389
  misc_feature: Ceres CDNA ID no. 29191667
  misc_feature (7)..(101): Pfam Name: Ribosomal_L31e PFAM Desc: Ribosomal protein L31e
  misc_feature: Homolog of GI Number: 915313 NR Desc: ribosomal protein L31
  misc_feature: Homolog of GI Number: 7229709 NR Desc: 80S ribosomal protein L31
  misc_feature: Homolog of GI Number: 14423899 NR Desc: 60S ribosomal protein L31
  misc_feature: Homolog of GI Number: 50947419 NR Desc: putative 60S ribosomal protein L31
  misc_feature: Homolog of GI Number: 50912155 NR Desc: putative 60S ribosomal protein L31
  misc_feature: Homolog of GI Number: 54111529 NR Desc: putative 60S ribosomal protein L31
  misc_feature: Homolog of GI Number: 21700813 NR Desc: AT5g56710/MIK19_16
  misc_feature: Homolog of GI Number: 21553532 NR Desc: 60S ribosomal protein L31
  misc_feature: Homolog of GI Number: 21553368 NR Desc: putative ribosomal protein
  misc_feature: Homolog of GI Number: 54290930 NR Desc: putative 60S ribosomal protein L31
MVEAKGRKEEVVTREFTINLHKRLHGCTFKKKAPKAIKEIRKFAQKAMGTNDVRVDVKLNKAVWSQGIRSVPRRIRVRIARKRNDDEDAKEELYSLVTVVEIPKDELKGLGTKVIDDED

SEQ ID NO: 5345 - DNA, 664 bp, Glycine max
  misc_feature: Ceres CLONE ID no. 1050527
  misc_feature: Ceres CDNA ID no. 29191668
  CDS (57)..(500): REFERENCED BY SEQ ID NO: 5346
gctgcagcaagggctcaacgcacgcaggaggaggagattgatcgagagaagagaagatgactacacgcttcaagaagaacaggaagaagagaggccacgtgagtgccggccatggccgcatcgggaagcaccggaagcaccctggaggacgcggtaatgccggaggcatgcaccaccaccggatcctctttgacaagtaccaccctgggttcttcggcaaggtcggaatgcgctattttcacaagctccgcaacaaattctactctccgatcctcaacatcgacaagctctggtccctggttccgcaagaagtgaaggacaaggcctccaaggagaacaaggcgccgctgatcgacgtcacgcagttcgggtactttaaggttctcggaaagggtgttttgccgcagaaccagcccgttgttgtcaaagctaagcttatttccaagatcgctgagaagaagatcaaggaggctggcggtgctgttgttctcaccgcctgattttattgacggtatcgctttttcaacgatttagggtttttttggttttgttctgatacgtttcgttttggatgacgttgttgtttagtctatgctacatttcaggatttaatttaaggttttattttttttaatttgcgcgttttagaaaaaaaaaaaaaaaa

SEQ ID NO: 5346 - protein, 147 aa, Glycine max
  misc_feature: Ceres CLONE ID no. 1050527
  misc_feature: Ceres CDNA ID no. 29191668
  misc_feature (108)..(141): Pfam Name: L15 PFAM Desc: Ribosomal protein L15
  misc_feature: Homolog of GI Number: 3608481 NR Desc: ribosomal protein L27a
  misc_feature: Homolog of GI Number: 76160998 NR Desc: ribosomal protein L27a
  misc_feature: Homolog of GI Number: 20147177 NR Desc: At1g70600/F5A18_22
  misc_feature: Homolog of GI Number: 21553702 NR Desc: 60S ribosomal protein L27A
  misc_feature: Homolog of GI Number: 7959355 NR Desc: 60S ribosomal protein L27a
  misc_feature: Homolog of GI Number: 23308283 NR Desc: At1g23290/F26F24_23
  misc_feature: Homolog of GI Number: 50939233 NR Desc: putative 60S ribosomal protein L27a
  misc_feature: Homolog of GI Number: 50916422 NR Desc: putative ribosomal protein L27a
  misc_feature: Homolog of GI Number: 50251205 NR Desc: putative 60S ribosomal protein L27a
  misc_feature: Homolog of GI Number: 22758850 NR Desc: ribosomal protein L22
  misc_feature: Useful for making plants with altered leaf shape eg curled leaves
  misc_feature: Useful for making plants with increased biomass
MTTRFKKNRKKRGHVSAGHGRIGKHRKHPGGRGNAGGMHHHRILFDKYHPGFFGKVGMRYFHKLRNKFYSPILNIDKLWSLVPQEVKDKASKENKAPLIDVTQFGYFKVLGKGVLPQNQPVVVKAKLISKIAEKKIKEAGGAVVLTA

SEQ ID NO: 5347 - DNA, 601 bp, Glycine max
  misc_feature: Ceres CLONE ID no. 1050542
  misc_feature: Ceres CDNA ID no. 25445662
  CDS (59)..(493): REFERENCED BY SEQ ID NO: 5348
gagtgctctgagaaaggtagcgttttttttgtggttgtttttttctcaattctcaaccatggagaagcagaagacagtgatgggtttgattctgttgctgctgttatttgcttcggatgtgagtgcttggactggtgaaatccatggaagagttgtttgtgatgtttgtggggattcttctctcggacctgaagaccatgttctcgaaggtgctgaggttgctgttctttgcatcaccaaatctggggaggttctaaattatcaggcattcactgatgctaaggggatatacacagtggccgagacaatgccggagagtgatcgttgggatgcatgtcttgcccgaccaatcagtagtttccatgagcaatgcactcaacttggtgaaggcagcattggggttaaattcagttacaatcatccatcaggacattcacacactgtcaggacctttgtttatcgacccaccagtgttccaacttactgcatttgatatatactaatgagtatatgaatctgagagtgtctatgcttgattgaactagtgcaaaactaatgagtatatgagcatattttatttatactaaaaaaaaaaaaaaaa

SEQ ID NO: 5348 - protein, 144 aa, Glycine max
  misc_feature: Ceres CLONE ID no. 1050542
  misc_feature: Ceres CDNA ID no. 25445662
  misc_feature (28)..(143): Pfam Name: Pollen_Ole_e_I PFAM Desc: Pollen proteins Ole e I family
  misc_feature: Homolog of GI Number: 50907543 NR Desc: pollen Ole e 1 allergen and extensin family protein
MEKQKTVMGLILLLLLFASDVSAWTGEIHGRVVCDVCGDSSLGPEDHVLEGAEVAVLCITKSGEVLNYQAFTDAKGIYTVAETMPESDRWDACLARPISSFHEQCTQLGEGSIGVKFSYNHPSGHSHTVRTFVYRPTSVPTYCI

SEQ ID NO: 5349 - DNA, 675 bp, Glycine max
  misc_feature: Ceres CLONE ID no. 1050912
  misc_feature: Ceres CDNA ID no. 40351577
  CDS (54)..(416): REFERENCED BY SEQ ID NO: 5350
actcaacctaaacgacgaccactgcgttttcagtttcagcacccaaaaaaaccatggttcttctgcagctagatccgtttctcaatgagcttaccagcatgtttgagcgcagcaccaagcttggctctgtttgggttactcttaaacgatcatctttgaaatctaaggtgcagaggaataaattggccactgctggtgaagcaattgagtatagatgccttatacgtgccactgatgggaaaaagacaatttctacttcggttggaccaaaggatcatcagcgctttcaagcttcttatgcaactatattaaaggcgcatatgactgctctaaagaagagagaaaggaaagacaagaagaagcctgcagaggcagataaaagagaagggagttcaaagagaccaaaaaagtcttaaaataatctgccttttgcgcctgatgttctgctcaaacttcgtttcctactgattctgtttatgtttcccccaattttttttttcattagtaaaatgtgataaatgaaggtgaaggggaaaagaagtgaagggaaaattgaaatattcttggattttaatctttagaaaaatattcattgaagtggcaatttgagaaaattttctcagttccccagttggttataaaatgaatcttcaggatataaaaaaaaaaaaaaaa

SEQ ID NO: 5350 - protein, 120 aa, Glycine max
  misc_feature: Ceres CLONE ID no. 1050912
  misc_feature: Ceres CDNA ID no. 40351577
  misc_feature (4)..(93): Pfam Name: SRP14 PFAM Desc: Signal recognition particle 14kD protein
MVLLQLDPFLNELTSMFERSTKLGSVWVTLKRSSLKSKVQRNKLATAGEAIEYRCLIRATDGKKTISTSVGPKDHQRFQASYATILKAHMTALKKRERKDKKKPAEADKREGSSKRPKKS

SEQ ID NO: 5351 - DNA, 674 bp, Glycine max
  misc_feature: Ceres CLONE ID no. 1051017
  misc_feature: Ceres CDNA ID no. 40351578
  CDS (81)..(482): REFERENCED BY SEQ ID NO: 5352
aaaggctgcagcgtgagagaaaactcgtcgattttcacaaccggagagctcagtctgatctctgaggaatagcagcagccatggcggagaaagcagtcacaatcaggaccaggaagttcatgaccaacaggcttctctccaggaagcagtttgttattgatgttcttcacccaggaagagctaatgtctcaaaggctgagctcaaggagaagttggcgaggatgtacgaggttaaggacccaaatgctatcttcgttttcaaattcagaacccactttggaggtggcaaatcttctgggtttggtttgatctacgacaatgtcgagagtgccaagaagttcgagcccaagtacaggctcatcaggaatggacttgacaccaagattgagaaatcaaggaaacagattaaggagaggaagaacagggccaagaaaatccgtggtgttaagaagaccaaggctggtgaccccaagaagaagtgaggaggtgttgaagagccaagacgcattatgggtttttattacgcaccatcccttcttgcttatcattgtcacactcgttctattttggtttggattatgctttaagctttagagaaatcatgtgctaaagattttgctgaatacaattttattttaaactccgttccttgcttcctaaaaaaaaaaaaaaaa

SEQ ID NO: 5352 - protein, 133 aa, Glycine max
  misc_feature: Ceres CLONE ID no. 1051017
  misc_feature: Ceres CDNA ID no. 40351578
  misc_feature (24)..(107): Pfam Name: Ribosomal_S24e PFAM Desc: Ribosomal protein S24e
MAEKAVTIRTRKFMTNRLLSRKQFVIDVLHPGRANVSKAELKEKLARMYEVKDPNAIFVFKFRTHFGGGKSSGFGLIYDNVESAKKFEPKYRLIRNGLDTKIEKSRKQIKERKNRAKKIRGVKKTKAGDPKKK

SEQ ID NO: 5353 - DNA, 705 bp, Glycine max
  misc_feature: Ceres CLONE ID no. 1051158
  misc_feature: Ceres CDNA ID no. 29191669
  CDS (86)..(418): REFERENCED BY SEQ ID NO: 5354
ctcgagacttgttttgttattccatcctcgctcgctcactcctctctcaaatcctcttcgcatcgcatccctcagggtggataaaatggcagcatcagggttccaagcgttcttgaacagtccggttggacctaaaacaacccatttctggggtcctatcgctaactggggctttgttgctgctggtttggtggatatgcaaaagccccctgagatgatctctggaaacatgacctcagccatgtgcatttactctgcattgttcatgagatttgcatggatggtgcagccacgcaactatttactacttgcctgccatgcttccaatgagactgttcagctctatcagctctcgcgttgggctagatcccaagggtatctatcctcaactaaagaagaggagaaaccggctcagtaaagctttcttcaacccctgcttccgatgatcaacggatcatcagcatatcagttcttggaaattaatgaatccttgatccatctatttttcattttcctttgaaacgtgtttgtcttctgtccccaacctatggatgatttacttgttggatccttcattgacatatatctcttttgtttgaaataagtataccgcttgtaataaaatttgggaccagtcgcaaagtccacatttcgtcttcatatgttttataagagtttattataaattcaaaaaaaaaaaaaaaa

SEQ ID NO: 5354 - protein, 110 aa, Glycine max
  misc_feature: Ceres CLONE ID no. 1051158
  misc_feature: Ceres CDNA ID no. 29191669
  misc_feature (1)..(93): Pfam Name: UPF0041 PFAM Desc: Uncharacterised protein family
  misc_feature: Homolog of GI Number: 54111523 NR Desc: brain protein 44
  misc_feature: Homolog of GI Number: 50899866 NR Desc: brain protein 44
  misc_feature: Homolog of GI Number: 50945709 NR Desc: brain protein 44
  misc_feature: Homolog of GI Number: 72078983 NR Desc:  similar to brain protein 44
  misc_feature: Homolog of GI Number: 4929727 NR Desc: CGI
  misc_feature: Homolog of GI Number: 7706369 NR Desc: brain protein 44
  misc_feature: Homolog of GI Number: 55233931 NR Desc: ENSANGP00000015797
  misc_feature: Homolog of GI Number: 51830691 NR Desc: similar to Brain protein 44
  misc_feature: Homolog of GI Number: 83000119 NR Desc:  similar to Brain protein 44
MAASGFQAFLNSPVGPKTTHFWGPIANWGFVAAGLVDMQKPPEMISGNMTSAMCIYSALFMRFAWMVQPRNYLLLACHASNETVQLYQLSRWARSQGYLSSTKEEEKPAQ

SEQ ID NO: 5355 - DNA, 1376 bp, Glycine max
  misc_feature: Ceres CLONE ID no. 1051286
  misc_feature: Ceres CDNA ID no. 40351579
  CDS (101)..(1264): REFERENCED BY SEQ ID NO: 5356
atctcctagtttcctaaccatatactaatatttgcttgtattgatagcccctccgttcccaagagtataaaactgcatcgaataatacaagccactaggcatgggtctagcaaaggaaacaacaatgggaggtagaggtcgtgtggccaaagtggaagttcaacggaagaagcctctctcaagggttccaaacacaaagccaccattcactgttggccaactcaagaaagcaattccaccacactgctttcagcgctccctcctcacttcattctcctatgttgtttatgacctttcatttgccttcattttctacattgccaccacctacttccacctccttcctcaacccttttccctcattgcatggccaatctattgggttctccaaggttgccttctcactggtgtgtgggtgattgctcacgagtgtggtcaccatgccttcagcaagtaccaatgggttgatgatgttgtgggtttgacccttcactcaacacttttagtcccttatttctcatggaaaataagccatcgccgccatcactccaacacaggttcccttgaccgtgatgaagtgtttgtcccaaaaccaaaatccaaagttgcatggttttccaagtacttaaacaaccctctaggaagggctgtttctcttctcgtcacactcacaatagggtggcctatgtatttagccttcaatgtctctggtagaccctatgatagttttgcaagccactaccacccttatgctcccatatattctaaccgtgagaggcttctgatctatgtctctgatgttgctttgttttctgtgacttactctctctaccgtgttgcaaccctgaaagggttggtttggctgctatgtgtttatggggtgcctttgctcattgtgaacggttttcttgtgactatcacatatttgcagcacacacactttgccttgcctcattacgattcatcagaatgggactggctgaagggagctttggcaactatggacagagattatgggattctgaacaaggtgtttcatcacataactgatactcatgtggctcaccatctcttctctacaatgccacactaccatgcaatggaggcaaccaatgcaatcaagccaatattgggtgagtactaccaatttgatgacacaccattttacaaggcactgtggagagaagcgagagagtgcctctatgtggagccagatgaaggaacatccgagaagggcgtgtattggtacaggaacaagtattgatggagcaaccaatgggccatagtgggagttatggaagttttgtcatgtattagtacataattagtagaatgttataaataagtggatttgccgcgtaaaaaaaaaaaaaaaa

SEQ ID NO: 5356 - protein, 387 aa, Glycine max
  misc_feature: Ceres CLONE ID no. 1051286
  misc_feature: Ceres CDNA ID no. 40351579
  misc_feature (93)..(344): Pfam Name: FA_desaturase PFAM Desc: Fatty acid desaturase
MGLAKETTMGGRGRVAKVEVQRKKPLSRVPNTKPPFTVGQLKKAIPPHCFQRSLLTSFSYVVYDLSFAFIFYIATTYFHLLPQPFSLIAWPIYWVLQGCLLTGVWVIAHECGHHAFSKYQWVDDVVGLTLHSTLLVPYFSWKISHRRHHSNTGSLDRDEVFVPKPKSKVAWFSKYLNNPLGRAVSLLVTLTIGWPMYLAFNVSGRPYDSFASHYHPYAPIYSNRERLLIYVSDVALFSVTYSLYRVATLKGLVWLLCVYGVPLLIVNGFLVTITYLQHTHFALPHYDSSEWDWLKGALATMDRDYGILNKVFHHITDTHVAHHLFSTMPHYHAMEATNAIKPILGEYYQFDDTPFYKALWREARECLYVEPDEGTSEKGVYWYRNKY

SEQ ID NO: 5357 - DNA, 561 bp, Glycine max
  misc_feature: Ceres CLONE ID no. 1051389
  misc_feature: Ceres CDNA ID no. 25447144
  CDS (141)..(305): REFERENCED BY SEQ ID NO: 5358
atttttttgtttggagaaaacagagaaggttaagaaatatacatgttgaggtagcaacagagaaaccctaaattgaagagaagagtgaagattgagagttagggtttaagcgaaatcagatcagagaagaaggcatcatcatgtttccaggaatgttcatgcgcaagccagacaaagctgcagcactgaagcagctgaaatctcacgcggccatgttcggggcatgggttgttgttattcgagtcaccccttacgttcttcactttctcagcaccgagaaagaggaacttaagctcgagctttagcttctcactcttcctcggcagagtggattttgaggagttggatgtgtccttgggttcgggacaataatggagtaatgtatttatgtaacccttgaaattgtgaggccatgatgatatagagtttaatcatatttccttttgcatttgtaatataaatgtgtttgggctagttgtgaaacgatagacaatttcaatagtcaattatagatatactcaattattgttataattgattacatgaaaaaaaaaaaaaaaa

SEQ ID NO: 5358 - protein, 54 aa, Glycine max
  misc_feature: Ceres CLONE ID no. 1051389
  misc_feature: Ceres CDNA ID no. 25447144
MFPGMFMRKPDKAAALKQLKSHAAMFGAWVVVIRVTPYVLHFLSTEKEELKLEL

SEQ ID NO: 5359 - DNA, 1020 bp, Glycine max
  misc_feature: Ceres CLONE ID no. 1051419
  misc_feature: Ceres CDNA ID no. 29191237
  CDS (66)..(809): REFERENCED BY SEQ ID NO: 5360
ttatcttatcttcgttaataatatcgacgcgtttaattgatttttctctcgcaaaagaagaaaacatggaatcgttctcgtccttcttcgattctcagccaggcagcagaagctggagctatgattctctcaagaacctccatcagatctctccgtccgtccagaatcatctcaagcgggtttatctcactttgtgttgtgcccttgttgcgtctgcctttggagcttacctccacgtgctctggaacatcggtggtatcctcacaaccattgcatgctgtggaagcatgatttggcttctctcatgtcctccttatcagcaacaaaagaggctctcacttctcttcctgtctgccgttcttgaaggtgcctctgttggccccttgatcaaagtggctgttgattttgacccaagcatccttatcactgcgtttgtcggaactgcgatagcgtttatctgcttctcaggagcagcgatgctggcaagacgtagagagtatctctacctcggaggacttctctcttctggcttgtccatgcttatgtggcttcagtttgcctcttcgatctttggtggctctgcctctatctttaagtttgagctctacttcggattgttgatctttgtgggatacatggtggtcgacacacaagagattatagagaaggcacacctcggcgacatggactatgtgaaacatgcgttgacccttttcaccgattttgtggctgtgtttgtccgtgttctcatcataatgctgaagaactcggcagataaagaggagaagaagaagaagaggagaaactgagactaaaagtgacaaggaaagctaataagagtgggtgttttaaataacatgaaagctttggtgtttttacgtgttaggacgcacttttggtttgcgtattcctcttatcgcacacgattgtaaatggatcaagtagttttcgtttttgtctcgactctcgttcactttcgtaatgtccaaagtatttcctctactaaaaaaaaaaaaaaaa

SEQ ID NO: 5360 - protein, 247 aa, Glycine max
  misc_feature: Ceres CLONE ID no. 1051419
  misc_feature: Ceres CDNA ID no. 29191237
  misc_feature (31)..(235): Pfam Name: UPF0005 PFAM Desc: Uncharacterised protein family UPF0005
  misc_feature: Homolog of GI Number: 17981376 NR Desc: bax inhibitor
  misc_feature: Homolog of GI Number: 14719274 NR Desc: Bax inhibitor 1
  misc_feature: Homolog of GI Number: 21280947 NR Desc: putative Bax inhibitor
  misc_feature: Homolog of GI Number: 21593125 NR Desc: Bax inhibitor
  misc_feature: Homolog of GI Number: 39579116 NR Desc: Bax inhibitor
  misc_feature: Homolog of GI Number: 14719276 NR Desc: Bax inhibitor 1
  misc_feature: Homolog of GI Number: 13940165 NR Desc: BAX inhibitor 1
  misc_feature: Homolog of GI Number: 50904931 NR Desc: Bax inhibitor
  misc_feature: Homolog of GI Number: 15236582 NR Desc: Bax inhibitor
  misc_feature: Homolog of GI Number: 50904933 NR Desc: putative Bax inhibitor
MESFSSFFDSQPGSRSWSYDSLKNLHQISPSVQNHLKRVYLTLCCALVASAFGAYLHVLWNIGGILTTIACCGSMIWLLSCPPYQQQKRLSLLFLSAVLEGASVGPLIKVAVDFDPSILITAFVGTAIAFICFSGAAMLARRREYLYLGGLLSSGLSMLMWLQFASSIFGGSASIFKFELYFGLLIFVGYMVVDTQEIIEKAHLGDMDYVKHALTLFTDFVAVFVRVLIIMLKNSADKEEKKKKRRN

SEQ ID NO: 5361 - DNA, 719 bp, Glycine max
  misc_feature: Ceres CLONE ID no. 1051491
  misc_feature: Ceres CDNA ID no. 29191469
  CDS (87)..(491): REFERENCED BY SEQ ID NO: 5362
atctgctccggatctctctctctctctctctctctctctctctctctctacgtgtaagactggtgattgttttttaggcggggaaaatgtcaggaaaaggagcgaaagggctgataatggggaaatccagcggcaacgacaaggacaaagacaagaagaaacccactactcgctcttctcgtgctggtcttcagtttccagtcgggagagtccacagactgttgaaaggaaggtcaaccgctcacggacgcgttggcgcaaccgcagcggtttacacagccgctattttggagtatctaaccgcggaagtcctcgagctcgctggcaacgcgagcaaggatctgaaagtgaagcgtatcacgccgaggcatctgcagctcgctattcgcggtgatgaagagcttgatactctcatcaaaggaactattgctggtggtggtgtcattcctcacatccacaagtctctcatcaacaaatctggccaagagtagcttttgtctctgtctctcgaacctttttgcttaaatataatcgtttgtgtgttaagacattagtagagagaaaactcttgggagattgtttgttttgttaaagactcacgtgtgacttgtttgttggctcttgtttctgatttaatgttttggtgtttgttcatatgaaaacagttgcataagttttctaatcttttttttttcttccggctaaaaaaaaaaaaaaaa

SEQ ID NO: 5362 - protein, 134 aa, Glycine max
  misc_feature: Ceres CLONE ID no. 1051491
  misc_feature: Ceres CDNA ID no. 29191469
  misc_feature (29)..(105): Pfam Name: Histone PFAM Desc: Core histone H2A/H2B/H3/H4
  misc_feature: Homolog of GI Number: 21536635 NR Desc: putative histone H2A
  misc_feature: Homolog of GI Number: 30024110 NR Desc: putative histone H2A
  misc_feature: Homolog of GI Number: 21592838 NR Desc: histone H2A.F/Z
  misc_feature: Homolog of GI Number: 34902610 NR Desc: Putative histone H2A
  misc_feature: Homolog of GI Number: 31432099 NR Desc: putative histone H2A
  misc_feature: Homolog of GI Number: 50918585 NR Desc: putative histone H2A protein
  misc_feature: Homolog of GI Number: 6319146 NR Desc: H2A protein
  misc_feature: Homolog of GI Number: 62319094 NR Desc: histone H2A
  misc_feature: Homolog of GI Number: 62087582 NR Desc: H2A histone family
  misc_feature: Homolog of GI Number: 63615089 NR Desc:  histone H2A.F/Z variant
  misc_feature: Useful for making ornamental plants with modified flowers
MSGKGAKGLIMGKSSGNDKDKDKKKPTTRSSRAGLQFPVGRVHRLLKGRSTAHGRVGATAAVYTAAILEYLTAEVLELAGNASKDLKVKRITPRHLQLAIRGDEELDTLIKGTIAGGGVIPHIHKSLINKSGQE

SEQ ID NO: 5363 - DNA, 1067 bp, Glycine max
  misc_feature: Ceres CLONE ID no. 1051549
  misc_feature: Ceres CDNA ID no. 25447434
  CDS (134)..(826): REFERENCED BY SEQ ID NO: 5364
gtgttggagtgtttggcaataaaaggaggagacgacgacgcggggaatctccggtctccaccgacatcccttctcttccaaatcctgtgatcccattccaatccgttccgttcagctcaatctcaaaatctcaatggccgataatgagcaaccgaataacgaggaggcaagtcctcttctccaccagccccatccccaacccaaatccgaaccaccaacgccacctgagactcccgagtttctcctcggctggaccgctgatgggctccctctggcccacgccagcgtcgtgggccagcccatgggccgcgccccttggaactcctccatctgcgcctgtctcggccaaaacgatcacttctgcagcagcgatctcgaagtttgtcttcttgggagtgtggctccttgtgtgctgtatggaagcaatgttgagagacttggatctgctcgtgggacatttgccaatcactgcttgccttattctggaatgtatataattggaaattcctgctttggttggaattgccttgcaccctggttttcctatcctagccggactgctattcgtcgcaggttcaatttagagggaagttgcgaagcacttaatagatcatgcgggtgctgcggaagcattttggaagatgaggtgcagcgtgaacattgtgagtcagcatgtgacttggcaactcatgtcttctgtcatgtatgtgctctttgtcaagaaggtcgtgagctccgtcgtaggttacctcatcctggctttaatgctcaaccagtactggttatgattcccccaggagagcagaccatgggacgtgaggcttgaaaattttctccttcatcttggaagtgctattcgtgcgtatattaccgttgtcttgctctatattatataacttgatgttgtcgaaccgtgtgatgactttattaaaagagggccctttattattattttttttttttttataaataagaacatgaaacatcatcataatttctgtttgcttccctactgttttgtatcatatatggatttgaaatgatattggagaaaaaaaaaaaaaaaa

SEQ ID NO: 5364 - protein, 230 aa, Glycine max
  misc_feature: Ceres CLONE ID no. 1051549
  misc_feature: Ceres CDNA ID no. 25447434
  misc_feature (62)..(201): Pfam Name: PLAC8 PFAM Desc: PLAC8 family
  misc_feature: Homolog of GI Number: 34485633 NR Desc: SAT5
  misc_feature: Homolog of GI Number: 34895986 NR Desc: P0011G08.35
MADNEQPNNEEASPLLHQPHPQPKSEPPTPPETPEFLLGWTADGLPLAHASVVGQPMGRAPWNSSICACLGQNDHFCSSDLEVCLLGSVAPCVLYGSNVERLGSARGTFANHCLPYSGMYIIGNSCFGWNCLAPWFSYPSRTAIRRRFNLEGSCEALNRSCGCCGSILEDEVQREHCESACDLATHVFCHVCALCQEGRELRRRLPHPGFNAQPVLVMIPPGEQTMGREA

SEQ ID NO: 5365 - DNA, 649 bp, Triticum aestivum
  misc_feature: Ceres CLONE ID no. 1051977
  misc_feature: Ceres CDNA ID no. 40351580
  CDS (53)..(475): REFERENCED BY SEQ ID NO: 5366
acacttactcttcgcgccgccgctcggagcaagcgccgcaggggacgcagccatgtcgaagcgcgggaggggaggatcggcggggaacaagttccggatgtcgcttggtctgccggtggcagcgacggtgaactgcgccgacaacacgggcgccaagaacctgtacatcatctccgtgaagggcatcaagggaaggctcaaccgcctgccgtcggcctgcgtcggcgacatggtcatggccaccgtcaagaaggggaagcccgacctcaggaagaaggtcatgccggcggtcatcgtgcgccagcgcaagccatggcgccgaaaggacggtgtcttcatgtacttcgaagataatgctggggtgattgtgaatccgaagggtgagatgaaaggatctgctatcacaggacccattggtaaggagtgtgctgatctctggcctaggatcgctagcgcagcaaatgccattgtctgaggagcttgttggggataatgatatgtttccttagtttcagattggtactggatgatgaatgtacctgagttatttgtttgccagatatttatccgaatgaggctcaacctcttaacttttttgctctgtgggttaaaagatctcttttatcacttatcaaaaaaaaaaaaaaaa

SEQ ID NO: 5366 - protein, 140 aa, Triticum aestivum
  misc_feature: Ceres CLONE ID no. 1051977
  misc_feature: Ceres CDNA ID no. 40351580
  misc_feature: The plant is abnormally small.
  misc_feature: Useful for making plants with modulated biomass
  misc_feature (19)..(140): Pfam Name: Ribosomal_L14 PFAM Desc: Ribosomal protein L14p/L23e
MSKRGRGGSAGNKFRMSLGLPVAATVNCADNTGAKNLYIISVKGIKGRLNRLPSACVGDMVMATVKKGKPDLRKKVMPAVIVRQRKPWRRKDGVFMYFEDNAGVIVNPKGEMKGSAITGPIGKECADLWPRIASAANAIV

SEQ ID NO: 5367 - DNA, 623 bp, Triticum aestivum
  misc_feature: Ceres CLONE ID no. 1052127
  misc_feature: Ceres CDNA ID no. 35383335
  CDS (84)..(380): REFERENCED BY SEQ ID NO: 5368
atcactccagtcttctcgtgcaaccgaaacaacatacaagcagctcagtcttgtttgctggaagctcagtgggaaggggatcaatggcggggaagctctaccagctcatggccaggctgcacctggccaagggacgggcgtcggcggacgtgcccaagggccacttcgcggtctacgtcggcaagcagcggaagcggttcgtcatcccgacggcgtacctgaggcacccgtccttcctcgtgctgctcaagcgggtggaggacgagttcggcttcgaccaccgcgccggcggcggcctcaccatcccctgctcagagggcgacttcgccgacatcgtcggcggctgctcatcctcctccccaccagtggactaccactagatatatagcagctcatccgaccacaccggcgccggcgcatgcatcggccggtccagacatcgttatgatcactgctgcttagattactacattaggacggatacattttgttattagctgaggattaattcttcttggaacttggcattagtactcatcaatgtactgttgcatttgcttgaaccctgtaatcactcgtcacattaagggatatgagaaagtctgccaaaaaaaaaaaaaaaa

SEQ ID NO: 5368 - protein, 98 aa, Triticum aestivum
  misc_feature: Ceres CLONE ID no. 1052127
  misc_feature: Ceres CDNA ID no. 35383335
  misc_feature (1)..(89): Pfam Name: Auxin_inducible PFAM Desc: Auxin responsive protein
  misc_feature: Homolog of GI Number: 20149046 NR Desc: auxin
  misc_feature: Homolog of GI Number: 34365625 NR Desc: At2g21210
  misc_feature: Homolog of GI Number: 51969274 NR Desc: auxin
  misc_feature: Homolog of GI Number: 7270867 NR Desc: auxin
  misc_feature: Homolog of GI Number: 20149044 NR Desc: putative auxin
  misc_feature: Homolog of GI Number: 255573 NR Desc: orf 15A
  misc_feature: Homolog of GI Number: 20149050 NR Desc: auxin
  misc_feature: Homolog of GI Number: 7270869 NR Desc: putative auxin
  misc_feature: Homolog of GI Number: 55296995 NR Desc: putative auxin
  misc_feature: Homolog of GI Number: 4406817 NR Desc: putative auxin
MAGKLYQLMARLHLAKGRASADVPKGHFAVYVGKQRKRFVIPTAYLRHPSFLVLLKRVEDEFGFDHRAGGGLTIPCSEGDFADIVGGCSSSSPPVDYH

SEQ ID NO: 5369 - DNA, 823 bp, Triticum aestivum
  misc_feature: Ceres CLONE ID no. 1052135
  misc_feature: Ceres CDNA ID no. 25445586
  CDS (207)..(668): REFERENCED BY SEQ ID NO: 5370
atcggtctagttagtgttgatctcggctggtgatttcactagtccgcgcaggtgcgaagccggattcggcccgctgctcccctctcgtctcccgtcgtcggacccccggcgacccctcttccaagccgccatcgtcctcacctccagcgcgacttcgtcttctccaccactcgacccagctcagcagcaaggcggcggacgggaggatgatgggaagcaacaaccccggcggcgcagggggagggggagggatggccccgggcacgggggccggcggcagcgacgggcggcatgacgacgaggccgtgctcaccgagttcctctcctccctcatggactacaatcccacgatcccggacgagctcgtggagcactacctcggccgaagcggcttccactgccccgacatacgcctaacaaggctggttgctgtagctgctcaaaagttcatttcagacattgcaagcgactctcttcagcactgcaaagccagggttgcagcacctatcaaagataacaagagcaaacaaccgaaggatagacgccttgtattgaccatggatgatctttcaaaagcattgcgtgagcatggtgttaatctgaaacatccagagtattttgcggacagcccatcagcagggatgcccccctcaacaagagaggagtagaatcgatcgctccttcaacaagagagggctagaatccattgtttcttatatgcgtacccagtgaatgggcgtgtccttccaactttatgtaacaaagccttataagcatgtatgcaatggcagttgatgtattatggaccaaaaaaaaaaaaaaa

SEQ ID NO: 5370 - protein, 138 aa, Triticum aestivum
  misc_feature: Ceres CLONE ID no. 1052135
  misc_feature: Ceres CDNA ID no. 25445586
  misc_feature: null
  misc_feature: Useful for making plants with altered Lignin content
  misc_feature: Useful for making plants with altered terpenoid content
  misc_feature (32)..(82): Pfam Name: TFIID_30kDa PFAM Desc: Transcription initiation factor TFIID 23
  misc_feature: Homolog of GI Number: 50726325 NR Desc: putative TATA box
  misc_feature: Homolog of GI Number: 39545934 NR Desc: TAF10
  misc_feature: Homolog of GI Number: 28416879 NR Desc: At4g31720
  misc_feature: Homolog of GI Number: 41529318 NR Desc: TATA box
  misc_feature: Homolog of GI Number: 57102914 NR Desc:  similar to Transcription initiation factor TFIID subunit 10
  misc_feature: Homolog of GI Number: 46518499 NR Desc: TAF10 RNA polymerase II
  misc_feature: Homolog of GI Number: 6119623 NR Desc: mTAFII30 protein
  misc_feature: Homolog of GI Number: 34859827 NR Desc: similar to Ilk protein
  misc_feature: Homolog of GI Number: 61866430 NR Desc:  similar to TAF10 RNA polymerase II
  misc_feature: Homolog of GI Number: 73988322 NR Desc:  similar to Transcription initiation factor TFIID subunit 10
MAPGTGAGGSDGRHDDEAVLTEFLSSLMDYNPTIPDELVEHYLGRSGFHCPDIRLTRLVAVAAQKFISDIASDSLQHCKARVAAPIKDNKSKQPKDRRLVLTMDDLSKALREHGVNLKHPEYFADSPSAGMPPSTREE

SEQ ID NO: 5371 - DNA, 706 bp, Triticum aestivum
  misc_feature: Ceres CLONE ID no. 1052215
  misc_feature: Ceres CDNA ID no. 25891891
  CDS (77)..(535): REFERENCED BY SEQ ID NO: 5372
atctcatctgcaatcccctctcctccttcaatcctccagcgaaaccccaccccgccccaccccaccgtcagcatccatggcgcccaaggccgagaagaagccggcggcgaagaagccagtggaggaggagcccgcggcggagaaggccgagaagaccccggccgggaagaagcccaaggccgagaagcggctgccggcgggcaagtcgtcggcggcggccaaggagggcggcaaggcgaagaagaaggccaagaagagcgtggagacgtacaagatctacatcttcaaggtgctgaagcaggtgcaccccgacatcggcatctcctccaaggccatgtccatcatgaactccttcatcaacgacatcttcgagaagctcgccggcgaggccgctaagctggcgaggtacaacaagaagcccaccatcacgtcccgggagatccagacctccgtccgcctcgtcctccccggcgagctcgccaagcacgccgtctccgagggcaccaaggctgtcaccaagttcacctcctcctgagtctcgtagttagctgtttgggtgtgtttgtggccgtgttatcgtgtaagaatcgcatcgctatgtttctggatctcgagaaatagtaacggtgcctgcctcaatgttcagtacatgctcgtgttattttgttctggtcttcaattcttcatctcgaaaaaaaaaaaaaaa

SEQ ID NO: 5372 - protein, 152 aa, Triticum aestivum
  misc_feature: Ceres CLONE ID no. 1052215
  misc_feature: Ceres CDNA ID no. 25891891
  misc_feature: No seed is being produced by the plant
  misc_feature: The plant flowers significantly late compared to wild-type.
  misc_feature: Useful for biocontainment applications
  misc_feature: Useful for making plants with modulated flowering time
  misc_feature (59)..(131): Pfam Name: Histone PFAM Desc: Core histone H2A/H2B/H3/H4
  misc_feature: Homolog of GI Number: 21801 NR Desc: histone H2B
  misc_feature: Homolog of GI Number: 34895832 NR Desc: putative histone H2B
  misc_feature: Homolog of GI Number: 34895838 NR Desc: putative histone H2B
  misc_feature: Homolog of GI Number: 34895896 NR Desc: putative histone H2B
  misc_feature: Homolog of GI Number: 577825 NR Desc: H2B histone
  misc_feature: Homolog of GI Number: 34895900 NR Desc: putative histone H2B
  misc_feature: Homolog of GI Number: 22323 NR Desc: H2B histone
  misc_feature: Homolog of GI Number: 34895904 NR Desc: putative histone H2B
  misc_feature: Homolog of GI Number: 34895888 NR Desc: putative histone H2B
  misc_feature: Homolog of GI Number: 34895908 NR Desc: putative histone H2B
  misc_feature: Useful for delaying flowering time
  misc_feature: Useful for increasing chlorophyll and photosynthetic capacity
  misc_feature: Useful for making plants with altered leaf shape eg curled leaves
  misc_feature: Useful for making plants with altered leaf shape eg curled leaves
  misc_feature: Useful for making plants with increased biomass and foliage
  misc_feature: Useful for making plants with increased biomass and foliage
  misc_feature: Useful for sterility
  misc_feature: Useful for sterility
MAPKAEKKPAAKKPVEEEPAAEKAEKTPAGKKPKAEKRLPAGKSSAAAKEGGKAKKKAKKSVETYKIYIFKVLKQVHPDIGISSKAMSIMNSFINDIFEKLAGEAAKLARYNKKPTITSREIQTSVRLVLPGELAKHAVSEGTKAVTKFTSS

SEQ ID NO: 5373 - DNA, 661 bp, Triticum aestivum
  misc_feature: Ceres CLONE ID no. 1052252
  misc_feature: Ceres CDNA ID no. 35383336
  CDS (94)..(417): REFERENCED BY SEQ ID NO: 5374
acttcacgcgcgccaccacacatcgtcgtcgtagtcgacattacacagaccacacgtacgtacacacaaaccctcgcacgaaccaaccaatccatggccgccgccgtgaagacgacgagagcgacgtgcgtgctgctgatcctgctcctgctggccgacgggcggtcaaggcccgtggctgggcaggctccaccggggcccgaggaggccgcgacaatcgaggcggatgcggacggccgtggcaacggcacccgcggcggcagcaggagcgacacgacggcgaaggtgttgagcaccatcgactgccaggtctgcgagtcgacgtgccgggtcaagtgcctcatcaacaacctcttacagtggggcagctgctaccagcactgcaaggccgacaactgcaacgagtggtgtaggtagccctccgtcgagctagcgagccggcggatgcatgacacgcgcatggatccatgcatggatcacgaggacgttcgttttttgcgattcaagggttgctttgaatacaacaaatcagctgctctatgttttcctttttacattcaatgaatctatatactttccatacgaaaatccatttgtaaatgtactcatcttccattttgctgaagtcattgaactgttctcaccaaaaaaaaaaaaaaaa

SEQ ID NO: 5374 - protein, 107 aa, Triticum aestivum
  misc_feature: Ceres CLONE ID no. 1052252
  misc_feature: Ceres CDNA ID no. 35383336
MAAAVKTTRATCVLLILLLLADGRSRPVAGQAPPGPEEAATIEADADGRGNGTRGGSRSDTTAKVLSTIDCQVCESTCRVKCLINNLLQWGSCYQHCKADNCNEWCR

SEQ ID NO: 5375 - DNA, 577 bp, Triticum aestivum
  misc_feature: Ceres CLONE ID no. 1052347
  misc_feature: Ceres CDNA ID no. 36530690
  CDS (62)..(373): REFERENCED BY SEQ ID NO: 5376
accaaactccacagcgactccaaatctctcgtggtagacagcttccatctcatctccggcgatgtctgggcgtggcaagggcggcaaggggctcggcaagggcggcgccaagcgccaccggaaggtgctccgggacaacatccagggcatcaccaagccggcgatccggaggctggccaggaggggcggtgtgaagcgcatctcggggctcatctacgaggagacccgcggcgtcctcaagatcttcctcgagaacgtcatccgcgacgccgtcacctacaccgagcacgcccgccgcaagaccgtcaccgccatggacgtcgtgtacgccctcaagcgccagggccgcaccctctacggcttcggcggctgagcgccatcagcgcgctgccgctggctgacactgctgtttcctgctttgctctgtagtcttactcccccccgtcgtgaatccagtgcgctggctatgcttgtttctgtagtttgtctagtgagatccaacttctagttgtaactcctatcgtttcgtttcgctgcaatgaaaagttaattccaatctgtaaaaaaaaaaaaaaaa

SEQ ID NO: 5376 - protein, 103 aa, Triticum aestivum; identical to SEQ ID NO: 8
  misc_feature: Ceres CLONE ID no. 1052347
  misc_feature: Ceres CDNA ID no. 36530690
  misc_feature (66)..(92): Pfam Name: TAF PFAM Desc: TATA box binding protein associated factor
  misc_feature: Homolog of GI Number: 62663604 NR Desc:  similar to Histone H2B 291B
  misc_feature: Homolog of GI Number: 74004256 NR Desc:  similar to germinal histone H4 gene
  misc_feature: Homolog of GI Number: 61835903 NR Desc:  similar to germinal histone H4 gene
  misc_feature: Homolog of GI Number: 76631272 NR Desc:  similar to germinal histone H4 gene
  misc_feature: Homolog of GI Number: 61820747 NR Desc:  similar to germinal histone H4 gene
  misc_feature: Homolog of GI Number: 74004178 NR Desc:  similar to germinal histone H4 gene
  misc_feature: Homolog of GI Number: 76651053 NR Desc:  similar to germinal histone H4 gene
  misc_feature: Homolog of GI Number: 57098917 NR Desc:  similar to germinal histone H4 gene
  misc_feature: Homolog of GI Number: 50911547 NR Desc: histone H4
  misc_feature: Homolog of GI Number: 62648434 NR Desc:  similar to germinal histone H4 gene

SEQ ID NO: 5377 - DNA, 702 bp, Triticum aestivum
  misc_feature: Ceres CLONE ID no. 1052418
  misc_feature: Ceres CDNA ID no. 35383337
  CDS (1)..(270): REFERENCED BY SEQ ID NO: 5378
ccatctcaggacacgcgcggaccaagaagcagccagctacgcgccgctctagctagctcgagatatggaagggagcgtggcgacgacgacgctcctggtggcgggggctgcggcggcgctcctcctgctcccgctgctgctgcccccactgccgccgccgccgtcgctgcttctactcgtccccgtggcgctcatgctcgcgctgctcgccctcgccttcctcgtccccaaccgcgacgtcgcggccgcccgcggagcgccgtggtctgaccacttcccgcgctgaattgacggtagcgcgttgtggtcgtcgttcgcggttgcagcaagggaaggggccggcgccattgaggagatcgatcgacgcgcagtgcgcacgcgcccttcaccgtgcaagctgcagtaagtaagtttgtgcatcagatccatttactggagggcatgcagaaatactgaggggtcgatgtgcatctgcaaggtaggagaattgaccgtgtattattttgagcgagatgaagatccatttagtggggggcatgcagatattcttcttcttccatgcataaatgccttcgtcgatagtattgctatatactccatttactggagtatttgcatatgctgtaagaatacgaccaatgatcgttgaaacctcgatgaaccaggtcagagtgcccctttttttcaaaaaaaaaaaaaaaa

SEQ ID NO: 5378 - protein, 73 aa, Triticum aestivum
  misc_feature: Ceres CLONE ID no. 1052418
  misc_feature: Ceres CDNA ID no. 35383337
  misc_feature: Homolog of GI Number: 50904545 NR Desc: B1139B11.15
  misc_feature: Homolog of GI Number: 50924554 NR Desc: OSJNBa0058G03.5
  misc_feature: Homolog of GI Number: 34907496 NR Desc: B1099D03.18
MEGSVATTTLLVAGAAAALLLLPLLLPPLPPPPSLLLLVPVALMLALLALAFLVPNRDVAAARGAPWSDHFPR

SEQ ID NO: 5379 - DNA, 730 bp, Triticum aestivum
  misc_feature: Ceres CLONE ID no. 1052433
  misc_feature: Ceres CDNA ID no. 25445714
  CDS (88)..(549): REFERENCED BY SEQ ID NO: 5380
acaccatcccagcccccacctcccctccctccagcaaactcacgcatcccaccaccgaagctcccaaccccacccgaagcggcagccatggcccccaaggcagacaagaagccggccgccgagaacaaggtcgagaaggcggcggagaagacccccgcgggcaagaagcccaaggccgagaagcggctgccggcgggcaagacggcgtccaaggaggccggcggcgagggcaagacccggggccgcaagaagggcagcaaggccaagaagggcgtggagacgtacaagatctacatcttcaaggtgctgaagcaggtgcaccccgacatcggcatctcctccaaggccatgtccatcatgaactccttcatcaacgacatcttcgagaagctcgccggggagtcggccaagctcgcccgctacaacaagaagcccaccatcacctcccgggagatccagacctccgtccgcctcgtcctccccggggagctcgccaagcacgccgtctccgagggcaccaaggccgtcaccaagttcacctcctcctagactgaagatgcgccgcttgttgtgccagatgtggctgtctgatgtatctctgctgttgactctgcttacctgcaagtagaagtagtggtagtagttcgtgtggtagaagattgccaacgctttgttggcttcttggttgtgagaactgaacgtgttgcttttgctaaaaaaaaaaaaaaaa

SEQ ID NO: 5380 - protein, 153 aa, Triticum aestivum; identical to SEQ ID NO: 2012
  misc_feature: Ceres CLONE ID no. 1052433
  misc_feature: Ceres CDNA ID no. 25445714
  misc_feature: No seed is being produced by the plant
  misc_feature: The plant flowers significantly late compared to wild-type.
  misc_feature: Useful for biocontainment applications
  misc_feature: Useful for making plants with modulated flowering time
  misc_feature (60)..(132): Pfam Name: Histone PFAM Desc: Core histone H2A/H2B/H3/H4
  misc_feature: Homolog of GI Number: 122033 NR Desc: Histone H2B.2
  misc_feature: Homolog of GI Number: 22325 NR Desc: H2B histone
  misc_feature: Homolog of GI Number: 577825 NR Desc: H2B histone
  misc_feature: Homolog of GI Number: 21801 NR Desc: histone H2B
  misc_feature: Homolog of GI Number: 34895900 NR Desc: putative histone H2B
  misc_feature: Homolog of GI Number: 34895838 NR Desc: putative histone H2B
  misc_feature: Homolog of GI Number: 34895896 NR Desc: putative histone H2B
  misc_feature: Homolog of GI Number: 34895832 NR Desc: putative histone H2B
  misc_feature: Homolog of GI Number: 50932769 NR Desc: putative histone H2B
  misc_feature: Homolog of GI Number: 1708107 NR Desc: Histone H2B
  misc_feature: Useful for delaying flowering time
  misc_feature: Useful for increasing chlorophyll and photosynthetic capacity
  misc_feature: Useful for making plants with altered leaf shape eg curled leaves
  misc_feature: Useful for making plants with altered leaf shape eg curled leaves
  misc_feature: Useful for making plants with increased biomass and foliage
  misc_feature: Useful for making plants with increased biomass and foliage
  misc_feature: Useful for sterility
  misc_feature: Useful for sterility

SEQ ID NO: 5381 - DNA, 559 bp, Triticum aestivum
  misc_feature: Ceres CLONE ID no. 1052536
  misc_feature: Ceres CDNA ID no. 25446490
  CDS (1)..(417): REFERENCED BY SEQ ID NO: 5382
aaattcccctttgaaaacaaggaagcccaaaatttctccccccgaaataaaagcatccaatggccatggagagcggctcggaggcggcggcggcggcgggctactacggcggcacctgcgggtgggagacgccgaagcgggaggagtgccgcatcctggcgacgctgccctgccccgcggcgccgaggaaggccgcggccgacttcggcacgccccggcgcccgcccaagaacggctacttccagccgccggacctcgaggccctcttcgcgctcgccccgcgccggcaggcctcgtgcgcgtgattcggcccgctccgaaggcatgcggcggagagctgtgttttggattgattttgggaagtgtagatactcagccggtttctcctctgttgtactattagcggtagcggattagggggtgttctagggggtagtagtatgtagctaggtaggcgggcagaggaactgatatgggctgggagctgatgagcatatggtttttgtatcggctggaatgagaaatccttatttgtttcttggcaaaaaaaaaaaaaaaa

SEQ ID NO: 5382 - protein, 81 aa, Triticum aestivum
  misc_feature: Ceres CLONE ID no. 1052536
  misc_feature: Ceres CDNA ID no. 25446490
  misc_feature: Homolog of GI Number: 34908220 NR Desc: P0406G08.25
  misc_feature: Homolog of GI Number: 34897416 NR Desc: putative FtsJ cell division protein
  misc_feature: Homolog of GI Number: 50947927 NR Desc: FtsJ cell division protein
  misc_feature: Homolog of GI Number: 8778541 NR Desc: F22G5.11
MAMESGSEAAAAAGYYGGTCGWETPKREECRILATLPCPAAPRKAAADFGTPRRPPKNGYFQPPDLEALFALAPRRQASCA

SEQ ID NO: 5383 - DNA, 854 bp, Triticum aestivum
  misc_feature: Ceres CLONE ID no. 1052558
  misc_feature: Ceres CDNA ID no. 25092184
  CDS (131)..(592): REFERENCED BY SEQ ID NO: 5384
gcataccccgaaggatcattgttcgctgacgccgcctcctttggtccttcctctcctcccgtcccctcccctccgccgcgatcgatcccaagagcacgaaaccctagccctagcccaacccatcttctccatggccaacagcaacctcccccgccgcatcatcaaggagacgcagcggctgctcagcgaaccagctcctgggatcagtgcttcaccatcagaggagaacatgcgctacttcaatgtcatgatccttggcccaactcagtcgccatatgaaggaggagtattcaaacttgagttgtttttacctgaagaatatccaatggctccgccaaaggttcgctttctcacaaaaatttaccatccaaacattgacaagcttgggaggatatgccttgatatcttaaaggacaagtggagtcctgcccttcagatccgaacagttcttttgagcattcaagcactcctcagcgctccaaatcctgacgatccgcttgctgacaatgtggcaaagcactggaaggccaacgaaacagaagctgtggaaacagccaaagagtggacccgtgtctacgctaatgatgcatgagctctgcatgctatgactgattgctcagtagtcttggcaaggtgaggcgaaatcgactatcaagtggtttaaaatggaggtccaactgatgaactagtgaaatgtgaagtttcctccttgcatcgcgtgtactgagtgtgatgtatattattaccctagttgggatgcgacggacccatgtgcatgtatattttgtttgagtgttgtaccgtaataaacatcctgaagtcatgtgtgccttttctgaaaaaaaaaaaaaaaa

SEQ ID NO: 5384 - protein, 153 aa, Triticum aestivum; identical to SEQ ID NO: 5028
  misc_feature: Ceres CLONE ID no. 1052558
  misc_feature: Ceres CDNA ID no. 25092184
  misc_feature (9)..(146): Pfam Name: UQ_con PFAM Desc: Ubiquitin
  misc_feature: Homolog of GI Number: 34911052 NR Desc: ubiquitin
  misc_feature: Homolog of GI Number: 21555312 NR Desc: E2
  misc_feature: Homolog of GI Number: 71040675 NR Desc: ubiquitin
  misc_feature: Homolog of GI Number: 23308287 NR Desc: At1g78870/F9K20_8
  misc_feature: Homolog of GI Number: 5381319 NR Desc: ubiquitin
  misc_feature: Homolog of GI Number: 79590480 NR Desc: ubiquitin conjugating enzyme/ ubiquitin
  misc_feature: Homolog of GI Number: 3834310 NR Desc: Similar to Ubiquitin
  misc_feature: Homolog of GI Number: 16758810 NR Desc: ubiquitin
  misc_feature: Homolog of GI Number: 30583959 NR Desc: Homo sapiens ubiquitin
  misc_feature: Homolog of GI Number: 54673547 NR Desc: Ubiquitin

SEQ ID NO: 5385 - DNA, 559 bp, Triticum aestivum
  misc_feature: Ceres CLONE ID no. 1052590
  misc_feature: Ceres CDNA ID no. 40351581
  CDS (69)..(437): REFERENCED BY SEQ ID NO: 5386
atcctcccattctcattctgcacggcacagcacagcacagcacagcggagaagaggaaggagagagagatgactgcgtccgtctcctacgggctgcgagctcttccgacgtggtccagctctgtgtccggtgacgaccactgctcggcgctggccatgtcggtgtcggcgcgggggccccggtcgacgcggccccttcggacgccggcgaggatgggcaatgtaaacgagggcaagggcatcttcgcgcccctggtggtggtggtgcgcaacatcgtcggacgcaagcgcttcaaccagctcaggggcaaggccatcgcgctgcactcccaggtgatcaccgagttctgtaagaccatcggcgctgaccccaagcagaggcagggcttgatccgcctcgccaagaagaacggagagaagctcggattccttgcttgacccgcctcacaatccccccttccttctcctaccttttctactagcaaaaaggaaattccttggagttggagattgcatgcatgcatgtatgtatactagtcttataaaaaaaaaaaaaaaaa

SEQ ID NO: 5386 - protein, 74 aa, Triticum aestivum
  misc_feature: Ceres CLONE ID no. 1052590
  misc_feature: Ceres CDNA ID no. 40351581
MGNVNEGKGIFAPLVVVVRNIVGRKRFNQLRGKAIALHSQVITEFCKTIGADPKQRQGLIRLAKKNGEKLGFLA

SEQ ID NO: 5387 - DNA, 499 bp, Triticum aestivum
  misc_feature: Ceres CLONE ID no. 1052670
  misc_feature: Ceres CDNA ID no. 40351582
  CDS (56)..(367): REFERENCED BY SEQ ID NO: 5388
acacatcgaaaacacacaagcgaatctcaatttaaaactttccgagaaaagaaaaatgtctgggcgaggaaaaggaggaaagggattgggaaagggaggagccaagaggcacaggaaggtcctccgtgacaacatccagggcatcacgaagcctgcgattcgtcgtttagctagaagaggtggcgtgaagcgtatcagcggtttgatctacgaggagactcgcggtgttctcaagatctttctcgagaatgtgattcgtgatgccgttacttacactgagcacgctaggaggaagacggtgacggcgatggatgttgtctacgcgttgaagaggcagggacgaactttatatggattcggcggttgatgggatgattttgtaaatcgcgtttgtctttagggtttgtttaatctattaaagctgttttagagtttcgtttagaatgtttcagcgttttgaattgaatgaaaacactttttctcaaaaaaaaaaaaaaaa

SEQ ID NO: 5388 - protein, 103 aa, Triticum aestivum; identical to SEQ ID NO: 8
  misc_feature: Ceres CLONE ID no. 1052670
  misc_feature: Ceres CDNA ID no. 40351582
  misc_feature (66)..(92): Pfam Name: TAF PFAM Desc: TATA box binding protein associated factor

SEQ ID NO: 5389 - DNA, 908 bp, Triticum aestivum
  misc_feature: Ceres CLONE ID no. 1052767
  misc_feature: Ceres CDNA ID no. 25891073
  CDS (282)..(773): REFERENCED BY SEQ ID NO: 5390
accgaaacggctcgccccaaacccaacccaacacagcaccgcgacaaggccggcggggctgatctcacactcacagcactacgccctccgttctcattctccactgccgcggtgctgctgctgacgagtgacgagcaccgcgcacgcgccgcatccactccaccgcgcacgcgagtacaaatcccggacctgagaacctcctcgccacaagccccacgcccgcagatcagtacactcgtagcggcagcggcagcagcagcagcggaaactgaagcgggaggatgaacgggtaccgcaacctcgcctcgtcccctccggcgcccagcggcggcggggagccgcagccagccccgtccccggccgcggcgaaggagggcaagtgggagggggcggcggtcggcgcggcggccatcgtcaggaacctctcgtcctcctcccagaggttcgcgtccgtggagcggagcaagtccaccggcgcccaccgcggcggcggcttccaggcggccgtgaggagggccttctccatgcggaggcagccggcgtccggcctctcggaggggtactggcggatccacgacggcctggacgacggcgacgacgacgccgaggcgcccgaggaggtcgacgggcagaagaagcatcaggtggcggaggccgcggtgccgggagacgccgcggcgagcaacgacgagatcggcaaggagacgaagaagaagaagaggggtcacatcttcaaggcgtgcaagaagcttcttgggttcaaacatgtctagtctagtcaacaagaagcttcttggattcaagatccatggacgttcttgatgtgcctctgttttggatcttgttcttgtctcgttcgtcgttttgagtaaataaagagcttgggttcgttaaaaaaaaaaaaaaaa

SEQ ID NO: 5390 - protein, 163 aa, Triticum aestivum
  misc_feature: Ceres CLONE ID no. 1052767
  misc_feature: Ceres CDNA ID no. 25891073
  misc_feature: Homolog of GI Number: 66776896 NR Desc: LigA
  misc_feature: Homolog of GI Number: 67988031 NR Desc: ROK
  misc_feature: Homolog of GI Number: 66778899 NR Desc: UvrD/REP helicase
  misc_feature: Homolog of GI Number: 67985322 NR Desc: Prolyl
  misc_feature: Homolog of GI Number: 66776365 NR Desc: PE
  misc_feature: Homolog of GI Number: 66777445 NR Desc: LigA
  misc_feature: Homolog of GI Number: 67987177 NR Desc: 4Fe
  misc_feature: Homolog of GI Number: 66776974 NR Desc: ABC
  misc_feature: Homolog of GI Number: 57900284 NR Desc: putative Ser/Arg
  misc_feature: Homolog of GI Number: 66780099 NR Desc: PE
MNGYRNLASSPPAPSGGGEPQPAPSPAAAKEGKWEGAAVGAAAIVRNLSSSSQRFASVERSKSTGAHRGGGFQAAVRRAFSMRRQPASGLSEGYWRIHDGLDDGDDDAEAPEEVDGQKKHQVAEAAVPGDAAASNDEIGKETKKKKRGHIFKACKKLLGFKHV

SEQ ID NO: 5391 - DNA, 903 bp, Triticum aestivum
  misc_feature: Ceres CLONE ID no. 1052819
  misc_feature: Ceres CDNA ID no. 25891776
  CDS (123)..(653): REFERENCED BY SEQ ID NO: 5392
cctttttacctgccccagccgaacgccgttgaaccgggcgaccaatccctccctgccgccggcgagcaatctccgccaccgccgccgccgcagcagcagcagaagcagctcggccgtccgggatgggcgacgagcgcgtgaaggcggaggcgctgcagatcctgggcctgttccaggtgctcccgcgcctcgtcgtcttcgacctcgactacaccctgtggcccttctactgcgagtgccgctccaagagggagtcgcccagcctgtaccgccacgccaagggcatcatctgcgcgctcaaggagaagggggtcgacatggccattgcgtcgcgctcgcccacctccgacatcgccagggtcttcatcgacaagctcgagctccagcccatgttcgtcgcacaggaaatattctccagctggactcacaagacagagcatttccaaaagatccacagaaaaactggggttccatacaagtccatgctgttctttgacgatgaggacaggaatattcaatcggtatcgaaaatgggagttacgagtgttctagtaaacaacggattgaatctcgacatgtttaagttgggcctcagtaatttcgctactactgttgctgcatctgaacccgcacctgcaccagaggacaattaaccttatattgtacaagtaaaaacagcagacagggaaaacgcccatgatttacggatacttgtgaaaaataaacctgtatttcttgtagttgattgcccttgctcatgggcagtaaagcaaggatgactactgctgaaaccattctgtgtgtaagtttgtgttacttgagtgcgttccttgtgaaaggaaatgaatttggaaccatttgattgacgatgttatagattgtttggcaaaaaaaaaaaaaaaa

SEQ ID NO: 5392 - protein, 176 aa, Triticum aestivum
  misc_feature: Ceres CLONE ID no. 1052819
  misc_feature: Ceres CDNA ID no. 25891776
  misc_feature (48)..(147): Pfam Name: Hydrolase PFAM Desc: haloacid dehalogenase
  misc_feature: Homolog of GI Number: 50198845 NR Desc: At2g14110
  misc_feature: Homolog of GI Number: 62734294 NR Desc: haloacid dehalogenase
  misc_feature: Homolog of GI Number: 73962658 NR Desc:  similar to magnesium
  misc_feature: Homolog of GI Number: 27700106 NR Desc: similar to magnesium
  misc_feature: Homolog of GI Number: 56554161 NR Desc: Chain D Phosphotyrosine Phosphatase Mdp
  misc_feature: Homolog of GI Number: 57335887 NR Desc: Mg
  misc_feature: Homolog of GI Number: 66848820 NR Desc: magnesium dependent phosphatase
MGDERVKAEALQILGLFQVLPRLVVFDLDYTLWPFYCECRSKRESPSLYRHAKGIICALKEKGVDMAIASRSPTSDIARVFIDKLELQPMFVAQEIFSSWTHKTEHFQKIHRKTGVPYKSMLFFDDEDRNIQSVSKMGVTSVLVNNGLNLDMFKLGLSNFATTVAASEPAPAPEDN

SEQ ID NO: 5393 - DNA, 608 bp, Triticum aestivum
  misc_feature: Ceres CLONE ID no. 1053019
  misc_feature: Ceres CDNA ID no. 25891892
  CDS (63)..(458): REFERENCED BY SEQ ID NO: 5394
atcgactcaggcgcagccaccaccgaagcagactccggagagcaggcaaggcgaggaccgagatggcgcgcggcgtggcggcggctaccaagggcggcgcgggcgccgggaagaagaaggggtcggtcaccttcgtgatcgactgcaccaagcccgtcgacgacaagatcatggagatcgcgtcgctcgagaagttcctgcaggagcgcatcaaggtcgccgggggcaaggccggcaacctcggggactccgtcaccgtcgcccgcgacaagagcaaggtcaccgtcacctccgacggagccttctcgaagaggtacttgaagtacttgacgaagaagtacctgaagaagcacaatgtgcgtgactggcttcgggtgatttcatccaacaaggaccgcagcgtctacgagctccggtacttcaacattgctgagaacgagggcgaggaggaggactaatatgcactgccatgcttctgtgtcgtgtgaaactttgaacttgttggagcactcctgcagtagagttttgatgtttatttttttcacccatgttttgaattgtggccaggacgacatgtgatggatgcttagacaaaaaaaaaaaaaaaa

SEQ ID NO: 5394 - protein, 131 aa, Triticum aestivum
  misc_feature: Ceres CLONE ID no. 1053019
  misc_feature: Ceres CDNA ID no. 25891892
  misc_feature (17)..(131): Pfam Name: Ribosomal_L22e PFAM Desc: Ribosomal L22e protein family
  misc_feature: Homolog of GI Number: 42733478 NR Desc: BRI1
  misc_feature: Homolog of GI Number: 50939919 NR Desc: putative 60S ribosomal protein L22
  misc_feature: Homolog of GI Number: 6714454 NR Desc: putative 60S ribosomal protein  L22
  misc_feature: Homolog of GI Number: 12642842 NR Desc: putative 60S ribosomal protein L22
  misc_feature: Homolog of GI Number: 6056419 NR Desc: 60S ribosomal protein  L22
  misc_feature: Homolog of GI Number: 33150766 NR Desc: heparin
  misc_feature: Homolog of GI Number: 73956651 NR Desc:  similar to 60S ribosomal protein L22
  misc_feature: Homolog of GI Number: 57086899 NR Desc:  similar to ribosomal protein L22
  misc_feature: Homolog of GI Number: 45383834 NR Desc: ribosomal protein L22
  misc_feature: Homolog of GI Number: 13592059 NR Desc: ribosomal protein L22
MARGVAAATKGGAGAGKKKGSVTFVIDCTKPVDDKIMEIASLEKFLQERIKVAGGKAGNLGDSVTVARDKSKVTVTSDGAFSKRYLKYLTKKYLKKHNVRDWLRVISSNKDRSVYELRYFNIAENEGEEED

SEQ ID NO: 5395 - DNA, 483 bp, Triticum aestivum
  misc_feature: Ceres CLONE ID no. 1053087
  misc_feature: Ceres CDNA ID no. 40351583
  CDS (269)..(481): REFERENCED BY SEQ ID NO: 5396
ctctcttacgcttgtgttttgtttgtgctactagctagctagcagcttggctcatcgcgggacatgaagaaggatgaagaggatgccaatgccaccatccccttcaagcccccgccatcccctccccaccatggctggtcgctcggcatgccgcagacgccgctccgctgacctcttcgtccccgtcttcgtcttcgtctccgtcgtcgtctcggttctaccgcagggcaaaggcgtggaggcatccgtgcaagcttagctcagaaaaatggtggagagttctgtattggcatgcgggaaagccaggcaattttttttttcctcagttccgacttgtttccgctttcctctccttgctaattgctgtccttgttcttgctgctctaggtcgcttcgttcgaccttcagactatttgtatctcgtttcgttgcgaattttaaggccatccgatccatggatgttatacaaaaaaaaaaaaaaaa

SEQ ID NO: 5396 - protein, 61 aa, Triticum aestivum
  misc_feature: Ceres CLONE ID no. 1053087
  misc_feature: Ceres CDNA ID no. 40351583
MKRMPMPPSPSSPRHPLPTMAGRSACRRRRSADLFVPVFVFVSVVVSVLPQGKGVEASVQA

SEQ ID NO: 5397 - DNA, 694 bp, Triticum aestivum
  misc_feature: Ceres CLONE ID no. 1053159
  misc_feature: Ceres CDNA ID no. 40351584
  CDS (72)..(491): REFERENCED BY SEQ ID NO: 5398
atattcgaaaaaagatcttcgttttctctgcgtctcctttcagcagtctttgacagcgtcttgattcagccatggctaacgcggcgtcgggaatggcagtccatgatgactgcaagctaaggttcctggaactgaaggcgaagaggacgcaccgtttcattgtttacaagatcgaggagaagcagaagcaagtgattgttgagaaagttggtgagcctattcaaacctacgaggactttgctgcgagcctccctgctgaagagtgccgatacgccatttatgacttcgactttgtcactgcggagaattgccagaagagcaagattttcttcattgcgtggtgtcctgacgtagcaaaggtgagaagcaagatgatctatgcgagctccaaggacaggttcaagcgtgagcttgatggaattcaagtggagcttcaagcgactgatccaactgagatggatcttgatgttttcaaaagccgtgtcaattaaaaaacaaatattctctctctctctctctctctctctttgaataagcttctttggctcttacagtttcctgcgactgtataaaaacataacgccctttattctatccttatctggtctcgtcttctgcgtcgttgttaccgaacagtgttttcatcttatattgaaagttatcccaacgtttgtgctgaaaaaaaaaaaaaaaa

SEQ ID NO: 5398 - protein, 139 aa, Triticum aestivum
  misc_feature: Ceres CLONE ID no. 1053159
  misc_feature: Ceres CDNA ID no. 40351584
  misc_feature: The plant senesces significantly late copared to wild-type.
  misc_feature: Useful for making plants with modulated time to senescence
  misc_feature (12)..(139): Pfam Name: Cofilin_ADF PFAM Desc: Cofilin/tropomyosin
MANAASGMAVHDDCKLRFLELKAKRTHRFIVYKIEEKQKQVIVEKVGEPIQTYEDFAASLPAEECRYAIYDFDFVTAENCQKSKIFFIAWCPDVAKVRSKMIYASSKDRFKRELDGIQVELQATDPTEMDLDVFKSRVN

SEQ ID NO: 5399 - DNA, 464 bp, Triticum aestivum
  misc_feature: Ceres CLONE ID no. 1053642
  misc_feature: Ceres CDNA ID no. 40351585
  CDS (1)..(216): REFERENCED BY SEQ ID NO: 5400
aagggtttcctcgcgccgccgccgccgcagcttcctccccgccgtcacgatgccgtcgcacaagaccttccggatcaagcagaagctggccaagaagcagcgccagaaccgccccatcccctactggatccgcatgaggaccgacaacaccatcaggtacaacgccaagcgcaggcactggcgccgcaccaagctcggattctaagcgggggatgacgacgatgacacccgttgccgccgacgggagaagggtctagggtacctagggtttatgacgtctcgttgtttttgcaagctagcatgtgactccgggatgcctgttttaagatttcgcttgtgttgaaagatattattatttactgcttgtagcctacctgggataccatcatattttgctgattatggaactacttttatcctgcttaagctctgtattttgcccgagttgaaaaaaaaaaaaaaaa

SEQ ID NO: 5400 - protein, 51 aa, Triticum aestivum; identical to SEQ ID NO: 2442
  misc_feature: Ceres CLONE ID no. 1053642
  misc_feature: Ceres CDNA ID no. 40351585
  misc_feature (9)..(51): Pfam Name: Ribosomal_L39 PFAM Desc: Ribosomal L39 protein

SEQ ID NO: 5401 - DNA, 664 bp, Triticum aestivum
  misc_feature: Ceres CLONE ID no. 1053866
  misc_feature: Ceres CDNA ID no. 40351586
  CDS (149)..(373): REFERENCED BY SEQ ID NO: 5402
cccagcgcagagcaccgcagcaattcgatcccaagcatccccccaccaacctcaccatcctcgtaccgcacgtccaggcagctaatcagtcaagctcaagcatccaagccggcctcggattgaaggcatccatccgggagggaggggaatggggttcgtgctggtgatctcgctgcccttcatattcttcaccatcctgctcggcttcggctgctacttcctcggcaagcacaagggccgcgaggagatgcgcgccggcgtcggcgcccagatctacggcacgccgctgccgccgcctggcgtggccgggcagtccccggggccgtacccggtcccggttccgatgaagaaggagggccccgacgccgtctgatcggtcgagcttcctcctcctcctcggctggagcgttggtgttgtttgtttactgggtttgattattaccgtgtacatggagtcatttgttgctcgtttcttgtgtggtgtttactgtgaaggaggaagggatgttgatccggtgtgatgatttgtgatcacagttgcgtttctatgagatgcgcaaatcgatgtaatgaatattagtttgtgataatcaatcaaccgttgcttggtttgtaaaaaaaaaaaaaaaaaaaaaaaaaaaaaaaaccaaaaaaaaaaaaaaaa

SEQ ID NO: 5402 - protein, 74 aa, Triticum aestivum
  misc_feature: Ceres CLONE ID no. 1053866
  misc_feature: Ceres CDNA ID no. 40351586
MGFVLVISLPFIFFTILLGFGCYFLGKHKGREEMRAGVGAQIYGTPLPPPGVAGQSPGPYPVPVPMKKEGPDAV

SEQ ID NO: 5403 - DNA, 1273 bp, Triticum aestivum
  misc_feature: Ceres CLONE ID no. 1054059
  misc_feature: Ceres CDNA ID no. 25087947
  CDS (112)..(1140): REFERENCED BY SEQ ID NO: 5404
aacacgcaaagcagagtccattccactagtcgagagaaaatcaagagcagcgaccagagctaggggggaaaagcagaggcaaagcatcgaaagaagagaaagagagcgaggatgtgtggcggagcgatcctcgccgagctcatcccgggcgcgccggctcgccgcgccgcgtccggccacggccacgtctggcccggcaagggcgccaagcagacaaaggccgcggcggccgacgacttcgaggccgcgttccgggagttcaacgaggactctgatgaggaggacgtggtgatggtggtggagcggcaggaggaggtggccgagagcaagcccttcgtgttcgccgcttcgcccaagaagaagcagcagcagcagcaggaggaggaggaggagcaggcggcgcccgcccgccgcaggaagccggcgcagtaccggggcgtgcggcgccggccgtggggcaagtgggccgccgagatccgcgaccctgtcaagggcgtccgcgtctggctcggcaccttcccctccgccgacgccgccgcgctcgcctacgacgaggccgcgcgcgccatccgcgggcccagggccaagctcaacttcccttcctcctccgccgtcgccgccgcggccccgggagcacgcaagcgaggccgcgccggcgccgacgcggcccccgctgccaagccagcgcaggtcatcaccctcgtcgacgaagaggaggagcacgcgtcgtccttgttcgtcaagcacgaggccgacgcgagcgagggctccgagtccagcggcgccctccccgacttctcgtggcagggcgtgtcggcgttcgacgaggccccggcgtaccccgccccggagcccgagaccgagcagctcgcgaagcgggcgaggacgacggaggccgaggacgccgacgagggcatgtcggcccaccaggcgtccgactgcgactccgacgcgctgttcgacgcgctcctcttcgccgaccagttcgcctacttcaacggcggcgcctacgagtccctcgacagcctcttcagcgccgacgccgtgcagagcggcgccaccgccgcggacgaggcggccctggggctctggaccttcgacgacgactgcctcgtcgacgagtgcagcctgtcgttctagatcttcttgttccgcgtgcgtccgttcatgtcatgcgatgcggtggtgtaaatagagtagcttgccttgtgaaatctgtgtaagagtttgacatcgttgtgaaagattttgcctaacaaaaaaaaaaaaaaaa

SEQ ID NO: 5404 - protein, 342 aa, Triticum aestivum
  misc_feature: Ceres CLONE ID no. 1054059
  misc_feature: Ceres CDNA ID no. 25087947
  misc_feature (105)..(168): Pfam Name: AP2 PFAM Desc: AP2 domain
  misc_feature: Homolog of GI Number: 50920401 NR Desc: Putative EREBP
  misc_feature: Homolog of GI Number: 50920399 NR Desc: Putative AP2 domain containing transcription factor
  misc_feature: Homolog of GI Number: 60100224 NR Desc: ethylene
  misc_feature: Homolog of GI Number: 50920395 NR Desc: Putative AP2 domain containing protein
  misc_feature: Homolog of GI Number: 33331083 NR Desc: ethylene responsive protein
  misc_feature: Homolog of GI Number: 78708522 NR Desc: AP2 domain
  misc_feature: Homolog of GI Number: 70905121 NR Desc: root abundant factor
  misc_feature: Homolog of GI Number: 51979032 NR Desc: PREDICTED B1056G08.120 gene product
  misc_feature: Homolog of GI Number: 51979384 NR Desc: PREDICTED OJ1311_D08.9 gene product
  misc_feature: Homolog of GI Number: 30683064 NR Desc: AP2 domain
MCGGAILAELIPGAPARRAASGHGHVWPGKGAKQTKAAAADDFEAAFREFNEDSDEEDVVMVVERQEEVAESKPFVFAASPKKKQQQQQEEEEEQAAPARRRKPAQYRGVRRRPWGKWAAEIRDPVKGVRVWLGTFPSADAAALAYDEAARAIRGPRAKLNFPSSSAVAAAAPGARKRGRAGADAAPAAKPAQVITLVDEEEEHASSLFVKHEADASEGSESSGALPDFSWQGVSAFDEAPAYPAPEPETEQLAKRARTTEAEDADEGMSAHQASDCDSDALFDALLFADQFAYFNGGAYESLDSLFSADAVQSGATAADEAALGLWTFDDDCLVDECSLSF

SEQ ID NO: 5405 - DNA, 474 bp, Triticum aestivum
  misc_feature: Ceres CLONE ID no. 1054269
  misc_feature: Ceres CDNA ID no. 40351587
  CDS (3)..(380): REFERENCED BY SEQ ID NO: 5406
atcaaccgcccaccccatccaggcgcttctcgctttcagaaagaggaaggacagagaaagaaagaagccagaaagcctcgagtgaagtgagccatggcctcagcaacgttcatagaggtgatcctcgccatcatcctgcctccggtcggcgtcttcctgcgctacggcctcgccgtggagttctggatctgcctcttgctgaccctactggggtacataccggggatcatctacgcggtgtatgtgctggtggcttaagcaacggcctctgctgcagggtccaggcttggacgagcgagtcgctctgcaagagcaacaggggctgtcttcagagggcatgtgttgatcagttcgtgcttgtttatgtatgtattgattgagtattgtggatttttctttctttggaactcggtattgttgacctgtgatgtgataagtatgtttatgatcttaaatacaaaaaaaaaaaaaaaa

SEQ ID NO: 5406 - protein, 54 aa, Triticum aestivum
  misc_feature: Ceres CLONE ID no. 1054269
  misc_feature: Ceres CDNA ID no. 40351587
  misc_feature (4)..(54): Pfam Name: UPF0057 PFAM Desc: Uncharacterized protein family UPF0057
MASATFIEVILAIILPPVGVFLRYGLAVEFWICLLLTLLGYIPGIIYAVYVLVA

SEQ ID NO: 5407 - DNA, 996 bp, Glycine max
  misc_feature: Ceres CLONE ID no. 1054556
  misc_feature: Ceres CDNA ID no. 29191749
  CDS (29)..(781): REFERENCED BY SEQ ID NO: 5408
aattccaagttacaacttggctgtgtctatggatcgcgctcagcttctgttgctgggtgtacccctcttcctcttctgctctgacctcttctcccttttcactcatcatccaccgccgccaccccaccaccaccaccaccaccaccatcctcacccgccgcaccaccaccaccacccaccgcaccaccatcaccacccaccccaccaccaccatcatcacccgccccaccaccatcaccagccggtgacaatagatttccctcccgagaaacccaccaacaatattgcaactccgggtctcggcaacactgtccacatcaatttctgctcttcctgctcttacaagggaacagcagtgacgatgaaaaatatgttggagattgcatttcctggaactgaggttattcttgcgaattatcccccaacgcttccgaagcgtctgctaagcaaattggttccagttgttcagattggtgttataggggttgttgttgcaggggaacatatttttccaatgttgggttttgttgcacctcctccttggtattacaacttgcgtgctaataggtttggaaccattgcaagtacttggcttcttgggaatgccttgcagtcattcttacagagctctggggctttcgaagtttacttcaatggtgaactggttttctctaaactgaaggagggaaggtttcctggagagatcgagttgaaggatctgattaccaaaaagatgacaaattctatacgtgtcaatggtgtgtcagaattgacctcttagtgcctttggtggagacatattttgagctgtcataaattatgtaactgggcctgccattccactacgaagtaaaggttgatatacagatataataggattatcatgttgtaaggtttccagatgtatactggagtatgaactttctgtattgaaagaactaagtgattgttgaaggcaaaactcagttaatagtttgtgcaaaaaaaaaaaaaaaa

SEQ ID NO: 5408 - protein, 250 aa, Glycine max
  misc_feature: Ceres CLONE ID no. 1054556
  misc_feature: Ceres CDNA ID no. 29191749
  misc_feature: Homolog of GI Number: 552196 NR Desc: histidine
  misc_feature: Homolog of GI Number: 12669897 NR Desc: hypothetical esophageal gland cell secretory protein 6
  misc_feature: Homolog of GI Number: 42761512 NR Desc: similar to Volvox carteri f. nagariensis. Pherophorin
  misc_feature: Homolog of GI Number: 50924466 NR Desc: OSJNBa0006B20.16
  misc_feature: Homolog of GI Number: 17560336 NR Desc: predicted CDS
  misc_feature: Homolog of GI Number: 28628318 NR Desc: hypothetical histidine
  misc_feature: Homolog of GI Number: 27881787 NR Desc: MGC53818 protein
  misc_feature: Homolog of GI Number: 32442462 NR Desc: cystatin domain fetuin
MDRAQLLLLGVPLFLFCSDLFSLFTHHPPPPPHHHHHHHHPHPPHHHHHPPHHHHHPPHHHHHHPPHHHHQPVTIDFPPEKPTNNIATPGLGNTVHINFCSSCSYKGTAVTMKNMLEIAFPGTEVILANYPPTLPKRLLSKLVPVVQIGVIGVVVAGEHIFPMLGFVAPPPWYYNLRANRFGTIASTWLLGNALQSFLQSSGAFEVYFNGELVFSKLKEGRFPGEIELKDLITKKMTNSIRVNGVSELTS

SEQ ID NO: 5409 - DNA, 812 bp, Glycine max
  misc_feature: Ceres CLONE ID no. 1054730
  misc_feature: Ceres CDNA ID no. 24766016
  CDS (81)..(461): REFERENCED BY SEQ ID NO: 5410
agcatcagcaattcagcgtcaagtatcctcttccttcttctgcatcaactcatcttattagagtttttgactaatcaattatggcctatgagataactgagataaagaagattggcataggcctaattggtttcggcatatttttcgcatttcttggcataattcttttctttgaccgtggtttgcttgctctgggaaatattttttccttggcaggggtagccattttgcttggttggcgttccacgtgggcactcttcacatatagagcaaactttaagggttctgcatcatttctactaggtctctttttcatttgtgtgaggtggccaattgttggtataatacttgaaatatacagttgtgtttttctcttcagtggattttggtcatctatcaaagtgttcctctatcatatccctgttgttggatggattatacagtttatctctcctccttgattgtcacagaagggataactgatgccttagtatatggctaatcatgggtttcgattgtattggtaatttttccaatgacttgtgcatgaatgcaatgttaagctagtttttccaagagtttgcatcaggcagattagcttcctttagtgagaagtatcgcagcatgttatttatgtagaagagttggtacttggtagccatattttgttgctttaaatgtaaacaagaatacaagctggttatgctgttcagttgtctgatagcatgagggcttgctactgatgtcagactgaacatatattaaccttcggctttatgcgccttgtcattgttaaaaaaaaaaaaaaaaaa

SEQ ID NO: 5410 - protein, 126 aa, Glycine max
  misc_feature: Ceres CLONE ID no. 1054730
  misc_feature: Ceres CDNA ID no. 24766016
  misc_feature (29)..(121): Pfam Name: Got1 PFAM Desc: Got1
  misc_feature: Homolog of GI Number: 51964144 NR Desc: PREDICTED OJ1669_F01.17 gene product
  misc_feature: Homolog of GI Number: 38603916 NR Desc: At3g03180
  misc_feature: Homolog of GI Number: 78708240 NR Desc: Got1
  misc_feature: Homolog of GI Number: 50938913 NR Desc: NFkB activating protein
  misc_feature: Homolog of GI Number: 68365016 NR Desc:  similar to UPF0198 protein CGI
  misc_feature: Homolog of GI Number: 48110113 NR Desc: similar to ENSANGP00000015000
  misc_feature: Homolog of GI Number: 76666457 NR Desc:  similar to UPF0198 protein CGI
  misc_feature: Homolog of GI Number: 73997496 NR Desc:  similar to UPF0198 protein CGI
  misc_feature: Homolog of GI Number: 61677905 NR Desc: CG32576
  misc_feature: Homolog of GI Number: 57118003 NR Desc: KISS1 isoform f
MAYEITEIKKIGIGLIGFGIFFAFLGIILFFDRGLLALGNIFSLAGVAILLGWRSTWALFTYRANFKGSASFLLGLFFICVRWPIVGIILEIYSCVFLFSGFWSSIKVFLYHIPVVGWIIQFISPP

SEQ ID NO: 5411 - DNA, 853 bp, Glycine max
  misc_feature: Ceres CLONE ID no. 1054823
  misc_feature: Ceres CDNA ID no. 29191470
  CDS (94)..(669): REFERENCED BY SEQ ID NO: 5412
atcctgtccgggagcacggagccgcttcgttatccgctggccgctgctgctgcttctctgcgagtgagcgagtgaggaaagaggacggcgacgatggccggcatggcggcgctgcagggcgccatgggggcgctctccgtctcggccgcgagcaccagcgcattctggggcaacccgctcgccgccaccttctccgccgcgccgtctggggtcagattcatggccaagacaagcccaattgaaatgaggcttaagcgatgggaacggaagaagtgtaagccaaacagtcttcctatgctgcacaagatgcatgttagggtcggcgacacggtgcaggtcatcgcaggccgtgagaaaggtaaagttggggaagtcgtacggctttataagcacaacagcactgtgatagtgaaggatctgaacttgaagtcaaagcacaagaaaggcactgaggatgaaccgggtgaaattgtcatgattgaaggccccattcatagctcgaacatgatgctctactcaaaggagaagaacgtgacgagtagggttgggcacaaaatcctcgaggatggcaccaaggtccgctacctgaagaagaccggtgaagtaatcgacagcgttgacaactgggtgaaggtgttcaaggaaggagattctgagtcatcatcgtagtatggaaatgctgcgcatgctctcaaccttagctgcgcttattgctgcccaaacgcttactcggctggtgccactgcttgtactgtcagtttttttctagcttcagagcctcttttgtaaattactactactactacaaagttgtcaccatttttgcaaaaaaaaaagaaaaaaaaaaaaaaaa

SEQ ID NO: 5412 - protein, 191 aa, Glycine max
  misc_feature: Ceres CLONE ID no. 1054823
  misc_feature: Ceres CDNA ID no. 29191470
  misc_feature (74)..(107): Pfam Name: KOW PFAM Desc: KOW motif
  misc_feature: Homolog of GI Number: 52076895 NR Desc: putative 50S ribosomal protein L24
  misc_feature: Homolog of GI Number: 30102926 NR Desc: At5g54600
  misc_feature: Homolog of GI Number: 1694974 NR Desc: plastid ribosomal protein
  misc_feature: Homolog of GI Number: 322771 NR Desc: ribosomal protein L24 precursor
  misc_feature: Homolog of GI Number: 81485 NR Desc: ribosomal protein L24 precursor
  misc_feature: Homolog of GI Number: 30696487 NR Desc: 50S ribosomal protein L24
  misc_feature: Homolog of GI Number: 53764198 NR Desc: COG0198: Ribosomal protein L24
  misc_feature: Homolog of GI Number: 22297636 NR Desc: 50S ribosomal protein L24
  misc_feature: Homolog of GI Number: 48893982 NR Desc: COG0198: Ribosomal protein L24
  misc_feature: Homolog of GI Number: 32307620 NR Desc: ribosomal protein rpL24
MAGMAALQGAMGALSVSAASTSAFWGNPLAATFSAAPSGVRFMAKTSPIEMRLKRWERKKCKPNSLPMLHKMHVRVGDTVQVIAGREKGKVGEVVRLYKHNSTVIVKDLNLKSKHKKGTEDEPGEIVMIEGPIHSSNMMLYSKEKNVTSRVGHKILEDGTKVRYLKKTGEVIDSVDNWVKVFKEGDSESSS

SEQ ID NO: 5413 - DNA, 781 bp, Triticum aestivum
  misc_feature: Ceres CLONE ID no. 1054830
  misc_feature: Ceres CDNA ID no. 25446491
  CDS (95)..(487): REFERENCED BY SEQ ID NO: 5414
acccatcaatccacccatccctcagcgctcattgctagccagccacccccattactctccacctagcttaacaaccaccgccgccgccgctgctatggcttccaacaccgccaacgcggcctccgaggtgagcaacgccatcaccgacctcaacgaccacctcgccaccgccctcggagccggcgacgaggccggcaagacgaccgtcatcacgctggcgggggagaacaacggcgccgtgatggacgcggaggacctggtcgttgtcgaggccggcggcgagggggaggagggcgaggaggaggaggaggtgcacgtggccgcctacaccaacagcaactaccaggcggtgaacaactcggtgctcctcgccggcagctgcgccgtcagggaccccggcgtgcacgtcgtcatcgtggagcacgtcgacgacatccgcgactgcgacggcgacgagatcttcgaggacggtgaggtggccaagtgaggccatctatcatcgagcggtgcggatgacgatgttctgcttctactcaatttggtcggtcggtcggtcggtggcttcttcgggccgtctggagatgttgcgtactaccctgagtcgtttggagtttatttaatttctatatgagcgtttgatcatgcacatgtatgcatatgtttatgtattgcatttatatgtatacgtcctcctagtgtctgcaaacatatttgtatgttatgtaagtttgcctcatgtgcggttctgaaatatttgccactcctaaaaaaaaaaaaaaaa

SEQ ID NO: 5414 - protein, 130 aa, Triticum aestivum
  misc_feature: Ceres CLONE ID no. 1054830
  misc_feature: Ceres CDNA ID no. 25446491
  misc_feature: Homolog of GI Number: 50921225 NR Desc: OSJNBa0094O15.16
  misc_feature: Homolog of GI Number: 67987580 NR Desc: ABC transporter
  misc_feature: Homolog of GI Number: 53767039 NR Desc: COG1530: Ribonucleases G and E
  misc_feature: Homolog of GI Number: 66776663 NR Desc: RNase H
  misc_feature: Homolog of GI Number: 7248459 NR Desc: arabinogalactan protein
  misc_feature: Homolog of GI Number: 18958209 NR Desc: subtilisin
  misc_feature: Homolog of GI Number: 67985765 NR Desc: Pantoate
  misc_feature: Homolog of GI Number: 67989342 NR Desc: ABC transporter
  misc_feature: Homolog of GI Number: 66778899 NR Desc: UvrD/REP helicase
  misc_feature: Homolog of GI Number: 66779508 NR Desc: Aspartate/glutamate/uridylate kinase
MASNTANAASEVSNAITDLNDHLATALGAGDEAGKTTVITLAGENNGAVMDAEDLVVVEAGGEGEEGEEEEEVHVAAYTNSNYQAVNNSVLLAGSCAVRDPGVHVVIVEHVDDIRDCDGDEIFEDGEVAK

SEQ ID NO: 5415 - DNA, 821 bp, Triticum aestivum
  misc_feature: Ceres CLONE ID no. 1055006
  misc_feature: Ceres CDNA ID no. 25088012
  CDS (179)..(637): REFERENCED BY SEQ ID NO: 5416
ctgatggagtgttagtggactagggagctcgctctcacatccgctgctgcctgcctgctgcagacgacggccaaacagtagtttccccggttgctccacgcaccatcctccggacgcgcctcccagctccttcgtagctacctatcctgcgacaatacccaggcgggggatcctagccatgatggcatgtgccctctccatcgcccagcctaccgccctcgcgccgtgcggcggcggcggcggcggcagcagcaagagcatccccaggaatctcccgaagctgcgaagccccatggtttcaggcaggatgagaagtcgcggtgtcgttgccagggctgcgcaggacagttcagaagcctcctccgggagcgtcgtcaaatacgtcaagagttcgttcaacactactgaagacatatttgctctagcgggtatcggctttgcagccattgcggcattctgggcttccatgatgcttattggggtcatcgacaagctccctgttctccctcttttcttcgaactaatcggaatagcagttgcatggtggtttatctacgggaacctcctcttcaagccagacagggaaaagtttctggagaacatcaaaagctcagtatctcgaatcttggggcagtaacttcgccgcgaagacaaagtacatcctgcctacgacatacattttctttgggcctgtcagaaaacatttagctgtgcgctcatgttaggcatctgcgtcaccgttgtccgttctagatgtaatacgctatctcctgtacaggttaaatcaagcattcttctggtggccaaaaaaaaaaaaaaaa

SEQ ID NO: 5416 - protein, 152 aa, Triticum aestivum
  misc_feature: Ceres CLONE ID no. 1055006
  misc_feature: Ceres CDNA ID no. 25088012
MMACALSIAQPTALAPCGGGGGGSSKSIPRNLPKLRSPMVSGRMRSRGVVARAAQDSSEASSGSVVKYVKSSFNTTEDIFALAGIGFAAIAAFWASMMLIGVIDKLPVLPLFFELIGIAVAWWFIYGNLLFKPDREKFLENIKSSVSRILGQ

SEQ ID NO: 5417 - DNA, 1261 bp, Triticum aestivum
  misc_feature: Ceres CLONE ID no. 1055016
  misc_feature: Ceres CDNA ID no. 25400931
  CDS (65)..(895): REFERENCED BY SEQ ID NO: 5418
acttatcactcctcctgtccaccacaccaccacgctcgtccaccactaccaccagctggcagccatggctgcgagcacgaagaagctccgtccgctcctgctcaccctcctcctgctcctcaccaccgccgtcgcggcgtccaccatcgactgcgactgcgacaagccgaaggcccccaagccctcccacccgcccaagaccaagccccccaccaagggccccaagccgggacccaagggccccacctacccgtcgccggcgcccaagggccacctcccgcacccgccggtcgtcggcccgccgaagggtcacgtccctcgcccaccggtcgtcggccctccgaagggccacgtcccccgcccgccggtctacggtccgcccaagggccccatcacgcgcccgccggtcacagctcctcccgtcgtcgtcgggccgccggtgacctaccccacgccgccagtcacctaccccgcgccaccagtgaccgcccctccagtcacctacccggcgccaccagtgaccacccctccggtcacctaccccgcgccgccggtgaccaaccccccggtcacgtacccgtcgcctccggtgaacacgccgtgccctcctccaccgccggcgacgcccgcggcgcagacgtgcccggtggactcgctgaagatcggggcgtgcgtggacctgctgggcgggctggtgcacgtgggcctcggcgacccggtggtgaacaagtgctgcccgctgctggaggggctggtggagctggaggcggcggtgtgcctgtgcaccaccatccggctgaagctcctcaacatcaacctcgtcctccccctcgccctccagctcctcctcacctgcggcaagacccctcccaccggctacacctgctccatctagtcgagctaagctctgtgagtcactgagccatggcaagtggagattgatggatggatcgacatgagaggatgtcgaacgtcgtcgtcgcctatagctagacagctagtacgtagcgagcaagaagaagagatcgatcgatcagctaggagtggattgatgagtgcgtgtttgtttttcctcatttcttgtggtttccttttcgtgtttggttattaggtctgtgtgttgtggtttctagcaagaggtgataatcggtgtgtctactgatcgattaattaattgtgtggtcacagctgatggccaattggttaagctagcaaacactagtagtaagattccatgtcatgaacaaaaaaaaaaaaaaaa

SEQ ID NO: 5418 - protein, 276 aa, Triticum aestivum
  misc_feature: Ceres CLONE ID no. 1055016
  misc_feature: Ceres CDNA ID no. 25400931
  misc_feature (193)..(274): Pfam Name: Tryp_alpha_amyl PFAM Desc: Protease inhibitor/seed storage/LTP family
  misc_feature: Homolog of GI Number: 51535472 NR Desc: putative cell wall protein
  misc_feature: Homolog of GI Number: 3818416 NR Desc: proline
  misc_feature: Homolog of GI Number: 1155068 NR Desc: cell wall
  misc_feature: Homolog of GI Number: 2578444 NR Desc: ptxA
  misc_feature: Homolog of GI Number: 7268262 NR Desc: cell wall protein like
  misc_feature: Homolog of GI Number: 4206763 NR Desc: cell wall
  misc_feature: Homolog of GI Number: 19521 NR Desc: proline rich protein
  misc_feature: Homolog of GI Number: 19390 NR Desc: proline rich protein
  misc_feature: Homolog of GI Number: 15022163 NR Desc: putative proline
  misc_feature: Homolog of GI Number: 34898430 NR Desc: Similar to Zea mays PRP gene.
MAASTKKLRPLLLTLLLLLTTAVAASTIDCDCDKPKAPKPSHPPKTKPPTKGPKPGPKGPTYPSPAPKGHLPHPPVVGPPKGHVPRPPVVGPPKGHVPRPPVYGPPKGPITRPPVTAPPVVVGPPVTYPTPPVTYPAPPVTAPPVTYPAPPVTTPPVTYPAPPVTNPPVTYPSPPVNTPCPPPPPATPAAQTCPVDSLKIGACVDLLGGLVHVGLGDPVVNKCCPLLEGLVELEAAVCLCTTIRLKLLNINLVLPLALQLLLTCGKTPPTGYTCSI

SEQ ID NO: 5419 - DNA, 555 bp, Triticum aestivum
  misc_feature: Ceres CLONE ID no. 1055040
  misc_feature: Ceres CDNA ID no. 25445803
  CDS (93)..(335): REFERENCED BY SEQ ID NO: 5420
aaaaaacctttctttggctcggctagggtttgcccctgcctctgcctctgcctctgtcttccggcggccggcggcgaagcgactctcagacgatgtcgaagaagaacagcctctccaagcggaagaagcagcacgagttcgacctccagagggagaagaaggccaaggaggagcaggccaagaagctgcaggccaagaagtccaagatgaagattgatggcagcgataagaagaagaagggcagcagcttcaaggtgggcaagaagaaggtgaagacaaagctctcagcactgggaaaagccaaggccgcgcaagccatggagctcgacaactgactgattcccatggcctaaactgttgcaccaatgccagtcattttgttgtaatcgtcggagaaatgaagttcatttgctctggccaggtccatgtagtcgagcggcgttagatagatataagagttttggtacttctccagtcagatcttgcggttcctgatcgtgtatgatccacccctcgaaacatttctgattcagattcaaaaaaaaaaaaaaaaaa

SEQ ID NO: 5420 - protein, 80 aa, Triticum aestivum
  misc_feature: Ceres CLONE ID no. 1055040
  misc_feature: Ceres CDNA ID no. 25445803
MSKKNSLSKRKKQHEFDLQREKKAKEEQAKKLQAKKSKMKIDGSDKKKKGSSFKVGKKKVKTKLSALGKAKAAQAMELDN

SEQ ID NO: 5421 - DNA, 861 bp, Glycine max
  misc_feature: Ceres CLONE ID no. 1057283
  misc_feature: Ceres CDNA ID no. 40351588
  CDS (86)..(706): REFERENCED BY SEQ ID NO: 5422
gtttcgatttatagacctttgccttttgcattttacacaccaacaacgcgcttcactctagtttctcccttttcgattccaaaagatgagtgaagagcagcagcgacctgcgcctcgtctgaacgagaggatcctctcttccttgtccagacgttccgttgctgctcatccttggcatgatcttgagattggacctggagctccccagattttcaatgttgtcgttgagattacaaagggaagcaaagtcaaatatgaacttgacaaaaagactggactcatcaaggttgatcgtattctctactcatcagttgtttacccacacaactatggtttcgttcctcgcacattgtgtgaagacaatgaccctattgatgttttagtcatcatgcaggaacctgtgcttcctggttgttttctacgtgctcgtgctattggattaatgcctatgattgaccagggtgagaaagatgacaagatcatagcagtctgtgttgatgatcctgagtacaagcattacactgacatcaaagaacttcctcctcaccgtctctctgagatccgtcgtttctttgaagactacaagaagaacgagaacaaggaagttgcggttaatgattttctgccatctgagaatgctattgaagctatccagtactctatggacctctatgcggagtacattctccataccctgagacgttgaagcttcttctcctcagaacatctcttgcaacatcttggtttctgtttacctttttatctttaattgatacttcctctgcattttcttgtaagactttggatctttcatttgtccttgtcaactcattacgattgaatctaaaaaaaaaaaaaaaa

SEQ ID NO: 5422 - protein, 206 aa, Glycine max
  misc_feature: Ceres CLONE ID no. 1057283
  misc_feature: Ceres CDNA ID no. 40351588
  misc_feature: null
  misc_feature: Useful for making plants with modulated nitrogen use efficiency
  misc_feature (44)..(198): Pfam Name: Pyrophosphatase PFAM Desc: Inorganic pyrophosphatase
MSEEQQRPAPRLNERILSSLSRRSVAAHPWHDLEIGPGAPQIFNVVVEITKGSKVKYELDKKTGLIKVDRILYSSVVYPHNYGFVPRTLCEDNDPIDVLVIMQEPVLPGCFLRARAIGLMPMIDQGEKDDKIIAVCVDDPEYKHYTDIKELPPHRLSEIRRFFEDYKKNENKEVAVNDFLPSENAIEAIQYSMDLYAEYILHTLRR

SEQ ID NO: 5423 - DNA, 871 bp, Glycine max
  misc_feature: Ceres CLONE ID no. 1057444
  misc_feature: Ceres CDNA ID no. 29191256
  CDS (2)..(637): REFERENCED BY SEQ ID NO: 5424
cccatcctcgtcgtctccacgctaccgcctcctcccccccaaactcccaactacccgctctgctcctgagttccgagcccgctcgatctccgccgacgccgctccgtcaactcgcacggggaatctcgccatggccgccgcgtcctccgccacctccgtccacgacttcaccgtcaaggatgcaagcggcaaggacgtcgacctgagcgtctacaaggggaaggttcttctcattgttaacgtcgcttcgcagtgtggcttgaccaactccaactacaccgagctgagccagctgtacccgaagtacaaggaccaaggctttgagatcttggctttcccatgcaatcagtttggtgggcaggagcctggcaccaatgatgagatcgttcagtttgcctgcactcgcttcaaggccgagtaccccattttcgacaaggttgatgtcaatggcaacaatgtttctcccctatacaagttcctgaagtctagcaaaggtggccttttcggcgacagcatcaagtggaacttctccaagttcttggttgacaaggagggtcgcgttgtagaccgctatgccccgaccacttcccccctgagcattgagaaggatatcaagaagctgcttgggagctcttagacccgccgctggctggagcgtctggagaaatcggcactctgtattctagaaacaagaataatgtcgtgttgaaataaaatctgtacccagcatttcagaggatgcatctgctatattttcagcatcctgctctgtacttgttgtatatgtcgtgttaatgaatgaattcaaatattgtagctgttcggtgtgcctttcattggatcgtgttgttgtcgaaaaaaaaaaaaaaaa

SEQ ID NO: 5424 - protein, 168 aa, Glycine max
  misc_feature: Ceres CLONE ID no. 1057444
  misc_feature: Ceres CDNA ID no. 29191256
  misc_feature (9)..(118): Pfam Name: GSHPx PFAM Desc: Glutathione peroxidase
  misc_feature: Homolog of GI Number: 34334012 NR Desc: cytosolic glutathione peroxidase
  misc_feature: Homolog of GI Number: 6179604 NR Desc: glutathione peroxidase
  misc_feature: Homolog of GI Number: 48374968 NR Desc: putative glutathione peroxidase
  misc_feature: Homolog of GI Number: 44663004 NR Desc: phospholipid
  misc_feature: Homolog of GI Number: 48374955 NR Desc: putative glutathione peroxidase
  misc_feature: Homolog of GI Number: 6179600 NR Desc: GPX12Hv
  misc_feature: Homolog of GI Number: 50251353 NR Desc: putative glutathione peroxidase
  misc_feature: Homolog of GI Number: 21360380 NR Desc: glutathione peroxidase 1
  misc_feature: Homolog of GI Number: 22268405 NR Desc: putative glutathione peroxidase
  misc_feature: Homolog of GI Number: 27544804 NR Desc: phospholipid hydroperoxide glutathione peroxidase
  misc_feature: Useful for delaying flowering time
  misc_feature: Useful for making plants with altered leaf shape eg curled leaves
  misc_feature: Useful for making plants with increased biomass and foliage
MAAASSATSVHDFTVKDASGKDVDLSVYKGKVLLIVNVASQCGLTNSNYTELSQLYPKYKDQGFEILAFPCNQFGGQEPGTNDEIVQFACTRFKAEYPIFDKVDVNGNNVSPLYKFLKSSKGGLFGDSIKWNFSKFLVDKEGRVVDRYAPTTSPLSIEKDIKKLLGSS

SEQ ID NO: 5425 - DNA, 1047 bp, Glycine max
  misc_feature: Ceres CLONE ID no. 1057483
  misc_feature: Ceres CDNA ID no. 25891893
  CDS (89)..(739): REFERENCED BY SEQ ID NO: 5426
cttttccagcagagcctttccccacaaccgccgccgcccatcgcgcacagaaaccacgctccaagacaccaaaacccaccgatcccccatggagaacggcgacgaaaccctcgtctcccccgccgccgccgcctccgcggaggtcgagaaggctgcgcccaacggagacgtcgcgggcgaggaggtcaccctcgccgacgccgtccaccccgccaagtcctacgccgccgtcgccgccaacgccgagatcgaggacctccgcgccaccaagctcgacctcgaggagcagctcgccaacgccagccaggagaacaagaccctcgccgcggaggcccaccgcctcgagggcctcttctcccaggcccgggacgacgtcgccaccgccgagcacgccgccgccaccaccgaagaagaggtggcctcgctccgtgccgaggtcgagcgcctccaggccctcctcgaccgcaagaaggctgaccgtgaggccgacgagcgccaacgccaggagctcacggccgaggtggagaccgttcgtcaggcgaagctcaagctcgagaaggagatcgacgccctgaaggcttccgccgatgctaccaccgtgaaggacagggaggctgctccggacgctggggtcccgaaggaagaaggggtcgcctggcaggggatggcagcgggggcggccgctggtgctgccatcacggctgccgtcgttctgatctacctccgcctcaagaggtaatctggtgctctggtgcgcaggaagttttgctctgctgctacagcttatggaagatttgatgagtttgtcgtggtgatgctgttagtaccgaactgagagtaatatgtcttctatcagttagttgcttaatagactacaaaaacttaggtaatctggagaatggttatgtttcatccgtgtttttccttaatcatctacgggcttttggtggtgacgatgaatgtgtacacactttgtcaaccgagctaggctgtatgcttggttatactattatcgttatggttgctggcttaaaaaaaaaaaaaaaa

SEQ ID NO: 5426 - protein, 216 aa, Glycine max
  misc_feature: Ceres CLONE ID no. 1057483
  misc_feature: Ceres CDNA ID no. 25891893
  misc_feature: Homolog of GI Number: 6996142 NR Desc: VIP1 protein
  misc_feature: Homolog of GI Number: 57863856 NR Desc: putative VIP1 protein
  misc_feature: Homolog of GI Number: 50901988 NR Desc: OJ1116_H09.21
  misc_feature: Homolog of GI Number: 6523547 NR Desc: hydroxyproline
  misc_feature: Homolog of GI Number: 228938 NR Desc: Hyp
  misc_feature: Homolog of GI Number: 58388035 NR Desc: ENSANGP00000010844
  misc_feature: Homolog of GI Number: 22092 NR Desc: hydroxyproline
  misc_feature: Homolog of GI Number: 21992 NR Desc: extensin
  misc_feature: Homolog of GI Number: 12018147 NR Desc: vegetative cell wall protein gp1
  misc_feature: Homolog of GI Number: 67987177 NR Desc: 4Fe
MENGDETLVSPAAAASAEVEKAAPNGDVAGEEVTLADAVHPAKSYAAVAANAEIEDLRATKLDLEEQLANASQENKTLAAEAHRLEGLFSQARDDVATAEHAAATTEEEVASLRAEVERLQALLDRKKADREADERQRQELTAEVETVRQAKLKLEKEIDALKASADATTVKDREAAPDAGVPKEEGVAWQGMAAGAAAGAAITAAVVLIYLRLKR

SEQ ID NO: 5427 - DNA, 1083 bp, Glycine max
  misc_feature: Ceres CLONE ID no. 1057487
  misc_feature: Ceres CDNA ID no. 29191224
  CDS (63)..(809): REFERENCED BY SEQ ID NO: 5428
ctaagcgacaacattctacctctcatcctcccacttccttttctcggccattctaagccaccatgccgggctccatcgccttcggtcgcttcgatgactccttcagcttggcctctttcagggcctacatcgccgagttcatctccaccctcatcttcgtcttcgccggcgtcggctctgtcatcgcctacaccaaggtgagcggcggcgcgccgcttgacccatccgggctgatcgccgtggcgatttgccacgggtttgggctgttcgtcgcggtcgccatcggcgccaacatctccggcggccatgtgaaccctgccgtcaccttcggcctcgccctcggcggccagatcaccatcctcaccggcatcttctactgggttgcccagctcctcggcgccatcgtcggcgccttcctcgtccagttctgcaccggcgtggccacccctacacacgggctttccggcgtgggcgcctttgagggcgtcgtgatggagatcatcgtcaccttcgggctcgtctacaccgtgtacgccaccgccgccgaccccaagaagggatccctcggcaccatcgcccccatcgccatcggcttcatcgtcggcgccaacatcctcgtggccggccccttctccggcgggtccatgaaccctgcacgctccttcggccccgccgttgccagcggcgacttcaccaacatctgggtctactgggccggcccgctcatcggcggtggcctcgccggcgtcgtctaccgatacctatacatgtgcgacgaccacagccccgtcgccggcaacgactactaagccagccatgggaagagtcgttcggtccataatgccttcggcaacataaaaagtgcgtacgtggtgggcagtctcacgaatgtctcgatgatgtgaagaacatcctgttgtttggttcagatcgaagctgtagctggatgatgcatgttcctttatctgtaaaatgtgatgttgtgaagttggtggggtttgagaaaaaaaaaaaaaaaaaaaaaaaaaaaaaaaaaaaaaaaaaaaaaaaaaaaaaaaaaaaaaaataaaaaaaaaaaaaaaa

SEQ ID NO: 5428 - protein, 248 aa, Glycine max
  misc_feature: Ceres CLONE ID no. 1057487
  misc_feature: Ceres CDNA ID no. 29191224
  misc_feature (12)..(231): Pfam Name: MIP PFAM Desc: Major intrinsic protein
  misc_feature: Homolog of GI Number: 42541150 NR Desc: delta tonoplast intrinsic protein TIP2
  misc_feature: Homolog of GI Number: 4099408 NR Desc: delta
  misc_feature: Homolog of GI Number: 42541152 NR Desc: delta tonoplast intrinsic protein TIP2
  misc_feature: Homolog of GI Number: 42541154 NR Desc: delta tonoplast intrinsic protein TIP2
  misc_feature: Homolog of GI Number: 54291206 NR Desc: putative delta tonoplast intrinsic protein TIP2
  misc_feature: Homolog of GI Number: 1439609 NR Desc: delta
  misc_feature: Homolog of GI Number: 3249565 NR Desc: aquaporin
  misc_feature: Homolog of GI Number: 12006841 NR Desc: putative delta TIP
  misc_feature: Homolog of GI Number: 7441258 NR Desc: probable water channel protein delta
  misc_feature: Homolog of GI Number: 21554052 NR Desc: delta tonoplast integral protein delta
MPGSIAFGRFDDSFSLASFRAYIAEFISTLIFVFAGVGSVIAYTKVSGGAPLDPSGLIAVAICHGFGLFVAVAIGANISGGHVNPAVTFGLALGGQITILTGIFYWVAQLLGAIVGAFLVQFCTGVATPTHGLSGVGAFEGVVMEIIVTFGLVYTVYATAADPKKGSLGTIAPIAIGFIVGANILVAGPFSGGSMNPARSFGPAVASGDFTNIWVYWAGPLIGGGLAGVVYRYLYMCDDHSPVAGNDY

SEQ ID NO: 5429 - DNA, 1119 bp, Glycine max
  misc_feature: Ceres CLONE ID no. 1057513
  misc_feature: Ceres CDNA ID no. 40351589
  CDS (32)..(904): REFERENCED BY SEQ ID NO: 5430
gacattagcaaggttttgagaaaaaaaaaagatgaatttgaacaacgtcaaagtgccgaaggtgccaggtgggggtgcagtatctgcgttgcttaagattgggattatcggtgggcttggtctctacggtgccacacacagtctctacaatgttgacggaggtcatcgagccatcatgttcaaccgtttagtcggtgttaaagataaggtttaccctgagggtacacaccttatggttccttggttcgaaaggcctgtcatctatgacgttcgtgcacgaccttaccttgttgagagtacttccggaagccgtgatctccagatggtgaaaattgggctgagggttctcacgcgtcccatggcagaccagctacctgagatctacaggacccttggtgagaactacagcgagagagttctgccttctataatccacgagactttgaaagctgttgttgctcagtacaatgctagccagcttatcactcagagagaggcggtcagtagggagatcaggaagattctgactcaacgagcaacaaacttcaacattgctcttgacgatgtctccatcacgaccttgactttcgggaaggagttcacagctgccattgaggcaaagcaggtggctgctcaagaggctgagagggctaagttcatcgttgagaaggcagaacaagacaagaggagtgcagttatccgcgctcagggagaagccaagagtgctcagctcataggtcaggcaatcgcaaacaaccaagcgttcataacgctcaggaagatcgaggcggctagagagattgctcagaccatagcacactcggccaacaaggtgtacctgagctctgatgatcttttgcttaacctacaggagatgaacttggatgtgaatccaaagaagtagagagaggcttctcaagtaaacacatgtgtggtggtttgtgttagtcttttcaattctcttgcatcctttggaacaaaagcttaagacctttggattgttatctactattatcccaagcttataaccttcgtccattaaaaaaggaagaagaaactgtttttgctgaacgagtcaaatgtaataaactagtttttgcattaaaaaaaaaaaaaaaa

SEQ ID NO: 5430 - protein, 290 aa, Glycine max
  misc_feature: Ceres CLONE ID no. 1057513
  misc_feature: Ceres CDNA ID no. 40351589
  misc_feature (38)..(229): Pfam Name: Band_7 PFAM Desc: SPFH domain / Band 7 family
MNLNNVKVPKVPGGGAVSALLKIGIIGGLGLYGATHSLYNVDGGHRAIMFNRLVGVKDKVYPEGTHLMVPWFERPVIYDVRARPYLVESTSGSRDLQMVKIGLRVLTRPMADQLPEIYRTLGENYSERVLPSIIHETLKAVVAQYNASQLITQREAVSREIRKILTQRATNFNIALDDVSITTLTFGKEFTAAIEAKQVAAQEAERAKFIVEKAEQDKRSAVIRAQGEAKSAQLIGQAIANNQAFITLRKIEAAREIAQTIAHSANKVYLSSDDLLLNLQEMNLDVNPKK

SEQ ID NO: 5431 - DNA, 626 bp, Glycine max
  misc_feature: Ceres CLONE ID no. 1057781
  misc_feature: Ceres CDNA ID no. 40351590
  CDS (32)..(454): REFERENCED BY SEQ ID NO: 5432
agtacgcgtcactctgctcaagccgtcaacaatgtcgaagcgaggacgtggaggaacgtctggtaacaagttcagaatgtcccttggtctccccgtggcggcgacggtgaactgcgccgacaacaccggtgccaagaacctttacatcatttcggtgaaaggaatcaaaggtcgtcttaaccgattaccttctgcttgcgtcggcgacatggtgatggccaccgtcaagaagggaaagcctgatctccgtaagaaggttctgccagctgtcatcgttaggcagaggaagccgtggcgccgaaaggatggtgtcttcatgtacttcgaagataatgctggagtcatcgtcaaccccaagggagaaatgaagggttctgcgatcactggtcctattggtaaagagtgcgctgatctctggccgaggattgctagtgctgccaatgccattgtctaatgatcagagcaagaagtcttttgctggcgtttgattatcattctgaatcttgtttgagttataattatatcaaaaacaaatttgaggattttggtagaacgtgttttgacattatggcgtaatgttcgacatttaaatatttttggttatttagacaaaaaaaaaaaaaaaa

SEQ ID NO: 5432 - protein, 140 aa, Glycine max [sequence omitted]

SEQ ID NO: 5433 - DNA, 611 bp, Glycine max
  misc_feature: Ceres CLONE ID no. 1057782
  misc_feature: Ceres CDNA ID no. 29191725
  CDS (128)..(466): REFERENCED BY SEQ ID NO: 5434
attgatttaattttagatacaatgatcggggagctccgaaggcaccggtgagtcttcaccactgacgccttggcaaatccaactctgtaaaaatctgtgaatgaaacgaaggatcccagtctcctgaatggcgacaccatttttggcgggagttgcagtagctgcgactgcacttgctggtagatatggtatccaagcttggcaagcattcaaggctaggccacctaggcccaaaatcaagaaattctacgaaggcggtttccagcctaccatgaccaaaagagaagctgctctcattcttggcatcagggagaatgttccggcggagaaagtgaaggaagcacacaggaaagtaatggttgcaaaccatccagatgcaggtggtagccatttcttggcctctaagatcaacgaagctaaagacgtcatgctcggcaaaactaaaggcggcggatcccccttttgatgctccattagaatcatctctgtctttgttataggctttatagcaatgcattgttaaagtggagattgtacgcagaccataagctttgtggtctctttgcgacataaagagtcaaaatctttgtttgctaaaaaaaaaaaaaaaa

SEQ ID NO: 5434 - protein, 112 aa, Glycine max
  misc_feature: Ceres CLONE ID no. 1057782
  misc_feature: Ceres CDNA ID no. 29191725
  misc_feature (53)..(108): Pfam Name: DnaJ PFAM Desc: DnaJ domain
  misc_feature: Homolog of GI Number: 55770429 NR Desc: putative DNAJ domain
  misc_feature: Homolog of GI Number: 21554024 NR Desc: DNAJ protein
  misc_feature: Homolog of GI Number: 62858503 NR Desc: LOC549696
  misc_feature: Homolog of GI Number: 55621546 NR Desc:  similar to homolog of yeast TIM14 isoform a
  misc_feature: Homolog of GI Number: 74003214 NR Desc:  similar to translocase of the inner mitochondrial membrane 14 isoform a isoform 1
  misc_feature: Homolog of GI Number: 50417603 NR Desc: MGC89962 protein
  misc_feature: Homolog of GI Number: 46434207 NR Desc: potential DnaJ
  misc_feature: Homolog of GI Number: 6323036 NR Desc: Constituent of the mitochondrial import motor associated with the presequence translocase
  misc_feature: Homolog of GI Number: 53804288 NR Desc: DnaJ domain protein
MATPFLAGVAVAATALAGRYGIQAWQAFKARPPRPKIKKFYEGGFQPTMTKREAALILGIRENVPAEKVKEAHRKVMVANHPDAGGSHFLASKINEAKDVMLGKTKGGGSPF

SEQ ID NO: 5435 - DNA, 775 bp, Triticum aestivum
  misc_feature: Ceres CLONE ID no. 1057835
  misc_feature: Ceres CDNA ID no. 40041391
  CDS (94)..(423): REFERENCED BY SEQ ID NO: 5436
atcccacagagctagaagcagcaagcaaacaaagcaagcagccactcacacattagccaggagcaagagcaccagttcaggagcaggctagcgatggagaagtcgaccaagatggcggcgatgctcgtcctcgccgtgctggccgcggcgaccagcgccgaggcgaggaacatcaagacgaccttcccgcccttcgaccgcctcggcagcgggtcaccggcattcagcggcggcagcagcatgccgggattcagcctccccggcagcagcggcgccacctcgggcttcggcggcatcggcagcatgcccttcctcggcggcagctcccccggcctcggcggctcccccggtctcggcggcttcggcggcatgccggggtcccccgctgcagctgccgtcgacgagcacgccaagaagccgtgaaaagctgagggcggccgttgatagctagatccgctggtgtgtggcaagcactgacggggcgcatggttgatggttcggtagtgctactcgtagcgtgcatgcatgctggttctgtgggcgctatacgccgcgcgtacgtacgtttggagaactcgatttgtttgttgtgtttgtcgcttaattacgtcgttaggtccatctctgtcggtcggtcgtgttaagttcttggttatctgtagtagtggtgcatgttcttgaggcatatgaataatgctagatgtacgtgtcagcttgtgccgtggtatgcaatgatgaaatgaatgaagtattattagtaaaaaaaaaaaaaaaa

SEQ ID NO: 5436 - protein, 109 aa, Triticum aestivum
  misc_feature: Ceres CLONE ID no. 1057835
  misc_feature: Ceres CDNA ID no. 40041391
  misc_feature: Homolog of GI Number: 520943 NR Desc: structural protein
  misc_feature: Homolog of GI Number: 22647 NR Desc: MFS18
MEKSTKMAAMLVLAVLAAATSAEARNIKTTFPPFDRLGSGSPAFSGGSSMPGFSLPGSSGATSGFGGIGSMPFLGGSSPGLGGSPGLGGFGGMPGSPAAAAVDEHAKKP

SEQ ID NO: 5437 - DNA, 728 bp, Glycine max
  misc_feature: Ceres CLONE ID no. 1058067
  misc_feature: Ceres CDNA ID no. 24766018
  CDS (27)..(533): REFERENCED BY SEQ ID NO: 5438
gattactcaacttgtttggtcaaataatggaagcggcgacgaagcagagcgttacaaaccgccttctcaccgtcaagtcagcctccggcaagacttacagtcaattagcggcggagacagggctcaccaacgtctacgtggctcagctgctccgtcgccaagcccagctcaaacccgaaacagtccccaagctccgtgaagccttacctgctctgaccgaagaactcatcgccgccatgatgtctccgccgtggagatcgtatgatccaaacctcatccaagaacccaccgtctacaggttgaatgaagcagtgatgcatttcggtgagagtataaaggagatcatcaatgaagatttcggcgatggcatcatgtcggcaatagacttctattgctctgtggacaaagttaaaggagttgacggtaataaccgcgttgtcgtgacacttgatgggaagtatctttctcattccgaacagaggactgagaatatggtctcaaggctaaacctcaagggaagtacaagcgaatgatatgaaaatgtaagaataaaacgattcatatgaatgtaagcagcaatccatgaaggcttttatgtctaaagctgtaaacattgtaatatttatggtgtttgtttattctgtactctatgcaactccagcctcgagctgtttcaagttgaataacagtgaataaaataaaataaacaatgaaaaaaaaaaaaaaaa

SEQ ID NO: 5438 - protein, 168 aa, Glycine max
  misc_feature: Ceres CLONE ID no. 1058067
  misc_feature: Ceres CDNA ID no. 24766018
  misc_feature (17)..(68): Pfam Name: HTH_3 PFAM Desc: Helix
  misc_feature (78)..(151): Pfam Name: Cyanate_lyase PFAM Desc: Cyanate lyase C
  misc_feature: Homolog of GI Number: 21554171 NR Desc: cyanate lyase
  misc_feature: Homolog of GI Number: 20137963 NR Desc: Cyanate hydratase
  misc_feature: Homolog of GI Number: 71733228 NR Desc: cyanate hydratase
  misc_feature: Homolog of GI Number: 23471974 NR Desc: COG1513: Cyanate lyase
  misc_feature: Homolog of GI Number: 46130292 NR Desc: COG1513: Cyanate lyase
  misc_feature: Homolog of GI Number: 78214160 NR Desc: cyanate lyase
  misc_feature: Homolog of GI Number: 33867020 NR Desc: cyanate lyase
  misc_feature: Homolog of GI Number: 34103191 NR Desc: cyanate lyase
  misc_feature: Homolog of GI Number: 16331651 NR Desc: cyanate lyase
  misc_feature: Homolog of GI Number: 72607755 NR Desc: Cyanase
  misc_feature: Useful for making ornamental plants with modified leaves
  misc_feature: Useful for making plants with increased biomass and foliage
MEAATKQSVTNRLLTVKSASGKTYSQLAAETGLTNVYVAQLLRRQAQLKPETVPKLREALPALTEELIAAMMSPPWRSYDPNLIQEPTVYRLNEAVMHFGESIKEIINEDFGDGIMSAIDFYCSVDKVKGVDGNNRVVVTLDGKYLSHSEQRTENMVSRLNLKGSTSE

SEQ ID NO: 5439 - DNA, 894 bp, Glycine max
  misc_feature: Ceres CLONE ID no. 1058091
  misc_feature: Ceres CDNA ID no. 29191257
  CDS (104)..(595): REFERENCED BY SEQ ID NO: 5440
gattcccatccagcgtacagactaggcgacccccgcttcccgtcccctctctcctccacacgcctcgctccctctcccctcgtccgccgccgccgccgccaccatgggcaggggcaagttcaagggcaagccaaccggccgccgcaacttctccaccccggaggagatcgcttctggaacttcagggcgtccacgctcatttaagaagaatgtagctgaagcagaagaggaagaggaagaggtagaagaatctgaagaggaagaatccgaagacgacggtgaagagaagaaacataaaggaaccgaaggtgttattcaaattgaaaatccaaacctggtgaaagcaaagaatataaaagccaaagaagctgatcttggaaagacaactgaactctcgaggcgtgagagagaggagattgagaaacaaaaatctcatgagcgctatatgaagcttcaggagcaaggcaaaacagaacaggcgaagaaagatttggaacgtcttgctttaataaggcagcaaagagcagatgctgcaaagaaacgtgaagaggagaaagctgctaaagaacagaggaagactgaagcgcgcaaataactgcgaaggttgtggaggcatgagctaagctgagttgtgttgtctggatatttatttctatgcatcctagtatatttaaaccgggtctctgttccatcatctacatttccataaaaacagtgcattgacaagtgtaaagtagtcctgtcggcgtggcttgctgtaaacttgagcttggcagggtacacatttagtgagatcagcttatgtgagatttgctttcactcaaaaattggtatgaaaaataactattgaaatttaatgtgttggaggcccgagctgtaaaaaaaaaaaaaaaa

SEQ ID NO: 5440 - protein, 163 aa, Glycine max; identical to SEQ ID NO: 3326
  misc_feature: Ceres CLONE ID no. 1058091
  misc_feature: Ceres CDNA ID no. 29191257
  misc_feature: Homolog of GI Number: 57899606 NR Desc: putative 28 kDa heat
  misc_feature: Homolog of GI Number: 34909600 NR Desc: P0435B05.20
  misc_feature: Homolog of GI Number: 82899800 NR Desc:  PDGFA associated protein 1
  misc_feature: Homolog of GI Number: 41055582 NR Desc: similar to PDGFA associated protein 1
  misc_feature: Homolog of GI Number: 12018258 NR Desc: PDGFA associated protein 1
  misc_feature: Homolog of GI Number: 73958089 NR Desc:  similar to PDGFA associated protein 1
  misc_feature: Homolog of GI Number: 30584165 NR Desc: Homo sapiens PDGFA associated protein 1
  misc_feature: Homolog of GI Number: 7657441 NR Desc: PDGFA associated protein 1
  misc_feature: Homolog of GI Number: 55628996 NR Desc:  similar to 28 kDa heat

SEQ ID NO: 5441 - DNA, 1132 bp, Glycine max
  misc_feature: Ceres CLONE ID no. 1058176
  misc_feature: Ceres CDNA ID no. 40351591
  CDS (120)..(791): REFERENCED BY SEQ ID NO: 5442
gagatttagcatttgggtaagaaggaacctcacatctccaagcccggcggcccgcaccctgccaagactcaagacaccgccgtcgcccctcgtcgccggcgctccaccgactcgccgccatggcccccgccaagtggctgatgcactggcacccgaaccctggggtgacgctcaacacccagatcctgtcggaggcctgcggctgcgcggagtccctcggcggcaccaaggacggccgctggaagacctccatcatcttctaccgcccgatgacgcgggacggcgcgggcggggcgcagcagaacctgccccccgacgtgccccgcgagctcctcggcgtcgcgctccacgagcgccccgggctctacttctccatcctccggaaccagcgcctcgtcctgcaggcggacgctgccttctcccaggtcatggagaagctccagtccttcaaggcccgcgtcaacctcaacttcgagggattccagtatcaactgggtgacttttgcttgaggataggaaaatgtgttcctaacaatactgaaacactgagaggaatcatgatggaggtagagtattaccccctgtcttctatcgaaaagtccaggacaattatggtagacttctttgacatatggcaggaaacactcgcaaagaagtcgctgcctggtcgattcatccatgtagaatctaatttcgcagagtatggcctttccgaccattactctttccagcacaccgcagttcagtacgctacctgcttgcaacaactcatggcagctgtgagggcttagatccgcagatgaaagtttcagaatatcatgatgtttgacttgttcccaagatcatgatgacatcaacgtatgccaggacatgtatcttatgtgctgaaatgtaatcaatttgtatgttcttcacggctaagtatcccttcctctaccgtgtttgagatgttaacctgatttatttgcaaggaatagcaagttgtaatggtcatctgagcgaccgagtagctgtgttttatgttctcattagctcccagtagatgctgctgggtaatgttgttgtacaatttttttgaacatgaacatctgatgtggtcgtaactatcatgggagcaaaaaaaaaaaaaaaa

SEQ ID NO: 5442 - protein, 223 aa, Glycine max
  misc_feature: Ceres CLONE ID no. 1058176
  misc_feature: Ceres CDNA ID no. 40351591
MAPAKWLMHWHPNPGVTLNTQILSEACGCAESLGGTKDGRWKTSIIFYRPMTRDGAGGAQQNLPPDVPRELLGVALHERPGLYFSILRNQRLVLQADAAFSQVMEKLQSFKARVNLNFEGFQYQLGDFCLRIGKCVPNNTETLRGIMMEVEYYPLSSIEKSRTIMVDFFDIWQETLAKKSLPGRFIHVESNFAEYGLSDHYSFQHTAVQYATCLQQLMAAVRA

SEQ ID NO: 5443 - DNA, 889 bp, Glycine max
  misc_feature: Ceres CLONE ID no. 1058242
  misc_feature: Ceres CDNA ID no. 40351592
  CDS (1)..(756): REFERENCED BY SEQ ID NO: 5444
gagcccgaagcgaaaggtaatcccaatccccacagaaatccccatctcaaaaccctagccctcatccccgatcccggcgagcgagatggccaacccgagggtgttcttcgacatgaccgtcggcggcgcgccggccgggcgcatcgtgatggagctgtacaaggacgcggtgccgcggacggtggagaacttccgcgcgctgtgcaccggcgagaagggcgtcggcaagagcggcaagccgctgcactacaagggcagcgccttccaccgcgtgatccccgacttcatgtgccagggcggcgacttcacccggggcaacggcaccggcggcgagtccatctacggcgagaagttcgccgacgagaagttcgtccacaagcacaccaagcccgggatcctctccatggccaacgcggggcccaacaccaacggctcccagttcttcatctgcaccgtcccctgcaattggctcgacggcaagcacgtggtcttcggcgaggtcgtcgagggcatggacgtcgtcaagaacatcgagaaggtgggctcccgcagcggcacctgctccaagcaggtggtcatcgccgactgcggccagctctagatccgcccgcgcgcgggtcgcctttcgccgtcgtcgtcgccgccccgtgtgtcccgtgtcgtgtcgtcgatctaaataagagagtcgtgtgtcgtgtcgtgtcttcccctggtccgtccgatgagatctccgtggttggtttaggagggttttaggtggactctttgggctgctggatctctgtccggccgccttggttatcttcctgtgtctgctgctatcttaccgtttgaatgagatgaactccgctatgaattatccattatttgtacaaaaaaaaaaaaaaaa

SEQ ID NO: 5444 - protein, 171 aa, Glycine max
  misc_feature: Ceres CLONE ID no. 1058242
  misc_feature: Ceres CDNA ID no. 40351592
  misc_feature (5)..(171): Pfam Name: Pro_isomerase PFAM Desc: Cyclophilin type peptidyl
MANPRVFFDMTVGGAPAGRIVMELYKDAVPRTVENFRALCTGEKGVGKSGKPLHYKGSAFHRVIPDFMCQGGDFTRGNGTGGESIYGEKFADEKFVHKHTKPGILSMANAGPNTNGSQFFICTVPCNWLDGKHVVFGEVVEGMDVVKNIEKVGSRSGTCSKQVVIADCGQL

SEQ ID NO: 5445 - DNA, 702 bp, Glycine max
  misc_feature: Ceres CLONE ID no. 1058321
  misc_feature: Ceres CDNA ID no. 25891896
  CDS (73)..(537): REFERENCED BY SEQ ID NO: 5446
aaaccacatcaatcaatcaatcccacctactccacctctcgccggagccccagcaaggagcaagcaaggaagatggacgccggcaagctgaagaaggtggccgggaagaagttcggcgggccgaggaagaagtcggtgaccaggtccgtcaaggccgggctccagttccccgtcggccgcatcggtcgcttcctcaagaagggccgctacgcccagcgcgtcggctccggcgcccccgtctacctcgccgccgtcctcgagtacctcgcagccgaggtgctggagctggccgggaacgccgccaaggacaacaagaagagccgcatcgtgcccaggcacctgctgctggccatccgcaacgaccaggagctcgggaggctgctgtccggcgtcaccatcgcccacggcggcgtcatccccaacatcaacccggtgctgctccccaagaaggccgccgagaaggctgagaaggccggcaccgccgccaagtcgcccaagaaggccaccaagtcccccaagaaagccaccaaggcgtagattgtagtagtgcggtgtgctgattgttcgagtttggttagatgtagtagctgcttcactctgtatcctgcgcccctgatgtaatcgcgaacaaaggggaagccgcttgcttcctcttgacttatgaattatcaactaagcgtttctgcaaaaaaaaaaaaaaaa

SEQ ID NO: 5446 - protein, 154 aa, Glycine max
  misc_feature: Ceres CLONE ID no. 1058321
  misc_feature: Ceres CDNA ID no. 25891896
  misc_feature (30)..(94): Pfam Name: CBFD_NFYB_HMF PFAM Desc: Histone
  misc_feature: Homolog of GI Number: 121982 NR Desc: Histone H2A.2.2
  misc_feature: Homolog of GI Number: 121974 NR Desc: Histone H2A.2.1
  misc_feature: Homolog of GI Number: 34914498 NR Desc: putative histone H2A
  misc_feature: Homolog of GI Number: 729671 NR Desc: Histone H2A
  misc_feature: Homolog of GI Number: 7649159 NR Desc: histone H2A
  misc_feature: Homolog of GI Number: 47026912 NR Desc: histone H2A
  misc_feature: Homolog of GI Number: 47026919 NR Desc: histone H2A
  misc_feature: Homolog of GI Number: 536890 NR Desc: protein H2A
  misc_feature: Homolog of GI Number: 122006 NR Desc: Histone H2A
  misc_feature: Homolog of GI Number: 68441405 NR Desc:  similar to histone H2A
MDAGKLKKVAGKKFGGPRKKSVTRSVKAGLQFPVGRIGRFLKKGRYAQRVGSGAPVYLAAVLEYLAAEVLELAGNAAKDNKKSRIVPRHLLLAIRNDQELGRLLSGVTIAHGGVIPNINPVLLPKKAAEKAEKAGTAAKSPKKATKSPKKATKA

SEQ ID NO: 5447 - DNA, 808 bp, Glycine max
  misc_feature: Ceres CLONE ID no. 1058511
  misc_feature: Ceres CDNA ID no. 40351593
  CDS (99)..(491): REFERENCED BY SEQ ID NO: 5448
ctaattcacagatcttattcactcctctttgtgtcttcgtcgttagctagcaggagaggtttgtgcggctgccatttcgattccaagagctctgaagaatggtgagaatcagtgtgcttaacgacgctcttaagagtatgtacaatgcggagaagagagggaagaggcaggttatgatcaggccttcttccaaggtcatcatcaagtttctcattgtcatgcagaaacacggttacattggcgagttcgagtacgttgatgaccacaggtctggtaagattgtggttgagcttaatggaagactgaacaaatgtggagtcataagtcctcgttttgatgttggagttaaggagatcgaaggctggaccgctcgccttcttccttccagacagtttggttacattgttcttaccacctctgcgggtatcatggaccacgaagaagcaaggaggaagaatgttggtggaaaggtccttggattcttttactgaagaggcaagataatcttctttgtcccgagtacactttgcttctccttttggtgagatgaggaattcgaattgagctcaaaggtcaaagagggtagtagagtttttgatgcttgttttcttagttaatatgccattttgtttgttttgcgcaaaagacttgcaaatgtagacagtaagacggtgcttattttgagccaatcttctttcttgagacattttatcttctcttcatgactattttgtttcttgtttcgatggttcaagcatcatgatcaattttctaaataaattttgattcgctaaaaaaaaaaaaaaaa

SEQ ID NO: 5448 - protein, 130 aa, Glycine max
  misc_feature: Ceres CLONE ID no. 1058511
  misc_feature: Ceres CDNA ID no. 40351593
  misc_feature (5)..(130): Pfam Name: Ribosomal_S8 PFAM Desc: Ribosomal protein S8
MVRISVLNDALKSMYNAEKRGKRQVMIRPSSKVIIKFLIVMQKHGYIGEFEYVDDHRSGKIVVELNGRLNKCGVISPRFDVGVKEIEGWTARLLPSRQFGYIVLTTSAGIMDHEEARRKNVGGKVLGFFY

SEQ ID NO: 5449 - DNA, 1094 bp, Glycine max
  misc_feature: Ceres CLONE ID no. 1058548
  misc_feature: Ceres CDNA ID no. 40351594
  CDS (271)..(864): REFERENCED BY SEQ ID NO: 5450
accccacactcttgagctaagctaagcaagccagcacctcgatctagcaccactccagcaatggcgtcgtccaggagagcgctcatcctgctggcggtggtgctggcggcggtgccggcggcgctgagccagaagacgacggccccggcgcccgaggcgcccgagacgccagacgcgccggcggcggggacgacgcccaaggcggccgccgcgccgaacgtgacggcggtgctggagaaggccgggcagtacaccaagttcatccggctgatggcgtcgacgcagcaggacacgcagctgaacgcgcaggccaacgactccgacacgggcttcatggtgttcgcccccaccgacaacgccttcaacagcctcaagccgggcaccctcaactcgctctcgcagcaggaccaggtgacgctcgtgcaggcccacatcgtccccaccttctactccatggagtccttcgagaccgccagcaaccccgtccgcacccaggcctccggcaccgacgggccctgcaccgtcaacgtcaccgccaccagcaacagcgccgtcaacgtctccaccgggatcgtccacaccaccgtcggcaccgcgctgcgcgccaccaggccgctcgccgtctactccgtcgacaaggtgctgctgcccatggacctcttcggccccaagccgccggcctccgcgcccccggcccccggcaagaagccctcgtcggccaagggggcagccaaggcgccctcgggcgacgacgaggacgaggaggaggccccgcccgccggagccgccgcagccgtcggcgccggctggaggagcctcgtcgccgtggtggccgccgccgccgccgccgcgtgcctcttgtaagaagaagaaagtgcgagagaggatcatgattcgtgagaccgacagatcgatggagactagctgcgtgcatgttgtgcatggatttggataggttactagttcttgcattagtggctgcttcttctctctctttttttgttaaatgtccatttttgttctctttcttttcctcccctgttgatgggctaagatgcgataagatgttccactgttgaaaaaaaaaaaaaaaa

SEQ ID NO: 5450 - protein, 267 aa, Glycine max
  misc_feature: Ceres CLONE ID no. 1058548
  misc_feature: Ceres CDNA ID no. 40351594
  misc_feature (63)..(197): Pfam Name: Fasciclin PFAM Desc: Fasciclin domain
MASSRRALILLAVVLAAVPAALSQKTTAPAPEAPETPDAPAAGTTPKAAAAPNVTAVLEKAGQYTKFIRLMASTQQDTQLNAQANDSDTGFMVFAPTDNAFNSLKPGTLNSLSQQDQVTLVQAHIVPTFYSMESFETASNPVRTQASGTDGPCTVNVTATSNSAVNVSTGIVHTTVGTALRATRPLAVYSVDKVLLPMDLFGPKPPASAPPAPGKKPSSAKGAAKAPSGDDEDEEEAPPAGAAAAVGAGWRSLVAVVAAAAAAACLL

SEQ ID NO: 5451 - DNA, 1100 bp, Glycine max
  misc_feature: Ceres CLONE ID no. 1058593
  misc_feature: Ceres CDNA ID no. 29191258
  CDS (3)..(863): REFERENCED BY SEQ ID NO: 5452
acaagaagaaaagaaacgccaccaaatccaatctcgacctccccctctcccgtccgcccgtcgttcccaacccgatccgatctcccccctcctccgtcgccatgggccgcaagttcttcgtcggcggcaactggaaatgcaatggaactgtggaacaggtagagagtatcgtcaacactctgaacgctggacagatcgcctctacggatgttgtcgaggttgtcgtcagcccgccctatgtcttccttcccaccgtcaagggtaagctgcgcccagagatccaagtcgctgctcagaactgctgggtgaagaagggcggtgctttcaccggtgaagtcagtgctgagatgcttgtcaacctcggcgttccctgggtcatccttggacactctgaaaggaggagcttgatgggagaatcaagcgagtttgttggagagaaggttgcatatgcacttgctcagggcttgaaggtcattgcatgtgttggtgagactctcgagcagcgagaagctggatcaaccatggcagttgtcgctgaacagacaaaagcaattgctggcaagatcaaggactggaccaatgtggttgtcgcttacgaaccagtgtgggccattggcaccggtaaagttgcgacaccggctcaggcgcaggaagtccatgccaatctgagggactggctcaagaccaatgtgagccccgaggttgctgaatccacgaggatcatctatggaggatctgtaactggcgcaagctgcaaggagttggcagggcagcccgacgttgatggtttcctcgttggtggagcttctttgaagcctgagttcattgacatcatcaacgccgccaccgtgaagtccgcctaagaaaaatcttgatgtggctcctctcggtgcggaggaagacagcgaagatgaagagactccttttttctcctgtgtttattatgtgtgtactatgctagtaattttgtggtggagcagctgctactgttttcctccccccctgacttgagcttgcaagccaataatgataatgtttgctactgaacatatatcagcaataatctttagctcctattaatgacaaaaaaaaaaaaaaaa

SEQ ID NO: 5452 - protein, 253 aa, Glycine max
  misc_feature: Ceres CLONE ID no. 1058593
  misc_feature: Ceres CDNA ID no. 29191258
  misc_feature (5)..(245): Pfam Name: TIM PFAM Desc: Triosephosphate isomerase
  misc_feature: Homolog of GI Number: 11124572 NR Desc: triosephosphat
  misc_feature: Homolog of GI Number: 407525 NR Desc: triosephosphate isomerase
  misc_feature: Homolog of GI Number: 1785948 NR Desc: cytosolic triosephosphate isomerase
  misc_feature: Homolog of GI Number: 168647 NR Desc: triosephosphate isomerase 1
  misc_feature: Homolog of GI Number: 50900728 NR Desc: putative triosephosphate isomerase
  misc_feature: Homolog of GI Number: 602590 NR Desc: triosephosphate isomerase
  misc_feature: Homolog of GI Number: 38112662 NR Desc: triose phosphate isomerase cytosolic isoform
  misc_feature: Homolog of GI Number: 77745458 NR Desc: triose phosphate isomerase cytosolic isoform
  misc_feature: Homolog of GI Number: 553107 NR Desc: triosephosphate isomerase
  misc_feature: Homolog of GI Number: 34908172 NR Desc: putative triosephosphate isomerase
  misc_feature: Useful for making lethal plants for genetic confinement systems
  misc_feature: Useful for making plants with increased biomass and foliage
  misc_feature: Useful for sterility
MGRKFFVGGNWKCNGTVEQVESIVNTLNAGQIASTDVVEVVVSPPYVFLPTVKGKLRPEIQVAAQNCWVKKGGAFTGEVSAEMLVNLGVPWVILGHSERRSLMGESSEFVGEKVAYALAQGLKVIACVGETLEQREAGSTMAVVAEQTKAIAGKIKDWTNVVVAYEPVWAIGTGKVATPAQAQEVHANLRDWLKTNVSPEVAESTRIIYGGSVTGASCKELAGQPDVDGFLVGGASLKPEFIDIINAATVKSA

SEQ ID NO: 5453 - DNA, 1916 bp, Glycine max
  misc_feature: Ceres CLONE ID no. 1058605
  misc_feature: Ceres CDNA ID no. 25891897
  CDS (2)..(1579): REFERENCED BY SEQ ID NO: 5454
aggtggtaggtatccgcgtccgcatcgcaccgcacaccaaccaaacactcgcctgccttccttccttccttgttcgttcctcgacgcacgcacgcagatctcatccatccaagccaaggcaggtcaggtcaggtacgagatggctctcaccagaattggtctcgctggcctcgcggtcatgggccagaaccttgccctcaacattgccgagaaaggcttccccatctctgtctacaacaggacaacgtccaaggtcgatgagactgttcagcgtgccaagctagaaggaaaccttcctctctatggtttccatgaccctgcatcctttgtcaactccattcagaagccacgtgtcgtcatcatgcttgtcaaggctggtgctccggtcgaccagaccatcgcaacgctcgcagcacacctggagcaaggtgactgcatcgttgacggaggaaacgagtggtatgagaacacagaaaggagggagaaggccatggaggagcgtggactcctctacttagggatgggtgtctccggaggagaggagggtgcccgccatggcccctccatgatgcctggaggctcactggaggcttaccagtacattgaagacattcttctcaaggtgtctgctcaagtccctaacagcggtccgtgtgtcacatacattgggaagggtggatctggaaactttgtcaagatggttcacaatggtatcgagtacggtgacatgcagctgatcgctgaggcatatgatgttctcaagtcggttggtaagctcacaaacggtgagctgcagcaggttttcgccgagtggaacaagggtgagctcctcagtttcttggtcgagatcactgctgatatattcagcatcaaggatgaccagggtgaaggctacttggtcgacaaggtcctggacaagactgggatgaagggaaccggcaagtggacagtgcagcaggctgctgagctctcagtggctgctcctaccattgaggcgtccttggattccaggttcctcagcgggttgaaggacgagagggtggctgcttccaagatcttccaaggtgactacagcagcggcgaaactgtggacaaggcgcagctcatcgaggatgtgaggaaagctctgtatgcctccaagatctgcagctatgcccagggcatgaacatcatcaaggccaagagcgtggagaagggatggggcctgaacctgggcgagctggccaggatctggaagggcgggtgcatcatccgcgccagcttcctggaccgcatcaagaaggcgtacgacaggaacggcgagctcgcgaacctcctcatcgaccccgagtttgcgcaggagatcatggacaggcaggccgcatggaggagggtcgtgtgcctcgccatcaacaacggcgtgagcacccccggcatgtcggcgagcctggcctactttgactcgtacaggagggagaggcttcccgcgaacctcgtgcaggcccagagggattactttggggcgcacacctacgagagggtcgacatgccgggatccttccacaccgagtggtacaagatcgccaactcgaagatctaagctgctgctgctgctgctgctgctgctgctgctgctgctgctgctgagagacggcccatcaggtttcgtcttgtcggtaggtatatcttttgttgttgagtcctttttcctgtaggggaggaactgcctgccgtttaatttttattactcgagtaatgagtctgtctgtggtgtatttattttctacaaggaggtccagccggtattctctccactagttccatgtgattgatcaaccctggagggaaaccaccactgttatttgtcggatttcgccatcctgaattttatatagcatgaagaaataaaatacgttttcacaaaaaaaaaaaaaaaa

SEQ ID NO: 5454 - protein, 479 aa, Glycine max
  misc_feature: Ceres CLONE ID no. 1058605
  misc_feature: Ceres CDNA ID no. 25891897
  misc_feature (182)..(472): Pfam Name: 6PGD PFAM Desc: 6
  misc_feature (3)..(178): Pfam Name: NAD_binding_2 PFAM Desc: NAD binding domain of 6
  misc_feature: Homolog of GI Number: 603221 NR Desc: 6
  misc_feature: Homolog of GI Number: 51241755 NR Desc: 6
  misc_feature: Homolog of GI Number: 21592941 NR Desc: 6
  misc_feature: Homolog of GI Number: 21928135 NR Desc: AT5g41670/MBK23_20
  misc_feature: Homolog of GI Number: 28416567 NR Desc: At1g64190
  misc_feature: Homolog of GI Number: 14009640 NR Desc: cytosolic 6
  misc_feature: Homolog of GI Number: 7431264 NR Desc: phosphogluconate dehydrogenase
  misc_feature: Homolog of GI Number: 13936693 NR Desc: plastidic 6
  misc_feature: Homolog of GI Number: 3342802 NR Desc: putative cytosolic 6
  misc_feature: Homolog of GI Number: 3342800 NR Desc: putative cytosolic 6
  misc_feature: Useful for accelerating crop development and harvest
  misc_feature: Useful for increasing chlorophyll and photosynthetic capacity
  misc_feature: Useful for making ornamental plants with modified flowers
  misc_feature: Useful for making plants with altered leaf shape eg curled leaves
  misc_feature: Useful for making plants with modified flowers
  misc_feature: Useful for making smaller plants
  misc_feature: Useful for modifying plant architecture
  misc_feature: Useful for sterility
MALTRIGLAGLAVMGQNLALNIAEKGFPISVYNRTTSKVDETVQRAKLEGNLPLYGFHDPASFVNSIQKPRVVIMLVKAGAPVDQTIATLAAHLEQGDCIVDGGNEWYENTERREKAMEERGLLYLGMGVSGGEEGARHGPSMMPGGSLEAYQYIEDILLKVSAQVPNSGPCVTYIGKGGSGNFVKMVHNGIEYGDMQLIAEAYDVLKSVGKLTNGELQQVFAEWNKGELLSFLVEITADIFSIKDDQGEGYLVDKVLDKTGMKGTGKWTVQQAAELSVAAPTIEASLDSRFLSGLKDERVAASKIFQGDYSSGETVDKAQLIEDVRKALYASKICSYAQGMNIIKAKSVEKGWGLNLGELARIWKGGCIIRASFLDRIKKAYDRNGELANLLIDPEFAQEIMDRQAAWRRVVCLAINNGVSTPGMSASLAYFDSYRRERLPANLVQAQRDYFGAHTYERVDMPGSFHTEWYKIANSKI

SEQ ID NO: 5455 - DNA, 595 bp, Glycine max
  misc_feature: Ceres CLONE ID no. 1058660
  misc_feature: Ceres CDNA ID no. 24766731
  CDS (73)..(342): REFERENCED BY SEQ ID NO: 5456
cactacctcaagcataacttgcatagactattgattaagaaagctattgtcattgatttgctagctccaacaatgggttctagcagattatcattcattttagtacttgtgcttgtaaccttttcatccatgatcattgactcaagggttgcagaggcacgtaccctgccaaaatcagccttattgccttccaaagttgatatacctactgttgttcctcttccactggtggcaccactgccaaatttgcctgttactctccctccagtgcctgaactacctgcagtacctaaagtaccaattcctgaagtaatagttaataacgccaaaataatcccttgagtacctatgatctatccagtcactactacttattttgtcacttgctaaattaacttgttgttgccatcccagggtggttctggttctgttggggtttaatttctgtcattcaattacatgctatgttcagtttatatgttgcttcagtcagttgaacttcagcatattatttattgtgacctgtgtaatgtaatgtatcaacttatcttctagttcaataaattctggaatttctgaaaaaaaaaaaaaaaaa

SEQ ID NO: 5456 - protein, 89 aa, Glycine max
  misc_feature: Ceres CLONE ID no. 1058660
  misc_feature: Ceres CDNA ID no. 24766731
MGSSRLSFILVLVLVTFSSMIIDSRVAEARTLPKSALLPSKVDIPTVVPLPLVAPLPNLPVTLPPVPELPAVPKVPIPEVIVNNAKIIP

SEQ ID NO: 5457 - DNA, 539 bp, Glycine max
  misc_feature: Ceres CLONE ID no. 1058705
  misc_feature: Ceres CDNA ID no. 29191259
  CDS (73)..(384): REFERENCED BY SEQ ID NO: 5458
atcagccaccgtagccaccacaaagacaagtcaacctcaccgaggagaagagaagaaaagagaagcgagaagatgtcgggccgtggcaagggaggcaaggggctcggcaagggcggcgccaagcgccaccggaaggtgctgcgcgacaacatccagggcatcaccaagccggcgatccgccgtctggcgaggaggggcggcgtgaagcgcatctcggggctcatctacgaggagacccgcggcgtgctcaagatcttcctcgagaacgtcatccgcgacgccgtcacctacaccgagcacgcccgccgcaagaccgtcaccgccatggacgtcgtctacgccctcaagcgccagggacgcaccctctacggattcggaggctaggccgccaccaccaccagattaggagctagcccatgtgtagggttcgtggtcctcgttgtaatcgcagtatctcgctgttgttcgctgagttctgtaggatcgaatggaatggaattgaaattaaactagttcgtcgttgaaaaaaaaaaaaaaaa

SEQ ID NO: 5458 - protein, 103 aa, Glycine max; identical to SEQ ID NO: 8
  misc_feature: Ceres CLONE ID no. 1058705
  misc_feature: Ceres CDNA ID no. 29191259
  misc_feature (66)..(92): Pfam Name: TAF PFAM Desc: TATA box binding protein associated factor
  misc_feature: Homolog of GI Number: 68441405 NR Desc:  similar to histone H2A
  misc_feature: Homolog of GI Number: 50729214 NR Desc:  similar to germinal histone H4 gene
  misc_feature: Homolog of GI Number: 57106967 NR Desc:  similar to germinal histone H4 gene
  misc_feature: Homolog of GI Number: 62648434 NR Desc:  similar to germinal histone H4 gene
  misc_feature: Homolog of GI Number: 56798269 NR Desc: histone H4
  misc_feature: Homolog of GI Number: 61820747 NR Desc:  similar to germinal histone H4 gene
  misc_feature: Homolog of GI Number: 57110415 NR Desc:  similar to germinal histone H4 gene
  misc_feature: Homolog of GI Number: 55667113 NR Desc:  similar to germinal histone H4 gene
  misc_feature: Homolog of GI Number: 1806283 NR Desc: Histone H4 homologue
  misc_feature: Homolog of GI Number: 62663604 NR Desc:  similar to Histone H2B 291B

SEQ ID NO: 5459 - DNA, 1279 bp, Glycine max
  misc_feature: Ceres CLONE ID no. 1058806
  misc_feature: Ceres CDNA ID no. 40351595
  CDS (191)..(979): REFERENCED BY SEQ ID NO: 5460
acacacacacacaccattattttcccctccctcctcctgaccacccacccacctaccagccaccgaggcggccgatctcccctccccacccgcgccgcgccaccgccaccgccgccgccgccgccgccgccggcagccgttcgtctcgagattgacctttggtgactgttagaaaccacaggcggtgaagatggcgcagcctgctgagctttcccgtgaggagaatgtgtacatggctaagcttgcagagcaggctgagaggtacgaagagatggtcgagttcatggagaaggtggccaagacaattgactctgaggagctcaccgtcgaggagcgcaaccttctatcagttgcttacaagaatgttattggtgcccgccgtgcctcgtggcgcatcatttcctccatcgagcagaaggaagagagccgtggcaatgaggaccgtgtcacactcatcaaggactaccgtggaaagattgaggttgagctcactaagatctgtgatggtatcctcaagcttcttgattcccaccttgtcccctcatccaccgctccagagtccaaggtcttctacctgaagatgaagggtgattactataggtaccttgcagagttcaagagtggaactgagaggaaggatgctgctgagaacaccatggtggcatacaaagctgctcaggagattgcactgaaagagctgcccccgactcatcctattaggcttgggctggcactcaacttctcggtgttctattatgagatcctcaactctccagaccgtgcttgtgacctcgccaagcaggcttttgatgaggccatctcggaactggactctctgagcgaggagtcctacaaggacagcactttgatcatgcagcttctgcgtgataacctgacgctgtggacttctgacatctcggaggacgctgctgaagaaatgaaggatgctcccaagggtgaatctggagatggacagtaaacactgtctatgtgcccagaaacttgtctttctcgcttgttcagtgtagattgtaatgtcgccgtggttgctggtaattggaggctccaatttgtgttgtgatagggaagcttgtagctgccttgcttgctcggtggcctgattatcgggctgcactggttattgcctcttgttgaacctttgtgttactttggtgattctagaaattttctgctgctcttcaaaaaaaaaaaaaaaaaaaaaaaaaaaaaaaaaaaaaaaaaaaaaaaaaaaaaaaaaaaaagaaaaaaaaaaaaaaaa

SEQ ID NO: 5460 - protein, 262 aa, Glycine max
  misc_feature: Ceres CLONE ID no. 1058806
  misc_feature: Ceres CDNA ID no. 40351595
  misc_feature: Useful for making plants with modulated growth and phenotype characteristics
  misc_feature: null
  misc_feature: The sequence is a functional homolog of  SEQ ID NO 2350 in the  10/374,780 US patent application
  misc_feature: The sequence is a functional homolog of  SEQ ID NO 342 in the  10/412,699 US patent application
  misc_feature: The sequence is a functional homolog of  SEQ ID NO 344 in the  10/412,699 US patent application
  misc_feature: The sequence is a functional homolog of  SEQ ID NO 782 in the  11/479,226 US patent application
  misc_feature: The sequence is a functional homolog of  SEQ ID NO 786 in the  11/479,226 US patent application
  misc_feature: The sequence is a functional homolog of  SEQ ID NO 789 in the  11/479,226 US patent application
  misc_feature: The sequence is a functional homolog of  SEQ ID NO 790 in the  10/225,066 US patent application
  misc_feature: The sequence is a functional homolog of  SEQ ID NO 797 in the  11/479,226 US patent application
  misc_feature: The sequence is a functional homolog of  SEQ ID NO 801 in the  11/479,226 US patent application
  misc_feature: The sequence is a functional homolog of  SEQ ID NO 805 in the  11/479,226 US patent application
  misc_feature: Useful for making plants with modulated drought sensitivity
  misc_feature (9)..(246): Pfam Name: 14 PFAM Desc: 14
MAQPAELSREENVYMAKLAEQAERYEEMVEFMEKVAKTIDSEELTVEERNLLSVAYKNVIGARRASWRIISSIEQKEESRGNEDRVTLIKDYRGKIEVELTKICDGILKLLDSHLVPSSTAPESKVFYLKMKGDYYRYLAEFKSGTERKDAAENTMVAYKAAQEIALKELPPTHPIRLGLALNFSVFYYEILNSPDRACDLAKQAFDEAISELDSLSEESYKDSTLIMQLLRDNLTLWTSDISEDAAEEMKDAPKGESGDGQ

SEQ ID NO: 5461 - DNA, 934 bp, Glycine max
  misc_feature: Ceres CLONE ID no. 1058881
  misc_feature: Ceres CDNA ID no. 25891898
  CDS (173)..(727): REFERENCED BY SEQ ID NO: 5462
agagtaaagtggaggagagtttgaaacaggtgttattatatgaaagaaagatacctcgtatttccatcttagattccaatcctttcttccttcaaattctattctatttaccctttgttggtccgcgaagtttcttgttccctcatctttctctttcttcgattcacacacaatgggtctctgggattccttcctcaattggctccgcagcttgttttttaaacaggagatggaactttcacttgttggccttcagaatgctggcaagacttctcttgtcaatgcaattgctactgggggctacagtgaggacatgattccaactgttgggttcaacatgagaaaagtgactaagggaaatgtcacaataaagctttgggaccttgggggacagaggaggttccggtcaatgtgggagcgatactgtcgtggtgtctctgctattgtatatgttgtagatgccgctgatagagacagtgttccaatatctcgaagtgagttacatgatctattgacaaaaccttctttgagtgggattcctttgcttgttcttggaaacaaaattgacaagtcagaagctctttctaagcaagcattggtagatcagctaggacttgagtcaattaaagacagagaggtctgctgctatatgatttcatgcaaggattctgtaaacttagatgtagtcattgactggctaatcaaacactcaaaaactgcaaaatgatccttggtttgaccagtatttcatttttagtcaaagatgcaaggtgtcgaggaaattccttcttggtagaatacattttctttaatttagttgtggttcaagtttgtctgtatagtaatcaaaccaggtcaggtgactcaaatcttccatgcaatgttcttatgtatcataaaccgattagttgatctcaaaaaaaaaaaaaaaaaa

SEQ ID NO: 5462 - protein, 184 aa, Glycine max
  misc_feature: Ceres CLONE ID no. 1058881
  misc_feature: Ceres CDNA ID no. 25891898
  misc_feature: null
  misc_feature: Useful for making plants with altered terpenoid content
  misc_feature: Homolog of GI Number: 21553410 NR Desc: ADP
  misc_feature: Homolog of GI Number: 50912455 NR Desc: putative ADP
  misc_feature: Homolog of GI Number: 21593081 NR Desc: ADP
  misc_feature: Homolog of GI Number: 9757978 NR Desc: ADP
  misc_feature: Homolog of GI Number: 21389677 NR Desc: ADP
  misc_feature: Homolog of GI Number: 9757877 NR Desc: ADP
  misc_feature: Homolog of GI Number: 68369362 NR Desc:  similar to ADP
  misc_feature: Homolog of GI Number: 50754608 NR Desc:  similar to ADP
  misc_feature: Homolog of GI Number: 8922601 NR Desc: ADP
  misc_feature: Homolog of GI Number: 76648606 NR Desc:  similar to ADP
  misc_feature: Useful for increasing chlorophyll and photosynthetic capacity
  misc_feature: Useful for making plants with increased biomass and foliage
  misc_feature: Useful for making shorter plants
  misc_feature: Useful for making smaller plants
  misc_feature: Useful for making stronger plants
MGLWDSFLNWLRSLFFKQEMELSLVGLQNAGKTSLVNAIATGGYSEDMIPTVGFNMRKVTKGNVTIKLWDLGGQRRFRSMWERYCRGVSAIVYVVDAADRDSVPISRSELHDLLTKPSLSGIPLLVLGNKIDKSEALSKQALVDQLGLESIKDREVCCYMISCKDSVNLDVVIDWLIKHSKTAK

SEQ ID NO: 5463 - DNA, 1075 bp, Glycine max
  misc_feature: Ceres CLONE ID no. 1058892
  misc_feature: Ceres CDNA ID no. 25891050
  CDS (1)..(861): REFERENCED BY SEQ ID NO: 5464
agtcggccgcctcccccctccacctcctcccccagcgtcgcctcccgttcggaaccccaagctccccccgccgccggcgaaatggccccgaagcgaggcggcaaggcgccggtgccggcgaagaagaaggcggcggacaaggtggtgaacccactgttcgagaagaggccgaagcagttcggcatcggcggggcgctgccgcccaagaaggacctccaccggttcgtcaagtggcccaaggtcgtgcggatccagcgccagcgccgcatcctcaagcagcgcctcaaggttcccccggcgctccaccagttcacccgcaccctcgacaagaacctcgccaccaacctgtttaagatgcttctcaagtaccgccccgaggacaaggtggctaagaaggagaggcttctgaagagggcccaggctgaggctgaggggaaaaccgttgaggccaagaagccaattgttgtcaagtatggtcttaaccatgtcacttacctcatcgagcagagcaaggctcagctggtcgtcatcgctcatgatgttgacccaattgagctggttgtgtggctcccagccctgtgcaggaagatggaggttccatactgcattgttaagggaaaatcacgccttggatcgatcgttcacaagaagactgcctcagttctgtgcctcaccactgtgaagaacgaggacaagcttgagttcagcaagatcttggaggctatcaaggctaacttcaacgacaagtttgacgaggtcaggaagaagtggggcggtggtgtcatgggatccaagtcgcaggccaagaccaaggccagggaaaggctcatcgccaaggaggctgcgcagaggatgaactaagcctagccttatatgcgagagcatatgccatgtagtttccctttcagtgtgtcctgattttgacgaggaactcgaacccttttagcagcactgtggaatcgtattgtggttttctgattctctgttccgttctccagacttatgcaaagatcagatgaggtttacccatgtttggattctatatagttttatgtccccaaaaaaaaaaaaaaaa

SEQ ID NO: 5464 - protein, 259 aa, Glycine max
  misc_feature: Ceres CLONE ID no. 1058892
  misc_feature: Ceres CDNA ID no. 25891050
  misc_feature (114)..(209): Pfam Name: Ribosomal_L7Ae PFAM Desc: Ribosomal protein L7Ae/L30e/S12e/Gadd45 family
  misc_feature: Homolog of GI Number: 50944205 NR Desc: 60S ribosomal protein L7A
  misc_feature: Homolog of GI Number: 23308199 NR Desc: At2g47610/T30B22.8
  misc_feature: Homolog of GI Number: 21592470 NR Desc: 60S RIBOSOMAL PROTEIN L7A protein
  misc_feature: Homolog of GI Number: 50904347 NR Desc: putative 60S ribosomal protein
  misc_feature: Homolog of GI Number: 82623429 NR Desc: 60S ribosomal protein L7A
  misc_feature: Homolog of GI Number: 57900205 NR Desc: putative 60S ribosomal protein L7A
  misc_feature: Homolog of GI Number: 82400140 NR Desc: 60S ribosomal protein L7A
  misc_feature: Homolog of GI Number: 61654624 NR Desc: L7a
  misc_feature: Homolog of GI Number: 38047799 NR Desc: similar to Drosophila melanogaster RpL7A
  misc_feature: Homolog of GI Number: 806545 NR Desc: ribosomal protein L7a
  misc_feature: Useful for making plants with altered leaf shape eg curled leaves
  misc_feature: Useful for making plants with increased biomass and foliage
  misc_feature: Useful for making plants with increased biomass and foliage
  misc_feature: Useful for making shorter plants
MAPKRGGKAPVPAKKKAADKVVNPLFEKRPKQFGIGGALPPKKDLHRFVKWPKVVRIQRQRRILKQRLKVPPALHQFTRTLDKNLATNLFKMLLKYRPEDKVAKKERLLKRAQAEAEGKTVEAKKPIVVKYGLNHVTYLIEQSKAQLVVIAHDVDPIELVVWLPALCRKMEVPYCIVKGKSRLGSIVHKKTASVLCLTTVKNEDKLEFSKILEAIKANFNDKFDEVRKKWGGGVMGSKSQAKTKARERLIAKEAAQRMN

SEQ ID NO: 5465 - DNA, 1041 bp, Glycine max
  misc_feature: Ceres CLONE ID no. 1058903
  misc_feature: Ceres CDNA ID no. 29191260
  CDS (2)..(697): REFERENCED BY SEQ ID NO: 5466
atcaacaacctccccgctttctccttcccgtctctctcctctcctctggtcccgattcccttctccgagcttcctccctataaataaggcggcccgcggcggccatcaattcccgtcaccgcccaccgaggccgcgaattattcctccgccccgcccgccgcgaaaaccctagccgccgccgatcccatggccaccgcctccagccaggcgagcctcctcctccagaagcagctccgagatctcgcgaagcaccccgtcgatgggttttcagccgggctcgtcgacgacagcaacgtcttcgagtggcaggtcaccatcatcggcccgcccgagaccctatatgatggaggctatttcaatgcaataatgagcttcccacaaaattatccgaacagccctccaacagtcagattcacttctgaaatgtggcatcctaatgtttatccggatgggcgggtatgcatttctattcttcatccacctggtgatgatcccaacggatacgagctcgcgagtgagcgttggacaccagtccatacggttgagagtatagtattaagcatcatttcgatgctttctagtccaaatgatgaatcaccggcaaatattgaagcagctaaggactggagagagaagcaggatgagttcaagaagaaggtcaggcgcgccgtacggaaatcccaggaaatgctctgaataaaatgggagtactggggaagttagccatgccatttcaggtgtggagggttttgctgtcgatctccaaatgtccatccgacactagcaatttcacttctcccctgtatattttccattagcctgtctcctgtggaggtcttggttttgactctgaaaacgcaacgcatattctaagggtctggttgttgtaattgtgtggcttcggctatcaatattgagaaacttgggagagctgctacttaccataattctttaacgaacctgatataaacggacacctgcctgatcagctaatgttgaagtctgctctcatctggaagcgattaaaaaaaaaaaaaaaa

SEQ ID NO: 5466 - protein, 169 aa, Glycine max; identical to SEQ ID NO: 3640
  misc_feature: Ceres CLONE ID no. 1058903
  misc_feature: Ceres CDNA ID no. 29191260
  misc_feature (11)..(162): Pfam Name: UQ_con PFAM Desc: Ubiquitin
  misc_feature: Homolog of GI Number: 50931677 NR Desc: putative ubiquitin
  misc_feature: Homolog of GI Number: 34908132 NR Desc: putative Ubiquitin carrier protein UBC7
  misc_feature: Homolog of GI Number: 2641619 NR Desc: ubiquitin
  misc_feature: Homolog of GI Number: 2624417 NR Desc: Ubiquitin carrier protein
  misc_feature: Homolog of GI Number: 19347846 NR Desc: putative E2
  misc_feature: Homolog of GI Number: 28973769 NR Desc: putative E2
  misc_feature: Homolog of GI Number: 9759251 NR Desc: ubiquitin
  misc_feature: Homolog of GI Number: 66354436 NR Desc: ubiquitinating enzyme
  misc_feature: Homolog of GI Number: 81076243 NR Desc: ubiquitin
  misc_feature: Homolog of GI Number: 100813 NR Desc: ubiquitin

SEQ ID NO: 5467 - DNA, 680 bp, Glycine max
  misc_feature: Ceres CLONE ID no. 1059248
  misc_feature: Ceres CDNA ID no. 40351596
  CDS (1)..(522): REFERENCED BY SEQ ID NO: 5468
accccaatccctcctcctcaagcaccagaaccccctccccctccctcctcagcctcccggcgcatcgagccatggcccgcaccaagcagacggcgaggaagtccaccggcggcaaggcgccgaggaagcagctggccaccaaggccgcccgcaagtccgccccggccaccggcggcgtcaagaagccccaccgcttccgccccggcaccgtcgcgctccgcgagatccgcaagtaccagaagagcacggagctgctcatccgcaagctccccttccagcgcctcgtccgcgagatcgcccaggacttcaagaccgacctccgcttccagtcctccgccgtctccgcactgcaggaggccgccgaggcctacctcgtcggcctcttcgaggacaccaacctctgcgccatccacgccaagcgcgtcaccatcatgcccaaggacatccagctcgcccgccgcatccgtggcgagagggcctaggctgctccgtgcgcgtcgtcgtgtgttagatccaccttagccgttgttcagcggtcgagatgtgcgtgctcgtagtgtttgtttgtgccatggtggatgtagtgtgcctgatctgatgtcaccatcttgctgtcatcagtaatttaaatgaaaatgttggcggtctgttctaagatctgtccaaaaaaaaaaaaaaaa

SEQ ID NO: 5468 - protein, 136 aa, Glycine max; identical to SEQ ID NO: 588
  misc_feature: Ceres CLONE ID no. 1059248
  misc_feature: Ceres CDNA ID no. 40351596
  misc_feature (58)..(134): Pfam Name: Histone PFAM Desc: Core histone H2A/H2B/H3/H4

SEQ ID NO: 5469 - DNA, 698 bp, Glycine max
  misc_feature: Ceres CLONE ID no. 1059310
  misc_feature: Ceres CDNA ID no. 36699547
  CDS (1)..(582): REFERENCED BY SEQ ID NO: 5470
ccctgccagttcattactcttctcctcgctcccagttttgaatcgagagagagagagagagagaggtgttgggtgcagctagtagctaggagcaagcaagcagatccaggaggagcagagcggagcggagatggcggactgggggccggtcgtggtcgcgacggtgctcttcgtgctgctgacgccggggctgctgttccagctgccggcgcagggccggatcgtggccttcggcagcatgcacaccggcggcctcgccatcctcatccacgccgtcatctacttcgccctcatcaccatcttcctcatcgccatcggggtccacatctacgccggctagaccccacacccactcctcttcgccgcacatctccgccgtgcgtgcctatgaagctttgctgtcccggaggcggcttctcttactattaccgcttgtattgtacttactgtgtagtgggtaccttctattattgtcttcttcatttaggtggccagagaaacaaatatggtttgttgtttgcctggctgggatttcgtttgagatggctgccagtggcatggcgctctccgtctctgggatgaaaatttatccagaaaggctggctggtgttgctgctgccgttgcccttgtgattcctctcttgagttaaccttggacatgttaatttatccatctttttctaaaaaaaaaaaaaaaa

SEQ ID NO: 5470 - protein, 69 aa, Glycine max
  misc_feature: Ceres CLONE ID no. 1059310
  misc_feature: Ceres CDNA ID no. 36699547
  misc_feature: Homolog of GI Number: 50923841 NR Desc: OSJNBa0044M19.15
  misc_feature: Homolog of GI Number: 50904308 NR Desc: P0592G05.7
MADWGPVVVATVLFVLLTPGLLFQLPAQGRIVAFGSMHTGGLAILIHAVIYFALITIFLIAIGVHIYAG

SEQ ID NO: 5471 - DNA, 1407 bp, Glycine max
  misc_feature: Ceres CLONE ID no. 1059494
  misc_feature: Ceres CDNA ID no. 25891089
  CDS (76)..(1191): REFERENCED BY SEQ ID NO: 5472
atagatctcacactccaagctagccaacaccagctactgctcggtgaactagtttggtacgtagcagctagcacgatggggcagcttagcaagaaccttctggtggcggccgtgctggccgtggcggcggtggagctgtgcggcgccatcccgctggaggacaaggacctggagtcggaggaggcgctgtgggacctgtacgagcggtggcagaccgcgcaccgcgtgccccgccaccacgccgagaagcaccgccgcttcggcaccttcaagtccaacgcccacttcgtccactcccacaacaagcgcggcgaccgcccctaccgcctccgcctcaaccgcttcggcgacatgagccaggccgagttccgcgccaccttcgtcggcgacttccgccgcgacaccctggccacgccgccgtccgtccccggattcatgtacgccgccgtgaacgtgtccgacctgccgccgtccgtggactggcggcagaagggcgccgtgacgggcgtcaaggaccagggcaagtgcggtagctgctgggccttctccacggtggtgtccgtggaaggcatcaacgccatccgcacgggcagcctcgtgtccctctcggagcaggagctcatcgactgcgacacggcggacaacgaagggtgccagggcgggctcatggacaacgccttcgagtacatcaagagcaacggcgggctcatcaccgaggctgcctacccgtaccgcgccgcccaaggcacctgcaacgtcgcgagagcggcccagaactcccccgtggtggtgcacatcgacgggcaccaggacgtgccggccaacagcgaggaggcgctggcccaggcggtggcgaaccagcccgtgtccgtggccgtcgaggccagcgggaaggcgttcatgttctactccgagggggtcttcaccggcagctgcggcacggagctggaccacggcgtcgcggtggtcgggtacggcgtggcagaggacggcaaggcgtactggacggtgaagaactcgtgggggccgtcgtggggggagcagggctacatcagggtggagaaggattccggcgtcgcgggcgggctctgcggcatcgccatggaggcgtcctaccccgtcaagaccgacagcaagcccaagcccacgccgacgcccaggcgcgccctcggagccagggagtcacagtgatgcggcggaattattgctactactactatcgttcctagttaaattaagggtgaaataagttaagattgaattaaatggttctgcgtgggcacgcggcaagaattaagtgtcacgtgggacaaggtcgatcgatatctatttggattttctgaatgtaatgtaaaatataatgtgatgtaatgtattgctggttacagtgcaaaaaaaaaaaaaaaa

SEQ ID NO: 5472 - protein, 371 aa, Glycine max; identical to SEQ ID NO: 3600
  misc_feature: Ceres CLONE ID no. 1059494
  misc_feature: Ceres CDNA ID no. 25891089
  misc_feature (130)..(349): Pfam Name: Peptidase_C1 PFAM Desc: Papain family cysteine protease
  misc_feature: Homolog of GI Number: 4426617 NR Desc: cysteine endopeptidase precursor
  misc_feature: Homolog of GI Number: 7435804 NR Desc: cysteine proteinase
  misc_feature: Homolog of GI Number: 1146116 NR Desc: cysteine proteinase EPB1 precursor
  misc_feature: Homolog of GI Number: 1146118 NR Desc: cysteine proteinase EPB2 precursor
  misc_feature: Homolog of GI Number: 56785107 NR Desc: putative cysteine proteinase
  misc_feature: Homolog of GI Number: 40806500 NR Desc: putative cysteine protease 2
  misc_feature: Homolog of GI Number: 58531896 NR Desc: cysteine protease
  misc_feature: Homolog of GI Number: 396568 NR Desc: thiol
  misc_feature: Homolog of GI Number: 51965090 NR Desc: PREDICTED OJ1150_A11.17 gene product
  misc_feature: Homolog of GI Number: 31559528 NR Desc: cysteine proteinase

SEQ ID NO: 5473 - DNA, 965 bp, Glycine max
  misc_feature: Ceres CLONE ID no. 1059504
  misc_feature: Ceres CDNA ID no. 29191261
  CDS (97)..(660): REFERENCED BY SEQ ID NO: 5474
atcctctctctatttctctctcctaaagaaacacgataaaattcgacagaggattcgggaggacttccgccgtccgggaggcgaagagagggcgagatgggggcgtccgaatctgtgccggagacctccgtacacgaattcaccgttaaggattgcaacggcaaggaggtgtgcctggacacgtacaaggggaaggtcctcctcatcgtcaacgtcgcctccaaatgcgggttcacggagactaattacacgcagctgacggagctttatcagaagtacagggagaaagactttgagatattagcattcccctgcaaccagtttttgcgacaagagccaggcagtgaccagcagatccaagactttgcatgcacaagattcaaagctgaatatccagtttttcagaaggtgcgtgtaaatggcccagatgctgcgccgctttacaagtttctgaaagctagcaaacctggtttgtttggttcaagaatcaagtggaactttaccaagtttcttgttgacaagaatgggaaagtaatcaacagatacgcaactgctaccactccattttcattcgagaaagacatccagaaggcacttgaggaggaaccctccgactcgcagacaaaaaaagaggaggaatcttccgactcgcagaagtaggcacttgcaaagtatccccgtcgtgatatctagaccaatctctgccagtaaattactgtgatatttcccctggtttgatctttgttcttgtatttgtgacttccgcttatgtaagtagaggttgtgtagctaccaattatttatctgcaccgctctcgtggttttcttttgggtgcttttgtcgaggtacacaagatattgatgaactggaatcgtatgcagtttatggtagtttaaaaaaaaaaaaaaaaaaaaaaaaaaaaaaaaaaaaaaaaaaaaaaaaaaaaaaaaaaaaaaaaaaaaaa

SEQ ID NO: 5474 - protein, 187 aa, Glycine max
  misc_feature: Ceres CLONE ID no. 1059504
  misc_feature: Ceres CDNA ID no. 29191261
  misc_feature (11)..(120): Pfam Name: GSHPx PFAM Desc: Glutathione peroxidase
  misc_feature: Homolog of GI Number: 11544696 NR Desc: putative phospholipid hydroperoxide glutathione peroxidase
  misc_feature: Homolog of GI Number: 21617962 NR Desc: putative glutathione peroxidase
  misc_feature: Homolog of GI Number: 25285637 NR Desc: probable glutathione peroxidase
  misc_feature: Homolog of GI Number: 21537329 NR Desc: probable glutathione peroxidase
  misc_feature: Homolog of GI Number: 48374968 NR Desc: putative glutathione peroxidase
  misc_feature: Homolog of GI Number: 21360380 NR Desc: glutathione peroxidase 1
  misc_feature: Homolog of GI Number: 48374955 NR Desc: putative glutathione peroxidase
  misc_feature: Homolog of GI Number: 44663004 NR Desc: phospholipid
  misc_feature: Homolog of GI Number: 82581134 NR Desc: glutathion peroxidase
  misc_feature: Homolog of GI Number: 22268405 NR Desc: putative glutathione peroxidase
  misc_feature: Useful for delaying flowering time
  misc_feature: Useful for increasing seed/fruit yield or modifying fruit content
  misc_feature: Useful for making plants with increased biomass and foliage
  misc_feature: Useful for sterility
MGASESVPETSVHEFTVKDCNGKEVCLDTYKGKVLLIVNVASKCGFTETNYTQLTELYQKYREKDFEILAFPCNQFLRQEPGSDQQIQDFACTRFKAEYPVFQKVRVNGPDAAPLYKFLKASKPGLFGSRIKWNFTKFLVDKNGKVINRYATATTPFSFEKDIQKALEEEPSDSQTKKEEESSDSQK

SEQ ID NO: 5475 - DNA, 1484 bp, Glycine max
  misc_feature: Ceres CLONE ID no. 1059901
  misc_feature: Ceres CDNA ID no. 40351597
  CDS (77)..(1216): REFERENCED BY SEQ ID NO: 5476
cggatttgatcctgtgaagtgagagatcagttctcgatttcgattccgggctcagagaatttcccaggcgagcgagatggcgacggccgggaaggtgatcaagtgcaaagccgcggtggcatgggaggcggggaagccgctgtccatggaggaggtggaggtggcgccgccgcaggccatggaggtgcgcgtcaagatcctcttcacctccctctgccacaccgacgtctacttctgggaggccaaggggcagacccccatgttccctcggatcttcggtcatgaagctggaggcatagtggagagtgttggagagggtgtgactgagcttgcccctggtgaccatgtccttcctgtgttcactggggagtgtaaggaatgcccacattgcaagtctgcggagagcaacatgtgtgatctgctcaggatcaacaccgacagaggtgtcatgatcggggatggcaagtcacgcttctctattgacgggaagccgatttaccatttcgtagggacttccaccttcagtgagtatactgtcatgcatgttggttgtgttgccaagatcaaccctgaggccccccttgataaagtctgtgttcttagctgtggtatttccactggtcttggtgcatccattaatgttgcaaaaccaccaaagggttcgacagtggcgatatttgggctaggagctgttggccttgctgctgcagaaggtgcaaggattgcaggtgcatctaggatcattggtattgacttgaacgccagcagatttgaagaagctagaaaatttggctgcacggaatttgtgaacccgaaagatcacagcaagccagttcaggaggtgctcgctgagatgacaaatggtggagttgaccgcagtgttgagtgcacgggcaacgtcaatgctatgatacaagcatttgaatgtgtccatgatggctggggtgttgctgtgctggtgggtgtgccgcacaaggacgccgaattcaagacccacccgatgaacttcctgaacgagaggactctcaagggcaccttcttcggaaacttcaagccgcgcaccgacctgcccaatgtcgtggagatgtacatgagaaaggagctggaggtggagaagttcatcacacacagcgtgccgttctcggagatcaacaaggcgttcgacctcatggcgaagggcgagggcatccgctgcatcatccgcatggagaactaggccgcctcacgtgcttctgattgctccgatgtaataagcgtttggggggcggtttctgaaccagatcatcgtctgtggtttcgccttccttggcaaagtagcgtagtgttagttcaagtatatctgtaattacgtaccggagaagtggtggtactacgagctctcttttggcagcaatatatgctgctgctgctgctgctgctgctgctactatggccatgagtttcagttgaatgagtctgttcttagcccaaaaaaaaaaaaaaaa

SEQ ID NO: 5476 - protein, 379 aa, Glycine max
  misc_feature: Ceres CLONE ID no. 1059901
  misc_feature: Ceres CDNA ID no. 40351597
  misc_feature (198)..(239): Pfam Name: TrkA_N PFAM Desc: TrkA
MATAGKVIKCKAAVAWEAGKPLSMEEVEVAPPQAMEVRVKILFTSLCHTDVYFWEAKGQTPMFPRIFGHEAGGIVESVGEGVTELAPGDHVLPVFTGECKECPHCKSAESNMCDLLRINTDRGVMIGDGKSRFSIDGKPIYHFVGTSTFSEYTVMHVGCVAKINPEAPLDKVCVLSCGISTGLGASINVAKPPKGSTVAIFGLGAVGLAAAEGARIAGASRIIGIDLNASRFEEARKFGCTEFVNPKDHSKPVQEVLAEMTNGGVDRSVECTGNVNAMIQAFECVHDGWGVAVLVGVPHKDAEFKTHPMNFLNERTLKGTFFGNFKPRTDLPNVVEMYMRKELEVEKFITHSVPFSEINKAFDLMAKGEGIRCIIRMEN

SEQ ID NO: 5477 - DNA, 680 bp, Glycine max
  misc_feature: Ceres CLONE ID no. 1059994
  misc_feature: Ceres CDNA ID no. 40351598
  CDS (3)..(545): REFERENCED BY SEQ ID NO: 5478
accgcgaaaaatctcaatctcagtctccatctccatctccaaaccgcagcagcagcccatccctcgccgccgcccgcctcccgcagctccgatggcccgcaccaagcagactgcccgcaagtccaccggcggcaaggcgcccaggaagcagctcgccaccaaggcggcgcgcaagtcggcgccggccaccggcggcgtcaagaagccccaccgcttccgcccgggaaccgtcgcgctccgtgagatccgcaagtaccagaagagcacggagctgctcatccgcaagctccccttccagcgcctcgtccgggagatcgcccaggacttcaagaccgacctccgcttccagtcctccgccgtctccgcgctccaggaggccgccgaggcgtacctggtggggctgttcgaggacaccaacctgtgcgccatccacgccaagcgcgtcaccatcatgcccaaggacatccagctcgcccgccgcatccgcggggagcgcgcctaggctctgtatccgccctgtgtcagctgcccttgaatcccgctagatgtttatgactctgtagttgtctgctcctccttatgtttccctccttgtatttctaatggatgccatcaaatgttcaaatctctggtttgataaatgggatcacgcatattttctgccaaaaaaaaaaaaaaaa

SEQ ID NO: 5478 - protein, 136 aa, Glycine max; identical to SEQ ID NO: 588
  misc_feature: Ceres CLONE ID no. 1059994
  misc_feature: Ceres CDNA ID no. 40351598
  misc_feature (58)..(134): Pfam Name: Histone PFAM Desc: Core histone H2A/H2B/H3/H4

SEQ ID NO: 5479 - DNA, 1450 bp, Glycine max
  misc_feature: Ceres CLONE ID no. 1060067
  misc_feature: Ceres CDNA ID no. 25891125
  CDS (120)..(1235): REFERENCED BY SEQ ID NO: 5480
atcgatctcacactccaagctagcaacaccagctactgctcggtgatcagcagtgcactaccacgtacacagaaacaactcgtggtactgaactagtttggtacgtagcagctagcacgatggggcagcttagcaagaagcttctggtggcggccgtgctggccgtggcggcggtggagctctgcggcgccatcccgctggaggacaaggacctggagtcggaggaggcgctgtgggacctgtacgagcggtggcagaccgcgcaccgcgtgccccgccaccacgccgagaagcaccgccgcttcggcaccttcaagtccaacgcccacttcgtccactcccacaacaagcacagcgaccgcccctatcgcctccacctcaaccgcttcggcgacatgagccaggccgagttccgcgccaccttcgtcggcgacctccgccgcgacaccccggccacgccgccgtccgtccccggattcatgtacgccacagtgaacgtgtccgaccttccgccgtccgtggactggcggcagaagggcgccgtcacgggcgtcaaggaccagggcaagtgcggcagctgctgggccttctccacggtggtgtccgtggaaggcatcaacgccatccgcacgggcagcctcgtgtccctctcggagcaggagctcatcgactgcgacacggcagacaacgacgggtgccagggcgggctcatggacaacgccttcgagtacatcaagaacaacggcgggctcatcaccgaggccgcctacccgtaccgcgccgccaacggaacctgcaacgtcgcgaccgccgccaagagctcccccgtggtggtgcgcatcgacgggcaccaggacgtgccggccaacagcgaggaagcgctggcccaggccgtggcgaaccagcccgtgtccgtggccgtcgaggccagtgggaaggcgttcatgttctactccgagggggtcttcaccggcagctgcggcacggagctggaccacggcgtggcggtggtcgggtacggcgtggcggaggacggcaaggcgtactggacggtgaagaactcgtgggggccgtcgtggggggagcagggctacatcagggtggagaaggattcgggtgccgcgggcgggctctgcggcatcgccatggaggcgtcctaccccgtcaagaccgacagcaagcccaagcccacgcccacgcccaggcgcgccctcggagccagggagtcacagtgatcactgatcgatccttctgcgtatctgaattattactactactatcgttcctagttaaattaagggtgaaataaattaagattgaattaaatggttctgcgtgggcatgcagcaaataattaggcgtgtgtaacgtgggaccaggtcgatcgatatctatttggattctgaatgtaatgtaaaatataattttatgtataaaaaaaaaaaaaaaa

SEQ ID NO: 5480 - protein, 371 aa, Glycine max
  misc_feature: Ceres CLONE ID no. 1060067
  misc_feature: Ceres CDNA ID no. 25891125
  misc_feature (130)..(349): Pfam Name: Peptidase_C1 PFAM Desc: Papain family cysteine protease
  misc_feature: Homolog of GI Number: 4426617 NR Desc: cysteine endopeptidase precursor
  misc_feature: Homolog of GI Number: 7435804 NR Desc: cysteine proteinase
  misc_feature: Homolog of GI Number: 1146116 NR Desc: cysteine proteinase EPB1 precursor
  misc_feature: Homolog of GI Number: 1146118 NR Desc: cysteine proteinase EPB2 precursor
  misc_feature: Homolog of GI Number: 56785107 NR Desc: putative cysteine proteinase
  misc_feature: Homolog of GI Number: 40806500 NR Desc: putative cysteine protease 2
  misc_feature: Homolog of GI Number: 396568 NR Desc: thiol
  misc_feature: Homolog of GI Number: 58531896 NR Desc: cysteine protease
  misc_feature: Homolog of GI Number: 31559528 NR Desc: cysteine proteinase
  misc_feature: Homolog of GI Number: 537437 NR Desc: cysteine proteinase
MGQLSKKLLVAAVLAVAAVELCGAIPLEDKDLESEEALWDLYERWQTAHRVPRHHAEKHRRFGTFKSNAHFVHSHNKHSDRPYRLHLNRFGDMSQAEFRATFVGDLRRDTPATPPSVPGFMYATVNVSDLPPSVDWRQKGAVTGVKDQGKCGSCWAFSTVVSVEGINAIRTGSLVSLSEQELIDCDTADNDGCQGGLMDNAFEYIKNNGGLITEAAYPYRAANGTCNVATAAKSSPVVVRIDGHQDVPANSEEALAQAVANQPVSVAVEASGKAFMFYSEGVFTGSCGTELDHGVAVVGYGVAEDGKAYWTVKNSWGPSWGEQGYIRVEKDSGAAGGLCGIAMEASYPVKTDSKPKPTPTPRRALGARESQ

SEQ ID NO: 5481 - DNA, 594 bp, Glycine max
  misc_feature: Ceres CLONE ID no. 1060073
  misc_feature: Ceres CDNA ID no. 24766647
  CDS (18)..(407): REFERENCED BY SEQ ID NO: 5482
agctattatgttttctaatgtttctctgtttgaaattttcagagaccatggccaaaagccccttcaagcttgaacatcccttggaaagaaggcaggctgagtctgctcgcattagagacaagtatcctgatagaatacctgtgattgttgagaaagctgaaagaagtgacatcccagacatcgataagaagaagtaccttgtcccagcagatttgactgttggccaatttgtttatgttgtccgtaaaaggattaaggtcagtgcagagaaggctatttttgtttttgtcaataacactctacctccaactgccgctttgatgtcttctatttatgaggaaaataaagacgatgatggttttctttacatgacttacagtggagagaacactttcggttctcgctagggtcaaatttaataatatatgagatcctctgtaaatagatgctgcaagatgtaaactttctgctgtcgatagtcgatgcctatcctgtttattgcttatggtttacgtatctattgagcagatattttgctgctttgattatgtgcattctcttcaaattatggatttcagaaaaaaaaaaaaaaaa

SEQ ID NO: 5482 - protein, 119 aa, Glycine max
  misc_feature: Ceres CLONE ID no. 1060073
  misc_feature: Ceres CDNA ID no. 24766647
  misc_feature (14)..(117): Pfam Name: MAP1_LC3 PFAM Desc: Microtubule associated protein 1A/1B
  misc_feature: Homolog of GI Number: 34595981 NR Desc: microtubule
  misc_feature: Homolog of GI Number: 32401365 NR Desc: autophagy
  misc_feature: Homolog of GI Number: 50937683 NR Desc: putative microtubule associated protein
  misc_feature: Homolog of GI Number: 30102824 NR Desc: At4g21980
  misc_feature: Homolog of GI Number: 37776903 NR Desc: putative microtubule
  misc_feature: Homolog of GI Number: 21553487 NR Desc: symbiosis
  misc_feature: Homolog of GI Number: 21592920 NR Desc: putative microtubule
  misc_feature: Homolog of GI Number: 67462441 NR Desc: microtubule associated protein 1A/1B light chain 3
  misc_feature: Homolog of GI Number: 66848125 NR Desc: autophagic death protein
  misc_feature: Homolog of GI Number: 7269043 NR Desc: symbiosis
  misc_feature: Useful for accelerating flowering time
  misc_feature: Useful for making ornamental plants with modified flowers
  misc_feature: Useful for making plants with increased biomass and foliage
  misc_feature: Useful for making shorter plants
  misc_feature: Useful for making shorter plants and plants with modified flowers
  misc_feature: Useful for making smaller plants
  misc_feature: Useful for modifying plant structure
  misc_feature: Useful for sterility
MAKSPFKLEHPLERRQAESARIRDKYPDRIPVIVEKAERSDIPDIDKKKYLVPADLTVGQFVYVVRKRIKVSAEKAIFVFVNNTLPPTAALMSSIYEENKDDDGFLYMTYSGENTFGSR

SEQ ID NO: 5483 - DNA, 541 bp, Glycine max
  misc_feature: Ceres CLONE ID no. 1060499
  misc_feature: Ceres CDNA ID no. 29191262
  CDS (53)..(364): REFERENCED BY SEQ ID NO: 5484
aaaatctccgtctccaatcaattaacatatctacataagcttgtgaagagagatgtcaggaagaggaaagggaggaaagggattgggaaaaggaggagcgaagaggcacaggaaggttctcagggataacatccaaggcatcaccaagcctgcgattcgtcgtcttgctcgcagaggtggagtgaagcgtattagcggtctgatctacgaggagaccagaggagtcctcaagatcttcctcgagaatgtcatccgcgacgccgtgacttacatcgagcacgctaggaggaagacggttactgctatggatgtggtgtatgctttgaagaggcagggacgcactctctacgggttcggcggttaaatcaacgatgtgttgtggaagaggggattagtagtgttctctgtcttgtacttgtagctaaaatcttagcaatgttatgttaacgagatttgagaataaacaatattatgtctttggttctcttagtttgatatgtgaatccaagctcaagtttaactttcaaaaaaaaaaaaaaaa

SEQ ID NO: 5484 - protein, 103 aa, Glycine max
  misc_feature: Ceres CLONE ID no. 1060499
  misc_feature: Ceres CDNA ID no. 29191262
  misc_feature (25)..(96): Pfam Name: Histone PFAM Desc: Core histone H2A/H2B/H3/H4
  misc_feature: Homolog of GI Number: 74004215 NR Desc:  similar to germinal histone H4 gene
  misc_feature: Homolog of GI Number: 83030220 NR Desc:  similar to germinal histone H4 gene
  misc_feature: Homolog of GI Number: 74004228 NR Desc:  similar to germinal histone H4 gene
  misc_feature: Homolog of GI Number: 56798269 NR Desc: histone H4
  misc_feature: Homolog of GI Number: 62648434 NR Desc:  similar to germinal histone H4 gene
  misc_feature: Homolog of GI Number: 1806283 NR Desc: Histone H4 homologue
  misc_feature: Homolog of GI Number: 297152 NR Desc: histone H4
  misc_feature: Homolog of GI Number: 55626038 NR Desc:  similar to HIST2H3C protein
  misc_feature: Homolog of GI Number: 55626084 NR Desc:  similar to Histone H2A.1
  misc_feature: Homolog of GI Number: 62663604 NR Desc:  similar to Histone H2B 291B
MSGRGKGGKGLGKGGAKRHRKVLRDNIQGITKPAIRRLARRGGVKRISGLIYEETRGVLKIFLENVIRDAVTYIEHARRKTVTAMDVVYALKRQGRTLYGFGG

SEQ ID NO: 5485 - DNA, 511 bp, Glycine max
  misc_feature: Ceres CLONE ID no. 1060514
  misc_feature: Ceres CDNA ID no. 40351599
  CDS (10)..(309): REFERENCED BY SEQ ID NO: 5486
aaagaaaagatgttacagttcccggcgtatatgactcagtacccattgtcgacgaggactattccgacgtcgtttctgctaccctctcagtggcctcagccccaaaacgaagaactccttctcgccatggaagagtccgatttcgaagaaaaatgcaacgagatcaggaagatgaacagcaacctgattgtgatagggaaaaccactaatgaaaatgataaggaagactttgacaatgaggcagatgacgatgatgctgacaatgcagaggaatctgagggtgaagaatttgagcaagaaactagttgaggttgctgcacatcaacaagaaactgttactatacttttggactgctaggtgaaatctttgtattgagtttttcttctattcatattttggacctactattgagtattgacttgtcattcatatcaacctttgtattgtatctgctcttttattatacttaataaaatatttacaacctttaagtgacaaaaaaaaaaaaaa

SEQ ID NO: 5486 - protein, 99 aa, Glycine max
  misc_feature: Ceres CLONE ID no. 1060514
  misc_feature: Ceres CDNA ID no. 40351599
MLQFPAYMTQYPLSTRTIPTSFLLPSQWPQPQNEELLLAMEESDFEEKCNEIRKMNSNLIVIGKTTNENDKEDFDNEADDDDADNAEESEGEEFEQETS

SEQ ID NO: 5487 - DNA, 1241 bp, Glycine max
  misc_feature: Ceres CLONE ID no. 1060559
  misc_feature: Ceres CDNA ID no. 25087617
  CDS (3)..(956): REFERENCED BY SEQ ID NO: 5488
gtaaaccctatcttctcctgttccccttcgtccccggccggcgacgacgccgcgcgcgcagcgaacccagcccctcctccggttgcagtaagcaaggaaggatgagtaggcgctggagccggaccatttacgttgggaacctcccaggggatatcagggagcgggaggtggaggatctgttctacaagtatggacggatagttgaaattgacttgaaggtccccccaaggccacctggctttgcttttgttgagtttgaagatccccgtgatgctgaagatgcgattcatggtcgagatggttacaactttgatgggaatcgtctgcgggttgaacttgcacatggcgggagggccaactcttcatcccttccgaacagctatggtggcggaggacgccgtggtggtgtctctaggcatacagagtatcgtgttctggttactggactaccttcttctgcatcatggcaagatctaaaggatcatatgagaaaggctggtgatgtttgtttctctgaggtgtatcgtgagggtggtggtactattggaattgttgattatacaaactatgatgacatgaagtatgctataaggaagcttgatgatactgaatttaaaaatgcattctctcgagcgcctataagggtgaaggagtatgctggcaaaagcagccgctcctattcacgcagccgtagcagaagccgaagtggcagctacagcaggagtccgagtccaaagaaaaaaccatcacgccgttcagcgtcaagatctcggtcgagatcagtttcttcccattcaaggtcaccgtcaaagggacgctctccatcaagatcaccagcaaaatcccaatcccctgtcgctgcgtcccccgtcgtcaatggtgaagcagcaagccccaagagggacccaagcaagagcccatcacgttcccggtctcctgatgccaaatcagagtaaaacggatgcgaggctaggagcggtgagaggcggagccatggtcttcaaattcttcaaattttgtcttcgccaacttctgcatccgctgttatagtactatctctgtgttcggttattctaggttccttgatgtttctgtaaaaacttgtttggatggattcttgagatttatgtactctcttcattgtcagcatttttacttggattattatctatggtcgttggctcggaagatatttgaatacagtaacattgccgtttgtaatgctgaaaaaaaaaaaaaaa

SEQ ID NO: 5488 - protein, 284 aa, Glycine max
  misc_feature: Ceres CLONE ID no. 1060559
  misc_feature: Ceres CDNA ID no. 25087617
  misc_feature (9)..(77): Pfam Name: RRM_1 PFAM Desc: RNA recognition motif.
  misc_feature: Homolog of GI Number: 50939903 NR Desc: putative pre
  misc_feature: Homolog of GI Number: 55792397 NR Desc: splicing factor SF2
  misc_feature: Homolog of GI Number: 52140005 NR Desc: ASF/SF2
  misc_feature: Homolog of GI Number: 52140006 NR Desc: ASF/SF2
  misc_feature: Homolog of GI Number: 52140009 NR Desc: ASF/SF2
  misc_feature: Homolog of GI Number: 52140012 NR Desc: ASF/SF2
  misc_feature: Homolog of GI Number: 52140014 NR Desc: ASF/SF2
  misc_feature: Homolog of GI Number: 6056417 NR Desc: alternative splicing factor SF2a
  misc_feature: Homolog of GI Number: 5815235 NR Desc: splicing factor SR1
  misc_feature: Homolog of GI Number: 52140010 NR Desc: ASF/SF2
  misc_feature: Useful for making bigger plants
  misc_feature: Useful for making ornamental plants with modified flowers
  misc_feature: Useful for making plants with altered leaf shape eg curled leaves
  misc_feature: Useful for making plants with increased biomass
  misc_feature: Useful for sterility
MSRRWSRTIYVGNLPGDIREREVEDLFYKYGRIVEIDLKVPPRPPGFAFVEFEDPRDAEDAIHGRDGYNFDGNRLRVELAHGGRANSSSLPNSYGGGGRRGGVSRHTEYRVLVTGLPSSASWQDLKDHMRKAGDVCFSEVYREGGGTIGIVDYTNYDDMKYAIRKLDDTEFKNAFSRAPIRVKEYAGKSSRSYSRSRSRSRSGSYSRSPSPKKKPSRRSASRSRSRSVSSHSRSPSKGRSPSRSPAKSQSPVAASPVVNGEAASPKRDPSKSPSRSRSPDAKSE

SEQ ID NO: 5489 - DNA, 869 bp, Zea mays
  misc_feature: Ceres CLONE ID no. 1060758
  misc_feature: Ceres CDNA ID no. 29191263
  CDS (81)..(572): REFERENCED BY SEQ ID NO: 5490
accataccacaccattgacgcggcaagtcggcagaaactcatcaaaagcgcacaagctcgagccagaacacgagcccacgatggccggcattcgccgcgcccccgcgctcctcctgctgctcgccctcgcgtgcacccccgccctggccgcgcgcgacgtctccagcagcgccgccaaggcgaagaccaagtacccctcgggcccggcgcccggcaagaagccggccaagccgtacgtgccaccagccaccaagccccccgggtcgggcgccgtcgacggaggcgggatgcccgccatccccggcttcggcaccatccccgggttcaccgtgcccgggatggggggcgggtggggcgggggctacggcgggcccgacggcgggtactcgcgcggcggcgtggcggcctccaccaccgtctgctccgagaagggcccctgctacaagaagaagctgacgtgccccaagaagtgcttctcctcctacagcggcgccggcaaggggtacggcggcggcggcggcgggggcggctgcaccgtcgactgcaagaccaagtgcatcgcctactgctgagtgctgatcgatcgtacgtacgtacggggagctcggcggctccttggcttccatggtcatcgatggcgccggtgagcaccacattatacgtagctatcttgcgtgatacgcagaggaggcgcatacggctgtatgtttcctccccgatgtcgttctagtcggctgtaatatcgtcgcctcatgggtgtcagaattgctatgaactatgaagtgtatgagcaaataaacatagagatattactcttgggtcttgctgtttcttcaaatgcagtacatttcacaaaaaaaaaaaaaaaa

SEQ ID NO: 5490 - protein, 163 aa, Zea mays
  misc_feature: Ceres CLONE ID no. 1060758
  misc_feature: Ceres CDNA ID no. 29191263
  misc_feature (1)..(151): Pfam Name: GRP PFAM Desc: Glycine rich protein family
  misc_feature: Homolog of GI Number: 39933290 NR Desc: possible OmpA family member
  misc_feature: Homolog of GI Number: 12018147 NR Desc: vegetative cell wall protein gp1
  misc_feature: Homolog of GI Number: 41400384 NR Desc: plus agglutinin
  misc_feature: Homolog of GI Number: 66779249 NR Desc: similar to ATP
  misc_feature: Homolog of GI Number: 55234580 NR Desc: ENSANGP00000028786
  misc_feature: Homolog of GI Number: 32422095 NR Desc: predicted protein
  misc_feature: Homolog of GI Number: 50926032 NR Desc: OSJNBa0067K08.24
  misc_feature: Homolog of GI Number: 60678627 NR Desc: plus agglutinin
  misc_feature: Homolog of GI Number: 41400381 NR Desc: minus agglutinin
MAGIRRAPALLLLLALACTPALAARDVSSSAAKAKTKYPSGPAPGKKPAKPYVPPATKPPGSGAVDGGGMPAIPGFGTIPGFTVPGMGGGWGGGYGGPDGGYSRGGVAASTTVCSEKGPCYKKKLTCPKKCFSSYSGAGKGYGGGGGGGGCTVDCKTKCIAYC

SEQ ID NO: 5491 - DNA, 1168 bp, Zea mays
  misc_feature: Ceres CLONE ID no. 1060774
  misc_feature: Ceres CDNA ID no. 25446016
  CDS (3)..(896): REFERENCED BY SEQ ID NO: 5492
aaccgcactttttttttgccagtctccctcttgtcgcggagaacacagactcactatctctctcttgccacaccacgcaggcggccaccgggacagatccgcaggccatcaggtttgccgactccaacctccagaccttcccgccgtccgaggccaggggcaagatcgctggcgcctaccgcccgcccaccgacgccgacgataccttctcgtccaagggcggaggagccggaagcggtggcagaggcggcagcgcagggtcggatgatgccgcgcagggcggctggttccgcatgttctccgtggcggcgtacaagccctacttcgacgtcgacacgtctgacgttgtcgagaggatctgggagtccgtcttccccttccgcggcacatttacggagaagacctccgagaaccccgacctgtatgggccattttggacatgcaccaccctgattttcgttgctgcatctattgctacttttgtcatctacctatcccacaaatggcacaagaaggaatggaactatgatatcaacttggttacctggtctgctggcttattctatggctacgtgacatttgttcctcttcttttatatgttattctcaagtacttctcagcacctgctggtctggtgcaattgtggtgcctatatggatattctctattcatcttcattccagcatcgcttctgtctattgtgccaatagaaatattcagatgggtgattgctggtgttgctggtttcatgtctgctactttcgttgctgtaaatctccgcgcacacattgtaaattccggcgagcgatggttcctgatcgttgcagggatattcttgttgcagttggggcttgctgttttgctgaaactatatttcttcacgataactgtatagggttatttacatctaatgatcgtactagtcaagaatacacaattttccatgtggaatcacttccatgttcattgaacattgatgtaatttttccatgtatacatctttcttacacgtagaattgagaagcccctgaaattgaattacatcagccaaacaagtactgtgattgatatgggtgaagagtctgatctgtagtctatcctgtgttccactgcttgaggtgaataatgaatgagaaatcgctgtgttctccaaaaaaaaaaaaaaaa

SEQ ID NO: 5492 - protein, 200 aa, Zea mays
  misc_feature: Ceres CLONE ID no. 1060774
  misc_feature: Ceres CDNA ID no. 25446016
  misc_feature (11)..(176): Pfam Name: Yip1 PFAM Desc: Yip1 domain
  misc_feature: Homolog of GI Number: 34912560 NR Desc: P0410E03.18
  misc_feature: Homolog of GI Number: 30690667 NR Desc: integral membrane Yip1 family protein
  misc_feature: Homolog of GI Number: 38604050 NR Desc: At5g27490
  misc_feature: Homolog of GI Number: 53749357 NR Desc: unknow protein
  misc_feature: Homolog of GI Number: 18859855 NR Desc: CG4645
  misc_feature: Homolog of GI Number: 54642745 NR Desc: GA18325
  misc_feature: Homolog of GI Number: 48094892 NR Desc: similar to ENSANGP00000021771
  misc_feature: Homolog of GI Number: 40786465 NR Desc: similar to RIKEN cDNA C030002N13
  misc_feature: Homolog of GI Number: 51571929 NR Desc: zgc:91977
MFSVAAYKPYFDVDTSDVVERIWESVFPFRGTFTEKTSENPDLYGPFWTCTTLIFVAASIATFVIYLSHKWHKKEWNYDINLVTWSAGLFYGYVTFVPLLLYVILKYFSAPAGLVQLWCLYGYSLFIFIPASLLSIVPIEIFRWVIAGVAGFMSATFVAVNLRAHIVNSGERWFLIVAGIFLLQLGLAVLLKLYFFTITV

SEQ ID NO: 5493 - DNA, 1011 bp, Zea mays
  misc_feature: Ceres CLONE ID no. 1060877
  misc_feature: Ceres CDNA ID no. 29191264
  CDS (104)..(781): REFERENCED BY SEQ ID NO: 5494
acaacagcaaagcatccagcatcgccaacttccaaaatcaacctacgttgtacacttttcgagccctatccagtttttgtttctatacacttcttgcgaagacatggcttctcgtcaggatcaggctagctaccacgccggggaggccaaggcccgcgccgaggagaagacggggtacgtcgtgggcgcggcgcaggacaaggcgagggaggccaaggacacggcgtccgacgccgcgggccgcgccatgggcaggggcggcgacgccaaggaggcgaccaaggagaaggcgtacgaggccaaggacgcggcgtcggacgccactggccgcgccatggacaagggccgcggcgccgcggaggccaccaaggagaagggctacgaggccaaggacaacgcggccgacaccgcgcagcagaccgggagctacatcgcccagacggccgaggccgccaagcagaaggcggccggcgccgcccagtacaccatcgacacggcccgtgccggcaccgagcagaccgggagctacatcgggcagacggccgaggccgccaagcagaaggccggcgccgcagcgcagtatgccatggacaccgccgtggccggcaaggacaagaccggcagcctcctcgtacaggcaggggagacggtgaagggcgcggcggtgggggcgaaggacgcggtgatgaacacgatcggaatgggcggcggcaccaacggcagcaccgacgtcaccgccaaggacaccagcacgtacaagcccgggaccagggattactaatcgtgccattgtcaaggcgaccctgatgtatctttctaagctgtagtttaatttctacgtggccatctgccgccactttggtttctaaattagctcacctcgtggaggttgtaacttgtcaggacctagacaaatgcccaatgaggcatcctgactcctccctcccatacttgtttccgtgtttcagaatctaataaagttggaatcctagtgcaaaaaaaaaaaaaaaa

SEQ ID NO: 5494 - protein, 225 aa, Zea mays
  misc_feature: Ceres CLONE ID no. 1060877
  misc_feature: Ceres CDNA ID no. 29191264
  misc_feature (10)..(75): Pfam Name: LEA_4 PFAM Desc: Late embryogenesis abundant protein
  misc_feature: Homolog of GI Number: 537402 NR Desc: WSI18 protein induced by water stress
  misc_feature: Homolog of GI Number: 34910364 NR Desc: WSI18 protein
  misc_feature: Homolog of GI Number: 2654379 NR Desc: Group 3 Lea protein MGL3
  misc_feature: Homolog of GI Number: 25989705 NR Desc: LEA1 protein
  misc_feature: Homolog of GI Number: 21637 NR Desc: group 3 late embryogenesis abundant protein
  misc_feature: Homolog of GI Number: 25989707 NR Desc: LEA3 protein
  misc_feature: Homolog of GI Number: 55908886 NR Desc: putative group 3 LEA protein
  misc_feature: Homolog of GI Number: 4105441 NR Desc: group 3 LEA protein
  misc_feature: Homolog of GI Number: 1235567 NR Desc: group 3 LEA
  misc_feature: Homolog of GI Number: 10954052 NR Desc: ovarian fibroin
MASRQDQASYHAGEAKARAEEKTGYVVGAAQDKAREAKDTASDAAGRAMGRGGDAKEATKEKAYEAKDAASDATGRAMDKGRGAAEATKEKGYEAKDNAADTAQQTGSYIAQTAEAAKQKAAGAAQYTIDTARAGTEQTGSYIGQTAEAAKQKAGAAAQYAMDTAVAGKDKTGSLLVQAGETVKGAAVGAKDAVMNTIGMGGGTNGSTDVTAKDTSTYKPGTRDY

SEQ ID NO: 5495 - DNA, 795 bp, Zea mays
  misc_feature: Ceres CLONE ID no. 1060943
  misc_feature: Ceres CDNA ID no. 25446099
  CDS (235)..(573): REFERENCED BY SEQ ID NO: 5496
gagttttccccctttctcgcttctcctcgtggttcctcaagtcccgctgctgccgccctctccttctcgtcgcgctccgtgaccgcctcctctccttccactacagatgcctcctcatcggctcaccacccaggtttacccaccttgcagatccagtggcgattccattcctctccgtgtggacgcaaggactcagtgaaccacttccagatactcgctgcttctcccgtgcccatggctacaccacttatagcaggacttgcagttgcagcagctgcccttgccggtagatatagcatccaagcttggaatgcttataaggcccggcccgtagttccaaggatgcgcaaattctatgaaggtggtttccaacctacgatgacacgaagggaagctgctttaatccttggtgtcagggaaactgccagtgcagagaaggtcaaagaagcacacaagagagtgatggtggccaatcatccagatgcgggtggaagtcattaccttgcttcaaagattaacgaggcaaaggatgtaatgacagggaaaacaaaagggggtgggtctgccttttgatcggtacacggacaacgtgttcttccactgaaagagcaattttgtgtctccagactcgcattagaagatatgccgaaatctttgtgtgttttatgaaaatttgtggacaaaaaaaaagtagtggacctttatggagcaggcaattcgttgcttagtaaagctcggctcagttgtgcttgtgcccgaatcaattggacattgttgctaaaaaaaaaaaaaaaa

SEQ ID NO: 5496 - protein, 112 aa, Zea mays
  misc_feature: Ceres CLONE ID no. 1060943
  misc_feature: Ceres CDNA ID no. 25446099
  misc_feature (53)..(100): Pfam Name: DnaJ PFAM Desc: DnaJ domain
  misc_feature: Homolog of GI Number: 55770429 NR Desc: putative DNAJ domain
  misc_feature: Homolog of GI Number: 21554024 NR Desc: DNAJ protein
  misc_feature: Homolog of GI Number: 62858503 NR Desc: LOC549696
  misc_feature: Homolog of GI Number: 55621546 NR Desc:  similar to homolog of yeast TIM14 isoform a
  misc_feature: Homolog of GI Number: 27702271 NR Desc: similar to DnaJ
  misc_feature: Homolog of GI Number: 50752403 NR Desc:  similar to homolog of yeast TIM14 isoform a
  misc_feature: Homolog of GI Number: 6323036 NR Desc: Constituent of the mitochondrial import motor associated with the presequence translocase
  misc_feature: Homolog of GI Number: 53804288 NR Desc: DnaJ domain protein
  misc_feature: Homolog of GI Number: 46308927 NR Desc: COG2214: DnaJ
MATPLIAGLAVAAAALAGRYSIQAWNAYKARPVVPRMRKFYEGGFQPTMTRREAALILGVRETASAEKVKEAHKRVMVANHPDAGGSHYLASKINEAKDVMTGKTKGGGSAF

SEQ ID NO: 5497 - DNA, 631 bp, Zea mays
  misc_feature: Ceres CLONE ID no. 1061149
  misc_feature: Ceres CDNA ID no. 29191729
  CDS (85)..(507): REFERENCED BY SEQ ID NO: 5498
agaaaacctagcacctcggcgctccctcttctgactccttcgaggtactcccatcgctatcgaccgggtcctcgagcgcgggagatggcggatcaggagaccccagttgcagttgaggcccctaccccggtccttggggagccgatggacttgatgactgctctgcagcttgtcatgaagaagtcgggtgctcatgatggccttgttaagggtcttcgtgaggctgccaaagcaattgagaagcatgctgctcagctttgcgtgcttgcggaggactgtgaccagcctgattatgtcaagctggtgaaggctctttgctctgagcacaacgttcacctggttactgtgcctagcgctaaaactcttggcgaatggtctgggctttgcaagattgattctgagggcaaggcgaggaaggttgtgggttgctcctgtgttgtcgtcaaggactatggcgaagaatctgagggccttaacatagttcaggagtacgtcaagtcacactagatacagtgcatcggtatctggaacttgtgctctacactagctttaagacctgaatttaaatttgtgctggttcttgggcttttctaggagattatctcaattcttgttttaagtgaaaaaaaaa

SEQ ID NO: 5498 - protein, 140 aa, Zea mays
  misc_feature: Ceres CLONE ID no. 1061149
  misc_feature: Ceres CDNA ID no. 29191729
  misc_feature (25)..(120): Pfam Name: Ribosomal_L7Ae PFAM Desc: Ribosomal protein L7Ae/L30e/S12e/Gadd45 family
  misc_feature: Homolog of GI Number: 50934241 NR Desc: putative ribosomal protein S12
  misc_feature: Homolog of GI Number: 50935291 NR Desc: putative 40S ribosomal protein S12
  misc_feature: Homolog of GI Number: 5106775 NR Desc: ribosomal protein S12
  misc_feature: Homolog of GI Number: 21536844 NR Desc: 40S ribosomal protein S12
  misc_feature: Homolog of GI Number: 21537373 NR Desc: 40S ribosomal protein S12
  misc_feature: Homolog of GI Number: 50935293 NR Desc: putative 40S ribosomal protein S12
  misc_feature: Homolog of GI Number: 28566194 NR Desc: 40S ribosomal protein
  misc_feature: Homolog of GI Number: 18845074 NR Desc: 40S ribosomal protein S12
  misc_feature: Homolog of GI Number: 24266978 NR Desc: ribosomal protein S12
  misc_feature: Homolog of GI Number: 50344482 NR Desc: S12e ribosomal protein
MADQETPVAVEAPTPVLGEPMDLMTALQLVMKKSGAHDGLVKGLREAAKAIEKHAAQLCVLAEDCDQPDYVKLVKALCSEHNVHLVTVPSAKTLGEWSGLCKIDSEGKARKVVGCSCVVVKDYGEESEGLNIVQEYVKSH

SEQ ID NO: 5499 - DNA, 912 bp, Zea mays
  misc_feature: Ceres CLONE ID no. 1061193
  misc_feature: Ceres CDNA ID no. 36590036
  CDS (110)..(724): REFERENCED BY SEQ ID NO: 5500
actgcccactgcctcccctccattccatctcgaacccattaaacaaccggagccgtcctcctcctcctcccaccagatctcagatccgcggagctccggcgcgcctcccatggcggtcaaggtctacgtcgtgtactactccatgtatggtcatgttgctaagctagctgatgagatcaagaaaggtgcttcctctgtggaaggcgtggaggttaaagtgtggcaggtccctgagatcctgaacgaggaagtccttggcaagatgggcgccccacccaagaccgacgtgccggtgatctccccgcaggagctggcggaggcggacggcgtcctgttcgggttcccgacgaggttcggcatgatggcggcgcagatgaaggcgttcttcgacgcaacgggcgggctgtggagggagcagagcctggcggggaagccggcgggcgtgttcttcagcacgggcacgcagggcggcgggcaggagacgacgccgctgacggcggtgacccagctgacccaccacggcatggtattcgtgccggtggggtacacgttcggcgccaagatgttcgacatggacaaggtgcagggcggcagcccgtacggcgccggcacgttcgcgggcgatgggtcacggtggccgtcggagatggagctcgagcatgccttccaccagggcaagtacttcgccggcatcgccaagaagctcaagggctcctccgcctgagtgcatgatcattgatcacctgatcactggtggtggtggtgctgctgctgctatctgtatctgtggagcttaagtttgatgtgtgatgtggaaactgttatgttaattattatggctttgattgaaccggttgtaaagtttgtaagtggattttgcatttcatagtattatcaaaaaaaaaaaaaaaa

SEQ ID NO: 5500 - protein, 204 aa, Zea mays
  misc_feature: Ceres CLONE ID no. 1061193
  misc_feature: Ceres CDNA ID no. 36590036
  misc_feature (7)..(138): Pfam Name: Flavodoxin_1 PFAM Desc: Flavodoxin
  misc_feature: Homolog of GI Number: 53749369 NR Desc: 'putative 1
  misc_feature: Homolog of GI Number: 58500257 NR Desc: quinone reductase 2
  misc_feature: Homolog of GI Number: 34910128 NR Desc: putative 1
  misc_feature: Homolog of GI Number: 50940963 NR Desc: putative quinone
  misc_feature: Homolog of GI Number: 21068664 NR Desc: putative quinone oxidoreductase
  misc_feature: Homolog of GI Number: 12484052 NR Desc: quinone
  misc_feature: Homolog of GI Number: 21539481 NR Desc: 1
  misc_feature: Homolog of GI Number: 21593010 NR Desc: minor allergen
  misc_feature: Homolog of GI Number: 2464905 NR Desc: minor allergen
MAVKVYVVYYSMYGHVAKLADEIKKGASSVEGVEVKVWQVPEILNEEVLGKMGAPPKTDVPVISPQELAEADGVLFGFPTRFGMMAAQMKAFFDATGGLWREQSLAGKPAGVFFSTGTQGGGQETTPLTAVTQLTHHGMVFVPVGYTFGAKMFDMDKVQGGSPYGAGTFAGDGSRWPSEMELEHAFHQGKYFAGIAKKLKGSSA

SEQ ID NO: 5501 - DNA, 712 bp, Zea mays
  misc_feature: Ceres CLONE ID no. 1061208
  misc_feature: Ceres CDNA ID no. 29191265
  CDS (75)..(494): REFERENCED BY SEQ ID NO: 5502
ctggactctggactggagggcaccaagctaacatttagttgcaaaggagcgctaggaagaagaagcaacgagccatggcctccggtggcccgaaacccaaactggcctacatcatcttgtacgtgagggacgtggagaaggccgcctccttctacgacgccgccttcggctacaccgtccgccgcctcgaccagtcccgcaagtgggcggagctggagagcggggcgacgaccatcgcgttcacgccgctgcaccagcgggagacggacgagctgtcgggggcggtgcagctgccggactcgtcggccgccgggaggggctccgtagaggtctgcttcgcctacgcggacgtcgacgcggcgtacaagcgcgccgtggacaacggggccgtggccgtgagcgcgccggaggacaagccctggggccagaagtccggcttcgtgcgggacatggacggcaacatcgtgcgcatcgcgagctacgtgcgagagtagtcgcattccgctgcatcaccatcggtcgatcgatcagcctttcccatgcatgtctcgtatactacacgtctacacgtgtaccaaaaaaataaatataatcgttgtgcaggtcatgtttgtcttgggagaggtaggaccgtggaagatgtaaatggaaccgtggagcagtgaatacaaaaagcgccatctcgtccctgtttccaaaaaaaaaaaaaaaa

SEQ ID NO: 5502 - protein, 139 aa, Zea mays
  misc_feature: Ceres CLONE ID no. 1061208
  misc_feature: Ceres CDNA ID no. 29191265
  misc_feature (9)..(133): Pfam Name: Glyoxalase PFAM Desc: Glyoxalase/Bleomycin resistance protein/Dioxygenase superfamily
  misc_feature: Homolog of GI Number: 68345080 NR Desc: glyoxalase family protein superfamily
  misc_feature: Homolog of GI Number: 23129269 NR Desc: COG3324: Predicted enzyme related to lactoylglutathione lyase
  misc_feature: Homolog of GI Number: 68207073 NR Desc: Glyoxalase/Bleomycin resistance protein/dioxygenase domain
  misc_feature: Homolog of GI Number: 68055094 NR Desc: Glyoxalase/bleomycin resistance protein/dioxygenase
  misc_feature: Homolog of GI Number: 67666975 NR Desc: Glyoxalase/bleomycin resistance protein/dioxygenase
  misc_feature: Homolog of GI Number: 66779987 NR Desc: Glyoxalase/bleomycin resistance protein/dioxygenase
  misc_feature: Homolog of GI Number: 48780463 NR Desc: COG2764: Uncharacterized protein conserved in bacteria
  misc_feature: Homolog of GI Number: 46316028 NR Desc: COG2764: Uncharacterized protein conserved in bacteria
MASGGPKPKLAYIILYVRDVEKAASFYDAAFGYTVRRLDQSRKWAELESGATTIAFTPLHQRETDELSGAVQLPDSSAAGRGSVEVCFAYADVDAAYKRAVDNGAVAVSAPEDKPWGQKSGFVRDMDGNIVRIASYVRE

SEQ ID NO: 5503 - DNA, 933 bp, Zea mays
  misc_feature: Ceres CLONE ID no. 1061245
  misc_feature: Ceres CDNA ID no. 29191266
  CDS (93)..(758): REFERENCED BY SEQ ID NO: 5504
agttcgacaatcttctagagacgggcaccatcatccgcccgtgaggcttccagctccggcgaacccgcccgcggccgagagataccgcgaccatgtccatctcgctgcgcctcgtgatccccatcgcagcgccctgccccgtgccgccgccgcggacggcgcggaatgcgggctgctctccgctctctgcggccgccgtgccggtgcggaccacgggcgcgctcaggggatgcgccgctctgccgctgaggccgcagtcgctggtccggccatgccggagccgggggagcggcatcgtctgcaacgcgtcggcgtacctcagcccgccgacgacgcagtgggtctccgtcgcggccgccgcagtgctattgcttgctaaaggcacaggcatacacaaatctttcctcgtgccattgtttgttctgcaagcacctaccgccgtaatctcatggatcaagagtgaatatgggctgtggactgcttttcttgcgcttgtggtgcgtttgttcttaccctttccaggtgagctagagcttccactgtcaacaatgctggctgtcagcgttgctccttaccaggtgatgaatgtgaggggaactcaaggtggcgcgatagtgtcgttggcactagctgcgtatctcgcctttcagcacttcaccaggaccggaggaataggaaaagcctttgatcagggatcgatagttgcgaccatggccatcatctgtatcgcagttatcaatgtgatcctgctgttctgagttgccaagggctactccagagcgcagatgaataaagagaaaccttgtagtgcatcatcctgtcggaccttgtagcttgttttatcgtaataagaatgacctgtgagttgtgacatgactgatagtatgtatcttcatgtatggtatggtttgcgcagtaaaaaaaaaaaaaaaa

SEQ ID NO: 5504 - protein, 221 aa, Zea mays
  misc_feature: Ceres CLONE ID no. 1061245
  misc_feature: Ceres CDNA ID no. 29191266
  misc_feature (19)..(214): Pfam Name: WCOR413 PFAM Desc: Cold acclimation protein WCOR413
  misc_feature: Homolog of GI Number: 27902669 NR Desc: cold acclimation protein COR413
  misc_feature: Homolog of GI Number: 18449100 NR Desc: cold acclimation WCOR413
  misc_feature: Homolog of GI Number: 27902677 NR Desc: cold acclimation protein COR413
  misc_feature: Homolog of GI Number: 51854280 NR Desc: cold acclimation protein COR413
  misc_feature: Homolog of GI Number: 18397074 NR Desc: stress
  misc_feature: Homolog of GI Number: 42571691 NR Desc: stress
  misc_feature: Homolog of GI Number: 27902671 NR Desc: cold acclimation protein COR413
  misc_feature: Homolog of GI Number: 27902673 NR Desc: cold acclimation protein COR413
  misc_feature: Homolog of GI Number: 21360378 NR Desc: stress
  misc_feature: Useful for making ornamental plants with modified leaves
MSISLRLVIPIAAPCPVPPPRTARNAGCSPLSAAAVPVRTTGALRGCAALPLRPQSLVRPCRSRGSGIVCNASAYLSPPTTQWVSVAAAAVLLLAKGTGIHKSFLVPLFVLQAPTAVISWIKSEYGLWTAFLALVVRLFLPFPGELELPLSTMLAVSVAPYQVMNVRGTQGGAIVSLALAAYLAFQHFTRTGGIGKAFDQGSIVATMAIICIAVINVILLF

SEQ ID NO: 5505 - DNA, 656 bp, Zea mays
  misc_feature: Ceres CLONE ID no. 1061340
  misc_feature: Ceres CDNA ID no. 29191267
  CDS (79)..(441): REFERENCED BY SEQ ID NO: 5506
ctctcgcatcccaccaccaagctccagacgcctcctcctcctcccccgccgccgccgcactctccagagaccgcaggcatgggcgtcttcactttcgtgtgccgcgactccggcgccgagtggtcggccaagcagcacaagggcgagctcgaggcctccgccgccaccccctacgacctgcagcgccagctcgtgtccgccgcctgcgccgaggacaagtccggtggcgtccagtcctccttcaccatggtctcccccaagtccgccatcttccaggtggtcattggtggcgcctctgctggtccgatcggtggtggtgctgctgcaggtggtgccgctgcatcaggtggagctgccgccgaggcccccaaggctgaggagaagaaggaagaggagaaggaggagagcgaggatgaccttggcttctccctcttcgattagatcttctttaccctgttgcttgccagaaatgacatggtcctattgccgcagtaattttgatgccatgcccacagggtttgtgaacctgcctagtttgattgtcaagggatgtatgtggtactttctgttcatgtgaggatttggttatgttattatgcaggaatatcctaatatggctttagtcttgccagttcacaaaaaaaaaaaaaaaaaaa

SEQ ID NO: 5506 - protein, 120 aa, Zea mays
  misc_feature: Ceres CLONE ID no. 1061340
  misc_feature: Ceres CDNA ID no. 29191267
  misc_feature (25)..(119): Pfam Name: Ribosomal_60s PFAM Desc: 60s Acidic ribosomal protein
  misc_feature: Homolog of GI Number: 56783875 NR Desc: putative acidic ribosomal protein P3a
  misc_feature: Homolog of GI Number: 53792736 NR Desc: putative 60S acidic ribosomal protein P3
  misc_feature: Homolog of GI Number: 7489709 NR Desc: acidic ribosomal protein P3a
  misc_feature: Homolog of GI Number: 20259603 NR Desc: putative acidic ribosomal protein
  misc_feature: Homolog of GI Number: 21617903 NR Desc: 60S acidic ribosomal protein P3
  misc_feature: Homolog of GI Number: 6226017 NR Desc: 60S acidic ribosomal protein P3
  misc_feature: Homolog of GI Number: 38503544 NR Desc: 60S acidic ribosomal protein P3
  misc_feature: Homolog of GI Number: 38503547 NR Desc: 60S acidic ribosomal protein P3
  misc_feature: Homolog of GI Number: 38503536 NR Desc: 60S acidic ribosomal protein P3
  misc_feature: Homolog of GI Number: 12963432 NR Desc: ribosomal protein P2
MGVFTFVCRDSGAEWSAKQHKGELEASAATPYDLQRQLVSAACAEDKSGGVQSSFTMVSPKSAIFQVVIGGASAGPIGGGAAAGGAAASGGAAAEAPKAEEKKEEEKEESEDDLGFSLFD

SEQ ID NO: 5507 - DNA, 761 bp, Zea mays
  misc_feature: Ceres CLONE ID no. 1061370
  misc_feature: Ceres CDNA ID no. 29191268
  CDS (148)..(516): REFERENCED BY SEQ ID NO: 5508
cttcccactttatccctctcgcccacctccctcctctcctctcccctcccctcctctcgtcacaccgcgccagctaaggcttcgctgtgcgctcccctcccccacgcgcattcattctcgcccgctacccctcgccgccgccgcgccatggccggcgttaggagcctcgtgctgctcctcctggtgctcgccgtcgcgctgtccgcctccgcctcgtccatcgccggcggggaccacctgcagctcggcctcctctccggcggcgctggccgcggggagtgcaggggcaccgtggccgagtgcggcggggaggacgcggagggggagctcgggtccgcgtcggccgaggcgcaccgccgcgtgctgcagggccgcggctacatcagctacggcgcgctgcgcaggggcaccgtcccctgcaaccgccgcggcgccagctactacaactgccgccccggcgcccaggccaacccctaccaccgcggatgctcccgcatcacccgctgccgcggctaagcctcggatccgcgcccagagatcacgtcctctcagttcaaaaataagctgcttctcgtgctgttctttaagcggtgccactagtatactgctgctgctactattattagttaaatttctttggttgttgccgctgctgtgttggcctattgggacatttgttgccgtcgttgttgtaaagtataagagagatttgtgccttaatatgaagagatatttgttattctttaaaaaaaaaaaaaaaa

SEQ ID NO: 5508 - protein, 122 aa, Zea mays
  misc_feature: Ceres CLONE ID no. 1061370
  misc_feature: Ceres CDNA ID no. 29191268
  misc_feature (58)..(122): Pfam Name: RALF PFAM Desc: Rapid ALkalinization Factor
  misc_feature: Homolog of GI Number: 77556664 NR Desc: Rapid ALkalinization Factor
  misc_feature: Homolog of GI Number: 16566316 NR Desc: RALF precursor
  misc_feature: Homolog of GI Number: 42374767 NR Desc: rapid alkalinization factor preproprotein
  misc_feature: Homolog of GI Number: 28628203 NR Desc: rapid alkalinization factor 1 precursor
  misc_feature: Homolog of GI Number: 37695573 NR Desc: rapid alkalinization factor 2
  misc_feature: Homolog of GI Number: 21593878 NR Desc: RALF precursor
  misc_feature: Homolog of GI Number: 53718955 NR Desc: putative lipoprotein
  misc_feature: Homolog of GI Number: 55740439 NR Desc: hydroxyproline
MAGVRSLVLLLLVLAVALSASASSIAGGDHLQLGLLSGGAGRGECRGTVAECGGEDAEGELGSASAEAHRRVLQGRGYISYGALRRGTVPCNRRGASYYNCRPGAQANPYHRGCSRITRCRG

SEQ ID NO: 5509 - DNA, 802 bp, Zea mays
  misc_feature: Ceres CLONE ID no. 1061422
  misc_feature: Ceres CDNA ID no. 25446493
  CDS (285)..(554): REFERENCED BY SEQ ID NO: 5510
aaaggacaggcaggcagcgagtgcaaccgcgagagcgatcagcgatgggctccttcttctcgaccttagtgacgccccctccggccgccgacgacccgaactgcgccgtggtggccgcgcactccaaggccacctacgacgagcagtgggcggcccacaagagcagcagcaagctggtcagcccctcttcccttttcggctcttgttgccttgcccccgggccttccgtgccctggatctgaggaacgcgagggtctggttcccttgcgctctttgcttggcagatggtgatcgacttctcggcgtcctggtgcgggccctgccgcttcatcgagccggccttcaaggagctggcctcccgcttcaccgatgccatcttcgtcaaggttgacgtcgacgagctcgcggaggtcgcaaggacatggaaggtagaggcgatgccaacgttcgtgctggtcaaggatgggaaggaggtaggccgtgtgattggggctaagaaggacgagcttgagaggaagatcaggatgttcgtcacgtcatcttcctcgtcctaacttagcagtgcatacactcccaccttcttactggtttctcgactccagtggttcacctgggacggggttgctgaaatggttcccttctctgaatactgaaaaatcaaaaaaagaagtatatgaaaaaatgatggtagacgtgtctgggtcaataagagtttctgaaacttggatttgtatgtgtcagtctctgtgttctgtttccaaggaatggatcatgtgagtttggaataaaaaaaaaaaaaaaa

SEQ ID NO: 5510 - protein, 89 aa, Zea mays
  misc_feature: Ceres CLONE ID no. 1061422
  misc_feature: Ceres CDNA ID no. 25446493
  misc_feature (1)..(84): Pfam Name: Thioredoxin PFAM Desc: Thioredoxin
  misc_feature: Homolog of GI Number: 34897150 NR Desc: putative thioredoxin
  misc_feature: Homolog of GI Number: 50934869 NR Desc: putative thioredoxin
  misc_feature: Homolog of GI Number: 33621080 NR Desc: thioredoxin H2
  misc_feature: Homolog of GI Number: 46326970 NR Desc: thioredoxin
  misc_feature: Homolog of GI Number: 53748519 NR Desc: thioredoxin 3
  misc_feature: Homolog of GI Number: 13624884 NR Desc: thioredoxin h
  misc_feature: Homolog of GI Number: 21360489 NR Desc: AT5g39950/MYH19_110
  misc_feature: Homolog of GI Number: 21595244 NR Desc: thioredoxin
  misc_feature: Homolog of GI Number: 2982247 NR Desc: probable thioredoxin H
  misc_feature: Homolog of GI Number: 1388078 NR Desc: thioredoxin h
MVIDFSASWCGPCRFIEPAFKELASRFTDAIFVKVDVDELAEVARTWKVEAMPTFVLVKDGKEVGRVIGAKKDELERKIRMFVTSSSSS

SEQ ID NO: 5511 - DNA, 784 bp, Zea mays
  misc_feature: Ceres CLONE ID no. 1061462
  misc_feature: Ceres CDNA ID no. 40351600
  CDS (81)..(623): REFERENCED BY SEQ ID NO: 5512
gccgcagccacacccagaaccagctaaaccctaccatcttccgcttcctctccaccggcggcctccccggtcagatcaccatgtcgacggagaagaaacagttgaacacgatgcgggagatcaaggtgcagaagctcgtcctcaacatctccgtcggcgagagcggcgatcgcctcactcgagctgccaaggtgttggagcagctgagcgggcagtcgccagttttctccaaggcgaggtacactgtcaggtctttcggcattcgtcgtaatgagaagattgcctgctatgtgacgatcaggggtgagaaggcaatgcagcttctcgagagtgggctgaaggtgaaggagtacgagctcttgaggaggaacttcagtgacactggttgctttgggtttggtattcaggagcacattgatcttggcatgaagtatgacccatcaaccggcatctatggtatggacttcttcgtggttctggagcgagctggataccgcgtctcccgccggcgccgatgcaaggcccgtgttgggatccaccaaagggtgaccaaggaagacgccatgaagtggttccaggtcaagtatgagggtgtcatcctgaacaagtcccacgctagctagtaacctttcgagtgattgagttgtcgttagagctttaagtcagtcaagcttaatctggatcatggaatcgtatgtttattgaatacaaagttgcactatcaattttgccttgtctgctgggctgacctgcatctataattccatcaaaaaaaaaaaaaaaa

SEQ ID NO: 5512 - protein, 180 aa, Zea mays
  misc_feature: Ceres CLONE ID no. 1061462
  misc_feature: Ceres CDNA ID no. 40351600
  misc_feature (66)..(165): Pfam Name: Ribosomal_L5_C PFAM Desc: ribosomal L5P family C
  misc_feature (9)..(62): Pfam Name: Ribosomal_L5 PFAM Desc: Ribosomal protein L5
MSTEKKQLNTMREIKVQKLVLNISVGESGDRLTRAAKVLEQLSGQSPVFSKARYTVRSFGIRRNEKIACYVTIRGEKAMQLLESGLKVKEYELLRRNFSDTGCFGFGIQEHIDLGMKYDPSTGIYGMDFFVVLERAGYRVSRRRRCKARVGIHQRVTKEDAMKWFQVKYEGVILNKSHAS

SEQ ID NO: 5513 - DNA, 765 bp, Zea mays
  misc_feature: Ceres CLONE ID no. 1061499
  misc_feature: Ceres CDNA ID no. 40351601
  CDS (236)..(514): REFERENCED BY SEQ ID NO: 5514
ggcttgctggatcagaccgaaacaacatccaggtctgctggaggcgccatacagtcccggatcccggtggtttacccctgcggcctccgccgctccgcggctctgcctcttcctccgcttctccttgccccgcgtgcgcgaccgacgccgccgccgcctccgccctaagagtcttcgtaggacactccgtcaggaattcttcgggacccttcgccggcgacgatctgacgtgacgatgtctggtcatacccaacctgaaggaccacaccaacttgattcaaaacatgctgcaaattcatgccgaaagaatgtacccggtacatcgttcgtctcagatttgagggatcacatccacgagttcatcaatgcctctgcagatgaacaccggacatgcttcacaaagactctcaaaaggatgttcgatatgtcaaagactgtcactgatagatcctctgaagcagaggaagctggacccgaaagtgtcttgccacttcagaccacagtgtcgcggtagaagtttcgccacttcatattgcctccgtagaaataggataaagctagaaagcctcgccctccgcggatggagaaatttgttattttgtcactctcaattttgactctattaggtctataactggtcggatcatctgtgtctatgatttgtgggtctgattacatattgacaaagcccacagataataatagcaaaattatcaatcgctcccgctgaggaggccagttgcccagacaaaaaaaaaaaaaaaa

SEQ ID NO: 5514 - protein, 92 aa, Zea mays
  misc_feature: Ceres CLONE ID no. 1061499
  misc_feature: Ceres CDNA ID no. 40351601
MSGHTQPEGPHQLDSKHAANSCRKNVPGTSFVSDLRDHIHEFINASADEHRTCFTKTLKRMFDMSKTVTDRSSEAEEAGPESVLPLQTTVSR

SEQ ID NO: 5515 - DNA, 537 bp, Zea mays
  misc_feature: Ceres CLONE ID no. 1061523
  misc_feature: Ceres CDNA ID no. 5005401
  CDS (76)..(361): REFERENCED BY SEQ ID NO: 5516
cacgccgtcactcctctcaacccgaccacgccgcgcctccgcttcgaaccctagcctagcggggtaaggagggaaatggggaagggtacgggcagcttcggcaagcgccggaacaaaacgcacacgctgtgcatccggtgcggccgccgcagcttccatctccagaagagtacctgctcctcctgcggctaccccgccgcccgcatccgcaagtataattggagtgtgaaggccatcaggcgcaagaccactggtacgggaaggatgaggtacatgcgacacgtgcctcgccgtttcaagagcaacttcagagaagggactgaggctgccccaaagaagagtgctgctgctgccaactaagtgtcgatgttgccatcaagaacctcagaagctagacgttggatctttttattgaattgtacttctgaactatttgcccgtaatactattacagtactggtttaccgtgttttgaattgaagccagacgccatcttctttgggagcgtgatttatttattgaaaaaaaaaaaaaaaa

SEQ ID NO: 5516 - protein, 94 aa, Zea mays
  misc_feature: Ceres CLONE ID no. 1061523
  misc_feature: Ceres CDNA ID no. 5005401
  misc_feature (2)..(55): Pfam Name: Ribosomal_L37e PFAM Desc: Ribosomal protein L37e
MGKGTGSFGKRRNKTHTLCIRCGRRSFHLQKSTCSSCGYPAARIRKYNWSVKAIRRKTTGTGRMRYMRHVPRRFKSNFREGTEAAPKKSAAAAN

SEQ ID NO: 5517 - DNA, 509 bp, Zea mays
  misc_feature: Ceres CLONE ID no. 1061550
  misc_feature: Ceres CDNA ID no. 40351603
  CDS (49)..(345): REFERENCED BY SEQ ID NO: 5518
gttatcgtcggatttctcgtgacggtgagtccgtgacacgccggcgccatggcgagcaggtgcctagcggctgcatcggaggccgccgtcgtcttcctcatccggcccatcctcgccatcgttttcgtcttcaccctcatcctcctcggctggtacgtggcgtggacgacggtgctggtgcacgtgccgctggtgcaggagatcgccggcctgcgcccgaagaagccctctaaacccaagccagccaaccgcggccgcgtcgccaagttctaccggaaccaggccgaggccgcacaaaggcatagctgggaactggatacttggatagggatggaagaaaaataaagccaatatcattagcaggatcaatctggtttatctagtaaaaacgggctgtgatcgaaatagtttatgtatcctttcttatttaaaccactatcatgggtatgtattccggaaaaatggctatctgaaaagtcttatattttgatttaaaaaaaaaaaaaaaa

SEQ ID NO: 5518 - protein, 98 aa, Zea mays
  misc_feature: Ceres CLONE ID no. 1061550
  misc_feature: Ceres CDNA ID no. 40351603
MASRCLAAASEAAVVFLIRPILAIVFVFTLILLGWYVAWTTVLVHVPLVQEIAGLRPKKPSKPKPANRGRVAKFYRNQAEAAQRHSWELDTWIGMEEK

SEQ ID NO: 5519 - DNA, 971 bp, Zea mays
  misc_feature: Ceres CLONE ID no. 1061567
  misc_feature: Ceres CDNA ID no. 29191269
  CDS (106)..(780): REFERENCED BY SEQ ID NO: 5520
atatcacaagaagccgatccactccaagcacagtcgagcagaagcctaaagcgagtgagatttcccccttcccgttgattccaggtcgtgttccaagaaaccaaaatggcctccaaccagaaccaggccagctaccacgccggcgagaccaaggcccgcaacgaggagaagaccgggcaggtgatgggcgcgaccaaggacaaggcggggcagaccacggaggccacgaagcagaaggccggcgagaccacggaggccacgaagcagaaggccgccgagaccacggaggcggccaagcagaaggccagcgagacggccgaggccaccaagcagaaggccgccgaggccaaggacaagacggcgcagacggcgcaggcggccaaggagaagacgtacgagacggcgcagtcggccaaggagcgcgccgcccagggcaaggaccagaccgccagcaccctcggcgagaagacggaggcggccaagcagaaggccgccgagaccacggaggcggccaggcagaaggccgccgaggcgaccgaggcggccaagcagaaggcgtcggagacggcgcagtacaccaaggagtccgccgtcgccggcaaggacaagaccggcagcgtcctccagcaggcaggggagacggtggtgaacgccgtggtgggcgccaaggacgccgtggccaacacgctgggcatgggcggggacaacaccaacaccaccaaggacaacaccaccggcgccaccaccaaggacaccaccaccaccaccaggaatcactagacgcatgtgttggcgcttaatttgctttgctttagtagtgtttggtcgttcgcgggccttctacatatttgtatgtttccactctttcgtgatttcagctcatttggtgtaaaagtttgccttcgatttgatgtactcctcgtgtccggttctgtattagtacgagttatggtccaaaaaaaaaaaaaaaa

SEQ ID NO: 5520 - protein, 224 aa, Zea mays
  misc_feature: Ceres CLONE ID no. 1061567
  misc_feature: Ceres CDNA ID no. 29191269
  misc_feature (21)..(42): Pfam Name: LEA_4 PFAM Desc: Late embryogenesis abundant protein
  misc_feature: Homolog of GI Number: 25989705 NR Desc: LEA1 protein
  misc_feature: Homolog of GI Number: 21637 NR Desc: group 3 late embryogenesis abundant protein
  misc_feature: Homolog of GI Number: 25989707 NR Desc: LEA3 protein
  misc_feature: Homolog of GI Number: 25989709 NR Desc: LEA2 protein
  misc_feature: Homolog of GI Number: 4929080 NR Desc: ABA
  misc_feature: Homolog of GI Number: 2654379 NR Desc: Group 3 Lea protein MGL3
  misc_feature: Homolog of GI Number: 33342178 NR Desc: ABA inducible protein
  misc_feature: Homolog of GI Number: 4105441 NR Desc: group 3 LEA protein
  misc_feature: Homolog of GI Number: 55908886 NR Desc: putative group 3 LEA protein
  misc_feature: Homolog of GI Number: 56605421 NR Desc: group 3 late embryogenesis abundant protein
MASNQNQASYHAGETKARNEEKTGQVMGATKDKAGQTTEATKQKAGETTEATKQKAAETTEAAKQKASETAEATKQKAAEAKDKTAQTAQAAKEKTYETAQSAKERAAQGKDQTASTLGEKTEAAKQKAAETTEAARQKAAEATEAAKQKASETAQYTKESAVAGKDKTGSVLQQAGETVVNAVVGAKDAVANTLGMGGDNTNTTKDNTTGATTKDTTTTTRNH

SEQ ID NO: 5521 - DNA, 1064 bp, Zea mays
  misc_feature: Ceres CLONE ID no. 1061598
  misc_feature: Ceres CDNA ID no. 29191270
  CDS (64)..(795): REFERENCED BY SEQ ID NO: 5522
atatacacttaagcaacagatatacaggacacgagtatcagggaggaagacgaggaaacgttgatggccggcggtgaagagctgaagctgctggggtggtgggcgcccggggtgagtccctacgtgctgcgcgcccagatggcgctcgccgtaaaggggctgagctacgactacctccccgaggaccgctggtccacgagcgacctcctcatcgcgtccaaccccgtgtacaagaaggtgcccgtcctcattcacaacggcaggcccgtctgcgagtcgctgctcatcctggagtacctcgacgacgccgtcggccttgccggcaacggcaagcccatcctccccgcagacccctacagccgcgccgtcgctcgcttctgggccgcctatgtgaacgacaagctgttcccttcgtgcaccgggatcctcaagactacgaagcaggaggagagagccggtaagatggaggagaccctgtccgggctcagacacttagaagctgtcatggcggagtgctccgaaggggaggcggaggcgccgttcttcggtggtgacgccatcgggttcctcgacatcgcgctcgggtgctatcttccctggtttgaggcagcaggccgcctggccggcttggggccgatcatcgacccggcgaggacgccgaaactagctgcgtgggcggagcggttcagcgtcgccgagccgatcaaggcgctgctgcctggggtcgacaagctggaggagtacatcactacggcgctttatccaaagtggaacatcgcggtcaccggcaactaattaaagatctcgtcgttccactatggcaaaagaaataaaaaatggcgtcgttcgattaccggcggaggatctctgccttgtgagtagctgttttcacgtcaagagttgaactgttactactaagtcgggtttctttttgcgagggttagtgggtcgtggtcatgaataatgcacaggcgtgcactctcttcgatctgagttgtgatatgttgtttcgtgaataaattgaagcgtcgtcgatcttgcatcttacaaaaaaaaaaaaaaaa

SEQ ID NO: 5522 - protein, 243 aa, Zea mays
  misc_feature: Ceres CLONE ID no. 1061598
  misc_feature: Ceres CDNA ID no. 29191270
  misc_feature (7)..(81): Pfam Name: GST_N PFAM Desc: Glutathione S
  misc_feature (93)..(212): Pfam Name: GST_C PFAM Desc: Glutathione S
  misc_feature: Homolog of GI Number: 20067423 NR Desc: glutathione transferase
  misc_feature: Homolog of GI Number: 37536356 NR Desc: putative glutathione S
  misc_feature: Homolog of GI Number: 11385517 NR Desc: glutathione S
  misc_feature: Homolog of GI Number: 33304612 NR Desc: tau class GST protein 3
  misc_feature: Homolog of GI Number: 11385535 NR Desc: glutathione S
  misc_feature: Homolog of GI Number: 20143573 NR Desc: putative glutathione S
  misc_feature: Homolog of GI Number: 20143571 NR Desc: putative glutathione S
  misc_feature: Homolog of GI Number: 20143568 NR Desc: putative glutathione S
  misc_feature: Homolog of GI Number: 22038181 NR Desc: glutathione S
  misc_feature: Homolog of GI Number: 57015397 NR Desc: Probable glutathione S
MAGGEELKLLGWWAPGVSPYVLRAQMALAVKGLSYDYLPEDRWSTSDLLIASNPVYKKVPVLIHNGRPVCESLLILEYLDDAVGLAGNGKPILPADPYSRAVARFWAAYVNDKLFPSCTGILKTTKQEERAGKMEETLSGLRHLEAVMAECSEGEAEAPFFGGDAIGFLDIALGCYLPWFEAAGRLAGLGPIIDPARTPKLAAWAERFSVAEPIKALLPGVDKLEEYITTALYPKWNIAVTGN

SEQ ID NO: 5523 - DNA, 734 bp, Zea mays
  misc_feature: Ceres CLONE ID no. 1061684
  misc_feature: Ceres CDNA ID no. 25445715
  CDS (94)..(600): REFERENCED BY SEQ ID NO: 5524
tcagaaagcagagagagcgggcaacatcgcagatagagagagagagagagagagagagagagagagagaggcaaactggagaggccgagggtgatggtttccaaggagcagaataagcgaggagctttgcatgagaagctcaagattctccgcagcgttactcactctcatgcgggggataaagtgtcgataatagcggacgcgtcatcgtacatcaaggaactaaagcagaagatcgcgaagctaagccaagagatggcatcgtcgtctccgcagcacgccactactggtgtctgccaacaacaaccgtcgtcgtcgtcggtgagtgtgggagtcctgctggacaagaagggccgtttcctcgtcagtgtgttcatggacgagagctgcggcccgccgccggccgggctactcgcttccgtcctcgaggccttcgacgacatcggactcacggtgctcgaggctagggctacctgcgctggttcctttcggctagaagctgtaggagaggaagtagtagtagatgggggcctcatcatcgacgcgcacgcggtggagcaagcagtagttcaggcaatcaagaattgccctgcaaattaaactaatcgacctagtcctccaattcgatcgatcgagttgacgatgcgctggtggtggaccacaaagttcatgccaagctagagactccgagctatatatacatactgattcgcatcgtaaaaaaaaaaaaaaaa

SEQ ID NO: 5524 - protein, 168 aa, Zea mays
  misc_feature: Ceres CLONE ID no. 1061684
  misc_feature: Ceres CDNA ID no. 25445715
MVSKEQNKRGALHEKLKILRSVTHSHAGDKVSIIADASSYIKELKQKIAKLSQEMASSSPQHATTGVCQQQPSSSSVSVGVLLDKKGRFLVSVFMDESCGPPPAGLLASVLEAFDDIGLTVLEARATCAGSFRLEAVGEEVVVDGGLIIDAHAVEQAVVQAIKNCPAN

SEQ ID NO: 5525 - DNA, 868 bp, Zea mays
  misc_feature: Ceres CLONE ID no. 1061686
  misc_feature: Ceres CDNA ID no. 25445663
  CDS (443)..(724): REFERENCED BY SEQ ID NO: 5526
agttccaaccccagctcctcagttctcgtcatcgtcctcgcgctcagtgtcatttgcagttcccggtagcagccatggcgtcggtgcagctgtctgggccgcgggtggtggcggctgcgaaaccggctgcgttgggcgggctcctcctgacgccgtcccttgcggtgccaaaggggcggagggccaggggcctcgtggtgagggccgccacggtcgtgtcacctaagtatcagttcagacaagaccacaaggaggggagattgttgcggttggagaagggagaagttttggaagtaaccgcattgagatcagtgttccggttggtgcacaagttgtctactcgaaatatgcaggcacagaattgaaattcaatgacgccgaccatctcattttgaaagaagatgacataattggtattcttgacagtgatgatgtgaaggatatgaaaccactgaatgatcgcattctgattaaggttgctgaagctgaagaacgaactgctggtggtttgctattgacgcaggcaactaaggagaaaccttctgttggatcagtggtagccgttggcccagggccgttgggcgaggacggcagcaggaatcccctgtcgatcactcctggaagcaacgtgatgtattccaagtatgcggggagtgagttcaagggcgaggacggtgagtacatcgtgctcagggcgtctgacgtgatggctgttctttcctgatccccaaaccatacagcgccaggtgcgcgataggaagttttgatgttgaggccgaaccttatcttttatttgctcttgtttggaattggtggaggcttttgaactgtaatctggtgcgaattataaggaaaaaaaaaaaaaaaa

SEQ ID NO: 5526 - protein, 93 aa, Zea mays
  misc_feature: Ceres CLONE ID no. 1061686
  misc_feature: Ceres CDNA ID no. 25445663
  misc_feature (2)..(92): Pfam Name: Cpn10 PFAM Desc: Chaperonin 10 Kd subunit
  misc_feature: Homolog of GI Number: 51091339 NR Desc: putative chaperonin 21 precursor
  misc_feature: Homolog of GI Number: 50660327 NR Desc: chloroplast chaperonin 21
  misc_feature: Homolog of GI Number: 51090748 NR Desc: putative chaperonin 21 precursor
  misc_feature: Homolog of GI Number: 51091814 NR Desc: putative chaperonin 21 precursor
  misc_feature: Homolog of GI Number: 7331143 NR Desc: chaperonin 21 precursor
  misc_feature: Homolog of GI Number: 50915298 NR Desc: putative 20 kDa chaperonin
  misc_feature: Homolog of GI Number: 3057150 NR Desc: chaperonin 10
  misc_feature: Homolog of GI Number: 17065646 NR Desc: putative chloroplast Cpn21 protein
  misc_feature: Homolog of GI Number: 21780187 NR Desc: cp10
  misc_feature: Homolog of GI Number: 421794 NR Desc: chaperonin 10
MKPLNDRILIKVAEAEERTAGGLLLTQATKEKPSVGSVVAVGPGPLGEDGSRNPLSITPGSNVMYSKYAGSEFKGEDGEYIVLRASDVMAVLS

SEQ ID NO: 5527 - DNA, 475 bp, Zea mays
  misc_feature: Ceres CLONE ID no. 1061703
  misc_feature: Ceres CDNA ID no. 25445913
  CDS (2)..(235): REFERENCED BY SEQ ID NO: 5528
gtggctgtcagcaagtagcagcatctgtcgcgtctccccctccctgaccgagcgatccagcgagagggagcgagtagcagccgcagccgcagccggaggagctcgccgaggccgcctaagacgaccatggggttctgggcgacgacgctcatcttcctcctcgccggcgttgccgcatccctcttcacgctcctctgctgcaaccgcgggccctccacaaacctgttccatttgaccttggtgactacagctgtaatttgttgctggatgatgtatgcaatcgtctaccttgctcagatgaagccattgatcaaccccattctgagcggagagtgagcgcagcatctgtattgaacagaacgaaagctagacctgctgtaccattgttcagtccgtgaactttctattcattttggccccacctgatgaaataaataaataaactggcatgatttttttaaaaaaaaaaaaaaaa

SEQ ID NO: 5528 - protein, 69 aa, Zea mays
  misc_feature: Ceres CLONE ID no. 1061703
  misc_feature: Ceres CDNA ID no. 25445913
  misc_feature (1)..(69): Pfam Name: ATP_synt_H PFAM Desc: ATP synthase subunit H
  misc_feature: Homolog of GI Number: 50929367 NR Desc: OSJNBa0015K02.15
  misc_feature: Homolog of GI Number: 26986112 NR Desc: vacuolar ATPase subunit e
  misc_feature: Homolog of GI Number: 62751089 NR Desc: similar to ATP synthase subunit H protein
MGFWATTLIFLLAGVAASLFTLLCCNRGPSTNLFHLTLVTTAVICCWMMYAIVYLAQMKPLINPILSGE

SEQ ID NO: 5529 - DNA, 1006 bp, Zea mays
  misc_feature: Ceres CLONE ID no. 1061707
  misc_feature: Ceres CDNA ID no. 29191271
  CDS (94)..(789): REFERENCED BY SEQ ID NO: 5530
acacaacaaagtgtaccgacaaaaagaagtacaaacagcagcatactagattttgattccccctgtgacaagctcagctcagcgcagcgcaagatggagtaccagggacagcagcagcgcggccgcgtcgacgagtacggcaacccggtggccggacatggcgtcggcaccggcatggagacgcacggcggcgtcggcaccggcgcggccgccggtgggcatttccagcccatgagggacgagcaccagaccggccgtgggatcctgcaccgctccggcagctccagctccagctcgtctgaggatgatggcatgggcgggaggaggaagaagggcatcaaggagaagatcaaggagaagctccccggtggccacggtgaccagcagcacaccggtggcacctacagacagcagggtactggcatggtcggcaccggcggcacctacgggcagaagggtcacactgggatgaccggcaccggcggcacctacgggcagcagggtcacactgggatgaccggcaccggcggcacctacgggcagcagggccacactgggatgaccggcaccggcggcacctacggacagcaaggccacaccgggatggccggcaccggggcgcatggcaccacggccactggtggcacctacgggcagccgggccacaccgggatgacaggcacgggggcgcacggcaccggaggcacctacgggcagcacggcactgacaccggcgagaagaagggcatcatggacaagatcaaggagaagctcccaggccagcactgagcgctgaggagagcccgcggccgccacttctgagagtggaggtgccggtcgaccaccgttgcagaatcaataataagatcgcgatacgatacaataaaattccaccatacaacgtgagcctagttcacctagctcacttgcgtgttggaggagccactgtatctaggctcaagtttacgtgaacaaacagtgttttgagttaaaaaaaaaaaaaaaa

SEQ ID NO: 5530 - protein, 231 aa, Zea mays
  misc_feature: Ceres CLONE ID no. 1061707
  misc_feature: Ceres CDNA ID no. 29191271
  misc_feature (113)..(172): Pfam Name: Collagen PFAM Desc: Collagen triple helix repeat
  misc_feature: Homolog of GI Number: 21853 NR Desc: rab protein
  misc_feature: Homolog of GI Number: 60116309 NR Desc: dehydrin 4
  misc_feature: Homolog of GI Number: 60116283 NR Desc: dehydrin 4
  misc_feature: Homolog of GI Number: 48093951 NR Desc: dehydrin
  misc_feature: Homolog of GI Number: 60116293 NR Desc: dehydrin 4
  misc_feature: Homolog of GI Number: 60116324 NR Desc: dehydrin 4
  misc_feature: Homolog of GI Number: 60116295 NR Desc: dehydrin 4
  misc_feature: Homolog of GI Number: 18962 NR Desc: dehydrin
  misc_feature: Homolog of GI Number: 4105109 NR Desc: dehydrin 4
  misc_feature: Homolog of GI Number: 6017934 NR Desc: dehydrin
MEYQGQQQRGRVDEYGNPVAGHGVGTGMETHGGVGTGAAAGGHFQPMRDEHQTGRGILHRSGSSSSSSSEDDGMGGRRKKGIKEKIKEKLPGGHGDQQHTGGTYRQQGTGMVGTGGTYGQKGHTGMTGTGGTYGQQGHTGMTGTGGTYGQQGHTGMTGTGGTYGQQGHTGMAGTGAHGTTATGGTYGQPGHTGMTGTGAHGTGGTYGQHGTDTGEKKGIMDKIKEKLPGQH

SEQ ID NO: 5531 - DNA, 1536 bp, Zea mays
  misc_feature: Ceres CLONE ID no. 1061708
  misc_feature: Ceres CDNA ID no. 40351604
  CDS (186)..(1220): REFERENCED BY SEQ ID NO: 5532
gtagtgtggatccatccccacacggccctcgccaaatctactcctccagtcggcaggaaaggaaccctctctacctcggaggctcggacagagtgaacgcgccacccgccccggcgagcattgtccgctgccgcgcgccaccttccgctcacgggtgcatttgatccgtcccggccgcctacacgatgtccaagtcgggagcgctggatcttgcttctggcctcggagggaagatcaacaaggtggaagtcaagtcggccgtcgatgagtatgagaaatatcatggatactatggagggaaggaggaagcaaggaagtccaactatactgatatggttaataaatactatgatcttgccactagcttctatgagtatggttggggtgaatccttccactttgctcacagatggaatggagaatccttacgtgaaagcatcaagcgacatgagcattttcttgccctgcaacttggtttgaaaccaggaatgaaggttttagatgtgggctgtggaataggtggaccgctgagagaaattgcaagatttagctcaacttcagttacgggattgaataacaacgaataccagataaccaggggaaaggagctcaaccgtttagcaggaattagtggaacatgtgattttgtcaaggcagacttcatgaagatgccgttcgatgacaacacttttgatgctgtttatgccattgaggcaacatgtcatgcacctgatccagttggttgctacaaggagatatatcgtgtgttgaagcctggccagtgctttgccgtgtacgagtggtgcattacggatcactatgatcctaacaatgcaacccacaaaaggatcaaggatgaaattgagcttggcaatggcctgccagatatcagaagcactcggcaatgtctccaggcagtaaaagacgccgggtttgaggttgtttgggataaggatcttgctgaagattctcccttgccttggtacttgcccttggatccaagccgattctccctgagtagcttccgtttgacttctgtgggacgcatgattacccgcacaatggtcaaggccctggagtacgttggtcttgctccgcagggcagtgagagggtctctaatttcctggagaaggctgcagaagggctggtagagggcggaaagaaggagatcttcacgccaatgtacttctttcttgttcggaagcctcttctggaatgagctcttggatcaccttttcagagagagaaggcaagtggccatttcgaagaagccgaggagggggaacctggaaccaagaataccttcagctctcctgtgtaggaggaaagttaacgaacagtgtagtaactgttcagctttgtgtttattcagttgttttgctgcttgaggtcattcgtttctaggtgggggttggaatccttttcgccataaacctctcagtggcataaataagattgtttgcataagagtacttcatggataccgtaagggctactactgaaagagaaatatttaagcaaaaaaaaaaaaaaaa

SEQ ID NO: 5532 - protein, 344 aa, Zea mays
  misc_feature: Ceres CLONE ID no. 1061708
  misc_feature: Ceres CDNA ID no. 40351604
  misc_feature (42)..(295): Pfam Name: CMAS PFAM Desc: Cyclopropane
MSKSGALDLASGLGGKINKVEVKSAVDEYEKYHGYYGGKEEARKSNYTDMVNKYYDLATSFYEYGWGESFHFAHRWNGESLRESIKRHEHFLALQLGLKPGMKVLDVGCGIGGPLREIARFSSTSVTGLNNNEYQITRGKELNRLAGISGTCDFVKADFMKMPFDDNTFDAVYAIEATCHAPDPVGCYKEIYRVLKPGQCFAVYEWCITDHYDPNNATHKRIKDEIELGNGLPDIRSTRQCLQAVKDAGFEVVWDKDLAEDSPLPWYLPLDPSRFSLSSFRLTSVGRMITRTMVKALEYVGLAPQGSERVSNFLEKAAEGLVEGGKKEIFTPMYFFLVRKPLLE

SEQ ID NO: 5533 - DNA, 1009 bp, Zea mays
  misc_feature: Ceres CLONE ID no. 1061750
  misc_feature: Ceres CDNA ID no. 40351605
  CDS (437)..(844): REFERENCED BY SEQ ID NO: 5534
acccccagccggcgtcaccctcatgagccagccgccagccccaggcttctagcctctgtccaagccggcagcccgccacccgcgaggccgcgaccggcgaccgcccgcccctgacgtggtgactgcgtcctcctccgctctccgtgcgccaccctgaagcggtgaggcgaggacctccaggcaccgccctccctggttcggcggctccctcgaggccttcctccccaccggttcagcagctcccgatccgcacggccaaaggccgattcgcgctcctccagccttcctccgcgtccaacagcaagggttgctacagataccgaaaaaggggggataaggattccaaaacactcggaggaaacatgtatatggggccatgtccaatcaagaaatacgaacaaacgtggcatcacaaagaaattttctctagtaagcaatgaaaaacttcaacccaagaatggcgatgtcttggacaagagggttaaagcatggtgttgttccgaggcatgccgctcaattggtagagagcagaagccttgcaattgcaagcaaggcgaagaagggtggaaaggctgatgctggcaaaactcctgctctcagccaagagctcaagagtacaacagtgttcggggcaaacatcttcaaggagggttctgatccgaaaatccaaccagactctgagtatcctgactggctgtggcacttgctcgacaagcgtcctgtactaagtgagctgcggaggaaagatcccaagacactctcttatgaagacctgaagcgttttgtcaagttggacaaccgatccaggatcaagataaggaatgacctcaatgctaagaactgacctggagtcttggacgaaacaggacctgctctactgttctttttattattaatataatactagacgacatgaataatttttctggagtttttggcaaaacatagcgacttgggatgttaaaatgttaagatgtgcttggtttgttactcaaaaaaaaaaaaaaaa

SEQ ID NO: 5534 - protein, 126 aa, Zea mays
  misc_feature: Ceres CLONE ID no. 1061750
  misc_feature: Ceres CDNA ID no. 40351605
MSWTRGLKHGVVPRHAAQLVESRSLAIASKAKKGGKADAGKTPALSQELKSTTVFGANIFKEGSDPKIQPDSEYPDWLWHLLDKRPVLSELRRKDPKTLSYEDLKRFVKLDNRSRIKIRNDLNAKN

SEQ ID NO: 5535 - DNA, 805 bp, Zea mays
  misc_feature: Ceres CLONE ID no. 1061777
  misc_feature: Ceres CDNA ID no. 29191750
  CDS (137)..(604): REFERENCED BY SEQ ID NO: 5536
atctgcgtataaagtgtactagccagtctctcgtcagcagaacgcaacaaggatcggagcatcagcatcgcgacctgtgaacttgcctgcctgccaagtgccaaggccagcaacacaaggcagcggtcctcggtcgatggaccgcgcgacggacatggacgagaagcacgcgccgtcgccgtcacctgtccagaggagcctttccgccgtcacctactgctgcggcgcgtgcgggtacgacctgcgcctgcggtcgtccgaccgcaacacggcggggatcgtgggtgccggcggcgcggcgtacgggcgcgcggcccggcgcggggtcgtggcgttcgacgccatcgacgacgcgcggttcgggcacgccgacgagttccgctgcgtcgacctgcgcgcgcgtcgcctcttcgtgcgccgcacccgcctgctctgccgcaagtgcggcgccggcctcggcttcggttacgacgaccgcggtcaggacggcgccaggcccccgcgctacgacatcaagatccgcgcgctccagcccctggcagcagacgacgaccaccaccaccaccacggcgacgcggccgcaccgccgacgttggatgcatgatccttccttcttccgttccgtcctcggtgggcgtgtgcttgcttccctgacacgttagctgctggatttttttttctctgtctgtctgtcggtctgcaagaaagtcactcgcttgcatctcaagaaatgtacaaactgaagggtgtcactttcttcaaaaaaaaaaaaaaaaaaaaaaaaaaaagaaaaaaaaaaaaaaaa

SEQ ID NO: 5536 - protein, 155 aa, Zea mays
  misc_feature: Ceres CLONE ID no. 1061777
  misc_feature: Ceres CDNA ID no. 29191750
  misc_feature: Homolog of GI Number: 34908010 NR Desc: P0460C04.15
  misc_feature: Homolog of GI Number: 6322611 NR Desc: Cell wall mannoprotein with similarity to Tir1p
  misc_feature: Homolog of GI Number: 66775827 NR Desc: OsmC
  misc_feature: Homolog of GI Number: 67985353 NR Desc: UBA/THIF
  misc_feature: Homolog of GI Number: 67985322 NR Desc: Prolyl
  misc_feature: Homolog of GI Number: 67987177 NR Desc: 4Fe
  misc_feature: Homolog of GI Number: 66818531 NR Desc: spore coat protein Sp96
  misc_feature: Homolog of GI Number: 29247944 NR Desc: GLP_26_54603_52153
  misc_feature: Homolog of GI Number: 134780 NR Desc: Spore coat protein SP96
MDRATDMDEKHAPSPSPVQRSLSAVTYCCGACGYDLRLRSSDRNTAGIVGAGGAAYGRAARRGVVAFDAIDDARFGHADEFRCVDLRARRLFVRRTRLLCRKCGAGLGFGYDDRGQDGARPPRYDIKIRALQPLAADDDHHHHHGDAAAPPTLDA

SEQ ID NO: 5537 - DNA, 598 bp, Zea mays
  misc_feature: Ceres CLONE ID no. 1061778
  misc_feature: Ceres CDNA ID no. 29191191
  CDS (71)..(409): REFERENCED BY SEQ ID NO: 5538
cttctgggacgcaggcggcggcttagggttttaactcgcatccattctcaaggttagcaggagaccggccatggcgccgtcgcagcccaagtcagggctcttcgtgggcatcaacaagggccacgtcgtcaccaagcgcgagctgccgccacgcccgtccgaccggaaggggaaaggtaccaagagggtgctgtttgtccggaacttgattagggaggttgctggatttgctccctatgagaagcgtatcactgagcttcttaaggttggaaaggacaagcgtgcactcaaggtcgccaagaggaagcttggtactcacaagagagcaaagaagaagagggaggagatgtcaagtgtcctcaggaagatgaggtctggtggtggtggtgctgcggacaagaagaaatagattttgcatgttggtgaaattctatttatctcaatgcgttgccccgtatttccatattatgccaagtctgtagtctgtagcctgtggcaatttcaagttcagagtcaaactatgaattttcgacactatatttgcaagtggagtaacatggtagtacattgcattctgagtccaaaaaaaaaaaaaaaa

SEQ ID NO: 5538 - protein, 112 aa, Zea mays
  misc_feature: Ceres CLONE ID no. 1061778
  misc_feature: Ceres CDNA ID no. 29191191
  misc_feature (5)..(103): Pfam Name: Ribosomal_L36e PFAM Desc: Ribosomal protein L36e
  misc_feature: Homolog of GI Number: 57471698 NR Desc: ribosomal protein L36
  misc_feature: Homolog of GI Number: 50931673 NR Desc: putative 60S ribosomal protein L36
  misc_feature: Homolog of GI Number: 34908154 NR Desc: putative 60S RIBOSOMAL PROTEIN L36
  misc_feature: Homolog of GI Number: 56182368 NR Desc: putative 60S ribosomal protein L36
  misc_feature: Homolog of GI Number: 20148501 NR Desc: 60S ribosomal protein L36
  misc_feature: Homolog of GI Number: 12642884 NR Desc: putative 60S ribosomal protein
  misc_feature: Homolog of GI Number: 21592383 NR Desc: 60S ribosomal protein L36
  misc_feature: Homolog of GI Number: 21554932 NR Desc: 60S RIBOSOMAL PROTEIN L36 homolog
  misc_feature: Homolog of GI Number: 17865758 NR Desc: 60S ribosomal protein L36
  misc_feature: Homolog of GI Number: 1276967 NR Desc: putative ribosomal protein
  misc_feature: Useful for sterility
MAPSQPKSGLFVGINKGHVVTKRELPPRPSDRKGKGTKRVLFVRNLIREVAGFAPYEKRITELLKVGKDKRALKVAKRKLGTHKRAKKKREEMSSVLRKMRSGGGGAADKKK

SEQ ID NO: 5539 - DNA, 710 bp, Zea mays
  misc_feature: Ceres CLONE ID no. 1061800
  misc_feature: Ceres CDNA ID no. 29191272
  CDS (283)..(570): REFERENCED BY SEQ ID NO: 5540
acgaatcccctcctcacttcgcccctccccctctcctatttcttctctccgggccccgggccaaaattccatcctaagttccatcgaagagggcggcaaggggcgatccggatagcgcaagagcgaccatggcctacgtcgagagaggtgttgtgaaaggcaaacggacaatctggagactaagcataatccccgacttctttaaggctattgtgaacttcatcagaatgttcttcctcacaatgttttctatcgagaaaacagacagctataagaaaggatatggtagtggtaagaagtgggatggtggacctggtgggggaggtcctggtgggggtccatatggtggtgggggcggcggtggaggtggccctcgcggtcctcgcacactatctgacctccgatcaaacgatcagagttccctccctgcttgtggatcctgctgcggatgacatcttaacaaaagaacaacatattataatgacagaaaaacttccgtatttcatttcagcagagcaaaatcattgtgatgccgtgaagagtctagcatgtccagtatatattctgtagcttgtttctgatgtgatttgcatactgtattcatcatcgctttgccatgctgaattgtcctggatggagtcaaaatcttatccttaatactggcttcctgttgtgcaatgtgaatttactatgcaaaaaaaaaaaaaaaa

SEQ ID NO: 5540 - protein, 107 aa, Zea mays
  misc_feature: Ceres CLONE ID no. 1061800
  misc_feature: Ceres CDNA ID no. 29191272
  misc_feature: Homolog of GI Number: 24641445 NR Desc: CG1840
  misc_feature: Homolog of GI Number: 72016533 NR Desc:  similar to Selenoprotein K
  misc_feature: Homolog of GI Number: 49036484 NR Desc: Glycine
MAYVERGVVKGKRTIWRLSIIPDFFKAIVNFIRMFFLTMFSIEKTDSYKKGYGSGKKWDGGPGGGGPGGGPYGGGGGGGGGPRGPRTLSDLRSNDQSSLPACGSCCG

SEQ ID NO: 5541 - DNA, 528 bp, Zea mays
  misc_feature: Ceres CLONE ID no. 1061827
  misc_feature: Ceres CDNA ID no. 29191273
  CDS (58)..(330): REFERENCED BY SEQ ID NO: 5542
aaaccctaatcgaaccgaatcgaatcctccagtccagatcaaaacaagggagcgagcatggcgtcgtcctctgctgtgagcaagcgcggcgacgccggcggcgtcctgtctgcgatctcgcggtcctcggtggcggcgcacggccgcgaggccgcggcggtggcggggaagctgctgcggagcacggggaaggcggcgtggatcgccgggacgaccttcctggtgctggtcgtgccgctcatcatcgagatggaccgcgagcagcagatggtcgacctcgacctgcagcagcaggctcttctcggctcgccgccgcccctcgccaaataaatccctcctctttcgtccgtctttgttgcctgccgctgctgctgatgcgatcacatttcgttttgctagtatcataagttgtcgagaattttatcactagtctgttttgggggagaaagatcatgccttgttgtgactgctcctgctcgatacaattattatcgcaatatcaccgacttgccaaaaaaaaaaaaaaaa

SEQ ID NO: 5542 - protein, 90 aa, Zea mays
  misc_feature: Ceres CLONE ID no. 1061827
  misc_feature: Ceres CDNA ID no. 29191273
MASSSAVSKRGDAGGVLSAISRSSVAAHGREAAAVAGKLLRSTGKAAWIAGTTFLVLVVPLIIEMDREQQMVDLDLQQQALLGSPPPLAK

SEQ ID NO: 5543 - DNA, 485 bp, Zea mays
  misc_feature: Ceres CLONE ID no. 1061873
  misc_feature: Ceres CDNA ID no. 25446495
  CDS (148)..(357): REFERENCED BY SEQ ID NO: 5544
aatcacaagcatactccatccagtacaatactgttggtctagccggcggcggccgcgtccctcatccagtcatcccctttccgcgatcaaaaccgagctagggttttaggtgcgggggagagggtgaggagcggacggaggcgcgccatggacaaccccgagatgcagcggttccttcagcaaaaggcgatgatgaacgagatggttggcaagctaacgagcgtgtgctgggacaagtgcatcactagcgctcccgggagcaagttcagttccagggaatcaacctgcctgaccaactgcgcccagaggtttctcgacatgagcgtgatgattgccaaacgctttgagatgaagtgaggcgtcgacgccgaaagctgttacctagtcaatcaccctgagttttttaaccctttgatttgaggttccattgagcacttcgaacgattcaacagagtttaatgtactttccaaaaaaaaaaaaaaaa

SEQ ID NO: 5544 - protein, 69 aa, Zea mays
  misc_feature: Ceres CLONE ID no. 1061873
  misc_feature: Ceres CDNA ID no. 25446495
  misc_feature (11)..(69): Pfam Name: zf PFAM Desc: Tim10/DDP family zinc finger
  misc_feature: Homolog of GI Number: 50947997 NR Desc: putative small zinc finger
  misc_feature: Homolog of GI Number: 21592903 NR Desc: small zinc finger
  misc_feature: Homolog of GI Number: 5107157 NR Desc: small zinc finger
  misc_feature: Homolog of GI Number: 77548554 NR Desc: small zinc finger
  misc_feature: Homolog of GI Number: 77553573 NR Desc: SET domain protein 105
  misc_feature: Homolog of GI Number: 48138379 NR Desc: similar to Mitochondrial import inner membrane translocase subunit Tim8
  misc_feature: Homolog of GI Number: 50745652 NR Desc:  similar to Mitochondrial import inner membrane translocase subunit TIM8 A
  misc_feature: Homolog of GI Number: 58386226 NR Desc: ENSANGP00000017986
  misc_feature: Homolog of GI Number: 54643192 NR Desc: GA14436
MDNPEMQRFLQQKAMMNEMVGKLTSVCWDKCITSAPGSKFSSRESTCLTNCAQRFLDMSVMIAKRFEMK

SEQ ID NO: 5545 - DNA, 1181 bp, Zea mays
  misc_feature: Ceres CLONE ID no. 1061884
  misc_feature: Ceres CDNA ID no. 25447145
  CDS (147)..(674): REFERENCED BY SEQ ID NO: 5546
gtcggcctcccaacaccttcgtccccttctccagtggcacccatctcccccgagcacccgccgccgccgccgccgccgttgagcacccgccgtcgcagggatccgcgctgcgtccctatccaatcgcgctctgcggcggagaggcgatggattcggcaggcgcctcgaagcccgaggaggtggccgccgcttaccagagcagcgaggccaatcaggcgaggctgcagtccatgctcgcggcgctcctcgacgaccccatactcgccgacgtcccgaggaagccttcgctggcggacgtggacacgctcatcaacctcgagctcggcagcgccatgagggtgaccgtcgtcaagctggacaacacctcgttcgatgttgcggtgttgaacactgctacgctcaaggatttgaagctggccatcaggaagaagataactgagatagagcagggccagatgggccatcgtcacatctcgtggaagcatatttgggagaactactgcctgacacatcagagtgagaagttgatagatgacaattctgcactttcttcttacgacattcgtaataattccaaggtttgtttctcaccgcacgtcatgtcgagagtacaccagaagcattctaggagaagaaaacaccgtttcttccacgggcttagcaggaagatgtgatcccactcccacctcatgatttctgatcaggagaaacccttagagccattggagagtgattacttgcgaaacgaagaatgttccaagactcggctatggcgaataaatggggtgtaatttcaaggaagcaattcactgatcgagaaagctaacttccagccgactgtaagttagcgacatatccacacgactcgcgagccgcttgatccccgctcgttcagttagcgacatatccacatgaaattaaaaatagggccaattcgaacccacgaccagtcatttgaagcccatgacgcgcaaccaactggaatatgtacctattgtgtttcctagacggattaacaggattttataccttactaactgagaatgggaaagaaaaacaacatcgcctttgacgagggaacaaattcatctagtccaggttttgtaaaggactgatgcatcatgttgtacttgtctctattttatagtgatgcacattttctagcaaaaaaaaaaaaaaaa

SEQ ID NO: 5546 - protein, 175 aa, Zea mays
  misc_feature: Ceres CLONE ID no. 1061884
  misc_feature: Ceres CDNA ID no. 25447145
  misc_feature: Homolog of GI Number: 50929411 NR Desc: OSJNBa0084K01.17
  misc_feature: Homolog of GI Number: 73959877 NR Desc:  similar to U11/U12 snRNP 25K protein
  misc_feature: Homolog of GI Number: 66350795 NR Desc: chromosome 16 open reading frame 33
  misc_feature: Homolog of GI Number: 61831816 NR Desc:  similar to U11/U12 snRNP 25K protein
  misc_feature: Homolog of GI Number: 13443018 NR Desc: U11/U12 snRNP 25K protein
  misc_feature: Homolog of GI Number: 34875780 NR Desc: similar to chromosome 16 open reading frame 33
  misc_feature: Homolog of GI Number: 38014507 NR Desc: MGC68520 protein
MDSAGASKPEEVAAAYQSSEANQARLQSMLAALLDDPILADVPRKPSLADVDTLINLELGSAMRVTVVKLDNTSFDVAVLNTATLKDLKLAIRKKITEIEQGQMGHRHISWKHIWENYCLTHQSEKLIDDNSALSSYDIRNNSKVCFSPHVMSRVHQKHSRRRKHRFFHGLSRKM

SEQ ID NO: 5547 - DNA, 1102 bp, Zea mays
  misc_feature: Ceres CLONE ID no. 1061920
  misc_feature: Ceres CDNA ID no. 35383338
  CDS (339)..(698): REFERENCED BY SEQ ID NO: 5548
gagacaagtgaactcagagaagaactagcgcggcgggcgagcattgcaagccgagctgcaggggcccggagcggagaccggaggagggagacgtcgcttgcgatgtcaccggcagcatccgccgccgaaaccgccgtcgtcgtcgtcgtcgcaagcgtcccgagccagcagcagagcagccaccgcgccgcggcgccgtccgtcccgtcgtcctacgccgtctgggagaaggagcggtaaggcggctgcagctttacgacgtcgtcgtcgtcgtctgccacctgcctactgctgctgctgctgcaagggaaggaaaaaggaacggaaagggggaaggcatggaggtggaggcggccaagtgcgagtgctgcgggttcacggaggagtgcacgccggcgtacatcgcggctgtgcgcgccgagtacctgggccgctgggtctgcggcctctgcgccgaggcggtgggcgacgagatccggcgcgaggggaccatcaccacggccgaggcgctcgaccgccacgtcgcgttcgcgcgcgcgccgcgctcccggagggcgcccgcggaggacgacctcgtggcggccgtggcgcggctgctccgccgctgcctcgactcgccgcccgcgtcgcctgcgccgccgccacagagccggaaggtggccgcagggcccggctgccccgatggagccgacgcttgaagctgcttgcttaattggcggcaatgattggggggttggttccgctgctggtggattaattagttgtactagtacaagaataaacctccagtggcataatatgatggtacaagtgcatgtgtaggtcgccttccggagaataattcgtgccggtatcatttgacgagagagggggcaaatcacgctccgtgtgtgatcgagcatgaagctattgttaagcatatcactcattggagtacatcaggacaaacactgttccattagttctgcatattcaggttgtaagaatattgtattggagtagtcatgtgctatcttcttgattcaattcaatcgaagtaatttgatacaattgtgtccatgtatgcaaactaccatgtaacttgctaaaaaaaaaaaaaaaa

SEQ ID NO: 5548 - protein, 119 aa, Zea mays
  misc_feature: Ceres CLONE ID no. 1061920
  misc_feature: Ceres CDNA ID no. 35383338
  misc_feature: Homolog of GI Number: 34909432 NR Desc: OSJNBa0014K08.9
  misc_feature: Homolog of GI Number: 7715593 NR Desc: F20B17.20
  misc_feature: Homolog of GI Number: 66778247 NR Desc: cuticular collagen
  misc_feature: Homolog of GI Number: 66776103 NR Desc: LigA
  misc_feature: Homolog of GI Number: 66780099 NR Desc: PE
  misc_feature: Homolog of GI Number: 66778264 NR Desc: LigA
  misc_feature: Homolog of GI Number: 67987371 NR Desc: Aldehyde dehydrogenase
MEVEAAKCECCGFTEECTPAYIAAVRAEYLGRWVCGLCAEAVGDEIRREGTITTAEALDRHVAFARAPRSRRAPAEDDLVAAVARLLRRCLDSPPASPAPPPQSRKVAAGPGCPDGADA

SEQ ID NO: 5549 - DNA, 762 bp, Zea mays
  misc_feature: Ceres CLONE ID no. 1061924
  misc_feature: Ceres CDNA ID no. 36706114
  CDS (219)..(512): REFERENCED BY SEQ ID NO: 5550
ctcatgacacgagctgtacaggttcgttccgatccgtgtccgaccttgccactcgcccaccggccaccgccaccatcacaaggagaaacaaattcttctattttagctctagctcgctcgccatcccctgcccggctgctgcccccaacggaacgacggccagaggaagctaccagagtcgatcgatcgatcgagatcgagagagagagagagagagcatggctggcaggagtttcctgattcggtcccccaaggaggaggagtccaacgccgccgtcagagaagctgtactgctgggagcaaagaacgccgcaatagctggtactgtggttgcagttcccacgttggttggctgccgtgtccttccttgggcaaaggcgaatctcaactacactgcacaagcactcattatatctgcagcctgtattgctggcttcttcatcactgctgacaaaaccattctacggaacgcacgacaaaacaccatcgggaagcttgacaagtcaacttgatgcagagatgtagctgaagctgaaaaggttctctggttgccggggcggttgatagggtgtctattgccccatatgcagtggcaccatttctcttcgtggacaagtaatttttgggtgtttggctattcaaaccagaggttgtgctgtaatgacttgtctaactgatggacccaactattgtatccagtttactccgaatttgaatcagaataaaaggtggttctatatgttcgtaaaaaaaaaaaaaaaa

SEQ ID NO: 5550 - protein, 97 aa, Zea mays
  misc_feature: Ceres CLONE ID no. 1061924
  misc_feature: Ceres CDNA ID no. 36706114
  misc_feature (12)..(89): Pfam Name: ENOD93 PFAM Desc: Early nodulin 93 ENOD93 protein
  misc_feature: Homolog of GI Number: 50906535 NR Desc: early nodulin
  misc_feature: Homolog of GI Number: 21554258 NR Desc: nodulin
  misc_feature: Homolog of GI Number: 30793889 NR Desc: putative nodulin protein
  misc_feature: Homolog of GI Number: 6688816 NR Desc: Enod93 protein
  misc_feature: Homolog of GI Number: 218262 NR Desc: early nodulin
  misc_feature: Homolog of GI Number: 4731119 NR Desc: root
  misc_feature: Homolog of GI Number: 50948739 NR Desc: putative early nodulin
  misc_feature: Homolog of GI Number: 50948751 NR Desc: putative early nodulin
  misc_feature: Homolog of GI Number: 50948753 NR Desc: putative early nodulin
  misc_feature: Homolog of GI Number: 4809191 NR Desc: early nodulin
MAGRSFLIRSPKEEESNAAVREAVLLGAKNAAIAGTVVAVPTLVGCRVLPWAKANLNYTAQALIISAACIAGFFITADKTILRNARQNTIGKLDKST

SEQ ID NO: 5551 - DNA, 1258 bp, Zea mays
  misc_feature: Ceres CLONE ID no. 1062008
  misc_feature: Ceres CDNA ID no. 25446259
  CDS (178)..(1080): REFERENCED BY SEQ ID NO: 5552
attggagtcccatccatggagctccaccgctcctcaccgttgctctcgggtggccgaggtatttactcggccctgtccgtgtgattgttgatgtgaagcttgaagttcgtggatgtagaatgattctactttctacggaagaagcccttctttgtccaagcaaagagactagtggggatggagaaagcaagtacgaggccaggaacacaagagtctggacagacaaagaaaagagcacccctggttcgtggaactgttagcccacctcttccagtaccaggaaacatacctcggcctccttatgtcggcacagaatatgtaccagagatagcaaaagagatacaaatgcatgacaaagagggcattgtccacatgagagctgcttgcgagctcgcggctcgtgttcttgactatgcaggaacgttagtgaaaccctctgtaacaacagacgaaattgataaagcagtgcacaagatgatcatcgatgctggagcctatccatcaccacttggatatggtgggtttccaaaaagtgtatgcacctcagtgaatgagtgcatgtgccatggaattcctgattcacgcgagctacaggatggagacataattaacattgatgtcactgtctacttgaatggttatcatggggatacctcaaaaacatttctttgtggagaagtcgatgaagccagtaaacgacttgtgaaggttactgaagagtgcttgctcaggggcatatcaacatgcaaacatggtaccagctttaagaagattggcagaagaataagtgagcatgctgagaggaacggttttggtgttgtggagtgttttgttgggcatggagtcggcagggtatttcactcagaaccaattatctatcaccagaggaacaacagaccgggccagatgattgaagggcagactttcacaatagagccgatcatatcgatggggagcatcgagtgcgacatgtgggacgacggctggactgccgtgacgacggacggcagcttggcggcgcagttcgagcacaccatactgatcaccaggaccggagccgagatcctcacgaagtgctaggaggaaatcgcatgtgcccgaatagccgacggtaggtaacctgtattcgtgaggcggtgaggccgtgaggatgcttgaggtgacctattttgtctcgcaaaatgggcgtgctacagaatagtgaagaaaagggttgagagatcgcaaatggcaggtttgggcaaaaaaaaaaaaaaaa

SEQ ID NO: 5552 - protein, 244 aa, Zea mays
  misc_feature: Ceres CLONE ID no. 1062008
  misc_feature: Ceres CDNA ID no. 25446259
  misc_feature (8)..(243): Pfam Name: Peptidase_M24 PFAM Desc: metallopeptidase family M24
  misc_feature: Homolog of GI Number: 50928643 NR Desc: OSJNBa0085I10.11
  misc_feature: Homolog of GI Number: 23306398 NR Desc: methionine aminopeptidase I
  misc_feature: Homolog of GI Number: 11320956 NR Desc: methionine aminopeptidase
  misc_feature: Homolog of GI Number: 50937627 NR Desc: putative methionine aminopeptidase I
  misc_feature: Homolog of GI Number: 7939560 NR Desc: methionine aminopeptidase
  misc_feature: Homolog of GI Number: 21553973 NR Desc: methionyl aminopeptidase
  misc_feature: Homolog of GI Number: 4006872 NR Desc: methionyl aminopeptidase
  misc_feature: Homolog of GI Number: 15230872 NR Desc: metallopeptidase M24 family protein
  misc_feature: Homolog of GI Number: 11320958 NR Desc: methionine aminopeptidase
  misc_feature: Homolog of GI Number: 50913031 NR Desc: putative aminopeptidase MAP1 precursor
MHDKEGIVHMRAACELAARVLDYAGTLVKPSVTTDEIDKAVHKMIIDAGAYPSPLGYGGFPKSVCTSVNECMCHGIPDSRELQDGDIINIDVTVYLNGYHGDTSKTFLCGEVDEASKRLVKVTEECLLRGISTCKHGTSFKKIGRRISEHAERNGFGVVECFVGHGVGRVFHSEPIIYHQRNNRPGQMIEGQTFTIEPIISMGSIECDMWDDGWTAVTTDGSLAAQFEHTILITRTGAEILTKC

SEQ ID NO: 5553 - DNA, 767 bp, Zea mays
  misc_feature: Ceres CLONE ID no. 1062021
  misc_feature: Ceres CDNA ID no. 25447436
  CDS (105)..(539): REFERENCED BY SEQ ID NO: 5554
ctacagcgattagtctcgaccttcagtcgtgctgcctgctcatcagcatataattcctgatcgagcgagcgggagaggaaggcgagatcaggccgggagagaagatggcgcaggggacgctggaggtgctgctcgtcggagccaaggccctcgagaacaccgactacctctgcaacatggacccgtacgcggttctaaaatgcacctcgcaggagcagaagagcaccgtcgcctcaggaaagggaagtgatcctgagtggaacgaaacctttgtgttcaccgtctctgagaatgcaaccgagctcgtcatcaagcttctggacagtgatggtggcacggacgacgacagcgttggtgaagcaacgatcccattggatggagtgtacactgaaggaagcatcccaccaactgtttacaatgttgtcaaagacgaagagtaccgtggagaaatcaaaatcggtctgacgttcactccggaggaggctcgtgatcaggatcaacccgaggaaaactacggtgggtggaaccaatcatcttaagaagaagcaggtgctttgctgaactatggtgcgtgacaagtcgtgtgctagaactaaagcttattttaattgttaaagactgtatttgtcgttgattccgtcaattatgtataagctacaaatctccttattgattggtatcattttctaatcttcaaatttgtaataatagtgttccccacttgtatgaagtatgagccctttttaatgtcaaaaaaaaaaaaaaaa

SEQ ID NO: 5554 - protein, 144 aa, Zea mays
  misc_feature: Ceres CLONE ID no. 1062021
  misc_feature: Ceres CDNA ID no. 25447436
  misc_feature (6)..(87): Pfam Name: C2 PFAM Desc: C2 domain
  misc_feature: Homolog of GI Number: 50926660 NR Desc: OSJNBa0081C01.13
  misc_feature: Homolog of GI Number: 50911080 NR Desc: putative elicitor
  misc_feature: Homolog of GI Number: 20148351 NR Desc: putative elicitor
  misc_feature: Homolog of GI Number: 21553977 NR Desc: putative elicitor
  misc_feature: Homolog of GI Number: 56966810 NR Desc: Chain A
  misc_feature: Homolog of GI Number: 50929733 NR Desc: OSJNBa0032F06.15
  misc_feature: Homolog of GI Number: 7489474 NR Desc: FIERG2 protein
  misc_feature: Homolog of GI Number: 6644464 NR Desc: calcium
MAQGTLEVLLVGAKALENTDYLCNMDPYAVLKCTSQEQKSTVASGKGSDPEWNETFVFTVSENATELVIKLLDSDGGTDDDSVGEATIPLDGVYTEGSIPPTVYNVVKDEEYRGEIKIGLTFTPEEARDQDQPEENYGGWNQSS

SEQ ID NO: 5555 - DNA, 1493 bp, Zea mays
  misc_feature: Ceres CLONE ID no. 1062064
  misc_feature: Ceres CDNA ID no. 25446496
  CDS (169)..(1158): REFERENCED BY SEQ ID NO: 5556
agttcaaatgagcagtcgtagccggccttcctcctcctcgccccccttcccctccgttgttatcttgtcaagttgcggttgtctccctcctccggcgctcccttccgcccctcccttcccgcctcctccgcgcagatcgccaggcgaggaaccagaccgcagggcaggatgcagtacaagaacctggggcggtcgggcctccgcgtcagccagctctcgtacggcgcgtgggtcaccttcgggaaccagctggacgtgaaggaggccaaggtgctactgcaggcgtgccgggacgctggcgtcaacttcttcgacaacgccgaggtgtacgccaacgggcgcgccgaggagatcatgggccaggccatccgggacctgggctggcgccgctccgacgtcgtcatctccaccaagctcttctggggcggccagggccccaacgacaagggcctctcccggaagcacgtcgtcgagggcctccgcggctcgctccgccgcctcgccctggactacgtcgacgtcgtctactgccaccgccccgacgcgtccacgcccgtcgaggagacggtgcgcgccatgaactgggtcatcgaccagggctgggccttctactggggcacctccgagtggtccgcgcagcagatcaccgaggcctgggccgtcgccaaccgactcgacctcgtcggacccatcgtcgagcagcccgagtacaacctcttctccagacacaaggttgagtctgagttcttgccactttacagcacctatggcattggtttgactacatggagtcctctggcttcaggagtactatctggaaaatatggcaaaggggacatacctgctgatagcaggtttgccctagacaattacaagaacctggcgaacaggtccctggttgacgacacgcttcgaaaagtgaatgggctaaaacctatcgccgctgaacttggcgtttcgttagctcagctctcgattgcttggtgcgcgtcgaaccccaatgtgtcgtctgtgatcactggagccaccaaagaaagccagattgtggagaacatgaaggccctagatgtcatcccactgctgacgccggaggtcgtcgacaggatcgaggcggtggtccaaagcaagcccaaacgcaacgtcgagtcatacaggtgaaaattcggtgttcatccgacggagttcaggcctcctccacgaaacttcatccatgatccgtgtgtattctgggcgtggtgctgtgttcacaaacacaagtctgtcagtcctgtgttgtgtattctgctttccgatacagattttggaccaattcaatcctgcattgtgttgcttgcgagcagaaagatttgttggatgaccatgatcctttctggtcgtgctgcaagatttctggagcgtgagatcctctgctgtatcactgtatcagcagctcatgctgttggctgttgcttgcagaaatattcgagtccgttttagcaaaaaaaaaaaaaaaa

SEQ ID NO: 5556 - protein, 329 aa, Zea mays
  misc_feature: Ceres CLONE ID no. 1062064
  misc_feature: Ceres CDNA ID no. 25446496
  misc_feature (7)..(318): Pfam Name: Aldo_ket_red PFAM Desc: Aldo/keto reductase family
  misc_feature: Homolog of GI Number: 1063415 NR Desc: K+ channel protein
  misc_feature: Homolog of GI Number: 2832783 NR Desc: potassium channel beta subunit
  misc_feature: Homolog of GI Number: 1197587 NR Desc: potassium channel beta subunit protein
  misc_feature: Homolog of GI Number: 3402279 NR Desc: putative beta
  misc_feature: Homolog of GI Number: 20259255 NR Desc: putative potassium channel beta subunit
  misc_feature: Homolog of GI Number: 50915890 NR Desc: putative potassium channel beta subunit
  misc_feature: Homolog of GI Number: 23394348 NR Desc: K+ channel protein
  misc_feature: Homolog of GI Number: 72609559 NR Desc: Aldo/keto reductase
  misc_feature: Homolog of GI Number: 46311510 NR Desc: COG0667: Predicted oxidoreductases
  misc_feature: Homolog of GI Number: 78067010 NR Desc: Aldo/keto reductase
  misc_feature: Useful for making ornamental plants with modified leaves
MQYKNLGRSGLRVSQLSYGAWVTFGNQLDVKEAKVLLQACRDAGVNFFDNAEVYANGRAEEIMGQAIRDLGWRRSDVVISTKLFWGGQGPNDKGLSRKHVVEGLRGSLRRLALDYVDVVYCHRPDASTPVEETVRAMNWVIDQGWAFYWGTSEWSAQQITEAWAVANRLDLVGPIVEQPEYNLFSRHKVESEFLPLYSTYGIGLTTWSPLASGVLSGKYGKGDIPADSRFALDNYKNLANRSLVDDTLRKVNGLKPIAAELGVSLAQLSIAWCASNPNVSSVITGATKESQIVENMKALDVIPLLTPEVVDRIEAVVQSKPKRNVESYR

SEQ ID NO: 5557 - DNA, 702 bp, Zea mays
  misc_feature: Ceres CLONE ID no. 1062068
  misc_feature: Ceres CDNA ID no. 25446497
  CDS (239)..(442): REFERENCED BY SEQ ID NO: 5558
cccgttccaactcctacctacgcagcagaggccagccacctccccgtcgctctcacgctcttcgtgcccgccgcctctcctccgtctctgcctctctccctctcccctcccgtctgacgcacatggcctccatcgccggatcttcggccctctccttcgccaggcccgtcaaggcaatcaacacaaattctctagctttctccccggcgaggaagggatcgagagcgcggcggaggcgatggcgagcggagggaagggactcaacgcgactggggagttcttccggcggagggacgagtggaggaggcaccctatggcggggaaccagctgcgccacgccacacccgggctcggcatcgccatcgtcgccttcgggatctacctcgtcggcgaggccgcctacaaccgcctctaccgcccctccggcgacaaccaccactagatcgccggcaggatccgtgactcggtcaagaagctggagccaactttaccaagcactggtgctgttgatgtttttacagttttgagctcataaggtcagccatgaccatattgtaatctgtgaccaggtagacttgcccactggtccgtccaactattgtcttgggaccctgtgttaatccttgctatatggatctgacagtgctcatgtaattcaagaatcctggactatcttttatgtgcttaaaaaaaaaaaaaaaa

SEQ ID NO: 5558 - protein, 67 aa, Zea mays
  misc_feature: Ceres CLONE ID no. 1062068
  misc_feature: Ceres CDNA ID no. 25446497
MASGGKGLNATGEFFRRRDEWRRHPMAGNQLRHATPGLGIAIVAFGIYLVGEAAYNRLYRPSGDNHH

SEQ ID NO: 5559 - DNA, 689 bp, Zea mays
  misc_feature: Ceres CLONE ID no. 1062118
  misc_feature: Ceres CDNA ID no. 29191274
  CDS (83)..(436): REFERENCED BY SEQ ID NO: 5560
accaaaccagctccgatacaatctcataatacagtggccgactaagacacacagcgaggagaagagggttcgaccggcgtcaatggcgacgttcaagggtttcctcctcgtgtttgctctcctgcttgctgctgctttcctcgtcgcctcggccgaagaaactcaggccaagaaggaggagcccacggccgacgtgcaggactactaccgtggcggcggcggctacccgggccgtggttatcccgggcgcggtcgcggaggagggtactacccgtaccctggccgcggaggaggcgggtacccgggccgcggcggcggcgggtactgccggtggggctgctgcggccgcgggtactacggcggctgccggtgctgctcgcgcgccgacgaggtcccggagcccatgtaccgcgctgaggcggaggtgcaccactgagccgagcatgcatccaccggatgcagcagcgtgtacgcctgcacgtgcctagttaatctgcttatactgtgtgttcttgaggaacgcagctagccctgtgttcttgcaagctatgtgttcatgtgtgtttatggtgtgcttgttcgaaagacgtactggtcagtgtacggacgtattgtactactgtgcccgtgttgtgttcatcatggaataaaatgacaggcgaatttgctctccaaaaaaaaaaaaaaaa

SEQ ID NO: 5560 - protein, 117 aa, Zea mays
  misc_feature: Ceres CLONE ID no. 1062118
  misc_feature: Ceres CDNA ID no. 29191274
  misc_feature (1)..(95): Pfam Name: GRP PFAM Desc: Glycine rich protein family
  misc_feature: Homolog of GI Number: 50909901 NR Desc: putative glycine
  misc_feature: Homolog of GI Number: 27461096 NR Desc: glycine
  misc_feature: Homolog of GI Number: 728596 NR Desc: glycine rich protein
  misc_feature: Homolog of GI Number: 7024449 NR Desc: glycine
  misc_feature: Homolog of GI Number: 295808 NR Desc: glycine
  misc_feature: Homolog of GI Number: 42565497 NR Desc: glycine
  misc_feature: Homolog of GI Number: 6782438 NR Desc: glycine
  misc_feature: Homolog of GI Number: 20334894 NR Desc: At2g05540/T20G20.11
  misc_feature: Homolog of GI Number: 18266043 NR Desc: glycine
  misc_feature: Homolog of GI Number: 81625 NR Desc: glycine
MATFKGFLLVFALLLAAAFLVASAEETQAKKEEPTADVQDYYRGGGGYPGRGYPGRGRGGGYYPYPGRGGGGYPGRGGGGYCRWGCCGRGYYGGCRCCSRADEVPEPMYRAEAEVHH

SEQ ID NO: 5561 - DNA, 700 bp, Zea mays
  misc_feature: Ceres CLONE ID no. 1062141
  misc_feature: Ceres CDNA ID no. 25891067
  CDS (58)..(429): REFERENCED BY SEQ ID NO: 5562
acgaacgagagagagagagagacagggagggatcatccatccatcagaccatcacccatggacaaccttaaggagcagcggggccacgatgccgcgggcgccaacagcggcgtctggatgacggtgccggcgttcggggactgggacacgaagaacggcgcgctgccggactactccatggacttctccaagatccgcgagacgcgcaagcagaacaagaaggagctctcccgcgccagcctcggcggcgacgacgacctcttcgcccacgcccacgcccacgcccagaagccgcaggccaacagcgcccagcccaagctcggccgcccctgccccgccgccgaccgccgaccgctccacgcccgcgaccactccccaacgggagggaagaagttcctgagctacttccagtgctgtatcaaggcctgaagaggagctgccgcaatgctatgtctgtgtgcctgtgctttgtcgcagcagaacactcgtgagcaattaggtcccggctttgttaagtatccaaaaaatgtgcaatgtatttgccctgatggtcactcgtttgacctgttagcctgtatgaagaacaagtcaggttatggggccaggcagccgtctatctgtacatggcaccatcgatttgtttgcgactggtggtataatgttgccctgtaatcattgtattggaaaaaaaaaaaaaaaa

SEQ ID NO: 5562 - protein, 123 aa, Zea mays
  misc_feature: Ceres CLONE ID no. 1062141
  misc_feature: Ceres CDNA ID no. 25891067
  misc_feature: Homolog of GI Number: 72384402 NR Desc: 4D11_4
  misc_feature: Homolog of GI Number: 71834736 NR Desc: 80C09_15
  misc_feature: Homolog of GI Number: 56283929 NR Desc: CG3047
  misc_feature: Homolog of GI Number: 67984599 NR Desc: Salivary gland secretion 1
  misc_feature: Homolog of GI Number: 13345559 NR Desc: merozoite surface protein 2
MDNLKEQRGHDAAGANSGVWMTVPAFGDWDTKNGALPDYSMDFSKIRETRKQNKKELSRASLGGDDDLFAHAHAHAQKPQANSAQPKLGRPCPAADRRPLHARDHSPTGGKKFLSYFQCCIKA

SEQ ID NO: 5563 - DNA, 774 bp, Zea mays
  misc_feature: Ceres CLONE ID no. 1062150
  misc_feature: Ceres CDNA ID no. 29191275
  CDS (96)..(443): REFERENCED BY SEQ ID NO: 5564
accaataccagtgctagcaaatctagctatcccaccctctctccgtgagctagcccaccaccacaaggtccacaactacagctaactcggtcgagatggctcgcactgcagctactaagctcgtgctggtcgccctggtggcggcaatgatcctcgcagcctccgacgcggccatcagctgcggccaggtgagctctgccttgaccccctgcgtcgcctatgcgaagggcagcgggaccagcccgtctggggcctgctgcagcggcgtcaggaaattggccggcttagcgcggagcaccgccgacaagcaagctacatgcaggtgcctcaagagtgttgccggagggctcaaccccaacaaggccgcaggcattccctccaagtgcggcgtcagcgtcccctacacgatcagcgcatccgtggactgctctaagatccactgatcgatttctggccgccatcatcgccgattatagttccagcgattgatgctgagtacgttgaggtctcacacacacatatatacatatacatgaataaatgctctgatatgatctccatgtgagagataggagtacgtacatcgagccagctttgcatagctggccactgttgtatctattttgtatcagcgtttgattgttcgttcactccctttgagcagacacgggagtttgttgtactttgtacgatgtacgcttatcatatatggattataaattaatctaaaaaaaaaaaaaaaaaaaaaaaaaaaaaagaaaaaaaaaaaaaaaa

SEQ ID NO: 5564 - protein, 115 aa, Zea mays
  misc_feature: Ceres CLONE ID no. 1062150
  misc_feature: Ceres CDNA ID no. 29191275
  misc_feature (29)..(111): Pfam Name: Tryp_alpha_amyl PFAM Desc: Protease inhibitor/seed storage/LTP family
  misc_feature: Homolog of GI Number: 54111986 NR Desc: lipid transfer protein
  misc_feature: Homolog of GI Number: 55792862 NR Desc: lipid transfer protein
  misc_feature: Homolog of GI Number: 443797 NR Desc: Cw
  misc_feature: Homolog of GI Number: 443799 NR Desc: Cw
  misc_feature: Homolog of GI Number: 1098265 NR Desc: lipid transfer protein
  misc_feature: Homolog of GI Number: 1045199 NR Desc: lipid transfer protein
  misc_feature: Homolog of GI Number: 1045201 NR Desc: lipid transfer protein
  misc_feature: Homolog of GI Number: 1098266 NR Desc: lipid transfer protein
  misc_feature: Homolog of GI Number: 642017 NR Desc: phospholipid transfer protein precursor
  misc_feature: Homolog of GI Number: 56713113 NR Desc: type 1 non
MARTAATKLVLVALVAAMILAASDAAISCGQVSSALTPCVAYAKGSGTSPSGACCSGVRKLAGLARSTADKQATCRCLKSVAGGLNPNKAAGIPSKCGVSVPYTISASVDCSKIH

SEQ ID NO: 5565 - DNA, 811 bp, Zea mays
  misc_feature: Ceres CLONE ID no. 1062173
  misc_feature: Ceres CDNA ID no. 25445914
  CDS (113)..(538): REFERENCED BY SEQ ID NO: 5566
agcgatcgcagagagttgcgcccggaccccggaccgcgccgacccggctcgcaaactcctccacaaccctcgtcgccgccggctgctccacccccgccaccgccatgggacgatggtgtcgcagctggtgaagcacgagcgcatcgagaccaccgttgccaaggcgaaggaggttcggcggaaggcggatcagatggtgcagctagggaaggagggtactcagcatgcagcaagacgtgctgctgcctttgttcggggtgatgatgtcgttcataagctatttactgagctggcctttcgctacagagatcgagctgggggctacacaagaatgttaagaaccaggatacgtgttggtgatgctgctccaatggcatacatcgagttcgtggatagggagaatgagcttcgagaggccaaacctgcaacgccgccgcctcctcaacgagtccctcttgatccatgggccaagtcacgtgctagccaacagtgggcaggacctaaaatcaccaagagctcggaaacggacggcttatgagctagtatacctatgttccatagaaagtttcagttattttgcttaagagatttttttatctagagatatctgccgatagaataattcaaactttattgtcattttgtatgcttctaattcaccgagtgaagattgcaaggctgtgtccaaacaggaggaagtttggaacgagagagatgtatctctgctttgcttattggagttgtaacagatccaactacatgatcaaattcgtgtatgcatcagtctgccagtccaaaaaaaaaaaaaaaa

SEQ ID NO: 5566 - protein, 141 aa, Zea mays
  misc_feature: Ceres CLONE ID no. 1062173
  misc_feature: Ceres CDNA ID no. 25445914
  misc_feature (1)..(93): Pfam Name: Ribosomal_L17 PFAM Desc: Ribosomal protein L17
  misc_feature: Homolog of GI Number: 56784661 NR Desc: putative 50S ribosomal protein L17
  misc_feature: Homolog of GI Number: 18424850 NR Desc: ribosomal protein L17 family protein
  misc_feature: Homolog of GI Number: 26451578 NR Desc: putative 50S ribosomal protein L17
  misc_feature: Homolog of GI Number: 21555473 NR Desc: 50S ribosomal protein L17
  misc_feature: Homolog of GI Number: 21592350 NR Desc: ribsomal protein
  misc_feature: Homolog of GI Number: 10178068 NR Desc: 50S ribosomal protein L17
  misc_feature: Homolog of GI Number: 50931683 NR Desc: putative 50S ribsomal protein L17
  misc_feature: Homolog of GI Number: 72384434 NR Desc: 52O08_5
  misc_feature: Homolog of GI Number: 7671412 NR Desc: ribsomal protein
  misc_feature: Homolog of GI Number: 9759008 NR Desc: 50S ribosomal protein L17
MVSQLVKHERIETTVAKAKEVRRKADQMVQLGKEGTQHAARRAAAFVRGDDVVHKLFTELAFRYRDRAGGYTRMLRTRIRVGDAAPMAYIEFVDRENELREAKPATPPPPQRVPLDPWAKSRASQQWAGPKITKSSETDGL

SEQ ID NO: 5567 - DNA, 623 bp, Zea mays
  misc_feature: Ceres CLONE ID no. 1062247
  misc_feature: Ceres CDNA ID no. 29191301
  CDS (78)..(380): REFERENCED BY SEQ ID NO: 5568
actcccaccacttcgagcgcctcctcctgtctcgtcctcgtcccccgtcccctcgtcggcgcccgatctaagtcaagatgagtcgtggcgggagtgctggtggtggtcaaagttctctgggttacctgtttggagatggcgagcctgcaaagcctgctgcagcaccagctgcgaagcccgcacctgctgagaaaccagcaccggcagctgctgatgtagccaagcagattccagctggcattccaggtagccgggcgaacaactattaccgtgcagatggccagaacacgggcaacttccttacggaccgtccttcaaccaaggttcatgctgctcctggcggtggctcgtccctgggctacttgtttggcggaaagtgatgttaatgatggtgcctgcttaatgaacgagcgatgaattggcctgtatctctgttatccatgtggtgaaaactggaagtgtttggtttgagcagtttaccacctgcgtcgatgtactctgtctgtatggttcattgtgtccaagctgacctcctgcttggaagccagcttgcctaaaacctgtcgctttcaaactaatcgtcttcatctcaaaacttggtgtgcctaaaaaaaaaaaaaaaa

SEQ ID NO: 5568 - protein, 100 aa, Zea mays
  misc_feature: Ceres CLONE ID no. 1062247
  misc_feature: Ceres CDNA ID no. 29191301
  misc_feature: Homolog of GI Number: 21592628 NR Desc: putative nitrilase
  misc_feature: Homolog of GI Number: 21592782 NR Desc: nitrilase associated protein
  misc_feature: Homolog of GI Number: 28827480 NR Desc: putative nitrilase associated protein
MSRGGSAGGGQSSLGYLFGDGEPAKPAAAPAAKPAPAEKPAPAAADVAKQIPAGIPGSRANNYYRADGQNTGNFLTDRPSTKVHAAPGGGSSLGYLFGGK

SEQ ID NO: 5569 - DNA, 640 bp, Zea mays
  misc_feature: Ceres CLONE ID no. 1062272
  misc_feature: Ceres CDNA ID no. 25446498
  CDS (105)..(425): REFERENCED BY SEQ ID NO: 5570
aaaacccaacaactccaaacccgaagcccccacagcgcaggcgtaggcggcgcggtcagggccgggccgccggaggcgggccacttggcggcggcgcaggggagatgtgcgaggggaggcggccggcggacgcgagccgagcggggtgggcggcggcggcggagctgcggcggagagaggcggctgcgcgggcgcgcctggcggaggcgctggcggagctggagcgcgcgcgggcgcgcgccgccgagctgcagcggcgcatcgagcagacatacggcaagcgccggcgcctcctcgaggagacccgcggccggatccacgagatccacgcgcgcctccaccaggaccaggaccgggatcaggagcaggagcaggagcaggagccctccgccagcggcacttcctctccgtcctcgtcctcgtagggaacaagcgagttggcgctggatcatcgatggtttctactgctatgccgcgcgcttctttcccgtttcctcctgtcttatcgttagcttacaagcttgactttggacatgtaccgtagctgtagtatacacgactctctctgacctacagaacgtcagaaaattgatcagtgactgaattggattgggagttagttctaaaaaaaaaaaaaaaa

SEQ ID NO: 5570 - protein, 106 aa, Zea mays
  misc_feature: Ceres CLONE ID no. 1062272
  misc_feature: Ceres CDNA ID no. 25446498
  misc_feature: Homolog of GI Number: 66776365 NR Desc: PE
  misc_feature: Homolog of GI Number: 66780099 NR Desc: PE
  misc_feature: Homolog of GI Number: 66779522 NR Desc: Response regulator receiver:ATP
  misc_feature: Homolog of GI Number: 66778899 NR Desc: UvrD/REP helicase
  misc_feature: Homolog of GI Number: 1657446 NR Desc: merozoite surface protein 2
  misc_feature: Homolog of GI Number: 2388805 NR Desc: attachment region binding protein
MCEGRRPADASRAGWAAAAELRRREAAARARLAEALAELERARARAAELQRRIEQTYGKRRRLLEETRGRIHEIHARLHQDQDRDQEQEQEQEPSASGTSSPSSSS

SEQ ID NO: 5571 - DNA, 824 bp, Zea mays
  misc_feature: Ceres CLONE ID no. 1062276
  misc_feature: Ceres CDNA ID no. 29191302
  CDS (93)..(599): REFERENCED BY SEQ ID NO: 5572
ctctctcgccgtccgccgctactcccctgcctcccccagagctcgttagggttttctcttttttcgggggagaaatctcaagaggcggcaccatgctcgtgtaccaggacaagctttccggcgacgagcttctgtcggattcgttcccttacagggagctggagaacggcgtgctctgggaagtcgatggccattgggtcgttcaaggagcagttgatgtggacattggagccaatccctctgctgagggtggtggtgatgatgagggtgttgatgaccaggccgtgaaggtggttgacattgttgacaccttccgtcttcaggagcaacctgcttttgacaagaagcagtttatctctcacatgaagcgctacatcaagaacctctctgccaagcttgaaggggatgacctagatgctttcaagaagaatgttgagtccgccacaaagtatcttcttagcaagctcaaggaccttcagttctttgttggcgagagcatgcatgatgatggcggcgtggtgttcgcctactacaaggagggagctgctgatccaactttcctgtactttgcacatgggctgaaagaggtcaagtgctaatcgcactgtatgctaaaatctatgctgtcttcagtatttttgctcttatctatggttgtcagtcgactctccaatgttggtgtcagtaactgtcagatgttgagtgtcttgaaaactttctgataattgtgggatttgctttgtaatggtaatcgtgaaattggtgtggttgtgttttggttgaatcaagagattctgccctgttattcaaaaaaaaaaaaaaaa

SEQ ID NO: 5572 - protein, 168 aa, Zea mays
  misc_feature: Ceres CLONE ID no. 1062276
  misc_feature: Ceres CDNA ID no. 29191302
  misc_feature (1)..(165): Pfam Name: TCTP PFAM Desc: Translationally controlled tumour protein
  misc_feature: Homolog of GI Number: 21070379 NR Desc: translationally controlled tumor protein
  misc_feature: Homolog of GI Number: 20140865 NR Desc: Translationally controlled tumor protein homolog
  misc_feature: Homolog of GI Number: 303835 NR Desc: 21kd polypeptide
  misc_feature: Homolog of GI Number: 78191404 NR Desc: P23 tumor protein
  misc_feature: Homolog of GI Number: 49425163 NR Desc: translationally controlled tumor protein
  misc_feature: Homolog of GI Number: 76161018 NR Desc: P23
  misc_feature: Homolog of GI Number: 36963062 NR Desc: translationally controlled tumor protein
  misc_feature: Homolog of GI Number: 587546 NR Desc: P23 protein
  misc_feature: Homolog of GI Number: 4193388 NR Desc: translationally controlled tumor protein
  misc_feature: Homolog of GI Number: 7407154 NR Desc: human tumor protein
MLVYQDKLSGDELLSDSFPYRELENGVLWEVDGHWVVQGAVDVDIGANPSAEGGGDDEGVDDQAVKVVDIVDTFRLQEQPAFDKKQFISHMKRYIKNLSAKLEGDDLDAFKKNVESATKYLLSKLKDLQFFVGESMHDDGGVVFAYYKEGAADPTFLYFAHGLKEVKC

SEQ ID NO: 5573 - DNA, 928 bp, Zea mays
  misc_feature: Ceres CLONE ID no. 1062351
  misc_feature: Ceres CDNA ID no. 35389364
  CDS (49)..(744): REFERENCED BY SEQ ID NO: 5574
acgctcctgcgtagtgcgtactagtgcgctgccctgcgcccgcgcggcatggcattcgcattgctggtggcagcagcgagagcggagagtgctggaagcactcgcagcccagccgcagccgcaggcggaggccgagcaatgggaggaggatggccgcgtcccggcggggccttggcggcgccgcgcttgctcctccgagcgctgctgctctgctccctcctcgcgcagccgcatccgtcgcgcgccttcttcttcttcggcggcgtgcgcaccagcttgcacgtcccccagcaccgcggtggtggacgcgaggagaaggtgcccatgaccgtcgtcgtcccggactactcgccgcggcccgcgccgctcggcctctcgccctcagccgcgcccgcgcccgcgccggtgcccggctcggacggcgacgaagacggcacgccgaggctgccgtcagagcggcggggcacgggcgcgccctcgtcgaccggtcacagcgcgagcgcacaggcgccggccgcggccaccagcaccgacttcgtcagcagcagccccgccgtgccgctcccggccggcgtcacggactccgccaccgtcctgcccatgcccactcccggacagcatctccgggacgacgtggggatgggcacccggcggcttcaggctagggtgttgcagctcgccgtccctcttctcatgatgctgtcttttgcggctacctctgtctctgctggagttgttatgtgatcacaagggctctctctctctctctctctctctctgtactgtagcctccactgacactcatagatcatcatcacctcatctgtaaccaaggtcgccatgcttgctattgctgctgattcctgagttcatgccttatacatgcgtcacgcagagctccgttctctagccaaaaaaaaaaaaaaaa

SEQ ID NO: 5574 - protein, 231 aa, Zea mays
  misc_feature: Ceres CLONE ID no. 1062351
  misc_feature: Ceres CDNA ID no. 35389364
  misc_feature: Homolog of GI Number: 38605910 NR Desc: OSJNBb0088C09.4
  misc_feature: Homolog of GI Number: 66779656 NR Desc: Insulinase
  misc_feature: Homolog of GI Number: 67666322 NR Desc: Acriflavin resistance protein
  misc_feature: Homolog of GI Number: 55243617 NR Desc: ENSANGP00000025991
  misc_feature: Homolog of GI Number: 55234580 NR Desc: ENSANGP00000028786
  misc_feature: Homolog of GI Number: 67987629 NR Desc: Thymidylate kinase
  misc_feature: Homolog of GI Number: 34905848 NR Desc: P0483G10.28
  misc_feature: Homolog of GI Number: 66778899 NR Desc: UvrD/REP helicase
MAFALLVAAARAESAGSTRSPAAAAGGGRAMGGGWPRPGGALAAPRLLLRALLLCSLLAQPHPSRAFFFFGGVRTSLHVPQHRGGGREEKVPMTVVVPDYSPRPAPLGLSPSAAPAPAPVPGSDGDEDGTPRLPSERRGTGAPSSTGHSASAQAPAAATSTDFVSSSPAVPLPAGVTDSATVLPMPTPGQHLRDDVGMGTRRLQARVLQLAVPLLMMLSFAATSVSAGVVM

SEQ ID NO: 5575 - DNA, 646 bp, Zea mays
  misc_feature: Ceres CLONE ID no. 1062411
  misc_feature: Ceres CDNA ID no. 29191699
  CDS (95)..(397): REFERENCED BY SEQ ID NO: 5576
gaagagtgtggaagcgtctcgttctcttttcttgcttgtttcccaagaaggagaaggagaagagcggcggcgtctgatctcgtcggcggcggcgatggcggcgattcggcgtctgatcccgtccttcaaccgggtgctggtggagaaggtggtgcagcccaagaagagcgccggcggcatcctcctcccggagacctccaagcagctgaactctggtaaggtcatagctgttggccctggcagccgtgacaaggaagggaagctgatccctgttgctctcaaggaaggtgaccatgtgctcctgcctgagtatggtggtcttgaagtcaagcttgctcctgagaaagagtacctcctctacagagacgatgacattctgggcaccctccacgagtgattcagatggtgcggaagtcatcagctgctttaatgcaggaggagaggatgttagagtttccatgttatcggataaacctgaagtagaactctcttttatggtgtgatgatagacttatatgattgttgccagactttctgtcgtgatgcagttcagtaaacttgcagctgaagtgctgccttaattttcgtcaaattacttccctggctgctaagccttgcgttatttggattaaaaaaaaaaaaaaaa

SEQ ID NO: 5576 - protein, 100 aa, Zea mays
  misc_feature: Ceres CLONE ID no. 1062411
  misc_feature: Ceres CDNA ID no. 29191699
  misc_feature (6)..(98): Pfam Name: Cpn10 PFAM Desc: Chaperonin 10 Kd subunit
  misc_feature: Homolog of GI Number: 50939543 NR Desc: 10 kDa chaperonin
  misc_feature: Homolog of GI Number: 2267597 NR Desc: 10 kDa chaperonin
  misc_feature: Homolog of GI Number: 20258951 NR Desc: putative chaperonin CPN10 protein
  misc_feature: Homolog of GI Number: 1519241 NR Desc: 10 kDa chaperonin
  misc_feature: Homolog of GI Number: 21554204 NR Desc: putative 10kd chaperonin
  misc_feature: Homolog of GI Number: 25300327 NR Desc: probable 10kd chaperonin
  misc_feature: Homolog of GI Number: 32401306 NR Desc: heat shock protein 10
  misc_feature: Homolog of GI Number: 47938870 NR Desc: Heat shock 10kD protein 1
  misc_feature: Homolog of GI Number: 68366462 NR Desc:  similar to Heat shock 10kD protein 1
  misc_feature: Homolog of GI Number: 66547447 NR Desc:  similar to ENSANGP00000011747
MAAIRRLIPSFNRVLVEKVVQPKKSAGGILLPETSKQLNSGKVIAVGPGSRDKEGKLIPVALKEGDHVLLPEYGGLEVKLAPEKEYLLYRDDDILGTLHE

SEQ ID NO: 5577 - DNA, 1487 bp, Zea mays
  misc_feature: Ceres CLONE ID no. 1062418
  misc_feature: Ceres CDNA ID no. 40351606
  CDS (258)..(860): REFERENCED BY SEQ ID NO: 5578
accagacgagagacgacctcccccctcccccgcattctctcacgccgcctgcgctctccccctcgcgagatagacaaccctagctcccgtctccttgcttaccctcctctccaacccctctccgatctctataaaagacccgaatttcgaattccccctcgaacccgcgatccgcgctttccttcccgcccatttcggtctctgattcggcgcggattcgctgcgcgggagcccccgaggttgcgtgcgtgattcggatggcggagccggggctcgagggcagccagccggtggatctgtccaagcacccctctggcatcgtccccacgctccagaatatcgtatcaacagttaatttggattgtaaacttgacctcaaagcaatagctttgcaagcacgaaatgcggagtataacccaaagcgttttgctgcagtcatcatgagaataagagaacccaaaaccacggcactgatatttgcatcgggtaaaatggtatgtactggagcgaagagtgaacagcaatccaagcttgcagcaaggaagtatgcccgcattattcagaaacttggttttccagctaagtttaaggattttaagattcagaatattgttggctcttgtgatgtcaagtttccaattaggcttgagggccttgcatattctcatggtgccttctcaagttacgaacccgaactctttcctggccttatctatcggatgaaacaaccaaagattgttcttttaatttttgtttcaggcaagattgttttgactggagcaaaggtgagagaggagacctacactgccttcgaaaacatctatcctgtactgtcagagtttagaaaaattcagcaatgatgacatgtgatgtgaaggtcacgttcttcaaattacaagcttcctcgaggattctcgtgtgaccatgaattctaaatgtacataaaagtctggcggaacttatagcatcctgtaatctctgtgagccgcggtctgtcagtattgggtgggcttgctgtggtaactggtggacatgtcgagttcatccatttgggtaggccttggtgaacacggacgccccacatcatgtctcagtttgagtagtttgtgtgaactgaagggtacgtgcttctcccatgtggttgcagcgttaacttgagtcaagtgctaacaagagtagataaaattttgccccagttcgtctttgtgacagtcttttaaagtcttttttctgagtatctttcaaagtgttttcagagtatcttccagtgtgctactgctgtgcgatgatgagaaggctggcactgtatgtaacgggggcaacgtgaccggttgtaagttatgtattgtagttgagatgctgtagcgcctagggcactgggattgaacttgtggaggaaccagtcagtcgaccgttctatttgtgtggccctctgctactgactaatgtggcctgttccaaatgtcgctgcaaaaaaaaaaaaaaaa

SEQ ID NO: 5578 - protein, 200 aa, Zea mays
  misc_feature: Ceres CLONE ID no. 1062418
  misc_feature: Ceres CDNA ID no. 40351606
  misc_feature (20)..(105): Pfam Name: TBP PFAM Desc: Transcription factor TFIID
MAEPGLEGSQPVDLSKHPSGIVPTLQNIVSTVNLDCKLDLKAIALQARNAEYNPKRFAAVIMRIREPKTTALIFASGKMVCTGAKSEQQSKLAARKYARIIQKLGFPAKFKDFKIQNIVGSCDVKFPIRLEGLAYSHGAFSSYEPELFPGLIYRMKQPKIVLLIFVSGKIVLTGAKVREETYTAFENIYPVLSEFRKIQQ

SEQ ID NO: 5579 - DNA, 688 bp, Zea mays
  misc_feature: Ceres CLONE ID no. 1062460
  misc_feature: Ceres CDNA ID no. 29191520
  CDS (62)..(490): REFERENCED BY SEQ ID NO: 5580
acgtctcgccttccgcagttgcagcaacagtctctcttctcactctctcgccgtcgcaaacatgggtaagacacgtggtatgggagctgggcgcaagctgaagaggcttaggattaaccagaggtgggctgacaagcagtacaagaagagtcaccaaggaaacgagtggaagaagccttttgctggttcttcccacgctaaaggaatcgtccttgagaagattggtattgaagctaagcagcctaactctgccatccgtaaatgtgctagagttcagttgatcaagaacggcaaaaagattgctgctttcgttcccaatgatggttgcttgaactacattgaagaaaacgatgaggtgttgattgctgggtttgggcgtaaaggacatgccgttggagatattcctggagttaggttcaaggtggtgaaggtgtctggtgtctcactcttggctcttttcaaggagaagaaggagaagcctaggtcttagagactactgttttttcaagcttattttgttaatggatttttgtttcttcatggcttgaagccattacctcttttctgcttcaaagattctcgaacatgtactagtggttgagttttaaacatggttttatctcatctgttttggattcagtttgcctaaagtattatacttacttcgaagctaaaaaaaaaaaaaaaa

SEQ ID NO: 5580 - protein, 142 aa, Zea mays
  misc_feature: Ceres CLONE ID no. 1062460
  misc_feature: Ceres CDNA ID no. 29191520
  misc_feature (9)..(141): Pfam Name: Ribosomal_S12 PFAM Desc: Ribosomal protein S12
  misc_feature: Homolog of GI Number: 21536723 NR Desc: putative 40S ribosomal protein S23
  misc_feature: Homolog of GI Number: 50919443 NR Desc: 40S ribosomal protein S23
  misc_feature: Homolog of GI Number: 1362041 NR Desc: ribosomal protein S23.e
  misc_feature: Homolog of GI Number: 6716785 NR Desc: 40s ribosomal protein S23
  misc_feature: Homolog of GI Number: 6682246 NR Desc: putative 40S ribosomal protein S23
  misc_feature: Homolog of GI Number: 55233795 NR Desc: ENSANGP00000012229
  misc_feature: Homolog of GI Number: 11121260 NR Desc: 40S ribosomal protein S23
  misc_feature: Homolog of GI Number: 30025641 NR Desc: 40S ribosomal protein S23
  misc_feature: Homolog of GI Number: 50344514 NR Desc: S23e ribosomal protein
  misc_feature: Useful for increasing chlorophyll and photosynthetic capacity
  misc_feature: Useful for making plants with altered leaf shape eg curled leaves
  misc_feature: Useful for making shorter plants
  misc_feature: Useful for sterility
MGKTRGMGAGRKLKRLRINQRWADKQYKKSHQGNEWKKPFAGSSHAKGIVLEKIGIEAKQPNSAIRKCARVQLIKNGKKIAAFVPNDGCLNYIEENDEVLIAGFGRKGHAVGDIPGVRFKVVKVSGVSLLALFKEKKEKPRS

SEQ ID NO: 5581 - DNA, 887 bp, Zea mays
  misc_feature: Ceres CLONE ID no. 1062481
  misc_feature: Ceres CDNA ID no. 29191303
  CDS (22)..(690): REFERENCED BY SEQ ID NO: 5582
acagagggagaagaagaagggatggcgcctatgaaggtgtacggctgggcggtgtcgccatggatggcgcgggtcctcgtctgcctggaggaggccggcgccgagtacgagctcgtgcccatgagccgcaacggcggcgaccaccgccgcccggagcacctcgccagaaaccccttcggcgagatcccggtgctggaggacggcgatctgacgctctaccaatcccgtgccatcgcaaggcatattctgcgcaaatgcaagcccgagtttctaggagcgggcagcctcaaggagtcggcgatggtggacgtatgggtcgacgtggatgcccaccagcttgagcccgtactcaagcccatcgtgtttaactgcatcatcaacccgttcgtcgggagggacgtcgaccagggcctcgtcgatgagagcgtcgagaagctcaagaagctgctggaggtgtacgaggcgaggctgtcaagcaacaagtacttggccggtgatttcgtcagcttcgccgacctcacccatttctccttcatgcgctatttcatggcgacggagcatgcagttgtgctcgatgcgtatccgcacgtaaaggcatggtgggaggcgctgctggcaaggccgtcggtcaagaaggtgatagctggcatgcctccagattttggattcgggagcgggaacataccatgataaggcatatgctttgtgtgcttgagatgctctaatcgtctctacccaacccacgagaaataaagtaagcaaagcgtgggtgtggatatgaaataacttgtttcggtgaattgttttctaataccaattagaattgattctcaaaaaaagtaagttcaaggtctatgccctcaaaaaaaagaaaaaaaaaaaaaaaa

SEQ ID NO: 5582 - protein, 222 aa, Zea mays
  misc_feature: Ceres CLONE ID no. 1062481
  misc_feature: Ceres CDNA ID no. 29191303
  misc_feature (4)..(77): Pfam Name: GST_N PFAM Desc: Glutathione S
  misc_feature (93)..(201): Pfam Name: GST_C PFAM Desc: Glutathione S
  misc_feature: Homolog of GI Number: 23504743 NR Desc: glutathione transferase F4
  misc_feature: Homolog of GI Number: 54290815 NR Desc: putative glutathione transferase F4
  misc_feature: Homolog of GI Number: 34914740 NR Desc: putative glutathione S
  misc_feature: Homolog of GI Number: 11177841 NR Desc: putative glutathione S
  misc_feature: Homolog of GI Number: 11385467 NR Desc: glutathione S
  misc_feature: Homolog of GI Number: 23504741 NR Desc: glutathione transferase F3
  misc_feature: Homolog of GI Number: 23504739 NR Desc: glutathione transferase F2
  misc_feature: Homolog of GI Number: 695789 NR Desc: glutathione transferase
  misc_feature: Homolog of GI Number: 18479038 NR Desc: glutathione transferase
  misc_feature: Homolog of GI Number: 22022400 NR Desc: glutathione
  misc_feature: Useful for delaying flowering time
  misc_feature: Useful for making bigger plants
  misc_feature: Useful for making ornamental plants with modified leaves
  misc_feature: Useful for making plants with increased biomass and foliage
MAPMKVYGWAVSPWMARVLVCLEEAGAEYELVPMSRNGGDHRRPEHLARNPFGEIPVLEDGDLTLYQSRAIARHILRKCKPEFLGAGSLKESAMVDVWVDVDAHQLEPVLKPIVFNCIINPFVGRDVDQGLVDESVEKLKKLLEVYEARLSSNKYLAGDFVSFADLTHFSFMRYFMATEHAVVLDAYPHVKAWWEALLARPSVKKVIAGMPPDFGFGSGNIP

SEQ ID NO: 5583 - DNA, 435 bp, Zea mays
  misc_feature: Ceres CLONE ID no. 1062503
  misc_feature: Ceres CDNA ID no. 40351607
  CDS (72)..(317): REFERENCED BY SEQ ID NO: 5584
aggttgataaaagcacctcatccccctgcatatactaaccctgcaaaactgaagggtgatagcaaaatacaatgaggattgtgtacatggcagctgttatgtgtttggttcttgcaaccatgtcttctacctccccatcattctgccaagctgggggctgcatcggctgcccacgggctccaccaccgccgtccgatgagacatgctacgaggacctcaagtgttcggcttcgaggtgccacctgggttgcatacacaggggctacaagggtacgggttcgtactgccgtgggagggactgctgctgcaaacattgatgcaccgtagtgcatctatgcatttcatgaccatacaataaacctagatgtgtatcctttgcctccgacgactataaatgaaatgaaatactactaaggttcaaaaaaaaaaaaaaaa

SEQ ID NO: 5584 - protein, 81 aa, Zea mays
  misc_feature: Ceres CLONE ID no. 1062503
  misc_feature: Ceres CDNA ID no. 40351607
MRIVYMAAVMCLVLATMSSTSPSFCQAGGCIGCPRAPPPPSDETCYEDLKCSASRCHLGCIHRGYKGTGSYCRGRDCCCKH

SEQ ID NO: 5585 - DNA, 1893 bp, Zea mays
  misc_feature: Ceres CLONE ID no. 1062559
  misc_feature: Ceres CDNA ID no. 36590057
  CDS (445)..(1449): REFERENCED BY SEQ ID NO: 5586
acgcgctgttatgttcccagttctctctctctcttgcccatcccccacctcggctggctcagctcagctcctaaacccgcacctacctctctgcctgctgccccggcccctgatcctgatttccccaatcgagagtccgagacccgagaggaggcacaggcacctgcgctagctgcagctgcaaatcgtcttccccagatccggcgccgcctagttcgctcctgctcgcgacagcgcccagagccgtccgcgtgcgcccgcagagatcgtttcggggacagccgagcagagcagagcagagcagagctgactctgccgcttgttgcccgttcttggctgctgttgctggcgagagcgcgcaggaggagcggctgatttttgattctctctgtccctccctccctcgcttcgctcgcgcggggtgcgtgcacgtaccatgagaagatgatgcgcgccaggcccaaaggtacattcgccgacgcgatgagggagagctcccctcctcctcctccccctccggctccggcttcggcagcggtgaaagaggacgagtgggaggtgcggcccggcgggatgctggtgcagaagcggagccccgacgccgacgcccccgccggggcgcccgtccccaccatccgcgtcaaggtcaagttcaacggcatgtaccacgagatctacatcaactcccaggcctccttcggtgagctgaagaagatgctgtcggcgcggaccgggctgcaccccgaggaccagaagctggtgtacaaggacaaggagcgggactccaaggcgttcctggacatggccggcgtcaaggaccgctccaagatggtgctgctcgaggaccccgccgcgcaggccaagcgcctcctcgagcagcgccgcaccgacaaggcggagcgcgccgccaagtccatctcccgcatcggcctcgacgtcgacaagctcgccaccaaggtgtcggcgctggaggccatcgtcagcaagggcggcaaggtggtggacgctgacgtggtcgccctcaccgaggcgctcatgaacgagctggtcaagctggactccatcgccgccgacggcgaagtcaaggtgcagcgacgaatgcaggagaagcgggtgcagaagtacgtggagacgctggacgctatccgcgccaagaacgcggcggcgcccaaggccaaggccaaggccaacggcgacatgaatgggcacgccaaggcccgcgcgccgcaactcccgccgcgcccgccgcccgtgtcgcagaggcggaacttccagcagccctccccggcgccagcgccgcccacgcagggctgggagtcgttcgacctgctgtcgtcggtgccgtccacgtcctcggccaccgtgaccaccaccatggcggccgcgaccaccaccacctcgccggccggcgtctccccgatcccgcggttcgactgggagctcttctgaagccctccctcctcgcggcgcgtcggcgtgccggttggtcgatcagacggtacctacctcccttgtccatggatcttccctgctctcatcagtagtgccattgtttcttctgtggattctttccatttcttttcgcctcattctctcttcttttcttccatttcctttcgaatttgtatatctactatatgtctacaaaaagaacagagagaccgacgcggtgcggtgagtgtgttcactgggtcaaaagtccgtcagttgacaactcctcctcgtgaggatccatccatgcatgttgttcagtcacagcaaataagtggtggtcttattatgatggcgatgaagaagttttcatgacagtacacacacatataaatagcatgtatattttggtaacatttatttatacgcttgtgtatggttacgataaaaaaaaaaaaaaaa

SEQ ID NO: 5586 - protein, 334 aa, Zea mays
  misc_feature: Ceres CLONE ID no. 1062559
  misc_feature: Ceres CDNA ID no. 36590057
  misc_feature (154)..(235): Pfam Name: BAG PFAM Desc: BAG domain
  misc_feature (63)..(113): Pfam Name: PB1 PFAM Desc: PB1 domain
  misc_feature: Homolog of GI Number: 50948201 NR Desc: putative BAG domain containing protein
  misc_feature: Homolog of GI Number: 34898024 NR Desc: BAG domain containing protein
  misc_feature: Homolog of GI Number: 30697630 NR Desc: BAG domain
  misc_feature: Homolog of GI Number: 30697627 NR Desc: BAG domain
  misc_feature: Homolog of GI Number: 56785103 NR Desc: ubiquitin
  misc_feature: Homolog of GI Number: 50925249 NR Desc: OSJNBb0011N17.22
  misc_feature: Homolog of GI Number: 67987177 NR Desc: 4Fe
  misc_feature: Homolog of GI Number: 55243783 NR Desc: ENSANGP00000017440
MMRARPKGTFADAMRESSPPPPPPPAPASAAVKEDEWEVRPGGMLVQKRSPDADAPAGAPVPTIRVKVKFNGMYHEIYINSQASFGELKKMLSARTGLHPEDQKLVYKDKERDSKAFLDMAGVKDRSKMVLLEDPAAQAKRLLEQRRTDKAERAAKSISRIGLDVDKLATKVSALEAIVSKGGKVVDADVVALTEALMNELVKLDSIAADGEVKVQRRMQEKRVQKYVETLDAIRAKNAAAPKAKAKANGDMNGHAKARAPQLPPRPPPVSQRRNFQQPSPAPAPPTQGWESFDLLSSVPSTSSATVTTTMAAATTTTSPAGVSPIPRFDWELF

SEQ ID NO: 5587 - DNA, 597 bp, Zea mays
  misc_feature: Ceres CLONE ID no. 1062596
  misc_feature: Ceres CDNA ID no. 29191304
  CDS (55)..(396): REFERENCED BY SEQ ID NO: 5588
accgctttttcctcctcctcctcctcctcctcttccaccccagagtccagagctatggcgctcgccaaggccaaggagatcgtcgcctccgctcccgtcgtcgtcttcagcaagtcttactgccctttctgcgtacaagtgaagaagttgttcacgcagctgggagcaagtttcaaggccattgagttggacactgaaagcgatggaactgagattcagtcagctcttgctgaatggactgggcagaggactgttcccaatgtcttcatcaatggaaaacacattggtggctgtgacgatactattgcactgaacaagggagggaagctggttgctctgctgacggaggctggagcgatctcgggttcttcttcgaagaccactgtcactgcttagctctgtttgcgagttgtcgtgatcgacatgttagtgtgttacatgtgttgcatcgttcccgtgtcatgaaataacgtagttggatatgtttggcaagttcagggcttgttgctgtctagtatttctgcagtaaatgtctttgtgtaaaactcgttggaaataaatcaaattatgtcggcgataccaaaaaaaaaaaaaaaa

SEQ ID NO: 5588 - protein, 113 aa, Zea mays
  misc_feature: Ceres CLONE ID no. 1062596
  misc_feature: Ceres CDNA ID no. 29191304
  misc_feature: The plant produces a reduced number of seeds.
  misc_feature: Useful for biocontainment applications
  misc_feature (14)..(96): Pfam Name: Glutaredoxin PFAM Desc: Glutaredoxin
  misc_feature: Homolog of GI Number: 32401362 NR Desc: glutaredoxin
  misc_feature: Homolog of GI Number: 50926342 NR Desc: OSJNBa0043L24.17
  misc_feature: Homolog of GI Number: 485953 NR Desc: glutaredoxin
  misc_feature: Homolog of GI Number: 20141083 NR Desc: glutaredoxin
  misc_feature: Homolog of GI Number: 15637350 NR Desc: glutaredoxin
  misc_feature: Homolog of GI Number: 50910559 NR Desc: putative glutaredoxin
  misc_feature: Homolog of GI Number: 21592438 NR Desc: glutaredoxin
  misc_feature: Homolog of GI Number: 3850778 NR Desc: gluaredoxin
  misc_feature: Homolog of GI Number: 1076561 NR Desc: glutaredoxin
  misc_feature: Homolog of GI Number: 1732424 NR Desc: glutaredoxin
  misc_feature: Useful for sterility
MALAKAKEIVASAPVVVFSKSYCPFCVQVKKLFTQLGASFKAIELDTESDGTEIQSALAEWTGQRTVPNVFINGKHIGGCDDTIALNKGGKLVALLTEAGAISGSSSKTTVTA

SEQ ID NO: 5589 - DNA, 1063 bp, Zea mays
  misc_feature: Ceres CLONE ID no. 1062651
  misc_feature: Ceres CDNA ID no. 36695914
  CDS (86)..(820): REFERENCED BY SEQ ID NO: 5590
agcgcgactactgctccgaagcgcctccctgctccccctccgccgctcgcccctgcactcgtcccgcttccagccccgagccgccatggcctccgatgccgccagccagttccagaagatccagatccagcgcgaggacacgacgtttgatgcctatgttgttggcaaagaaaacgctcctggagttgtagtgttgcaagagtggtggggtgttgactatgaggtcaagaatcatgccatccatatttcccagatcggcgatggatacagagcacttattccagatttgtaccgtgggaaggttgctttggaggtagctgaagcacaacatctgatggaaggactagactggcagggtgcaatcaaggatattcaggcttcagttaaatggctgaaggaaaatggatcacccaaggttggtgttactggttattgcatgggaggtgctttggcaattgcaagtggagttttggtcccagaggttgatgctgttgttgctttctacgggacgccatcttcggagcttgctgatgcttccaaggcccaggctccaatccaggctcattttggggagcttgacagttttgttgggtttgcagatgttaccgcggccaagtcgttggaggagaagctcaaggcttctggagtggcacatgaagtccacatataccctggatgctcacatgccttcatgaacgcatcgcctgaggccgtcaagaggaggaagggcatgggtttgactgatgagaatcagggagccattgacctggcatggtcccgcttctccacttggatgggtcgtttcctgggatctgcatgagccattaccatatcttccatatggtctctgaatgatgtatgggcgtgtgtcggctcggaagaataaaatgtttgggcgcaatatgtagccagtgcccaatctagacacgcagtgtgtttgtgttagtagtactatattccaactcgtcattgttttgccagaatatcttgaggtacttgattggagtggaaatgaagcacttacacttgcgactttgcgagcatgtcaaaaaaaaaaaaaaaa

SEQ ID NO: 5590 - protein, 244 aa, Zea mays
  misc_feature: Ceres CLONE ID no. 1062651
  misc_feature: Ceres CDNA ID no. 36695914
  misc_feature (181)..(204): Pfam Name: Abhydrolase_3 PFAM Desc: alpha/beta hydrolase fold
  misc_feature: Homolog of GI Number: 34913460 NR Desc: putative carboxymethylenebutenolidase
  misc_feature: Homolog of GI Number: 30102612 NR Desc: At2g32520
  misc_feature: Homolog of GI Number: 21554208 NR Desc: putative carboxymethylenebutenolidase
  misc_feature: Homolog of GI Number: 48788766 NR Desc: COG0412: Dienelactone hydrolase and related enzymes
  misc_feature: Homolog of GI Number: 17549558 NR Desc: PUTATIVE TRANSMEMBRANE PROTEIN
  misc_feature: Homolog of GI Number: 67548540 NR Desc: Carboxymethylenebutenolidase
  misc_feature: Homolog of GI Number: 83747451 NR Desc: Usf protein
  misc_feature: Homolog of GI Number: 72610091 NR Desc: Carboxymethylenebutenolidase
  misc_feature: Homolog of GI Number: 41723491 NR Desc: COG0412: Dienelactone hydrolase and related enzymes
  misc_feature: Homolog of GI Number: 67667666 NR Desc: Carboxymethylenebutenolidase
MASDAASQFQKIQIQREDTTFDAYVVGKENAPGVVVLQEWWGVDYEVKNHAIHISQIGDGYRALIPDLYRGKVALEVAEAQHLMEGLDWQGAIKDIQASVKWLKENGSPKVGVTGYCMGGALAIASGVLVPEVDAVVAFYGTPSSELADASKAQAPIQAHFGELDSFVGFADVTAAKSLEEKLKASGVAHEVHIYPGCSHAFMNASPEAVKRRKGMGLTDENQGAIDLAWSRFSTWMGRFLGSA

SEQ ID NO: 5591 - DNA, 753 bp, Glycine max
  misc_feature: Ceres CLONE ID no. 1062875
  misc_feature: Ceres CDNA ID no. 25891106
  CDS (87)..(518): REFERENCED BY SEQ ID NO: 5592
atcgcaactcgcagcagttcaatacttgcacaaccatacacatcacacatcacctgtagatcgaccggtgcacgtaaggcgcgacaatggagtaccaggggcagaccggccacgccaccgacaaggtggaggagtacggccagcccgtggccgggcacggcggcgccaccgacggccccacggggacgcacggcgccgcagccgccgcgggcaccgggcagctccagccgaccagggacgaccacaagaccgacggtgtcctgcgccgctccggcagctccagctccagctcgtctgaggacgacggcgttggcgggaggaggaagaaggggatgaaggagaagatcaaggagaagctccccggcggagcccacaaggacgccaccgggcagcagcacacgccggcggccggcgagtacgccggcaccggcaccggcacccacggcgcggaggccaccggcgagaagaagggcgtcatggacaagatcaaggagaagcttcccggcggacagcactaagttaagctaggcagctagcgatcgccctgtgctgtgtctgtgttcggtcaaagctcggtatcatgcgtacttctgcatgcgttcgtacggataaataatgggcgccgatcgaggtgccggagtatatatgttgtgtgtgtgacgtatttgtggaccccgtgtacatgtatttgtactgaagtgctaaaaccccatcgtaataaagcgctcgtttatatcaaaaaaaaaaaaaaaa

SEQ ID NO: 5592 - protein, 143 aa, Glycine max; identical to SEQ ID NO: 5132
  misc_feature: Ceres CLONE ID no. 1062875
  misc_feature: Ceres CDNA ID no. 25891106
  misc_feature (11)..(143): Pfam Name: Dehydrin PFAM Desc: Dehydrin
  misc_feature: Homolog of GI Number: 6017930 NR Desc: dehydrin
  misc_feature: Homolog of GI Number: 18968 NR Desc: dehydrin
  misc_feature: Homolog of GI Number: 4105105 NR Desc: dehydrin 2
  misc_feature: Homolog of GI Number: 18966 NR Desc: dehydrin
  misc_feature: Homolog of GI Number: 296198 NR Desc: dehydrin 7
  misc_feature: Homolog of GI Number: 59894261 NR Desc: dehydrin 1
  misc_feature: Homolog of GI Number: 59894257 NR Desc: dehydrin 1
  misc_feature: Homolog of GI Number: 59894275 NR Desc: dehydrin 1
  misc_feature: Homolog of GI Number: 59894243 NR Desc: dehydrin 1
  misc_feature: Homolog of GI Number: 59894265 NR Desc: dehydrin 1

SEQ ID NO: 5593 - DNA, 775 bp, Glycine max
  misc_feature: Ceres CLONE ID no. 1062950
  misc_feature: Ceres CDNA ID no. 25447146
  CDS (33)..(422): REFERENCED BY SEQ ID NO: 5594
cttctttgtattgagcgtggagaaagagaaagatgatgaggttaaggtggagtttagtcgtaacggtcacgttcgctgttttgctgttttggattggatcgctgcaagttcaagcctctaattctgtttccgccttcgttcaaaacgccatctactccaacagaatcgccgttttctccaaatcctattgcccctactgtttgcgcgccaaacgcttgcttgctgagctcaatgagaaaccgtttgtggtggagctcgatttgcgagatgatgggtatcaaattcagagtgttcttctggatttgataggtagaaggacagtcccgcaagtatttgtgaatggcaaacatattggtggatcagatgatctcagtgctgccgtccaaagtggtgaattgcagaaacttctcagtgcaagttgatggtgtactagagatttacgagcactgacatccttcatggacaatgaagttgtcaagcttttagaagcataatatgttttgatgcctttttagttttctgggtatttaggtgacagcgcgtattctttagaggaataggatgtcattctgcttaaaatcagcttgaattcttcacatggaaatgtaggactcttgaaaggttgagctctaaaacatagaatccgagctctaattggtatattctacttgtttttatatttttttctggtttaacagttgattaatagtgaatttcaatgtggttgctcgtatcttacaaaaaaaaaaaaaaaaaaaaaaaaaaaaaaaaaaaa

SEQ ID NO: 5594 - protein, 128 aa, Glycine max
  misc_feature: Ceres CLONE ID no. 1062950
  misc_feature: Ceres CDNA ID no. 25447146
  misc_feature (43)..(125): Pfam Name: Glutaredoxin PFAM Desc: Glutaredoxin
  misc_feature: Homolog of GI Number: 2995953 NR Desc: glutaredoxin I
  misc_feature: Homolog of GI Number: 20465465 NR Desc: putative glutaredoxin protein
  misc_feature: Homolog of GI Number: 50911236 NR Desc: putative glutaredoxin I
  misc_feature: Homolog of GI Number: 6735386 NR Desc: glutaredoxin
  misc_feature: Homolog of GI Number: 21536938 NR Desc: glutaredoxin
  misc_feature: Homolog of GI Number: 19548658 NR Desc: glutaredoxin
  misc_feature: Homolog of GI Number: 52077363 NR Desc: putative glutaredoxin
  misc_feature: Homolog of GI Number: 33519160 NR Desc: glutaredoxin
  misc_feature: Homolog of GI Number: 19922712 NR Desc: CG7975
  misc_feature: Homolog of GI Number: 58377313 NR Desc: ENSANGP00000012664
MRLRWSLVVTVTFAVLLFWIGSLQVQASNSVSAFVQNAIYSNRIAVFSKSYCPYCLRAKRLLAELNEKPFVVELDLRDDGYQIQSVLLDLIGRRTVPQVFVNGKHIGGSDDLSAAVQSGELQKLLSAS

SEQ ID NO: 5595 - DNA, 701 bp, Glycine max
  misc_feature: Ceres CLONE ID no. 1063023
  misc_feature: Ceres CDNA ID no. 40351608
  CDS (90)..(341): REFERENCED BY SEQ ID NO: 5596
aattagctcacgaccacgcacctacataactaaataatcttatgcataacaatttcacaagtgttattttgcgttaattttcttcagttatgagggtgaacacagagtttgagcgtgttcttaagtattttgatgaggatggggatggtaagatttccccatctgagctcaggaaccggctaggcatgatgggtggtgtgttattgttcaaagacgctgaaaagttgattgaggaattggattctgacggtgatgggtttttgagtttggaagattttgtgaagataatggagatgaagaagccactgtcttgcaaggctgtgcctagggtttctgtttaggtttatgtgtgttgttgggttgagttggtttggtttgtctgcttaggtttgtggatgttgttcccaaggctgtgcctagggtttctgtttaggtttatgtgtgttgtttggtttgtctgtttaggtttatggatgttgtttggttgagttggtttggtttgtgttatctgctaagtttagttcaagaaaagtagggtttagagcacctttttattaatcgctaggggttgttattccgtgtacggtttgtagtaagttgtaaaagactagaagagaatgtaagaggttttgttttgtgtgggtcgttaattaagtgtatttgcagcagtttgatcatgccgtccaaaaaaaaaaaaaaaa

SEQ ID NO: 5596 - protein, 83 aa, Glycine max
  misc_feature: Ceres CLONE ID no. 1063023
  misc_feature: Ceres CDNA ID no. 40351608
  misc_feature (42)..(70): Pfam Name: efhand PFAM Desc: EF hand
MRVNTEFERVLKYFDEDGDGKISPSELRNRLGMMGGVLLFKDAEKLIEELDSDGDGFLSLEDFVKIMEMKKPLSCKAVPRVSV

SEQ ID NO: 5597 - DNA, 1188 bp, Glycine max
  misc_feature: Ceres CLONE ID no. 1063063
  misc_feature: Ceres CDNA ID no. 40351609
  CDS (108)..(887): REFERENCED BY SEQ ID NO: 5598
atcagtcacaaagccaaagcaaaagccacaagccaagaaccaatacttgatctgttgttttctttagctcccggaagaccttttagctgcaccgatcgatctcgatcatggaggatgagaggagcacccagtcataccagggaggtgaggccgccgagcaggtggaggtgacagacaggggcctcctcggcaacctcctcggcaagaagaaggcggaggaggacaaggagaagcaggaggagctggtcaccggcatggagaaggtctccgtggaagagcccgaggttaagaaggaggagcacgaggatggcgagaagaaggagaccctcttctccaagctgcaccgatccagctccagctccagctcgtctagtgacgaggaagaggaggaggtgatcgatgacaacggtgaggtgatcaagaggaagaagaagaagggtctcaaggagaagctcaaggagaagctgcccggccacaaggacaccgagggtgagcacgtgacgggcctacccgcaccggcggcccccgcgtctgtgcagacccaccatgacaccgacgtcgtcgtcgaaaagatcgacggtgacgtgaagacagaggcggcaccggcagtgcccgaggaggagaagaaaggcttcttggaaaagatcaaggagaagctgcccggcggccacaagaaaccggaggacgctgctccggtgcccgtcacgcacgctgctccagcaccagtgcacgcgccggcgccagccgccgaggaggtgagcagccctgacgcgaaggagaagaagggcctactgggcaagatcatggacaagctgcctggttaccacaagacaggggaggaggacaaggccgccgccgctgcaggcgagcacaagcccagcgcttgatcgccgccgtgcccgagactcgtgaccggacctcgattgaattgttggcgtgtgttgtgtttgctttacgttaagttggtgtcaaggtgggaggggttgatcgtctttgaaggttcggtccgtgaagcccgttcagtgacggatgcttgtgtttcagtttggttcagagtcaggtcctggatgttgttaagtttgtttacttattatgggcgcttgtgtattggttatttgctgggcattatgccttgatattaaagatttccgcccagtacatattgttgcattttgtaaaaaaaaaaaa

SEQ ID NO: 5598 - protein, 259 aa, Glycine max
  misc_feature: Ceres CLONE ID no. 1063063
  misc_feature: Ceres CDNA ID no. 40351609
  misc_feature (21)..(255): Pfam Name: Dehydrin PFAM Desc: Dehydrin
MEDERSTQSYQGGEAAEQVEVTDRGLLGNLLGKKKAEEDKEKQEELVTGMEKVSVEEPEVKKEEHEDGEKKETLFSKLHRSSSSSSSSSDEEEEEVIDDNGEVIKRKKKKGLKEKLKEKLPGHKDTEGEHVTGLPAPAAPASVQTHHDTDVVVEKIDGDVKTEAAPAVPEEEKKGFLEKIKEKLPGGHKKPEDAAPVPVTHAAPAPVHAPAPAAEEVSSPDAKEKKGLLGKIMDKLPGYHKTGEEDKAAAAAGEHKPSA

SEQ ID NO: 5599 - DNA, 1053 bp, Glycine max
  misc_feature: Ceres CLONE ID no. 1063112
  misc_feature: Ceres CDNA ID no. 24766020
  CDS (54)..(899): REFERENCED BY SEQ ID NO: 5600
gtctatattcattttgccgagtgcgagagaaagagtcaggtgagtgagagaaaatggagaatgggctaagcgagatcggaagcacgaagatgttcgatggctacaacaaaagatacaaacacaacagtgagacacttggctgttccatgactttctccatctacttccctccttcctcccacagatcccctgttctttactggctttctgggctcacctgtacagacgagaacttcatcatcaagtccggagctcaacgtgctgcttctactcacggcattgctctcgttgttccagatacttctccaagaggacttaatattgaaggtgaagcagacagttacgacttcggtgtaggagctggattctacctcaatgctactcaggaaaagtggaagaactggcgtatgtatgactatgttgtcaaagagctgcctaaactcctgagtgagaattttcctcagcttgacacaacaagagcttctatctctggacattccatgggtggacatggtgctcttactatttacctcaagaacctcgacaagtataagtctgtctctgcgtttgcaccaatcgccaatcccataaattgcccatggggacagaaagcattcactaattatctaggtgacaacaaggctgcttgggaggaatacgatgccacttgtcttatttcaaagttcaacaatctctctgccacaattctaattgatcagggagaaaacgaccagttctaccctgatcagttactgcccaacaagtttgaagaggcgtgcaagaaagtgaatgcgccgctcttagtgcgtctgcagccaggatacgaccactcctactactttattgcaactttcatcgaagaccacatcagtcaccatgttcaagcccttgagttgtagctcagctaggcatcatccagctttgcctttgtccaaatattagtagcaagtgaacttgtaacgttttgtgttcaataactgctctgtgtggtgtgtttgtctacaataataaaataaattaaatctccaatttattgtaaaaaaaaaaaaaaaa

SEQ ID NO: 5600 - protein, 281 aa, Glycine max
  misc_feature: Ceres CLONE ID no. 1063112
  misc_feature: Ceres CDNA ID no. 24766020
  misc_feature: The plant is abnormally small.
  misc_feature: null
  misc_feature: Useful for making plants with altered cell wall content and/or composition
  misc_feature: Useful for making plants with modulated biomass
  misc_feature (17)..(274): Pfam Name: Esterase PFAM Desc: Putative esterase
  misc_feature: Homolog of GI Number: 21593226 NR Desc: putative esterase D
  misc_feature: Homolog of GI Number: 57900400 NR Desc: putative S
  misc_feature: Homolog of GI Number: 50904405 NR Desc: putative esterase D
  misc_feature: Homolog of GI Number: 34874491 NR Desc: similar to esterase 10
  misc_feature: Homolog of GI Number: 62661724 NR Desc:  similar to esterase D/formylglutathione hydrolase
  misc_feature: Homolog of GI Number: 76631393 NR Desc:  similar to esterase D/formylglutathione hydrolase isoform 5
  misc_feature: Homolog of GI Number: 51895957 NR Desc: MGC84363 protein
  misc_feature: Homolog of GI Number: 51593227 NR Desc: MGC85439 protein
  misc_feature: Homolog of GI Number: 33413400 NR Desc: esterase D/formylglutathione hydrolase
  misc_feature: Useful for delaying flowering time
  misc_feature: Useful for increasing chlorophyll and photosynthetic capacity
  misc_feature: Useful for making ornamental plants with modified leaves
  misc_feature: Useful for making plants with altered leaf shape eg curled leaves
  misc_feature: Useful for making plants with increased biomass
  misc_feature: Useful for making plants with increased biomass and foliage
  misc_feature: Useful for making shorter plants
  misc_feature: Useful for making shorter plants and plants with modified flowers
  misc_feature: Useful for making smaller plants
MENGLSEIGSTKMFDGYNKRYKHNSETLGCSMTFSIYFPPSSHRSPVLYWLSGLTCTDENFIIKSGAQRAASTHGIALVVPDTSPRGLNIEGEADSYDFGVGAGFYLNATQEKWKNWRMYDYVVKELPKLLSENFPQLDTTRASISGHSMGGHGALTIYLKNLDKYKSVSAFAPIANPINCPWGQKAFTNYLGDNKAAWEEYDATCLISKFNNLSATILIDQGENDQFYPDQLLPNKFEEACKKVNAPLLVRLQPGYDHSYYFIATFIEDHISHHVQALEL

SEQ ID NO: 5601 - DNA, 481 bp, Glycine max
  misc_feature: Ceres CLONE ID no. 1063122
  misc_feature: Ceres CDNA ID no. 40351610
  CDS (2)..(319): REFERENCED BY SEQ ID NO: 5602
cctcattctagccaggcgagagcaaaaggtagggtttccagttgcgcgccgccgccgccgccgccatgggacactcgaacgtctggaactcgcaccccaagaactacggccccggatccagggtttgccgtgtctgcggcaactcgcatggcctgatccgcaagtacgggctgatgtgctgcaggcagtgcttccgcagcaacgccaaggacattggcttcatcaagtaccgttaagaatggaaacctcaaaggaagcaaggactaggaaattatcaacgaactgtggtgcttcatcgaggctgatctttatcctataagctatgtaatggactactattatgtttgaatcctggtgacaaaaccgtgaaaccatgttagcgactgctgtttgagcatgtgaaaccgataattctgttactgcgtgccattatggttagaaggttgctctgcatccttatatttcaaaaaaaaaaaaaaaa

SEQ ID NO: 5602 - protein, 56 aa, Glycine max; identical to SEQ ID NO: 3616
  misc_feature: Ceres CLONE ID no. 1063122
  misc_feature: Ceres CDNA ID no. 40351610
  misc_feature (3)..(56): Pfam Name: Ribosomal_S14 PFAM Desc: Ribosomal protein S14p/S29e

SEQ ID NO: 5603 - DNA, 644 bp, Glycine max
  misc_feature: Ceres CLONE ID no. 1063306
  misc_feature: Ceres CDNA ID no. 40351611
  CDS (3)..(572): REFERENCED BY SEQ ID NO: 5604
acaccgcaaagcaatcttctcttcacttcaaaacacccgagcaaacctctccgatctcccatcccggcgccccccgctcctcccgcgatggcccgcacgaagcagacggcgcgcaagtccaccggcggcaaggccccgcggaagcagctggcgaccaaggcggcgcgcaagtcggccccggcgaccggcggcgtgaagaagccgcaccgcttccgcccgggcaccgtcgcgctgcgcgagatccgcaagtaccagaagagcacggagctgctcatccgcaagctccccttccagcgcctggtccgggagatcgcgcaggacttcaagaccgacctccgcttccagagctccgccgtctccgccctgcaggaggccgccgaggcctacctcgtcggcctcttcgaggacaccaacctctgcgccatccacgccaagcgcgtcaccatcatgcccaaggacatccagcttgcccgccgcatccgcggggagcgcgcctaggcgcctcgcttgccattgctaggtgtttaggatctgttcccgtcgtgttccatatctgcgtcgttcctgtgtaactagcttgttgctgtgcttcgatgctttcaatgaaatatggttaccagtatgagacaaaaaaaaaaaaaaaa

SEQ ID NO: 5604 - protein, 136 aa, Glycine max; identical to SEQ ID NO: 588
  misc_feature: Ceres CLONE ID no. 1063306
  misc_feature: Ceres CDNA ID no. 40351611
  misc_feature (58)..(134): Pfam Name: Histone PFAM Desc: Core histone H2A/H2B/H3/H4

SEQ ID NO: 5605 - DNA, 750 bp, Glycine max
  misc_feature: Ceres CLONE ID no. 1063390
  misc_feature: Ceres CDNA ID no. 29191305
  CDS (124)..(582): REFERENCED BY SEQ ID NO: 5606
acattctctctctggaaggttcgtctattccggacgcaataaacctgcccgaagcgactggcgggtagagtgcgtgcgtacgtgagccctagcgggttcgaggaggcagcgccggcggcggagatgtcgacgccgtcgagaaagcgcctgatgcgggacttcaagcggctgcagcatgacccaccggccgggatcagcggcgcgccgcacgacaacaacatcatgctctggaacgccgtcatcttcgggccggatgatacgccatgggacggaggcacgttcaagcttaccttgcagtttacagaagattaccccaacaagccgccaactgttcgttttgtctctaggatgtttcacccaaatatttatgcagatgggagcatctgcttggatattctacagaatcagtggagccctatatatgacgttgctgccatattgacttctattcagtccttgctgtgtgatccaaaccccaactctccagcaaattcggaagctgccagaatgttcagcgagaacaagcgagagtacaaccgcaaagtccgcgagatcgtggagcagagctggactgctgactaaggcagggcgaggcggccgctgctagaaagttgcaataagcaaccatgaaacctttgtttagggctctctatagttgcttctcagatgaaatattaaacatctccagtgattgcttgcaggtcaaacctcaaagtatcttttgtctccgtggcaaaaaaaaaaaaaaaa

SEQ ID NO: 5606 - protein, 152 aa, Glycine max; identical to SEQ ID NO: 4250
  misc_feature: Ceres CLONE ID no. 1063390
  misc_feature: Ceres CDNA ID no. 29191305
  misc_feature (8)..(145): Pfam Name: UQ_con PFAM Desc: Ubiquitin
  misc_feature: Homolog of GI Number: 50934403 NR Desc: OsRad6
  misc_feature: Homolog of GI Number: 50919097 NR Desc: ubiquitin carrier protein
  misc_feature: Homolog of GI Number: 136640 NR Desc: Ubiquitin
  misc_feature: Homolog of GI Number: 13516451 NR Desc: ubiquitin
  misc_feature: Homolog of GI Number: 56236462 NR Desc: ubiquitin carrier protein
  misc_feature: Homolog of GI Number: 464980 NR Desc: Ubiquitin
  misc_feature: Homolog of GI Number: 8118527 NR Desc: ubiquitin conjugating protein
  misc_feature: Homolog of GI Number: 13516453 NR Desc: ubiquitin
  misc_feature: Homolog of GI Number: 83283991 NR Desc: ubiquitin carrier
  misc_feature: Homolog of GI Number: 52851176 NR Desc: Ubiquitin

SEQ ID NO: 5607 - DNA, 680 bp, Zea mays
  misc_feature: Ceres CLONE ID no. 1063698
  misc_feature: Ceres CDNA ID no. 40351612
  CDS (27)..(500): REFERENCED BY SEQ ID NO: 5608
aagcaaattagcacaccgccgcaaagatgcagatctttgtgaaaacccttacgggaaaaacaatcaccctcgaggtcgagtcctccgacaccatcgacaatgtcaaggccaagatccaggacaaggaaggcatccctcccgaccagcagcgactgattttcgccgggaagcagctcgaagacggccgcacgctcgccgactacaacatccagaaggagtcgacgcttcatctcgtcctccgtctccgtggtggcgcgaagaagaggaagaagaagacgtacaccaagcccaagaagatcaagcacaagcacaagaaggtgaagctcgccgtactccagttctataaggtcgatgggtccggcaaggtgcagaggctgaggaaggagtgtcctaacgcgacttgcggtgcggggactttcatggcgagtcacttcgatcgtcactactgtggtaagtgtgggcttacctatgtttaccagaaggagggagccgaggcgtgatttatcgaaccggttgattgatgatctctctcgatttcggtttggtagttttataagcgttttttgtcttattatgtaatggattcgttgttgaactgcttttggtctggatttcgttttttaattatgttggaactttgattagtctaaaatacatttcttgcaaaaaaaaaaaaaaaa

SEQ ID NO: 5608 - protein, 157 aa, Zea mays
  misc_feature: Ceres CLONE ID no. 1063698
  misc_feature: Ceres CDNA ID no. 40351612
  misc_feature (1)..(74): Pfam Name: ubiquitin PFAM Desc: Ubiquitin family
  misc_feature (101)..(147): Pfam Name: Ribosomal_S27 PFAM Desc: Ribosomal protein S27a
MQIFVKTLTGKTITLEVESSDTIDNVKAKIQDKEGIPPDQQRLIFAGKQLEDGRTLADYNIQKESTLHLVLRLRGGAKKRKKKTYTKPKKIKHKHKKVKLAVLQFYKVDGSGKVQRLRKECPNATCGAGTFMASHFDRHYCGKCGLTYVYQKEGAEA

SEQ ID NO: 5609 - DNA, 720 bp, Zea mays
  misc_feature: Ceres CLONE ID no. 1063700
  misc_feature: Ceres CDNA ID no. 29191306
  CDS (52)..(567): REFERENCED BY SEQ ID NO: 5610
aaatcacaccaaaaccctaatctctcccaaagcttctctcccaaacacaaaatggttaaccctaaagtttacttcgacatgaccgtcggcgacaaagccgccggacgcatcgtcatggagctttacgccgacacagtccccgagacggccgagaacttccgtgccctctgcaccggcgagaaaggaatcggcaaatccgggaagccgctccactacaagggctcggctttccaccgcgtgatccccaagttcatgtgccagggaggagatttcaccgccgggaacggaaccggaggagagtcgatctacggcatgaagttcaaagacgagaactttgtcaagaagcacaccggtccgggtattctctccatggccaacgctggttcgaacacgaacggatctcagtttttcatttgcactgagaagacatcgtggctcgacgggaagcatgttgtgttcggtcaagttgtcgaagggatggatgtcgttagagacattgagaaggttggatctgacagtggaaggacttctaagaaggttgtgatcgctgactgtggtcagctttagatctgatgagggagaaaagagagaggttgttgatccaatggtagctttgtgttcttttctgttgtgttttttttttgttctggttttctccgtgtttctatggctaccattgaataataatgataatgattaatcttaaaaaaaaaaaaaaaa

SEQ ID NO: 5610 - protein, 171 aa, Zea mays
  misc_feature: Ceres CLONE ID no. 1063700
  misc_feature: Ceres CDNA ID no. 29191306
  misc_feature (5)..(171): Pfam Name: Pro_isomerase PFAM Desc: Cyclophilin type peptidyl
  misc_feature: Homolog of GI Number: 1345921 NR Desc: Peptidyl
  misc_feature: Homolog of GI Number: 68407 NR Desc: peptidylprolyl isomerase
  misc_feature: Homolog of GI Number: 167138 NR Desc: cyclophilin
  misc_feature: Homolog of GI Number: 21592448 NR Desc: cytosolic cyclophilin ROC3
  misc_feature: Homolog of GI Number: 38708272 NR Desc: cyclophilin
  misc_feature: Homolog of GI Number: 1563719 NR Desc: cyclophylin
  misc_feature: Homolog of GI Number: 62728587 NR Desc: cyclophilin
  misc_feature: Homolog of GI Number: 17981611 NR Desc: cyclophilin
  misc_feature: Homolog of GI Number: 1561575 NR Desc: cyclophilin
  misc_feature: Homolog of GI Number: 1220142 NR Desc: cyclophilin
MVNPKVYFDMTVGDKAAGRIVMELYADTVPETAENFRALCTGEKGIGKSGKPLHYKGSAFHRVIPKFMCQGGDFTAGNGTGGESIYGMKFKDENFVKKHTGPGILSMANAGSNTNGSQFFICTEKTSWLDGKHVVFGQVVEGMDVVRDIEKVGSDSGRTSKKVVIADCGQL

SEQ ID NO: 5611 - DNA, 748 bp, Zea mays
  misc_feature: Ceres CLONE ID no. 1063709
  misc_feature: Ceres CDNA ID no. 29191307
  CDS (79)..(525): REFERENCED BY SEQ ID NO: 5612
atccaatctcgtttccaaggaaggaaggaagaaaatccagagaaactccagagaagaagaagaagaaggtcgacgacgatggcggtgttggtggagctgaccaaggagtacggctacgtggtgctcaccgtggtggcctacgccttcctcaacttctggatgagcttccaggtcggcgccgcccgcaagaagtacaaggtgttctaccccacgctgtacgccatcgagtcggagaacaaggacgccaagcgcttcaactgcgtccagagggggcaccagaactcgctggagatgatgccgctcttcttcgtcacggtgctgctcggtggcctgcagcacccggtggtcgccgccgcgctgggggtcctctacacagtcgccaggttcttctacttcaagggctacgccaccggcgtcccggacaaccgcctcaagcttggggggctcaacttcttggcgatcatcgggctgatcctctgcacggcgtccttcggcatcaaccttgtcatcagggaggcgatctgaggctccggactgatgtgcctgacttgataggcgtttgtgactcgagtcatttagacatggcggtggtgtcttttatagtgtccaaaaatgtgtgtgcctctgttttactctcacagaataaagctagatggagacggtttgtaacatcgaggttttgtagcttttgcagcacagttttaaatatggaggtgaatctccttccaatttaaaaaaaaaaaaaaaa

SEQ ID NO: 5612 - protein, 148 aa, Zea mays
  misc_feature: Ceres CLONE ID no. 1063709
  misc_feature: Ceres CDNA ID no. 29191307
  misc_feature (9)..(140): Pfam Name: MAPEG PFAM Desc: MAPEG family
  misc_feature: Homolog of GI Number: 50918191 NR Desc: putative glutathione S
  misc_feature: Homolog of GI Number: 62733553 NR Desc: MAPEG family
  misc_feature: Homolog of GI Number: 21617891 NR Desc: glutathione
  misc_feature: Homolog of GI Number: 6686399 NR Desc: F1E22.17
  misc_feature: Homolog of GI Number: 50751077 NR Desc:  similar to microsomal glutathione S
  misc_feature: Homolog of GI Number: 62079616 NR Desc: microsomal glutathione S
  misc_feature: Homolog of GI Number: 47087399 NR Desc: zgc:56518
  misc_feature: Homolog of GI Number: 13385010 NR Desc: microsomal glutathione S
  misc_feature: Homolog of GI Number: 50418447 NR Desc: Microsomal glutathione S
  misc_feature: Homolog of GI Number: 55665274 NR Desc: OTTHUMP00000042503
MAVLVELTKEYGYVVLTVVAYAFLNFWMSFQVGAARKKYKVFYPTLYAIESENKDAKRFNCVQRGHQNSLEMMPLFFVTVLLGGLQHPVVAAALGVLYTVARFFYFKGYATGVPDNRLKLGGLNFLAIIGLILCTASFGINLVIREAI

SEQ ID NO: 5613 - DNA, 675 bp, Zea mays
  misc_feature: Ceres CLONE ID no. 1063863
  misc_feature: Ceres CDNA ID no. 29191246
  CDS (58)..(510): REFERENCED BY SEQ ID NO: 5614
ctcaccctccctcgccgtccaaacccaatcagaaatctcaagcttagcacagcaccaatggcgtcggagcagaccttcatcatgatcaagcctgatggcgtccagaggggcctcatcggtgaggtcatcagccgcttcgagaagaagggcttctacctcaaaggtctgaagctccagaacgtggagaagtcgttcgccgagcagcactacgccgatctgtcctccaagcccttcgctgggctcgtggagtacatcgtctccggccctgtcgtcgctatggtctgggagggcaagagcgtcgtctccactggacgcaagataattggcgccaccaaccccctggcctctgagcccggcaccatccgtggtgactttgccgtcgacatcggcaggaacgtcatccatggaagcgactcagttgagagtgcgaggaaggagatcgccctgtggttccctgagggcattgcagagtggaggagcagccagcacaactggatctatgaggcctaagatgtgtcatgagtggttgagtgcaggtttcattaagcatctaccaaactagtctttggttgtttacagttttgagatttgtatcttgggaaccttgtttgtgtgaactgaagttatctccttgtgcttgggcatccaagcggtaaaacaaaaaaaaaaaaaaaa

SEQ ID NO: 5614 - protein, 150 aa, Zea mays
  misc_feature: Ceres CLONE ID no. 1063863
  misc_feature: Ceres CDNA ID no. 29191246
  misc_feature (4)..(136): Pfam Name: NDK PFAM Desc: Nucleoside diphosphate kinase
  misc_feature: Homolog of GI Number: 9652119 NR Desc: nucleoside diphosphate kinase
  misc_feature: Homolog of GI Number: 37536898 NR Desc: putative nucleoside diphosphate kinase
  misc_feature: Homolog of GI Number: 1777930 NR Desc: nucleoside diphosphate kinase
  misc_feature: Homolog of GI Number: 1389640 NR Desc: PNDKN1
  misc_feature: Homolog of GI Number: 296174 NR Desc: nucleoside
  misc_feature: Homolog of GI Number: 71040669 NR Desc: nucleoside diphosphate kinase I
  misc_feature: Homolog of GI Number: 47155384 NR Desc: nucloeside diphosphate kinase 1
  misc_feature: Homolog of GI Number: 73808794 NR Desc: cytosolic nucleoside diphosphate kinase
  misc_feature: Homolog of GI Number: 3309053 NR Desc: nucleoside diphosphate kinase I
  misc_feature: Homolog of GI Number: 1236951 NR Desc: nucleoside diphosphate kinase
MASEQTFIMIKPDGVQRGLIGEVISRFEKKGFYLKGLKLQNVEKSFAEQHYADLSSKPFAGLVEYIVSGPVVAMVWEGKSVVSTGRKIIGATNPLASEPGTIRGDFAVDIGRNVIHGSDSVESARKEIALWFPEGIAEWRSSQHNWIYEA

SEQ ID NO: 5615 - DNA, 943 bp, Zea mays
  misc_feature: Ceres CLONE ID no. 1063960
  misc_feature: Ceres CDNA ID no. 40351613
  CDS (93)..(614): REFERENCED BY SEQ ID NO: 5616
acctcacctcatctcaccagagagagaaagagagagagagagagagagagagagagagagagagagagtccgaagaaaaagacggcggcgggatgtttctgcggcggatcctgagcggcgggggcgggctggcggccctgcgctctgcgcgggcggtgaaggagacgacggggatcgtgggtctggacgtggtgcccgaggcgcggaatgtgctcatcgggctctacacgcgcaccctcaaggagatcgaggccgtccccaaggacgagggctaccgcaaggccgtcgagtccttcacccgccaccgcctccagatctgccaggaggaggaggactggaagcgcatcgaggaccgcctcggctgcggccaggtcgaggagctcatcgaggaggccgaggacgagctcaagctcatcggcaagatgatcgagtgggatccctggggtgttcctgatgactacgaatgcgaggtgattgaagatgacacacctattcccaagcatgttccgcagcaccggcccgttgcactacctgaggagttcttcaagacattagatgccatcaaatcagatccagctctgcagggcgactctcctccgcaagtgaagtcatgaaactagaactcttcaagatgcatcatttttcacctgttgcagtgtgtagttgagactagtctcatgggtcctttgcctgcagtttgcttgttgtcccgagcagaataaatttgtttctgtgaatgtgaatgcgtttttaacgcagtgcttcaacacagtaaaatactgtttctgttttctattaatcgatgttgacaaaagatcaaatgctggtttgttttatacttttcgcttaatgtatttctagaaccctgcacttctttaagtgtcattgcctagtgatgacctgcaacatgtattaaggtctttaagcaaaaaaaaaaaaaaaa

SEQ ID NO: 5616 - protein, 173 aa, Zea mays; identical to SEQ ID NO: 3874
  misc_feature: Ceres CLONE ID no. 1063960
  misc_feature: Ceres CDNA ID no. 40351613
  misc_feature (35)..(91): Pfam Name: ETC_C1_NDUFA5 PFAM Desc: ETC complex I subunit conserved region

SEQ ID NO: 5617 - DNA, 793 bp, Zea mays
  misc_feature: Ceres CLONE ID no. 1063967
  misc_feature: Ceres CDNA ID no. 40351614
  CDS (3)..(563): REFERENCED BY SEQ ID NO: 5618
agaaccctaaccagactcttttctatcctctcaccactcgcgcctctcacgcccttcccgccgccgccgccgccgccactcccctcgccgccgcagcagccgcagccatggggcgcatgcacagccgcgggaagggcatctcatcgtcggcgctgccgtacaagaggactccaccgagctgggtcaagaccgccgtcgccgatgtggacgagttaatcaccaaggccgcgaagaagggccagatgccgtcgcagatcggcgtcctgctccgtgaccagcacggcatccccctcgtcaagagcgtcaccgggagcaagatcctccgcatcctcaaggcccatgggctggcaccagagatcccggaggacctctactttctgatcaagaaggcggtggcgataaggaagcacctggagaggaacaggaaggacaaggactctaagttcaggctcatccttgtggagagcaggatccaccgcctcgctcgctactacaagcgcaccaagaagctcccgcccacctggaagtacgagtctaccaccgccagcactctggtggcgtaagggagatccagatctggtgtgctcttagctgattaaagcttgattgttctggaaaccattcttatgtaatgctttatgagagtttggagccaagcagatgctgcaaattttctatgtttgcctggaggatgctgtaaaacctttatggtttcactgttctgtctgttaaacgactgttataatgtacccagattttgtccgttaaaaaaaaaagaaaaaaaaaaaaaaaa

SEQ ID NO: 5618 - protein, 151 aa, Zea mays
  misc_feature: Ceres CLONE ID no. 1063967
  misc_feature: Ceres CDNA ID no. 40351614
  misc_feature (1)..(60): Pfam Name: Ribosomal_S13_N PFAM Desc: Ribosomal S13/S15 N
  misc_feature (65)..(151): Pfam Name: Ribosomal_S15 PFAM Desc: Ribosomal protein S15
MGRMHSRGKGISSSALPYKRTPPSWVKTAVADVDELITKAAKKGQMPSQIGVLLRDQHGIPLVKSVTGSKILRILKAHGLAPEIPEDLYFLIKKAVAIRKHLERNRKDKDSKFRLILVESRIHRLARYYKRTKKLPPTWKYESTTASTLVA

SEQ ID NO: 5619 - DNA, 458 bp, Zea mays
  misc_feature: Ceres CLONE ID no. 1063989
  misc_feature: Ceres CDNA ID no. 29191247
  CDS (78)..(353): REFERENCED BY SEQ ID NO: 5620
atactatatattagacataccggtattattgttcttagacatcgcacaagactcttgtcaacaagaccaacaacaggatgaggactgccgtgcatgctgcgctttgcattgtgcttgtgataatgtcttcaacactgtcatcttgcgaggacgatgagaaggtatctatcgcatgtgacacaggatgcaatgccgcgatctcccgtctcaaatgcttcctgatggcctattctgaagggaaagtgttggtcagcagcaactgcgaaacgccgaccaggtgcggctgcgtgtttcgtcacaaacaagatgcagcccttatcgccggcgacgttggcaacaaaaagggatactgatggcagacgtgtacttcttggttgaataatactgctagaattaatatgggcaccaacgaaatatctataaattttaaaaaaataaaaaaaaaaaataaaaaaaaa

SEQ ID NO: 5620 - protein, 91 aa, Zea mays
  misc_feature: Ceres CLONE ID no. 1063989
  misc_feature: Ceres CDNA ID no. 29191247
MRTAVHAALCIVLVIMSSTLSSCEDDEKVSIACDTGCNAAISRLKCFLMAYSEGKVLVSSNCETPTRCGCVFRHKQDAALIAGDVGNKKGY

SEQ ID NO: 5621 - DNA, 750 bp, Zea mays
  misc_feature: Ceres CLONE ID no. 1064047
  misc_feature: Ceres CDNA ID no. 40351615
  CDS (75)..(524): REFERENCED BY SEQ ID NO: 5622
atgcgccgccacccaaaaccctagccaagcacaccgacgcgctcacagcagccaagcacaccgccgcagccaccatggcagccgttctcacccgccctacgccgggcaccgtccagtgctttggccggaagaagaccgccgtcgccgtggcctactgcaagcccgggcgcggcctcatcaaggtcaacggcgcgccgatcgagctcatccgccccgagatgctccgcctgaaggccttcgagccgatcctgctcgccggcaggtcccgcttcaaggacatcgacatgcgtatccgcgtccgcggcggagggaagacgagccagatctactccatacgccaggccatcgccaagtctctcgtcgcctactaccagaagtacgtcgacgaggcggccaagaaggaggtgaaggagatcttcggccgctacgaccggacgctcctcgtcgccgatccacgccgctgcgagcccaagaagtttggcggtcgcggtgcccgcgcgcgtttccagaagtcgtaccgttgagctccggcgagatctcttgttgggtatggcggcggtggcctactccttgcatctatctaccttttaccgctagtagtttgccatcttttggaccaatgaattggacatgatctctaagaactgtgagttgtctgcagtatcctgcctagttgaagaaggggttttgttatcataaacttatgttaatgatgaaactgaatgttctgtttgaaaaaaaaaaaaaaaa

SEQ ID NO: 5622 - protein, 149 aa, Zea mays; identical to SEQ ID NO: 2758
  misc_feature: Ceres CLONE ID no. 1064047
  misc_feature: Ceres CDNA ID no. 40351615
  misc_feature (17)..(149): Pfam Name: Ribosomal_S9 PFAM Desc: Ribosomal protein S9/S16

SEQ ID NO: 5623 - DNA, 918 bp, Zea mays
  misc_feature: Ceres CLONE ID no. 1064091
  misc_feature: Ceres CDNA ID no. 36695483
  CDS (181)..(501): REFERENCED BY SEQ ID NO: 5624
aacaaggccacatcagcagagagcccagcaactgaaaaaaccaaccatcgcgcgggcacggttgcggttgctacctcccgatcccgtcctcccgcaagccaagctctctctctccccctccccttcagcacgatcggagtccaagtccatcccatccagacccactcgacagtcgacccgatggcgccgtccatctccgtcggcgccgcggcgccgtcccgtgcagcgggcgcgagcacgaagaagagcgcggacgaggtggagctcctgcggcggcggaacgcggagctggagcgggaggtggcggcgctgcggctggagctgggcgcggcgcggcgccgcgccgagacggcggaagaggccgaggagcggctgtgcgtgcagctcggcgacgccgaggtggaggcgctcgagctcgcgcgcgcctaccaggcccacgtccacgagctcgccagggagctcgccgccgcgcgcgcggccccggcacgcccggccagataggttctcgtgggctggtagtaggctactagtagctatagcgtgcggttcagcgggatggctgtggttcccgcgtttggttggcgtcggacggcaccccgcgccgcggtgccatttatttgctcgccgccggcatcgtcgtctttgctttttgctgtgtcgatgatgattctttaacgaacaagagtccatgatgacgcgtcctatgtgaaaacgtgtagagttgactgttgaggctaagggcatgtacaacccagatactgctgcacggtactctaagtacaaaatacaactaaaacacaatataatacagtggtcatgtctaaaacatgtgtcttacgatattcattgtgccaatcagagtattcaataaattaaagtgaccaatcaaaaaaaaaaaaaacaaaaaaaaaaaaaaaa

SEQ ID NO: 5624 - protein, 106 aa, Zea mays
  misc_feature: Ceres CLONE ID no. 1064091
  misc_feature: Ceres CDNA ID no. 36695483
  misc_feature: Homolog of GI Number: 66776365 NR Desc: PE
  misc_feature: Homolog of GI Number: 66780099 NR Desc: PE
  misc_feature: Homolog of GI Number: 66778899 NR Desc: UvrD/REP helicase
  misc_feature: Homolog of GI Number: 66776103 NR Desc: LigA
  misc_feature: Homolog of GI Number: 66778264 NR Desc: LigA
  misc_feature: Homolog of GI Number: 66779017 NR Desc: similar to Endoglucanase Y
MAPSISVGAAAPSRAAGASTKKSADEVELLRRRNAELEREVAALRLELGAARRRAETAEEAEERLCVQLGDAEVEALELARAYQAHVHELARELAAARAAPARPAR

SEQ ID NO: 5625 - DNA, 614 bp, Zea mays
  misc_feature: Ceres CLONE ID no. 1064094
  misc_feature: Ceres CDNA ID no. 29191248
  CDS (82)..(345): REFERENCED BY SEQ ID NO: 5626
ccccaccgaagccaacgaccgaacgaaccctagactccgagcgcacgaggagagagagagggagatctccaggtcgcggccatggcgatgcgcgcgctgtacaacgagatccgcgcgatgaaggtgcgcgatgtgccggcgtacctcaaaccgcgcctcacctgggagaacgtgaagaagagcaccgaccaggcggtggaccgctacatcgagaagtacatcgagaccagctcggttgacccgctcttccacgtctgcttcggcggcatggccttcgcctacctcgtgggcctgccccaggagcgccgccacctcgagcacctcgagaagcacggcggccactagatccggatccgcctcgcgcaggagagcttatctacggttgatttaggatggttttctccgtttttcttctactgatgggctacctggagttgatgtctatttgatggctggtttattttgtgtcggaaggcagcaatggactgtctagtccactgttatgttcctctgtgtcctgtcataagcaacttcaaactggaagtgcatgcattgtgattaaaaatattttcagcgaattgagtacaagttctttgcgaaaaaaaaaaaaaaaa

SEQ ID NO: 5626 - protein, 87 aa, Zea mays
  misc_feature: Ceres CLONE ID no. 1064094
  misc_feature: Ceres CDNA ID no. 29191248
  misc_feature: Homolog of GI Number: 50251207 NR Desc: putative fiber protein Fb15
  misc_feature: Homolog of GI Number: 42565482 NR Desc: fiber protein
  misc_feature: Homolog of GI Number: 30841448 NR Desc: fiber protein Fb15
MAMRALYNEIRAMKVRDVPAYLKPRLTWENVKKSTDQAVDRYIEKYIETSSVDPLFHVCFGGMAFAYLVGLPQERRHLEHLEKHGGH

SEQ ID NO: 5627 - DNA, 616 bp, Zea mays
  misc_feature: Ceres CLONE ID no. 1064118
  misc_feature: Ceres CDNA ID no. 40351616
  CDS (128)..(358): REFERENCED BY SEQ ID NO: 5628
ctcttttttaactttcgaccctatcaggctggcctggcatctctccccacgagcagccgcccccaggtctagggttccccctttcttcttctccacgcgaatcagctagatactagaaccagcatcgatggcggcggcagcaccggcggacgcgaaggcggaggccgccaagatggacctcctcgaggacgacgacgagttcgaggagttcgagatcgaccaagaatgggatgacaaggaagatggcaacgaagctgtccagcaatgggaggatgactgggatgacgacgacgtgaatgacgatttctcactgcagctgaggaaagagctggagggaggcaacactcagaagagctgaactacttccccatccatatcaaagctgtagtacactttatcttcgatcaggcactgtgtggccactgctctctgaacctgcgatacttccctagcaatatcaagctgtgatacttatcttcgtttcagtactgtgtatcagactttgtaccgtactgcatgtagttatcggctgcgagcagcacaacttgtggaacagtgatagttaccagacagtatcgcaattacccggaagtttgtcgtaaaaaaaaaaaaaaaa

SEQ ID NO: 5628 - protein, 76 aa, Zea mays
  misc_feature: Ceres CLONE ID no. 1064118
  misc_feature: Ceres CDNA ID no. 40351616
  misc_feature (9)..(71): Pfam Name: DSS1_SEM1 PFAM Desc: DSS1/SEM1 family
MAAAAPADAKAEAAKMDLLEDDDEFEEFEIDQEWDDKEDGNEAVQQWEDDWDDDDVNDDFSLQLRKELEGGNTQKS

SEQ ID NO: 5629 - DNA, 913 bp, Zea mays
  misc_feature: Ceres CLONE ID no. 1064130
  misc_feature: Ceres CDNA ID no. 25446499
  CDS (50)..(718): REFERENCED BY SEQ ID NO: 5630
atagataatcttatataaaaataggtttatatatcctggtgctcttgccatggctggtgcatcgctcctctccccatcctgcacgctcctccgcctgattcccagcgcgtcgcacttcaagagattcgatcgggttcgccggttcgcgcccgccgccatggcgacttcctcaggaccaaaggaggcgccagcgaataaccctgggctccagaccgaggtcgaccccgccaccaaaggctacttcttgcaacaaacgatgttacgtgtgaaggacccaaaagtgagccttgacttctactcacgtgtgatgggcatgtcgttgctgaaaaggttggattttgaagagatgaaattcagtttgtattttctaggttacgaggatgtgaccttagcccctgatgatcatatcaagcggactgaatggacttttaggcaaaaagctactcttgagctcacccacaactggggcacggaaaatgaccctgaattcaaaggttaccataatgggaactcagaccctcgtggttttggtcatataggagtaactgtggatgatgtccacaaggcatgtgaacgctttgaacgtcttggggttgagtttgtgaagaaacctgatgatggaaaaatcaaaggcatcgctttcatcaaagatcctgatggttactggatcgaaatatttgaccagacgattgggacggtaacttcttcagcatcatgatgaacagtagtggttccttatatggtgcgcaagatcatacaactctggcataagagcttttcatatgtgtgtctggggtctggactcggattaagggctggaatctgtttacttctagcatcttcttgctttaataatatgcgaactatgttgaggaatgaaataaaataagttcgggcaaaaaaaaaaaaaaaa

SEQ ID NO: 5630 - protein, 186 aa, Zea mays; identical to SEQ ID NO: 4786
  misc_feature: Ceres CLONE ID no. 1064130
  misc_feature: Ceres CDNA ID no. 25446499
  misc_feature (29)..(173): Pfam Name: Glyoxalase PFAM Desc: Glyoxalase/Bleomycin resistance protein/Dioxygenase superfamily
  misc_feature: Homolog of GI Number: 2909424 NR Desc: Glyoxalase I
  misc_feature: Homolog of GI Number: 79317307 NR Desc: calmodulin binding / lactoylglutathione lyase
  misc_feature: Homolog of GI Number: 12744892 NR Desc: glyoxalase I
  misc_feature: Homolog of GI Number: 48310604 NR Desc: At1g08110
  misc_feature: Homolog of GI Number: 2113825 NR Desc: Glyoxalase I
  misc_feature: Homolog of GI Number: 4127862 NR Desc: glyoxalase I
  misc_feature: Homolog of GI Number: 8778828 NR Desc: T6D22.20
  misc_feature: Homolog of GI Number: 1177314 NR Desc: glyoxalase
  misc_feature: Homolog of GI Number: 50740506 NR Desc:  similar to glyoxylase 1

SEQ ID NO: 5631 - DNA, 848 bp, Zea mays
  misc_feature: Ceres CLONE ID no. 1064146
  misc_feature: Ceres CDNA ID no. 40041392
  CDS (49)..(639): REFERENCED BY SEQ ID NO: 5632
aagtttaggaaaggaagcaccggagcaggcgatacggcgccgacgacaatggcagcaacaagggcttccccagtgcttctcttgctgctcaccgtccagctcagcttgctcttccgcctccccgactccccctccaccctcgccctcgccctcgccgcggaaccagagcaacagaacgccaagcagcatcgccagcccgcgctgctggtgcagtcgacgtgcaactccaccagcttctacgacctctgcatcgccgcgctcgccgccgaccccgccagctccaccgccgacgtcccgggcctcggcgccatcgccgtgtccgccgccgcaaacaacgcctccggcacggccgccttcctcggcaacgccagcgacgccgcggccaccccgcaggcggaccgcgcgctcctcgcgtccctcgccgagcaggcctacgactacgccttcgtgcacgtgagcgccgccggcgagtaccccgcggtgtgccgcacgctgttccggcgccggcagcagcagcagcgtggggcgagtaggtctgcgtacccggcggagctggccaagagggaggaggcgctgcggcgcctgtgcaccatcgccctcgacatcatctccctgctgcaaaaccaggagacctactagctccatgcatctcaattctcaactctcacagaaatgcagttgtcagtcggttagtcgatcttgttgatgcacaagagtagtaaaatggaccggagcaatgaacattgatcaagcatgcatggatgcccgtacaatgtagtgccgacaccaatacgatcgacatgaatagtccgcggaatgaaaaaggttgctcaaaaaaaaaaaaaaaa

SEQ ID NO: 5632 - protein, 196 aa, Zea mays
  misc_feature: Ceres CLONE ID no. 1064146
  misc_feature: Ceres CDNA ID no. 40041392
  misc_feature (121)..(186): Pfam Name: PMEI PFAM Desc: Plant invertase/pectin methylesterase inhibitor
  misc_feature: Homolog of GI Number: 6523547 NR Desc: hydroxyproline
  misc_feature: Homolog of GI Number: 50940367 NR Desc: nvertase/pectin methylesterase inhibitor
  misc_feature: Homolog of GI Number: 77554660 NR Desc: invertase inhibitor homolog
  misc_feature: Homolog of GI Number: 32422095 NR Desc: predicted protein
  misc_feature: Homolog of GI Number: 2429362 NR Desc: proline rich protein
  misc_feature: Homolog of GI Number: 530876 NR Desc: amino acid feature: Rod protein domain
  misc_feature: Homolog of GI Number: 60678627 NR Desc: plus agglutinin
MAATRASPVLLLLLTVQLSLLFRLPDSPSTLALALAAEPEQQNAKQHRQPALLVQSTCNSTSFYDLCIAALAADPASSTADVPGLGAIAVSAAANNASGTAAFLGNASDAAATPQADRALLASLAEQAYDYAFVHVSAAGEYPAVCRTLFRRRQQQQRGASRSAYPAELAKREEALRRLCTIALDIISLLQNQETY

SEQ ID NO: 5633 - DNA, 785 bp, Zea mays
  misc_feature: Ceres CLONE ID no. 1064158
  misc_feature: Ceres CDNA ID no. 29191521
  CDS (146)..(607): REFERENCED BY SEQ ID NO: 5634
gaaaaagaaggaaaaagaattaaaagcagcacgcacgagacgagagacgacgaagcgttctcgataatcaccgtgcttctttagcttagcttcgttctctctctcacaaaaaccctaaattctccgagaccgatagaccgcgataatggctaatagcaatctaccgcgaagaatcatcaaggaaacacaacgtctacttagtgaacctgctccggggataagcgcgtctccgtcagaggaaaacatgcgttatttcaatgtcatgattcttggtccttcacagtctccttatgaaggaggagttttcaagttggagctctttttgcctgaagaataccctatggcagctcccaaagttaggtttctcaccaaaatataccatcctaacattgacaagcttggaaggatctgccttgacattctgaaagacaaatggagtcctgcgctacaaataagaactgtgctcttgagtatccaagctcttctaagtgcaccaaaccctgatgatccactttctgagaacatagctaagcattggaagagtaatgaagctgaagctgtggagacagctaaggagtggactcgtctatatgcaagtggcgcttgatgggggggggagtgcaaaaaggagaatgatgttgtcatttaaataacattatatatggtgataactctacctcaaagtttatctgaatcctttctcttaaaacaagggaaaaagatttgcactctcttgatgtgttgttgtcattaagactcgtttttacccaaaaaaaaaaaaaaaa

SEQ ID NO: 5634 - protein, 153 aa, Zea mays
  misc_feature: Ceres CLONE ID no. 1064158
  misc_feature: Ceres CDNA ID no. 29191521
  misc_feature (9)..(146): Pfam Name: UQ_con PFAM Desc: Ubiquitin
  misc_feature: Homolog of GI Number: 66354480 NR Desc: ubiquitinating enzyme
  misc_feature: Homolog of GI Number: 71040675 NR Desc: ubiquitin
  misc_feature: Homolog of GI Number: 34911052 NR Desc: ubiquitin
  misc_feature: Homolog of GI Number: 66354478 NR Desc: ubiquitinating enzyme
  misc_feature: Homolog of GI Number: 79590480 NR Desc: ubiquitin conjugating enzyme/ ubiquitin
  misc_feature: Homolog of GI Number: 5381319 NR Desc: ubiquitin
  misc_feature: Homolog of GI Number: 3834310 NR Desc: Similar to Ubiquitin ESTs gbT88233 and gbT22122 come from this gene.  [Arabidopsis [imported]
  misc_feature: Homolog of GI Number: 16758810 NR Desc: ubiquitin
  misc_feature: Homolog of GI Number: 83754522 NR Desc: Chain K
  misc_feature: Homolog of GI Number: 30583959 NR Desc: Homo sapiens ubiquitin
MANSNLPRRIIKETQRLLSEPAPGISASPSEENMRYFNVMILGPSQSPYEGGVFKLELFLPEEYPMAAPKVRFLTKIYHPNIDKLGRICLDILKDKWSPALQIRTVLLSIQALLSAPNPDDPLSENIAKHWKSNEAEAVETAKEWTRLYASGA

SEQ ID NO: 5635 - DNA, 776 bp, Zea mays
  misc_feature: Ceres CLONE ID no. 1064198
  misc_feature: Ceres CDNA ID no. 29191249
  CDS (104)..(592): REFERENCED BY SEQ ID NO: 5636
acgaccaacacgtaccggatcttgaccgaccgaaccattcagtgctcgcgctcactcacgcatcatagccaagttaagcgggaaggaaggaaggaaggaagccatgtctgccgcggagggagccgtcgtgttcagcgaggagaaggaggcgctggtgctcaagtcatgggccatcatgaagaaggattccgccaaccttgggctccgcttcttcctcaagatcttcgagatcgcgccgtcggcgaggcagatgttcccgttcctgcgcgactccgacgtgccgctggagaccaaccccaagctcaagacccacgccgtgtccgtcttcgtcatgacgtgcgaggctgctgcgcagctgcggaaagccgggaagatcaccgtcagggagaccaccctgaagaggctgggcggcacgcacttgaaatacggcgtggcagatggccactttgaggtgacgcggttcgctctgctcgagacgatcaaggaggcgcttccggcggacatgtgggggccggagatgaggaacgcgtggggcgaggcctacgaccaactggtcgcggccatcaagcaagagatgaagccctctgagtagctcatccattgtactcatatcatatgccacgcaacttccgtccatatccgtccaactttcgttgcttgaccggttcactcatgtcaccatattgtgtttgtattgtgtgtttacgtgtactaacgcatattgtaaaatgggcattcaataaaggaacaaattgtgcatgaaaaaaaaaaaaaaa

SEQ ID NO: 5636 - protein, 162 aa, Zea mays; identical to SEQ ID NO: 4064
  misc_feature: Ceres CLONE ID no. 1064198
  misc_feature: Ceres CDNA ID no. 29191249
  misc_feature (14)..(154): Pfam Name: Globin PFAM Desc: Globin
  misc_feature: Homolog of GI Number: 2071976 NR Desc: hemoglobin
  misc_feature: Homolog of GI Number: 27085255 NR Desc: hemoglobin Hb1
  misc_feature: Homolog of GI Number: 9858882 NR Desc: hemoglobin
  misc_feature: Homolog of GI Number: 9931924 NR Desc: hemoglobin
  misc_feature: Homolog of GI Number: 14701800 NR Desc: hemoglobin 2
  misc_feature: Homolog of GI Number: 14701802 NR Desc: hemoglobin 1
  misc_feature: Homolog of GI Number: 14701804 NR Desc: hemoglobin 4
  misc_feature: Homolog of GI Number: 14701803 NR Desc: hemoglobin 3
  misc_feature: Homolog of GI Number: 37903656 NR Desc: non
  misc_feature: Homolog of GI Number: 225893 NR Desc: hemoglobin
  misc_feature: Useful for delaying flowering time
  misc_feature: Useful for increasing chlorophyll and photosynthetic capacity
  misc_feature: Useful for making plants with increased biomass and foliage
  misc_feature: Useful for sterility
  misc_feature: Utility: Cold Germination Useful for making plants with increased tolerance to cold stress

SEQ ID NO: 5637 - DNA, 578 bp, Zea mays
  misc_feature: Ceres CLONE ID no. 1064453
  misc_feature: Ceres CDNA ID no. 25447046
  CDS (57)..(392): REFERENCED BY SEQ ID NO: 5638
actccgctagggtttctcctcggtagcagccggctcacaggaaagtgttcgtcctcatggcgccgccgcagccgaagtcgggcctcttcgtgggcatcaacaagggccatgtcgtcaccaagcgcgagctgcctctgcgcccgtcccaccgcaaggggaaagcaacgaagagggtgtccatggtcaggggcctgatcagagaggttgctggctttgctccttatgagaagcgtatcaccgagcttctgaaggttggcaaggacaagcgcgctctgaagcttgccaagagaaagcttggaactcacaagagggcaaagaagaagagagaggagatgatgggcgtcctcaggaagatgagatcggctggtacgcacactgacaagaagaaataaagcatttcaagttcatgaatgtggcagccagagattatcaactgtgttttttccctacctctagaaactagacatggcaaagtatttttgaccgaaacattgtttgttagtaatgtattgaaccacctcgtggtattttgccccaacttccaatgcatcaatggtttgttaaaaaaaaaaaaaaaa

SEQ ID NO: 5638 - protein, 111 aa, Zea mays
  misc_feature: Ceres CLONE ID no. 1064453
  misc_feature: Ceres CDNA ID no. 25447046
  misc_feature (5)..(103): Pfam Name: Ribosomal_L36e PFAM Desc: Ribosomal protein L36e
  misc_feature: Homolog of GI Number: 56182368 NR Desc: putative 60S ribosomal protein L36
  misc_feature: Homolog of GI Number: 34908154 NR Desc: putative 60S RIBOSOMAL PROTEIN L36
  misc_feature: Homolog of GI Number: 50931673 NR Desc: putative 60S ribosomal protein L36
  misc_feature: Homolog of GI Number: 57471698 NR Desc: ribosomal protein L36
  misc_feature: Homolog of GI Number: 20148501 NR Desc: 60S ribosomal protein L36
  misc_feature: Homolog of GI Number: 21592383 NR Desc: 60S ribosomal protein L36
  misc_feature: Homolog of GI Number: 12642884 NR Desc: putative 60S ribosomal protein
  misc_feature: Homolog of GI Number: 21554932 NR Desc: 60S RIBOSOMAL PROTEIN L36 homolog
  misc_feature: Homolog of GI Number: 25295570 NR Desc: ribosomal protein L36
  misc_feature: Homolog of GI Number: 1276967 NR Desc: putative ribosomal protein
  misc_feature: Useful for sterility
MAPPQPKSGLFVGINKGHVVTKRELPLRPSHRKGKATKRVSMVRGLIREVAGFAPYEKRITELLKVGKDKRALKLAKRKLGTHKRAKKKREEMMGVLRKMRSAGTHTDKKK

SEQ ID NO: 5639 - DNA, 770 bp, Zea mays
  misc_feature: Ceres CLONE ID no. 1064461
  misc_feature: Ceres CDNA ID no. 25446807
  CDS (1)..(417): REFERENCED BY SEQ ID NO: 5640
caaacttctaaccagactctgttgggagagattatacatcgtggggtttatatgtttacacagcaaagtgcggccttcaagatcttgaggactcgactgaagactgtgccattcagtgaaaatcttaagcgcacatcttcagcgaatccatactctcagattctgcaagtgacggaagatggcaatagaaaccaagatatgcagaactacagtgcaatcaatttcccattccttctccagcaatttgagaacatgcagctgcagcatcgtaaccatttgaaggatcaactgcaatcccgtaaatctgcttcgactttaacattatctcaggagatacaaagatacgaagaagcgcattcctcttcgctgtcagagattaacaggcccccttcaagaacatccaaaggcattttatgatgcatttgttcttgcgatgtatgatatatttgccggaagcatcaccacatatatgttggggctttggttagtctcctcgttttttttcaaaggaggttgcatagggtacatagtgtaatcttttctatttcgttcctagatttgtcaagagatggcaattatttgttggagaaagctcgttgccacattctagtcattcttttcttagtggtttcactgctcatctggtttctgtaatttttcaattgaaggccaaatgagcaaagtagtaattggagatagaaatatgttactactgtcctatctatcgatctccaataaattagcgttgcaatgtaaaaaaaaaaaaaaaa

SEQ ID NO: 5640 - protein, 121 aa, Zea mays
  misc_feature: Ceres CLONE ID no. 1064461
  misc_feature: Ceres CDNA ID no. 25446807
MFTQQSAAFKILRTRLKTVPFSENLKRTSSANPYSQILQVTEDGNRNQDMQNYSAINFPFLLQQFENMQLQHRNHLKDQLQSRKSASTLTLSQEIQRYEEAHSSSLSEINRPPSRTSKGIL

SEQ ID NO: 5641 - DNA, 971 bp, Zea mays
  misc_feature: Ceres CLONE ID no. 1064465
  misc_feature: Ceres CDNA ID no. 29191250
  CDS (107)..(808): REFERENCED BY SEQ ID NO: 5642
ataggtaatcataccacaacccgagcattctacaaccactttcatcaacgccatacacgtctcctaccctcacagttcgttgctccgcacatcagcaggacttgcaatggcgggagacggcgagctgaagctgctgggcgtgtggacgagcccgttcgtcatcagggtgcgcgtggtgctcaacctcaagtctctgccgtacgagtacgtggaggagaacctgggcagcaagagcgcgctcctcctgggctccaacccggtgcaccagagcgtgcccgtcctcctccacggcggccgccccgtgaacgagtcccaggtcatcgtgcagtacatcgacgaggtctgggcgggggccggcccgtccgtgctcccggccgacccctacgagcgcgccacggcgcgcttctgggcggcgtacgtcgacgacaaggtcgggtcggcgtggacggggatgctcttctcgtgcaagacggaggaggagagggcggaggccgtgtcccgggccgtggcggcgctggagacgctggagggcgcgttcgcggagtgctccaaggggaaggcgttcttcggcggcgacgccatcgggttcgtcgacgtcgtgctcggcggctacctcgggtggttcggggcgatcgacaagatcatcgggcgccggctgatcgacccggcgaggacgccgctgctggccaggtgggaggagcagttccgcgcggcggacgcggccaagggcgtcgtgccggacgacgccgacaagatgctcgagttcttgcccaccgtgctcgcttgggtcgccgccaaagcgaagtgaactgtgagcccgtgacatcgccagctcgtgacatgtgtgtttgtgtgtgtgcgtgtctgagtccgtccagtgtgtgctgaataaatgcaccgcatgtcgtgtgttgtaccaagggcaaacgatgctgaataattttgatgtttgtggaaaaaaaaaaaaaaaa

SEQ ID NO: 5642 - protein, 233 aa, Zea mays; identical to SEQ ID NO: 2444
  misc_feature: Ceres CLONE ID no. 1064465
  misc_feature: Ceres CDNA ID no. 29191250
  misc_feature (7)..(78): Pfam Name: GST_N PFAM Desc: Glutathione S
  misc_feature (88)..(204): Pfam Name: GST_C PFAM Desc: Glutathione S
  misc_feature: Homolog of GI Number: 20067421 NR Desc: glutathione transferase
  misc_feature: Homolog of GI Number: 57015397 NR Desc: Probable glutathione S
  misc_feature: Homolog of GI Number: 11385511 NR Desc: glutathione S
  misc_feature: Homolog of GI Number: 37536368 NR Desc: putative glutathione S
  misc_feature: Homolog of GI Number: 11385501 NR Desc: glutathione S
  misc_feature: Homolog of GI Number: 11385527 NR Desc: glutathione S
  misc_feature: Homolog of GI Number: 37536358 NR Desc: putative glutathione S
  misc_feature: Homolog of GI Number: 11385535 NR Desc: glutathione S
  misc_feature: Homolog of GI Number: 11385495 NR Desc: glutathione S
  misc_feature: Homolog of GI Number: 20143553 NR Desc: putative glutathione S
  misc_feature: Useful for making plants with altered leaf shape eg curled leaves
  misc_feature: Useful for sterility

SEQ ID NO: 5643 - DNA, 1387 bp, Zea mays
  misc_feature: Ceres CLONE ID no. 1064466
  misc_feature: Ceres CDNA ID no. 29191251
  CDS (85)..(1221): REFERENCED BY SEQ ID NO: 5644
acaccacagcacaccaaccgcgcgccactgatccatcaactccactccactagctacgtaccttccgaccgagcagccagagagatggagaggatggtgatgaggctggtgaggaacaagcagtccctccgccagctgcaaggggccgccgccggcggcctagcgtcgtcgtcctccgcctcctcgaccgccggcgccgccgcgtcctccttctccaccctgcagcagcagcaggaggaccaccccggagtgctcaacatcagggacaccgccgcccacctcatcggccggacgccgctggtgtacctgaacaaggtgacggaggggtgcggcgcccgcgtcgccgccaagctcgagttcctccagccttccttcagcgtcaaggacaggccagcaatctccatgatcgaagacgcggagaagaaggggctgataaccccaggcaagacgacgctgatcgagcccacatccgggaacatgggcatcggcctggcgttcatggcagcactcaaagggtacgagctcgtgctgacgatgccatcatacaccagcctcgagaggagggtggtcatgaaggccttcggtgcgcagctcgtgctcactgacccggccaaggggatgggaggcaccgtcaggaaagcaacccagctctatgagaaccatcccagcgccttcatgctccagcagttcgagaatcccgccaacgtccaggtgcactacgagactaccggtccggagatatgggaggacacgctcgggcaggtcgacatcttcgtcatgggaatcggcagcggcggcaccgtcaccggcgtcggcaagtaccttaaggagaagaaccccaacgcaaagatctatggagttgaacctgccgaagcaaatgtcctgaacggtggcaagccagggcctcacctcatcactggaaatggagttggatttaagccagatattttggatatggatataatggagaaggttctagaggtgaaaagcgaggacgccgttacgatggcgcaacagttggcactgcaggagggcctgctggtggggatatcatcaggagccaacacagtggctgcgatcgaactcgcaaagaggccagaaaacaaagggaagctcatcgtgactgttcatccgagcgcgggagagcgatacttatcgtcggcgctattcgagggtctgaggaaggaggctgaggcaatgcagccagtgccagtggactaagttggagctatacaatgcatgtagaataaattcactgcaaccatgttgcaagtgctagtcatacctcatttgtgattcttcagtttgttcatcatgtggaagtcgtgtaaacaacagttcaaatggttgaaaaaaggactttacctctctaaaaaaaaaaaaaaaa

SEQ ID NO: 5644 - protein, 378 aa, Zea mays
  misc_feature: Ceres CLONE ID no. 1064466
  misc_feature: Ceres CDNA ID no. 29191251
  misc_feature (63)..(352): Pfam Name: PALP PFAM Desc: Pyridoxal
  misc_feature: Homolog of GI Number: 50930113 NR Desc: OSJNBa0019G23.9
  misc_feature: Homolog of GI Number: 30840956 NR Desc: beta
  misc_feature: Homolog of GI Number: 37719662 NR Desc: beta
  misc_feature: Homolog of GI Number: 37719666 NR Desc: beta
  misc_feature: Homolog of GI Number: 55233175 NR Desc: beta
  misc_feature: Homolog of GI Number: 11559260 NR Desc: beta
  misc_feature: Homolog of GI Number: 21592815 NR Desc: cysteine synthase AtcysC1
  misc_feature: Homolog of GI Number: 1066153 NR Desc: cysteine synthase
  misc_feature: Homolog of GI Number: 11995005 NR Desc: beta
  misc_feature: Homolog of GI Number: 12081919 NR Desc: plastidic cysteine synthase 1
MERMVMRLVRNKQSLRQLQGAAAGGLASSSSASSTAGAAASSFSTLQQQQEDHPGVLNIRDTAAHLIGRTPLVYLNKVTEGCGARVAAKLEFLQPSFSVKDRPAISMIEDAEKKGLITPGKTTLIEPTSGNMGIGLAFMAALKGYELVLTMPSYTSLERRVVMKAFGAQLVLTDPAKGMGGTVRKATQLYENHPSAFMLQQFENPANVQVHYETTGPEIWEDTLGQVDIFVMGIGSGGTVTGVGKYLKEKNPNAKIYGVEPAEANVLNGGKPGPHLITGNGVGFKPDILDMDIMEKVLEVKSEDAVTMAQQLALQEGLLVGISSGANTVAAIELAKRPENKGKLIVTVHPSAGERYLSSALFEGLRKEAEAMQPVPVD

SEQ ID NO: 5645 - DNA, 1096 bp, Zea mays
  misc_feature: Ceres CLONE ID no. 1064517
  misc_feature: Ceres CDNA ID no. 25446500
  CDS (464)..(856): REFERENCED BY SEQ ID NO: 5646
aaaaaaaccaaacacccgtagcctccgccgagagtcgcagccgccgacacccagtcgcccaccgacccgaccccaaccttggagctgctgtgccccggcggtccgtctctggccagagctccgccaccgcccgccgatcagagctccgcctccgagacgacgcgcctccccccagtggctcaggccgcctgcccgcctggcaggacgccgcgccgagctctttcccggcagctgctcgcccgcgccgatcttttcttcggcaaccgcgcgcccgcgtcgagctcctccccgtccccggcagccgcgcgccagcgccgagctcctccccgcggatccgcctctgctcagtctgagctccggccagccgcgagctccgtcgaggcgtcgacgccgaggcccagctccgcccgtgagtgcctgtgccggattcagcaaacagaaatttgctctgctggttagatagatggaggtgccaatgaacaccacgcaatctggtcctcacttccctgtgcagcatcggtccctctcgttagacatcaagggaaataaaacagatattgttatcaataaatacgaagatacctttctggtgattgtgacccaaatcggctgcatgggaaccatactagctgccaagaaagatgaaagtgttttctccgacccaacctacaacgtgtctgttctttttgggaagagagatgagccactcctactagcttgcgcacgtcaacttattgagcacataagtggcagtggctcagcccggtcattggtgatttctctgggtctgaaagatcattctcagggaacgctgaaggatattactgtagctgtgatcgagaatcgcctttggtgatgattgaatagctgagctgggcatgggaacgctgaaagatactgtttagcattgcgcaataggagccatcgtttacaccatgcactaaattctggtacttttgtagttagaccttctatctactgggattaacaaaaggtgggtttaagctgctgtcaaaattggagtgtcaactttaacgctaaacaaaaggcaatgtacactggtaaagcacttctgagttgaaaaaaaaaaaaaaaa

SEQ ID NO: 5646 - protein, 126 aa, Zea mays
  misc_feature: Ceres CLONE ID no. 1064517
  misc_feature: Ceres CDNA ID no. 25446500
  misc_feature: Homolog of GI Number: 55741043 NR Desc: putative integral membrane protein
  misc_feature: Homolog of GI Number: 50540128 NR Desc: zgc:92917
  misc_feature: Homolog of GI Number: 34894978 NR Desc: B1088D01.11
MNTTQSGPHFPVQHRSLSLDIKGNKTDIVINKYEDTFLVIVTQIGCMGTILAAKKDESVFSDPTYNVSVLFGKRDEPLLLACARQLIEHISGSGSARSLVISLGLKDHSQGTLKDITVAVIENRLW

SEQ ID NO: 5647 - DNA, 499 bp, Zea mays
  misc_feature: Ceres CLONE ID no. 1064588
  misc_feature: Ceres CDNA ID no. 5762262
  CDS (60)..(276): REFERENCED BY SEQ ID NO: 5648
acaaagaagctccataattaattattgccctttcagttcgccatcggcagccgagcaccatgagctccacaggcggcggcgacgatggcgccaagaagtcttggccggaagtggtcgggctcagcctggaagaagccaagagggtgatcctgtgcgacaagcccgacgccgacatcgtcgtgctgcccgtcggcacgccggtgaccatggatttccgccccaaccgcgtccgcatcttcgtcgacaccgtcgcggaggcaccccacatcggctgaggtttaaatctacaaaatgaatgactcggacatgccatgcgtacctgtccgtcgccgaataatggatgtgtgtgtgcttcgatcgttcctataagttgctagtaaaaataatggcatcgtcgttatgcatgaataaaaagtatcagaataatgttcaccctttcacgattggatatatgaaaatgtgctcgatcagttgtttggtttcaaaaaaaaaaaaaaaa

SEQ ID NO: 5648 - protein, 71 aa, Zea mays; identical to SEQ ID NO: 926
  misc_feature: Ceres CLONE ID no. 1064588
  misc_feature: Ceres CDNA ID no. 5762262
  misc_feature (12)..(71): Pfam Name: potato_inhibit PFAM Desc: Potato inhibitor I family

SEQ ID NO: 5649 - DNA, 792 bp, Zea mays
  misc_feature: Ceres CLONE ID no. 1064629
  misc_feature: Ceres CDNA ID no. 40351618
  CDS (114)..(524): REFERENCED BY SEQ ID NO: 5650
aaaaaaccccactacccaaccgccgctctccgaggcccctgaaagttgcaacctctccctctcggcgaatttggggtttctgaggcgcgcgaggtaaaccaaggttggtgctcatggctcgtactaagcagactgctcgtaagtccactggaggaaaggctccaaggaagcagttggccaccaaggctgcccgtaagtctgctcccaccactggaggagtgaagaagcctcaccgttaccgccctggaactgttgctcttcgtgagatccgcaagtaccagaagagcactgagctgctcataaggaagcttcctttccagaggcttgttagggagattgcccaggacttcaagactgacctccgcttccagagccatgcggtgctggcccttcaggaggctgcagaggcctacttggtgggtctcttcgaggacaccaacctgtgcgccatccatgccaagcgcgtgaccatcatgcccaaggacattcagctggctaggaggatccgtggcgagagggcttaaggtgcttgctttgcctgtgggaatggctctggtgggcatctgcgtctgcttttgctgctgaacacttgtcatgtgtcgtgaactactaatactggtcgtgtgtagtaatatgtcagtagcgtactctgtgcaatactatgttcgtggagctggatcatttgttcgttggtcgtcctaaatcatccacctggttggtgcctatctgaagcttgcattttatgtctgaaaattagtgattgtgtgaaccattataaataaaaaaaaaaaa

SEQ ID NO: 5650 - protein, 136 aa, Zea mays; identical to SEQ ID NO: 30
  misc_feature: Ceres CLONE ID no. 1064629
  misc_feature: Ceres CDNA ID no. 40351618
  misc_feature (58)..(134): Pfam Name: Histone PFAM Desc: Core histone H2A/H2B/H3/H4

SEQ ID NO: 5651 - DNA, 1173 bp, Zea mays
  misc_feature: Ceres CLONE ID no. 1064649
  misc_feature: Ceres CDNA ID no. 29191192
  CDS (122)..(922): REFERENCED BY SEQ ID NO: 5652
agctcctgactgactgcccgctcgtctgtttgaaacgaaggaggaggtacgcacgccgctactgcaagctagcaagaagaggccgctagcagggggttttgcttgatttctggcggacgacatgagcacggccacgggcgtgcggccggggcggcggttcacggtggggcggagcgaggacgccacgcacccggacaccatccgcgccgccatctctgagttcatcgccaccgccatcttcgtcttcgccgccgagggatccgtcctctcgctcgggaagatgtaccacgaccacagcacgatcagcacggcgggcgggctggtggcagtggcgctggcgcacgcgctgggtctggccgtggcggtggcggtggccgtcaacgtctcgggcgggcacgtgaacccggccgtcaccttcggcgcgctcgtcggcggccgcgtctccctcgtccgcgcggtcctctactgggccgcgcagctgctgggcgccgtcgccgcgacgctcctgctgcggctcgccacgggaggcgcgcgcccaccggggttcgcgctcgcgtccggggtcggcgacgggcacgccgtgctgctggaggccgtcatgacgttcggcctcgtgtacgcctactacgccacggtggtcgacccgaagcggggccacctgggcaccatcgcgccgctggccgtgggtttcctgctcggcgccaacgtgctggcgggcgggcccttcgacggcgccgggatgaacccggcgcgggtcttcggcccggcgctcgtcgggtggcggtggaggcaccactgggtttactggctgggccccttcctcggcgcggggctcgcagggctggtgtacgagtacctgcttatcccgcccgccgacgccgtgccgcacacgcaccagccgctcgcgccagaggactactagctagtcggccggcgccggcgccggcgcggcggcgtctccttagttgggccgtgtcctgttgtcaaatttttttatgcatgtgttggaaattatattgtggtgtcttgtgatggttaataatgaggggcatagggtacgtacttgttgatcgccccagcgttggacacggttaatcaggtgatatgcgtctctactaattactatgtatatgtaataaattccaggtacaaaatgcaaaaaaaaaaaaaaaa

SEQ ID NO: 5652 - protein, 266 aa, Zea mays
  misc_feature: Ceres CLONE ID no. 1064649
  misc_feature: Ceres CDNA ID no. 29191192
  misc_feature (20)..(243): Pfam Name: MIP PFAM Desc: Major intrinsic protein
  misc_feature: Homolog of GI Number: 13448043 NR Desc: tonoplast membrane integral protein ZmTIP3
  misc_feature: Homolog of GI Number: 13447827 NR Desc: tonoplast membrane integral protein ZmTIP3
  misc_feature: Homolog of GI Number: 10140710 NR Desc: putative beta
  misc_feature: Homolog of GI Number: 21436427 NR Desc: putative tonoplast intrinsic protein alpha
  misc_feature: Homolog of GI Number: 7441287 NR Desc: membrane protein MP23 precursor
  misc_feature: Homolog of GI Number: 4539145 NR Desc: major intrinsic protein
  misc_feature: Homolog of GI Number: 7441288 NR Desc: membrane protein MP28
  misc_feature: Homolog of GI Number: 81886 NR Desc: tonoplast intrinsic protein alpha
  misc_feature: Homolog of GI Number: 135859 NR Desc: Probable aquaporin TIP
  misc_feature: Homolog of GI Number: 1200161 NR Desc: tonoplast intrinsic protein
  misc_feature: Useful for making plants with increased biomass and foliage
  misc_feature: Useful for making plants with increased biomass and foliage
MSTATGVRPGRRFTVGRSEDATHPDTIRAAISEFIATAIFVFAAEGSVLSLGKMYHDHSTISTAGGLVAVALAHALGLAVAVAVAVNVSGGHVNPAVTFGALVGGRVSLVRAVLYWAAQLLGAVAATLLLRLATGGARPPGFALASGVGDGHAVLLEAVMTFGLVYAYYATVVDPKRGHLGTIAPLAVGFLLGANVLAGGPFDGAGMNPARVFGPALVGWRWRHHWVYWLGPFLGAGLAGLVYEYLLIPPADAVPHTHQPLAPEDY

SEQ ID NO: 5653 - DNA, 745 bp, Zea mays
  misc_feature: Ceres CLONE ID no. 1064677
  misc_feature: Ceres CDNA ID no. 29191252
  CDS (30)..(551): REFERENCED BY SEQ ID NO: 5654
atccatctcgagccagctactagctagccatggcatcttccaagagtagtcttgcaatgtttgcactggccatagtcatggccgtggtggctgacgtctcggcgcagaacaccccgcaggacttcgtcaacctgcacaaccgcgcccgcgccgtggacggcgtcggccccgtggcatgggacaacaacgtggccaggtttgcgcaggactgggcggcgcagcgcgccggcgattgccggctgcagcactccggcgggccgttcggcgagaacatcttctggggttccgggcagtcgtggacggccgccgacgcggtgaagctgtgggtggacgagaagcagaactaccatcttgacagcaacacctgcgacgccggcaaggtgtgcgggcactacacgcaggtggtgtggcgcaagtcgacccgcatcggctgcgcgcgcgtggtctgcacggggaaccggggcgtcttcatcacctgcaactacaatcccccgggcaacttcaacggcgagcgcccgttcgcgttcctcacccttgacgccgaagcctagtacgtgcgagtgagtgtgatcatacatgcatacgtacgtgcgtgtgtttatgtttgtgtggtttgaatatttatacgtctacaaatgttacgtacgtacgtaaataagcacacattccggcctgcatgtatccatgcggctctgtggagcgtgtaaatgtatgcaaacatctttactcaaaaaaaaaaaaaaaa

SEQ ID NO: 5654 - protein, 173 aa, Zea mays
  misc_feature: Ceres CLONE ID no. 1064677
  misc_feature: Ceres CDNA ID no. 29191252
  misc_feature (33)..(151): Pfam Name: SCP PFAM Desc: SCP
  misc_feature: Homolog of GI Number: 3702665 NR Desc: pathogenisis
  misc_feature: Homolog of GI Number: 732807 NR Desc: type
  misc_feature: Homolog of GI Number: 31430685 NR Desc: putative type
  misc_feature: Homolog of GI Number: 75994087 NR Desc: pathogenesis
  misc_feature: Homolog of GI Number: 3290004 NR Desc: pathogenesis related protein
  misc_feature: Homolog of GI Number: 75994079 NR Desc: pathogenesis
  misc_feature: Homolog of GI Number: 75994041 NR Desc: pathogenesis
  misc_feature: Homolog of GI Number: 75994063 NR Desc: pathogenesis
  misc_feature: Homolog of GI Number: 75994083 NR Desc: pathogenesis
  misc_feature: Homolog of GI Number: 75994085 NR Desc: pathogenesis
MASSKSSLAMFALAIVMAVVADVSAQNTPQDFVNLHNRARAVDGVGPVAWDNNVARFAQDWAAQRAGDCRLQHSGGPFGENIFWGSGQSWTAADAVKLWVDEKQNYHLDSNTCDAGKVCGHYTQVVWRKSTRIGCARVVCTGNRGVFITCNYNPPGNFNGERPFAFLTLDAEA

SEQ ID NO: 5655 - DNA, 966 bp, Zea mays
  misc_feature: Ceres CLONE ID no. 1064696
  misc_feature: Ceres CDNA ID no. 40351619
  CDS (92)..(793): REFERENCED BY SEQ ID NO: 5656
atcacaccacaacccgagcattctgcaaccactttcatcaacgtctcctacgctcaccgttcgttgctccgcacatcagcaggacttgccaatggcgggagacggcgagctgaagctgctgggcgtgtggacgagcccgttcgtcatcagggtgcgcgtggtgctcaacctcaagtcgctgccgtacgagtacgtggaggagagcctgggcagcaagagcgcgctcctcctgggctccaacccggtgcaccagagcgtgcccgtcctcctccacggcggccgccccgtgaacgagtcccaggtcatcgtgcagtacatcgacgaggtctgggcgggggccggcccgtccgtgctcccggccgacccctacgagcgcgccacggcgcgcttctgggcggcgtacgtcgacgacaaggtcgggtcggcgtggacggggatgctcttctcgtgcaagacggaggaggagcgggcggaggcggtgtcccgggccgtggcggcgctggagaccctggagggcgcgttcgcggagtgctccaaggggaaggcgttcttcggcggcgacgccatcgggttcgtcgacgtcgtgcttggcggctacctcggctggttcggcgcgatcgacaagatcatcgggcgccggctgatcgacccggcgaggacgccgctgctggccaggtgggaggagcggttccgcgcggcggacgcggccaagggcgtcgtgccggacgacgccgacaagatgctcgagttcttgcccaccgtgctcgcttggatcgccggcaaagcgaagtgaactgtgtctgtgaggccgtgacatcgccagctcgtgacatgtgtgtttgtgtgtgtctgagtccgtccagtgtgtgctgaataaatgcaccgcatgtcgtgtgttgtaccaagggcaaacaatgctgaataattttgctgtttgttgattccccaggaaaaaaaaaaaaaaaa

SEQ ID NO: 5656 - protein, 233 aa, Zea mays
  misc_feature: Ceres CLONE ID no. 1064696
  misc_feature: Ceres CDNA ID no. 40351619
  misc_feature (7)..(78): Pfam Name: GST_N PFAM Desc: Glutathione S
  misc_feature (88)..(204): Pfam Name: GST_C PFAM Desc: Glutathione S
MAGDGELKLLGVWTSPFVIRVRVVLNLKSLPYEYVEESLGSKSALLLGSNPVHQSVPVLLHGGRPVNESQVIVQYIDEVWAGAGPSVLPADPYERATARFWAAYVDDKVGSAWTGMLFSCKTEEERAEAVSRAVAALETLEGAFAECSKGKAFFGGDAIGFVDVVLGGYLGWFGAIDKIIGRRLIDPARTPLLARWEERFRAADAAKGVVPDDADKMLEFLPTVLAWIAGKAK

SEQ ID NO: 5657 - DNA, 628 bp, Zea mays
  misc_feature: Ceres CLONE ID no. 1064702
  misc_feature: Ceres CDNA ID no. 25446501
  CDS (2)..(388): REFERENCED BY SEQ ID NO: 5658
agctaaccccagaccgcccaacaccagctccaccctcgccaccaaccgcccccgcaccacggccagaaccctagtcacttccccgccgcccactccatggaggacgacgccatctcgacgctcatggacatcgacgactcgccgctcagcgctgcgggggccgggttcctcgacgaggaggacggggaaggcgagatgttcttcgccccgcaccgcgcggcccgcggcggcgctggcgatgcccgcgggcccctccccttttccgggttcttcaacagcttcgacggcgccgatttcgacgacgacgacctcgcctgagggaactgccgcccggttcggtaacggatgttgttcgtggatcgcgaatcgtgttatgtcgataccgtgatggggtctcttaattagcgcatcgattcagactcgtttgggcaatctgaagatgtttagggatcaacattacctttgtggcctatggttcgtggatgcacatgcacagggatcaatataagtacctttgtgccccatggttcgtggatcactgtgcatgtgttcttccgcgtctttgttgttattttggctccatctgtatgatctaatgaaccttcctttgttaaaaaaaaaaaaaaaa

SEQ ID NO: 5658 - protein, 73 aa, Zea mays; identical to SEQ ID NO: 1270
  misc_feature: Ceres CLONE ID no. 1064702
  misc_feature: Ceres CDNA ID no. 25446501

SEQ ID NO: 5659 - DNA, 859 bp, Zea mays
  misc_feature: Ceres CLONE ID no. 1064749
  misc_feature: Ceres CDNA ID no. 29191253
  CDS (122)..(625): REFERENCED BY SEQ ID NO: 5660
aaatagcctcccagccctctctgcctcccgaaaaaacaaacaaacagagatcgcgcttccaatctagctctgcggctgtcgcgaggctccacatttccctccccgcagcgccgaagtaagcatgtgtcccggcggcaggtacgcgggccttgacctccccgccggcgccggcgcgggggacctgcggccggcgttcgacgtgctggacgcggaccacgacggccgcatcagccgcgacgacctcaagaccttctacgccaacgcgggcgccaccgacgagcgcttcgacgacgacgacatcgaggccatgatcaccgccgccgacgccgacctcgacggcttcgtgcagtaccacgagttcgagggcctccttggccgcgcagctaaggcgggggcggacagcggctgccgctcggcgatggaggacgccttccggctaatggaccgcgacggggacggcaaggtcgggttcgaggacctcaaggcctacctcgggtgggccgggatgccggtcgccgacgacgagatccgcgccatgataagtatggctggtgacggcgacagcggcgtggggctcgaggcgctcgccagaatactcgccgtggactttgatgccatcgtctgaagaatctaaaataatcctactgtaaagcactagacttgattttttgggactttttccccctaaaatttggttggtggggagagcaggctggcgtgagattgattgttgtgagtggttctcgttaaccgtgagttttgaatgtatcgtactgttacccataaaaaatcgaaaatctttgagaaacatgaaagatactatgcgtgtatccttggaaactcaaaaaaaaaaaaaaaa

SEQ ID NO: 5660 - protein, 167 aa, Zea mays
  misc_feature: Ceres CLONE ID no. 1064749
  misc_feature: Ceres CDNA ID no. 29191253
  misc_feature (59)..(87): Pfam Name: efhand PFAM Desc: EF hand
  misc_feature: Homolog of GI Number: 5702231 NR Desc: hypersensitive reaction associated Ca2+
  misc_feature: Homolog of GI Number: 10177614 NR Desc: NaCl
  misc_feature: Homolog of GI Number: 2352828 NR Desc: NaCl
  misc_feature: Homolog of GI Number: 4959637 NR Desc: calmodulin mutant SYNCAM37
  misc_feature: Homolog of GI Number: 34909152 NR Desc: putative calmodulin
  misc_feature: Homolog of GI Number: 1168797 NR Desc: Caltractin
  misc_feature: Homolog of GI Number: 4959626 NR Desc: calmodulin mutant SYNCAM14
  misc_feature: Homolog of GI Number: 4959162 NR Desc: calmodulin mutant SYNCAM57A
  misc_feature: Homolog of GI Number: 6969639 NR Desc: calmodulin
MCPGGRYAGLDLPAGAGAGDLRPAFDVLDADHDGRISRDDLKTFYANAGATDERFDDDDIEAMITAADADLDGFVQYHEFEGLLGRAAKAGADSGCRSAMEDAFRLMDRDGDGKVGFEDLKAYLGWAGMPVADDEIRAMISMAGDGDSGVGLEALARILAVDFDAIV

SEQ ID NO: 5661 - DNA, 648 bp, Zea mays
  misc_feature: Ceres CLONE ID no. 1064849
  misc_feature: Ceres CDNA ID no. 29191254
  CDS (90)..(308): REFERENCED BY SEQ ID NO: 5662
ctcaaaacacacacacactcctccctcaccaagtcaccgggccgcagagggcgatcaagcagctagtacacctctgctgtgagtccgcaatgtcgactagctgccgcgctccggccaaccgctgcatctgcaagacgccgtcggggaacccgctgccgcggcggggccaggtcaaggagagcatcgccaagcagatcgtggcggccgccgtggccacggcgtcgatggtcgtctgcgacgccggcgcgggcggcaagaaaggcggggccaagccgcccgccccgcccgccggtgccaagaagaaatgagaagccgaattgcttgtccgggtgtccaataatttatggtatgcttgcacaccacctagctagcgcgccagttcatgtgccagctgtactatttttgttaaggtttgttcgtgttcgtgtagtgatcaccaccttgacgtgacgtctatcgttgtctcgtgcgtgcatgccaggataagtttcacttcctcgccgcacttgtctttgttctgctatgttttgttcttgttattccgtcgtcagggatgtactcctactggggggaggtcggcaagtattatggcctgatctttccctgttatatgtattgtgtgtgtactgcataaaaaaaaaaaaaaaa

SEQ ID NO: 5662 - protein, 72 aa, Zea mays
  misc_feature: Ceres CLONE ID no. 1064849
  misc_feature: Ceres CDNA ID no. 29191254
  misc_feature: Homolog of GI Number: 34908036 NR Desc: P0460C04.28
MSTSCRAPANRCICKTPSGNPLPRRGQVKESIAKQIVAAAVATASMVVCDAGAGGKKGGAKPPAPPAGAKKK

SEQ ID NO: 5663 - DNA, 757 bp, Zea mays
  misc_feature: Ceres CLONE ID no. 1064877
  misc_feature: Ceres CDNA ID no. 40351620
  CDS (262)..(585): REFERENCED BY SEQ ID NO: 5664
acacactttctctctccaccctctcgctctccgacaaggcgacgacgggtaggccaccgccgccggcgccgtcccactacgacaactgctgaggccttcatcgctttcttcgccggcgacgagcacccaccaattcattacgaaggtacacttgctgagactggtgaagttttcgataccacccatgaagataactctattttctcatttgaaattggacaaggcgctgtcatcaaagcatgggatatagccttaagaactatgaaggttggcgaggttgcaaaaattacatgcaaatcagaatatgcatatggagctgcaggctcaccaccagagatacctcctaatgcaacccttatttttgaggtggagctagtagcttgcaggccgaggaaaggttcaagcttaggtagtgtatctgatgagaaagccagacttgaagaacttaagaagcaacgggagctagctgctgctaccaaagaagaggagaaaaagaagagggaggaagcgaaggccgcggcagcagcccgggtgcaagcaaagcttgatgccaagaaggggaaggggaagggaaagggaaaatagatcgtgacgttgctgctgactattgttgtaaccaagaaaataattgtgggagcgtcctcaaactgctccgtcacttgctggttactgtgcttgatgttgtagcgtggactaatgtatcgaaaagacctaagtataaataatgtctggtatctacgcaaaaaaaaaaaaaaaa

SEQ ID NO: 5664 - protein, 107 aa, Zea mays
  misc_feature: Ceres CLONE ID no. 1064877
  misc_feature: Ceres CDNA ID no. 40351620
  misc_feature: The plant is abnormally small.
  misc_feature: Useful for making plants with modulated biomass
  misc_feature (1)..(39): Pfam Name: FKBP_C PFAM Desc: FKBP
MKVGEVAKITCKSEYAYGAAGSPPEIPPNATLIFEVELVACRPRKGSSLGSVSDEKARLEELKKQRELAAATKEEEKKKREEAKAAAAARVQAKLDAKKGKGKGKGK

SEQ ID NO: 5665 - DNA, 861 bp, Zea mays
  misc_feature: Ceres CLONE ID no. 1064878
  misc_feature: Ceres CDNA ID no. 25892497
  CDS (74)..(607): REFERENCED BY SEQ ID NO: 5666
aaggaggctctcgccgtctcgcacaggctcgttgttcctcttatccgcggaggaagaaccttggcccgacaccatgctcccaatggccgtccaccccaccaccacgccggccttgtccccgcgcgcccgcgtctcgccgcacaggcctcccatctcctccctggcggacccctcgtcctccccctgccatcgcatcgtcagtttcaaaagcaggaggctgccacttcgctctctccacatcgccgctgccgctgccgccggggcagaggaagaagaggcgcaactaggtggaagtgtgaacgcggtcgacgaggaggaagcggagaataaggtggtggtgcccgagagacaggacccgatgctggtactcaagttcatctggatggagaagaacatcggcatagcactcgaccagctggttcctggctatggcagcatcccgttgagcccgtactacttctggccgcggaaggacgcgtgggaggagcttagagccaagttggaagagaaagagtggatctcgcagaagcagatgatcatccttctcaaccaggccaccgatatcatcaacctctggcagcagggtggtgggaacctgtcgacatgagtccctccccgccctgttctttcaaccgtgcaaagcttgcgttttgttggtttcactacaggctctctctgttgttaatgttaaaagtatggtacatggccttgtagatcggttcaaactgttctcaggtatggccttttccatggaaatcatcttgtgatttatcttagttattatgtgtatcagtcgtccacccccccccgggaaaatcaagaaacatatccttttcggtgtggttaaaaaaaaaaaaaaaa

SEQ ID NO: 5666 - protein, 177 aa, Zea mays
  misc_feature: Ceres CLONE ID no. 1064878
  misc_feature: Ceres CDNA ID no. 25892497
  misc_feature (124)..(172): Pfam Name: PSRP PFAM Desc: Plastid and cyanobacterial ribosomal protein
  misc_feature: Homolog of GI Number: 50924818 NR Desc: OSJNBa0072F16.12
  misc_feature: Homolog of GI Number: 7578871 NR Desc: plastid
  misc_feature: Homolog of GI Number: 21554275 NR Desc: plastid
  misc_feature: Homolog of GI Number: 28372914 NR Desc: At5g15760
  misc_feature: Homolog of GI Number: 27923871 NR Desc: Probable 30S ribosomal protein PSRP
  misc_feature: Homolog of GI Number: 46577386 NR Desc: Probable 30S ribosomal protein PSRP
  misc_feature: Homolog of GI Number: 32307518 NR Desc: plastid protein ycf65
MLPMAVHPTTTPALSPRARVSPHRPPISSLADPSSSPCHRIVSFKSRRLPLRSLHIAAAAAAGAEEEEAQLGGSVNAVDEEEAENKVVVPERQDPMLVLKFIWMEKNIGIALDQLVPGYGSIPLSPYYFWPRKDAWEELRAKLEEKEWISQKQMIILLNQATDIINLWQQGGGNLST

SEQ ID NO: 5667 - DNA, 531 bp, Zea mays
  misc_feature: Ceres CLONE ID no. 1064880
  misc_feature: Ceres CDNA ID no. 40351621
  CDS (3)..(359): REFERENCED BY SEQ ID NO: 5668
ctctcgcccctctccctctctcccaccccgcagccgccgcgcaggtagccctagcacccgcgacgagcaggatctgcccagttgctcttgcggtagttcccccaactgtcaccatgcagaacgaggagggtaagactgtggacctctatgtccccaggaagtgctcggccacaaacaggatcatcactgccaaggaccatgcctctgtccagatcaacattggccacttggatgcgaatggcctgtatgatggtcacttcacaacgtttgctctctctgggtttgtccgtgctcagggcgacgcagacagctccttggacaggttgtggcagaagaagaaggttgatatcaagcagtagattttacatctagtttaccaagaattggacactgccttagctatgttttgaattcatgtcactatatgcaatgttgtgatttcagctggtaccttaaatctgaagatttagtatctttgttgggttccttctgagtttgatgtgtggtgttcgtttaaaaaaaaaaaaaaaa

SEQ ID NO: 5668 - protein, 81 aa, Zea mays
  misc_feature: Ceres CLONE ID no. 1064880
  misc_feature: Ceres CDNA ID no. 40351621
  misc_feature (1)..(81): Pfam Name: Ribosomal_S21e PFAM Desc: Ribosomal protein S21e
MQNEEGKTVDLYVPRKCSATNRIITAKDHASVQINIGHLDANGLYDGHFTTFALSGFVRAQGDADSSLDRLWQKKKVDIKQ

SEQ ID NO: 5669 - DNA, 647 bp, Zea mays
  misc_feature: Ceres CLONE ID no. 1064908
  misc_feature: Ceres CDNA ID no. 40351622
  CDS (82)..(492): REFERENCED BY SEQ ID NO: 5670
accgcgagaaatctcaatctcaatccccaaaccgtagcagcagcatcatccctcccctcgcatccgacccccccagccccgatggcccgcacgaagcagacggcgcgcaagtccaccggcggcaaggcgccgaggaagcagctggcgaccaaggcggcgcgcaagtccgccccggccaccggcggcgtgaagaagccccaccgcttccgcccggggaccgtcgccctccgcgagatccgcaagtaccagaagagcacggagctgctcatccgcaaactccccttccagcgcctcgtccgggagatcgcccaggacttcaagaccgacctccgcttccagtcctccgccgtctccgccctgcaggaggccgccgaggcctacctcgtcggcctcttcgaggacaccaacctctgcgccatccacgccaagcgcgtcaccatcatgcccaaggacatccagctcgcgcgccgcatccgtggggagcgcgcctaggctccgcacgcgccctgcccgcttcgcttggttgctagcagctgtctatgattctgtagttgtttgccctccttgtatgtcctgtggatgccatcgattgttcaaatctctggtttgattaatggaatcacacatctttaaaaaaaaaaaaaaaa

SEQ ID NO: 5670 - protein, 136 aa, Zea mays; identical to SEQ ID NO: 588
  misc_feature: Ceres CLONE ID no. 1064908
  misc_feature: Ceres CDNA ID no. 40351622
  misc_feature (58)..(134): Pfam Name: Histone PFAM Desc: Core histone H2A/H2B/H3/H4

SEQ ID NO: 5671 - DNA, 920 bp, Zea mays
  misc_feature: Ceres CLONE ID no. 1064927
  misc_feature: Ceres CDNA ID no. 36695918
  CDS (89)..(547): REFERENCED BY SEQ ID NO: 5672
aaaaccctagacgcgaacgcacctcctcccttcctgcccccgaccgccccagccgccgccgccgtcgccgccgccgccgactgcagccatgtcgctgatcgcgggtgaggagttccagcacatcctgcgtgtgctcaacaccaacgtcgatggtaagcagaagatcatgttcgcgctgacctccatcaagggtgtgggccgccgcttctccaacatcgtctgcaagaaggccgacatcgacatgaacaagagggccggagagctttccgcggaggagatggaccgtctgatggcggtggtgcacaacccgcgccagttcaaggtgccggattggttcctcaacaggaagaaggattacaaggacgggaggttctcccaggtcgtgtccaacgccgtggacatgaagctcagggatgaccttgagaggctcaagaagatcaggaaccatcgcggtctgcggcactactggggcgtgcgtgtccgtggtcagcacaccaagactacaggcaggagaggaaagactgttggtgtctccaagaagcgataagctgcttgacaaagatcctgcatagcttgtattactgtgttggtccatttccagaatcttaaggagtgttcttgtttagatgattaccttggatgatgttttgccctagataatgttttggttctggaacctttaatatattgtatcttgaattccatgttgaactcttcggagtttgttttgccatgggctttaagtcatttgaatggttggcaagattatgtatgttctagcatttctgtgaattacaggtttgttggctaaaaaaaaaaaaaaaaaaaaaaaaaaaaaaaaaaaaaaaaaaaaaaaaaaaaaaaaaaaaaaaaaaaaaaaaaaaaaaaaaaaaaaaaaaaaaaaaaaaaaaaaaaaaaaa

SEQ ID NO: 5672 - protein, 152 aa, Zea mays; identical to SEQ ID NO: 2664
  misc_feature: Ceres CLONE ID no. 1064927
  misc_feature: Ceres CDNA ID no. 36695918
  misc_feature (14)..(142): Pfam Name: Ribosomal_S13 PFAM Desc: Ribosomal protein S13/S18
  misc_feature: Homolog of GI Number: 22204120 NR Desc: putative ribosomal protein S18
  misc_feature: Homolog of GI Number: 50919149 NR Desc: putative ribosomal protein S18A
  misc_feature: Homolog of GI Number: 56236126 NR Desc: At1g22780
  misc_feature: Homolog of GI Number: 50934523 NR Desc: putative ribosomal protein S18
  misc_feature: Homolog of GI Number: 17978783 NR Desc: S18.A ribosomal protein
  misc_feature: Homolog of GI Number: 40287492 NR Desc: putative ribosomal protein
  misc_feature: Homolog of GI Number: 24266988 NR Desc: ribosomal protein S18
  misc_feature: Homolog of GI Number: 67083901 NR Desc: ribosomal protein S18
  misc_feature: Homolog of GI Number: 71040621 NR Desc: ribosomal protein S18

SEQ ID NO: 5673 - DNA, 639 bp, Zea mays
  misc_feature: Ceres CLONE ID no. 1064963
  misc_feature: Ceres CDNA ID no. 29191255
  CDS (43)..(489): REFERENCED BY SEQ ID NO: 5674
ataggtatcgccgacgagtgaactgctacaaaagatctcacaatggaacaaactttcatcatgatcaagccagacggcgtccagaggggtctggtcggtgaaatcatctgcaagttcgaaaagaagggtttcactttgaaaggtctaaagctgatcactgtggaccgtccttttgctgagaaacactaccaagacttgtctgccaagcccttcttcaacagccttgtcgattacataatctctggaccagtcgttgctatgatctgggaggggaagaacgttgttttgacaggaaggaagatcattggagcaactaaccctgcggcttctgagccaggaaccatccgtggcgattttgctattgacattggcaggaacgtgatccatgggagcgactcagtggagagtgctaacaaggaagctgcgttgtggttccctgacggacctgtgaactggcagagcagccttcattcttggatctacgaatgattctaacgcgtgtggttgtttgttaccctttttatcctttggttatgaatcgaaacatgtctctccgttgttctttttgttagctttgttgcttgtcttcttccctgggaatctatgaaaacctatcttgcaccaaaaaaaaaaaaaaaa

SEQ ID NO: 5674 - protein, 148 aa, Zea mays
  misc_feature: Ceres CLONE ID no. 1064963
  misc_feature: Ceres CDNA ID no. 29191255
  misc_feature (2)..(136): Pfam Name: NDK PFAM Desc: Nucleoside diphosphate kinase
  misc_feature: Homolog of GI Number: 19744165 NR Desc: NDPK I
  misc_feature: Homolog of GI Number: 18413214 NR Desc: nucleoside diphosphate kinase 1
  misc_feature: Homolog of GI Number: 7267574 NR Desc: nucleoside
  misc_feature: Homolog of GI Number: 16396 NR Desc: nucleoside diphosphate kinase
  misc_feature: Homolog of GI Number: 71040669 NR Desc: nucleoside diphosphate kinase I
  misc_feature: Homolog of GI Number: 3309053 NR Desc: nucleoside diphosphate kinase I
  misc_feature: Homolog of GI Number: 1236951 NR Desc: nucleoside diphosphate kinase
  misc_feature: Homolog of GI Number: 1389640 NR Desc: PNDKN1
  misc_feature: Homolog of GI Number: 400404 NR Desc: Nucleoside diphosphate kinase I
  misc_feature: Homolog of GI Number: 296174 NR Desc: nucleoside
MEQTFIMIKPDGVQRGLVGEIICKFEKKGFTLKGLKLITVDRPFAEKHYQDLSAKPFFNSLVDYIISGPVVAMIWEGKNVVLTGRKIIGATNPAASEPGTIRGDFAIDIGRNVIHGSDSVESANKEAALWFPDGPVNWQSSLHSWIYE

SEQ ID NO: 5675 - DNA, 705 bp, Zea mays
  misc_feature: Ceres CLONE ID no. 1064986
  misc_feature: Ceres CDNA ID no. 29191314
  CDS (54)..(500): REFERENCED BY SEQ ID NO: 5676
atccaatctcagcttccaaggcaaaccaagaggagagaccaaggtagacgacgatggcggtgtcggtggagctgcccaaggagtacggctacgtggtgctcgtcgtggtggcctacgccttcctcaacttctggatgagcttccaggtcggcgccgcccgcaagaagtacaaggtgttctaccccaccatgtacgccaccgagtcggagaacaaggacgccaagcgcttcaactgcgtccagagggggcaccagaactcgattgagatgatgccgctcttcttcgccacgctgctgctcggcggcctgcagcacccggtcgccgccgccgcgctggggctgctctacaccgtcgccaggttcttctacttcaagggctacgccaccggcgtcccggagaaccgctacaagcttggggggctcaacttcccggcgataatggggctgatcatctgcacggcgtcgttcggcatcaaccttgtcatcagggaggcgatctgaggttcccggactgatgcctggcttgatggccgctgtgactcgagtcatttaggcgtgttgatgatgtcttttaaagtgtcaaatatatgtgtgtgcgtctgttttactctcacagaataaggctgtatggagacggattataacatcgaagttttaggttttgcagtacagttttggatacggttttcgaaaaaaaaaaaaaaaa

SEQ ID NO: 5676 - protein, 148 aa, Zea mays
  misc_feature: Ceres CLONE ID no. 1064986
  misc_feature: Ceres CDNA ID no. 29191314
  misc_feature (9)..(140): Pfam Name: MAPEG PFAM Desc: MAPEG family
  misc_feature: Homolog of GI Number: 50918191 NR Desc: putative glutathione S
  misc_feature: Homolog of GI Number: 62733553 NR Desc: MAPEG family
  misc_feature: Homolog of GI Number: 21617891 NR Desc: glutathione
  misc_feature: Homolog of GI Number: 6686399 NR Desc: F1E22.17
  misc_feature: Homolog of GI Number: 13385010 NR Desc: microsomal glutathione S
  misc_feature: Homolog of GI Number: 50751077 NR Desc:  similar to microsomal glutathione S
  misc_feature: Homolog of GI Number: 47087399 NR Desc: zgc:56518
  misc_feature: Homolog of GI Number: 27678076 NR Desc: similar to microsomal glutathione S
  misc_feature: Homolog of GI Number: 61861854 NR Desc:  similar to microsomal glutathione S
  misc_feature: Homolog of GI Number: 72017432 NR Desc:  similar to microsomal glutathione S
MAVSVELPKEYGYVVLVVVAYAFLNFWMSFQVGAARKKYKVFYPTMYATESENKDAKRFNCVQRGHQNSIEMMPLFFATLLLGGLQHPVAAAALGLLYTVARFFYFKGYATGVPENRYKLGGLNFPAIMGLIICTASFGINLVIREAI

SEQ ID NO: 5677 - DNA, 718 bp, Zea mays
  misc_feature: Ceres CLONE ID no. 1065055
  misc_feature: Ceres CDNA ID no. 29191315
  CDS (99)..(557): REFERENCED BY SEQ ID NO: 5678
aaaaacacacaaagctcatcgagagaagattcagacatttcatagcttctttattccttcccgaaggggtaccctgagatcacaaaggataacaaacaatgggcaagggagttgcagtcttgaacagcagtgagggtgttaaggggactatcttcttcacccaggaaggagacggtgtgaccactgtgactggaacagtttctggacttaaacctggtctacatggtttccatgtccatgctcttggtgacaccactaacggttgcatgtccaccggtccacatttcaaccctgatggtaaacaacacggtgccccagaggatgctaatcgtcatgctggagatctaggaaacatcattgttggagatgatggaactgccaccttcacaatcactgactgccagattcctcttagtggaccaaactctattgtcggaagggctgttgttgtccacgcagaccctgatgacctcggaaagggaggccatgaactcagcttggctaccggaaacgcaggcgggcgtgttgcttgtggtattattggtcttcagggctaagtaagctgttacttatcgaggaagggagtgatgcaataaggaggtcatatacctctagacctggctagtttgtgtgtgtatctgtgtgtactgtgtgtgtggctataatctctcctttgtggctcaatacattttatttaagaccaaaaaaaaaaaaaaaa

SEQ ID NO: 5678 - protein, 152 aa, Zea mays
  misc_feature: Ceres CLONE ID no. 1065055
  misc_feature: Ceres CDNA ID no. 29191315
  misc_feature (1)..(152): Pfam Name: Sod_Cu PFAM Desc: Copper/zinc superoxide dismutase
  misc_feature: Homolog of GI Number: 24421235 NR Desc: superoxide dismutase
  misc_feature: Homolog of GI Number: 20258871 NR Desc: putative superoxide dismutase
  misc_feature: Homolog of GI Number: 1204052 NR Desc: cytosolic Cu/Zn
  misc_feature: Homolog of GI Number: 2305111 NR Desc: Cu/Zn superoxide dismutase
  misc_feature: Homolog of GI Number: 3288850 NR Desc: cytosolic Cu/Zn superoxide dismutase
  misc_feature: Homolog of GI Number: 1204050 NR Desc: cytosolic Cu/Zn
  misc_feature: Homolog of GI Number: 134602 NR Desc: Superoxide dismutase
  misc_feature: Homolog of GI Number: 9802567 NR Desc: F22O13.32
  misc_feature: Homolog of GI Number: 38228697 NR Desc: superoxide dismutase
  misc_feature: Homolog of GI Number: 4102861 NR Desc: copper/zinc
  misc_feature: Useful for making plants with increased biomass and foliage
MGKGVAVLNSSEGVKGTIFFTQEGDGVTTVTGTVSGLKPGLHGFHVHALGDTTNGCMSTGPHFNPDGKQHGAPEDANRHAGDLGNIIVGDDGTATFTITDCQIPLSGPNSIVGRAVVVHADPDDLGKGGHELSLATGNAGGRVACGIIGLQG

SEQ ID NO: 5679 - DNA, 695 bp, Zea mays
  misc_feature: Ceres CLONE ID no. 1065066
  misc_feature: Ceres CDNA ID no. 29191316
  CDS (141)..(452): REFERENCED BY SEQ ID NO: 5680
aacagagccccaaaccggtttcccctctacttctactcctccccccaccccacccagcccaccgtcgcagaagcacaagcgcagacagattcgaaccggagaactcgatctgatagcagaagctttcttgtctcggcggaatggcggaggagaaggggacgctgcaggcgatgaggggctgggtcgtggaccacaagctgcgggccgtagggacgctgtggctcacggggatcgcgggatccatcgcctacaactggtccaggcccggcatgaagaccagcgtcaagctcatccacgccaggcttcatgctcaggccctcaccctggctgccttgggttgttctgcactggtggagtactatgatcaccagtcaggatcagggtcaaaagttcacgactatgcaaagcagttccttccgtcggacagaaacgccaaaaaggactctgtgtagaagaggcagcaaattatgatataggcttccattagctgatatggaattcgttgatgttattttctgagcaaacaatctggcatttcacatgccgttatccaagttctgcaggcttcctgttctccgtataagctactgaaccagcatctagatgcagccgtatgcaaatccgtggtgatggaaatatgtactttcctgaaccgcgcatgaatgaaatgtaatgaatgaaaaaaaaaaaaaaaa

SEQ ID NO: 5680 - protein, 103 aa, Zea mays
  misc_feature: Ceres CLONE ID no. 1065066
  misc_feature: Ceres CDNA ID no. 29191316
  misc_feature (1)..(71): Pfam Name: HIG_1_N PFAM Desc: Hypoxia induced protein conserved region
  misc_feature: Homolog of GI Number: 51964126 NR Desc: PREDICTED OSJNBa0016G10.13 gene product
MAEEKGTLQAMRGWVVDHKLRAVGTLWLTGIAGSIAYNWSRPGMKTSVKLIHARLHAQALTLAALGCSALVEYYDHQSGSGSKVHDYAKQFLPSDRNAKKDSV

SEQ ID NO: 5681 - DNA, 941 bp, Zea mays
  misc_feature: Ceres CLONE ID no. 1065147
  misc_feature: Ceres CDNA ID no. 25892363
  CDS (2)..(766): REFERENCED BY SEQ ID NO: 5682
atcgcccgtccacttcaatttccatctctctgggcactccggcggaacgaagaacgcccacggatctgaggaacaagccgtctttgtgggctttagaatgcagatcttcgtgaggagccccagcggcaagatgatttgcctcagggtccaacctgacgataccttgcatacagttaagaaaaagattttagaaaaataccaccttgtctttgaaggagtgcagatggaggataacctcacactggctgattataacatccagcatcaatccacgcttgacctccaagaaaagatgcaaatctatgtgaaggagacgctaaaaggcctaaccatcactcttgatgttgatagcttagatactattgacatcataaaggacaagattgaatacaacgagggatttcccaagggtcggcaatgcctcatctttggcgacgaacagctagagggcaagtacaccttggcggactacaacatttgcaacgagtccacgcttctccttgtcatccacccatgtacaagtacaagtgacgcaatgcagatctttgtgaagatgcaaaacggaaagaccaccactgttagggtcgacagctcagataccgtcaacagtatcacggtgaagatctatgaaatggagggcatcccacccctagaacagcgcatcatctttcgcggcaggcgtcttgagggcagacgcaccctggcggactacggcatccagaaggaggaaaccctccatctgatgctttgcctttgtggctggtgatgagactgatgccatgcatgcatgcatggtcattcaatattactactagtggtttgttatcagtaaaaagtatcattaattatagggatgccgtgtcatttagctaaaggtctttcttaccaggagagttctgtcatcagtaaaagtttttattgtggtaaaaaaaaaaaaaaaa

SEQ ID NO: 5682 - protein, 222 aa, Zea mays
  misc_feature: Ceres CLONE ID no. 1065147
  misc_feature: Ceres CDNA ID no. 25892363
  misc_feature (147)..(220): Pfam Name: ubiquitin PFAM Desc: Ubiquitin family
  misc_feature: Homolog of GI Number: 27734407 NR Desc: polyubiquitin
  misc_feature: Homolog of GI Number: 27734402 NR Desc: polyubiquitin
  misc_feature: Homolog of GI Number: 433970 NR Desc: polyubiquitin
  misc_feature: Homolog of GI Number: 15982787 NR Desc: AT4g05320/C17L7_240
  misc_feature: Homolog of GI Number: 3126967 NR Desc: polyubiquitin
  misc_feature: Homolog of GI Number: 899608 NR Desc: polyubiquitin
  misc_feature: Homolog of GI Number: 902584 NR Desc: polyubiquitin containing 7 ubiquitin monomers
  misc_feature: Homolog of GI Number: 2760345 NR Desc: ubiquitin
  misc_feature: Homolog of GI Number: 2760349 NR Desc: ubiquitin
  misc_feature: Homolog of GI Number: 1332579 NR Desc: polyubiquitin
MQIFVRSPSGKMICLRVQPDDTLHTVKKKILEKYHLVFEGVQMEDNLTLADYNIQHQSTLDLQEKMQIYVKETLKGLTITLDVDSLDTIDIIKDKIEYNEGFPKGRQCLIFGDEQLEGKYTLADYNICNESTLLLVIHPCTSTSDAMQIFVKMQNGKTTTVRVDSSDTVNSITVKIYEMEGIPPLEQRIIFRGRRLEGRRTLADYGIQKEETLHLMLCLCGW

SEQ ID NO: 5683 - DNA, 882 bp, Triticum aestivum
  misc_feature: Ceres CLONE ID no. 1065203
  misc_feature: Ceres CDNA ID no. 24766113
  CDS (86)..(748): REFERENCED BY SEQ ID NO: 5684
atagatctctacttagcttctccgcgatacaagcccatttaaattcacatccaaccggatcgaggatttagggttcgcgaaaaaaatggcgcaacaacaatcgttgatctacagcttcgtcgctcgcgggacggtgatcctcgccgagttcactgatttcaaaggcaacttcacctccgtcgctgcacagtgcctccagaagctcccctcttccaacaacaagttcacctacacctgcgacggccacaccttcagttacctcgtcgaagatggattcacgtactgtgttgttgcggttgattctgctgggaggcagattccgatggcgtttttggagagagtgaaagaggattttagcaagagatatggtggtgggaaggctgctactgctcaggctaacagcttcaataaagagtttggctctaagctgaaagagcacatgcagtattgtatggatcaccctgatgagattagcaagcttgctaaggtgaaggctcaagtctctgaagttaaaggtgttatgatggaaaacatcgagaaggttcttgaccgtggtgagaaaattgagcttctggtggacaaaaccgagaaccttcgctctcaggcacaagacttcagaacaacggggacacagatgagaagaaagatgtggcttcagaacatgaagattaaactcatagttctcgccatcatcgtcgcactgattctcatcatcgtgctctcagtttgccatggcttcaagtgttaaagagccccatcaaagttaaaaaaactctcttgaaatctttttctcactcggtcttcgtaatctatatataatagcaaaccatttttattaatctgatgatgtcatcattttttataagaaaaaaaaaaaaaaaa

SEQ ID NO: 5684 - protein, 220 aa, Triticum aestivum
  misc_feature: Ceres CLONE ID no. 1065203
  misc_feature: Ceres CDNA ID no. 24766113
  misc_feature (129)..(216): Pfam Name: Synaptobrevin PFAM Desc: Synaptobrevin
  misc_feature: Homolog of GI Number: 22137292 NR Desc: At1g04740/T1G11_1
  misc_feature: Homolog of GI Number: 51969436 NR Desc: putative vesicle
  misc_feature: Homolog of GI Number: 21592481 NR Desc: putative synaptobrevin
  misc_feature: Homolog of GI Number: 600710 NR Desc: formerly called HAT24
  misc_feature: Homolog of GI Number: 79324082 NR Desc: SAR1
  misc_feature: Homolog of GI Number: 50509098 NR Desc: synaptobrevin
  misc_feature: Homolog of GI Number: 15220315 NR Desc: synaptobrevin family protein
  misc_feature: Homolog of GI Number: 2914706 NR Desc: putative synaptobrevin
  misc_feature: Homolog of GI Number: 29893540 NR Desc: putative synaptobrevin protein
  misc_feature: Homolog of GI Number: 50919181 NR Desc: synaptobrevin
  misc_feature: Useful for making plants with increased biomass and foliage
  misc_feature: Useful for making plants with increased biomass and foliage
MAQQQSLIYSFVARGTVILAEFTDFKGNFTSVAAQCLQKLPSSNNKFTYTCDGHTFSYLVEDGFTYCVVAVDSAGRQIPMAFLERVKEDFSKRYGGGKAATAQANSFNKEFGSKLKEHMQYCMDHPDEISKLAKVKAQVSEVKGVMMENIEKVLDRGEKIELLVDKTENLRSQAQDFRTTGTQMRRKMWLQNMKIKLIVLAIIVALILIIVLSVCHGFKC

SEQ ID NO: 5685 - DNA, 764 bp, Triticum aestivum
  misc_feature: Ceres CLONE ID no. 1065293
  misc_feature: Ceres CDNA ID no. 25087819
  CDS (246)..(515): REFERENCED BY SEQ ID NO: 5686
gaaaatcggctcccgccataaaaaaacacaccaagagtgaggacgtccctagggttcctagccgccgccggcccgccgccactactgccggccctccgctgcggcggccgaagcctccgctgccccgcctccggtacaggagcacagcagcgcctccctccctggagcagccgctcccgcccggcaacgccgccgcccggagctaccggcgaccagtataggcagacaaacgctacatttcctagatgaagcacatattcaagatcatcacggtgctggcggcgatctcggccgtctgggctgcgctccttgaaacctcgacagttcctcacagttacacctggctgcttcccatctatttggtagtggcgcttggatgctacggcctttttatggttgggtacgggctgatgttctttcccacctgtcctcaagaagccatactactacaacaggatattatggaggctaaggaattcttatccaaaaggggtgttgatgtgggctctgactgaggtcgattccaatgtttaatattttgtggccagtttgaagcttcctggataccatagctagaaaaggttatatgacatttcactatgtttagatactgttactaacacagttttggtgagtggcgtgttacaattctacatttgaggtggatggcttgtcacaacactacttgtgtccgaaaacattatgagaacaactaatgaatggttcgttaacaagtccattagtgttcaaaaaaaaaaaaaaaa

SEQ ID NO: 5686 - protein, 89 aa, Triticum aestivum
  misc_feature: Ceres CLONE ID no. 1065293
  misc_feature: Ceres CDNA ID no. 25087819
  misc_feature: Homolog of GI Number: 50912793 NR Desc: dolichol
  misc_feature: Homolog of GI Number: 73961608 NR Desc:  similar to Dolichol
  misc_feature: Homolog of GI Number: 22902323 NR Desc: Dpm3 protein
  misc_feature: Homolog of GI Number: 68226412 NR Desc: dolichol
  misc_feature: Homolog of GI Number: 20138038 NR Desc: Dolichol
MKHIFKIITVLAAISAVWAALLETSTVPHSYTWLLPIYLVVALGCYGLFMVGYGLMFFPTCPQEAILLQQDIMEAKEFLSKRGVDVGSD

SEQ ID NO: 5687 - DNA, 720 bp, Triticum aestivum
  misc_feature: Ceres CLONE ID no. 1065363
  misc_feature: Ceres CDNA ID no. 36701356
  CDS (122)..(556): REFERENCED BY SEQ ID NO: 5688
gaaaaccagaaaccgcagaccgcaccaccaccgctccccatctcgatctaaagccgagggtttcgtccagctccgtcgccgcgacccaagccagagccagccccaccccagccagccagccatgccgaagaacaagggtaagggaggcaagaaccgcaagaggggcaagaacgaggccgacgacgacaagcgcgagctggtgttcaaggaggacgggcaggagtacgcgcaggtgacgcggatgctcggcaacgggcgctgcgaggccatctgcgtcgacggcaccaagcgcctctgccacatccggggcaagatgcacaagaaggtctggatcgccgccggggacatcgtcctcgtcggcctccgcgactaccaggacgacaaggccgacgtcatcctcaagtacatgaacgacgaggcccgcctgctcaaggcctacggggagctccccgacacgctccgcctcaacgagggcgtcgacgtcgacggccccgaggagggcgagggcgacagcgactacatccagttcgaggacgaggacatcgacaagatctaagcttttttcccctcctcctccctcgctcgatatactttgtgttctattctgttctaatagcgtccgtgtctgtctgtgtcggtcggtcggtgggctgttgtggattgatggatttggtaacgagaaatcgttgtgatttgaggtgcttaaaaaaaaaaaaaaaa

SEQ ID NO: 5688 - protein, 144 aa, Triticum aestivum
  misc_feature: Ceres CLONE ID no. 1065363
  misc_feature: Ceres CDNA ID no. 36701356
  misc_feature (13)..(113): Pfam Name: eIF PFAM Desc: Eukaryotic initiation factor 1A
  misc_feature: Homolog of GI Number: 1352427 NR Desc: Eukaryotic translation initiation factor 1A
  misc_feature: Homolog of GI Number: 626041 NR Desc: translation initiation factor eIF
  misc_feature: Homolog of GI Number: 31043871 NR Desc: eukaryotic translation initiation factor 1A
  misc_feature: Homolog of GI Number: 50907237 NR Desc: eukaryotic translation initiation factor 1A
  misc_feature: Homolog of GI Number: 3024017 NR Desc: Eukaryotic translation initiation factor 1A
  misc_feature: Homolog of GI Number: 81076307 NR Desc: putative translation initiation factor eIF
  misc_feature: Homolog of GI Number: 21618180 NR Desc: putative translation initiation factor eIF
  misc_feature: Homolog of GI Number: 15450561 NR Desc: At2g04520/T1O3.7
  misc_feature: Homolog of GI Number: 17977975 NR Desc: translation initiation factor
  misc_feature: Homolog of GI Number: 76659720 NR Desc:  eukaryotic translation initiation factor 1A
MPKNKGKGGKNRKRGKNEADDDKRELVFKEDGQEYAQVTRMLGNGRCEAICVDGTKRLCHIRGKMHKKVWIAAGDIVLVGLRDYQDDKADVILKYMNDEARLLKAYGELPDTLRLNEGVDVDGPEEGEGDSDYIQFEDEDIDKI

SEQ ID NO: 5689 - DNA, 957 bp, Triticum aestivum
  misc_feature: Ceres CLONE ID no. 1065371
  misc_feature: Ceres CDNA ID no. 29191751
  CDS (65)..(823): REFERENCED BY SEQ ID NO: 5690
gcttaagaaaaaagcctcgctgcaccaactcgatcggcaagtacaggttccatctcgctcgtcgatgccgtctttcatcgacggcccaagcctccggtcgctgctccggccgtccacgaacgggcgccggaccaagacgccggacagcgccggcggcggcaaaggaggaggcggccatggccacggaggagggatcttcaagatgttcaagctcatgccgatgctctcgtcggggtgcaagatggtggcgctgctgggccggcacaacagccgggcgctcctcgcggaccacgccacgacggtgacgctcttcggccaccgccgcggccgcgtcagcctggccatccacgaggacacccgcgcgccgccggtgttcctcatcgagctgcccatgctcaccagcgcgctgcacaaggagatcgcgtccggggtggtcaagctggcgctggagagcgacacccgcagcgcgcgccgccggctggtcgaggagtacgtgtgggccgtcttctgcaacggccgcaaggccggctactccatccgccgcaaggacgcctccgacgacgagcgccacgtcatgcgcctgctgcgcggcgtctccatgggcgccggcgtgctgccggccgcgcccgagaaggacggcggcgtgcccgcggggcccgacggcgagctcacgtacgtgcgcgcccgcgttgagcgcgttgtcggctccaaggactcggaggcgttctacatgatcaacccccacgagggcggcgtcggcggcgacggtggcgacgacggcagcgcaccggagctgagcattttcctagtgaggatgaagtgaacaaagacaagcacttcgtcttacatgtatactcaggcgagcagatcagatcggttttcggagaaattggaatataaatagtgtgagagagagagattatgtgtaatatagcaagttcaaaaaaaaaaaaaaaa

SEQ ID NO: 5690 - protein, 252 aa, Triticum aestivum
  misc_feature: Ceres CLONE ID no. 1065371
  misc_feature: Ceres CDNA ID no. 29191751
  misc_feature: Homolog of GI Number: 34909066 NR Desc: P0702B09.30
  misc_feature: Homolog of GI Number: 50929061 NR Desc: OSJNBb0034I13.25
  misc_feature: Homolog of GI Number: 2078483 NR Desc: antifreeze glycopeptide AFGP polyprotein precursor
  misc_feature: Homolog of GI Number: 66776103 NR Desc: LigA
  misc_feature: Homolog of GI Number: 66776896 NR Desc: LigA
  misc_feature: Homolog of GI Number: 66775783 NR Desc: ABC transporter
MPSFIDGPSLRSLLRPSTNGRRTKTPDSAGGGKGGGGHGHGGGIFKMFKLMPMLSSGCKMVALLGRHNSRALLADHATTVTLFGHRRGRVSLAIHEDTRAPPVFLIELPMLTSALHKEIASGVVKLALESDTRSARRRLVEEYVWAVFCNGRKAGYSIRRKDASDDERHVMRLLRGVSMGAGVLPAAPEKDGGVPAGPDGELTYVRARVERVVGSKDSEAFYMINPHEGGVGGDGGDDGSAPELSIFLVRMK

SEQ ID NO: 5691 - DNA, 569 bp, Zea mays
  misc_feature: Ceres CLONE ID no. 1065778
  misc_feature: Ceres CDNA ID no. 29191317
  CDS (63)..(338): REFERENCED BY SEQ ID NO: 5692
aaaagccctcgttccccaaagccagatttcttctccagcctttcatcgcacgaaaggcatcaatggcggcggcgggcccagccaagacggaggtgctgtccctcttccgcgccttcctccgcacggcgaggcagttctccgactacaacatccgcgagtacacgcggcgccgcgcggcggacgccttccgcgagaaccgcgccctcgccgacgcgccggccgcggcggcggctttcgcggacgggaagcagcagctggaggtggccaagcggcaagtgctggtgtactctctgtacgcgcccaaggccaagagcgttgtggagatgaagattcagtgagcgacaccagggagaggtttcacgcccgccatctcctcctttttcccctttcgggtctgggctcttttatgtactgttagtagggttattatggagatctgacgctgatagaaattctgccgttactatgtttgctggataattgccatgatacggtggttgctattgttcaataagttcgcaaattaatgatcatgatactatgcgtttcgcgcaaaaaaaaaaaaaaaa

SEQ ID NO: 5692 - protein, 91 aa, Zea mays
  misc_feature: Ceres CLONE ID no. 1065778
  misc_feature: Ceres CDNA ID no. 29191317
  misc_feature (6)..(70): Pfam Name: Complex1_LYR PFAM Desc: Complex 1 protein
  misc_feature: Homolog of GI Number: 31431993 NR Desc: putative CGI
  misc_feature: Homolog of GI Number: 50734067 NR Desc:  similar to chromosome 6 open reading frame 149
  misc_feature: Homolog of GI Number: 62663447 NR Desc:  similar to CDNA sequence BC034664
  misc_feature: Homolog of GI Number: 66852593 NR Desc: Complex 1 protein
  misc_feature: Homolog of GI Number: 51593329 NR Desc: CDNA sequence BC034664
  misc_feature: Homolog of GI Number: 45187760 NR Desc: ADL113Cp
  misc_feature: Homolog of GI Number: 38570054 NR Desc: chromosome 6 open reading frame 149
MAAAGPAKTEVLSLFRAFLRTARQFSDYNIREYTRRRAADAFRENRALADAPAAAAAFADGKQQLEVAKRQVLVYSLYAPKAKSVVEMKIQ

SEQ ID NO: 5693 - DNA, 637 bp, Zea mays
  misc_feature: Ceres CLONE ID no. 1065860
  misc_feature: Ceres CDNA ID no. 40351623
  CDS (67)..(411): REFERENCED BY SEQ ID NO: 5694
atcagctcgaggtagcagctccccccgcaaaaaccctagctttacctccccacaagcgcctccaagatgaagctcgtcaggttcttgatgaagctgaacaacgaaacggtgaccatcgagcttaagaacggcaccgtcgtacacggaaccattaccggcgttgacatcagcatgaatactcatctgaagactgtgaagctgacactaaaagggaaaaatcctgttacccttgatcaccttagtgtgaggggaaacaacatccgctattatatccttcctgacagcctaaacctggagactttgctggttgaggaaacaccaagggtcaagcctaagaagcctacttctgggaagcccttgggacgtgggcgtggccgtggtcgtgggcgcggtcggggtcggggacgttgagcatgctagctgcttttggaaattgcattgcgtgcatctgcagtgtaacctacattcctatcaattgtacgaagtatgcctttgattatgcaaccatgtatcaattgtttttttttttttgccgtggatttatgttgatgaggttaccatgtgatcatatgttctttccctagaacttttaagaactaaatactatctttactctttagcaaaaaaaaaaaaaaaa

SEQ ID NO: 5694 - protein, 114 aa, Zea mays
  misc_feature: Ceres CLONE ID no. 1065860
  misc_feature: Ceres CDNA ID no. 40351623
  misc_feature (5)..(70): Pfam Name: LSM PFAM Desc: LSM domain
MKLVRFLMKLNNETVTIELKNGTVVHGTITGVDISMNTHLKTVKLTLKGKNPVTLDHLSVRGNNIRYYILPDSLNLETLLVEETPRVKPKKPTSGKPLGRGRGRGRGRGRGRGR

SEQ ID NO: 5695 - DNA, 1113 bp, Zea mays
  misc_feature: Ceres CLONE ID no. 1065873
  misc_feature: Ceres CDNA ID no. 29191318
  CDS (97)..(891): REFERENCED BY SEQ ID NO: 5696
attccattcgccgttcccgttctcctctccccctgtcgcctccatagcagcagcagctccagctcgagcaagaaagaactagtttgatctgtgaaaatgttggccatcttccagaagcaggtggcgcacgcgccgcaggagctcaacagcccgcgcggcagcaccgccaagcccaagaaccccgacgagatcctccgcgacttccacgccgcccacccctccgacgccttctccacctccttcggcggcggcgccgccctcgcctgcatcgccgcgcagccccgcaacctcgccgccggcgggtaccagaggatgttctgcgggctggacgacatctactgcgtcttcatggggacgctggacaacctgagcgcgctgatgcggcagtacggcctcacgggccgctccaccaacgaggcgctgctggtgatcgaggcctaccgcaccctgcgcgaccggggcccctaccctgctgaccaggtggtgaaggacctgtcgggctccttcgccttcgtcgtcttcgacaaccgcggccggtccggctccggggcggccgtgttcgcggcgcagagcacggacggcggcgtgccgctgcactggggcgtggcggcggacgggtcggtggtgatctgcgacgaccgcgccgtggccaaggccgggtgcgggcggtcctacgcgccgttcccgcccgggtgcatgttccacagcgagggcgggctcaagagcttcgagcaccccatgaaccggctcaaggcgctcccgcgggtggacagcgagggcgtcatgtgcggcgccaacttcaaggtcgacgccttcaccaagatcaactccatgccccgcgtcggtagcgccaccaactgggccgccacctgggacgaagccgccatctgatatagccatcgtcgctccccggcgccggcgacgctcgcctagctcgtcggacttctggatttgggcttactgcattttacttatttttttctttggcaatgtacattctgaatctgatctgatctgagccgtgtgtgggcgtgggcacgctgacacgtacggttgtttgcttgtacgatggaggaataagactttgcttccagtccaaaaaaaaaaaaaaaa

SEQ ID NO: 5696 - protein, 264 aa, Zea mays
  misc_feature: Ceres CLONE ID no. 1065873
  misc_feature: Ceres CDNA ID no. 29191318
  misc_feature: Homolog of GI Number: 20340249 NR Desc: aluminum
  misc_feature: Homolog of GI Number: 21436085 NR Desc: putative aluminum
  misc_feature: Homolog of GI Number: 67987177 NR Desc: 4Fe
  misc_feature: Homolog of GI Number: 53767310 NR Desc: COG1309: Transcriptional regulator
  misc_feature: Homolog of GI Number: 71367849 NR Desc: similar to Methylase involved in ubiquinone/menaquinone biosynthesis
  misc_feature: Homolog of GI Number: 66778899 NR Desc: UvrD/REP helicase
  misc_feature: Homolog of GI Number: 2078483 NR Desc: antifreeze glycopeptide AFGP polyprotein precursor
  misc_feature: Homolog of GI Number: 56283929 NR Desc: CG3047
  misc_feature: Useful for making plants with altered leaf shape eg curled leaves
  misc_feature: Useful for making plants with increased biomass and foliage
  misc_feature: Useful for making stronger plants
  misc_feature: Useful for modifying fruit shape and seed yield
MLAIFQKQVAHAPQELNSPRGSTAKPKNPDEILRDFHAAHPSDAFSTSFGGGAALACIAAQPRNLAAGGYQRMFCGLDDIYCVFMGTLDNLSALMRQYGLTGRSTNEALLVIEAYRTLRDRGPYPADQVVKDLSGSFAFVVFDNRGRSGSGAAVFAAQSTDGGVPLHWGVAADGSVVICDDRAVAKAGCGRSYAPFPPGCMFHSEGGLKSFEHPMNRLKALPRVDSEGVMCGANFKVDAFTKINSMPRVGSATNWAATWDEAAI

SEQ ID NO: 5697 - DNA, 606 bp, Zea mays
  misc_feature: Ceres CLONE ID no. 1065936
  misc_feature: Ceres CDNA ID no. 25446503
  CDS (1)..(324): REFERENCED BY SEQ ID NO: 5698
attcctattcttttccaacgcgactacacgtctacgcctctcctctgctttcccctctggcccttccgatggactactcgagtggcgcgacggagtcggggagggtgcgagcacgttggtgctactgccgctgcttccgccgttggtgccgctgcttctgcggctgctactgctgcaactgcttccccgacgagccccacgacgaccgccgcgccgcagcgtacgcttaggctcctggactctccactcgcagtcgcagggagagtcgcatataggcatatgagcagtatgagggaactggatttctgtcctcatgtacactaggcaaatggctaccttgttcttcaaatagatgttgaagaagatattacagcttcagagaatcagagctctcttttttggtgcttgtaatgttacaaagaagccccgacgatgatgtgaatcagagtagcacttcgtgcattctaatctgtgtactgtggttcgcgaaactaagattgaatgtgtcgagtgtttctgtgtgggcggttgtttgcctcttctgtactctgttgttcttcttctctgtttaatgaaataattcacagcccaaaaaaaaaaaaaaaa

SEQ ID NO: 5698 - protein, 53 aa, Zea mays
  misc_feature: Ceres CLONE ID no. 1065936
  misc_feature: Ceres CDNA ID no. 25446503
MDYSSGATESGRVRARWCYCRCFRRWCRCFCGCYCCNCFPDEPHDDRRAAAYA

SEQ ID NO: 5699 - DNA, 471 bp, Zea mays
  misc_feature: Ceres CLONE ID no. 1065977
  misc_feature: Ceres CDNA ID no. 40351624
  CDS (3)..(338): REFERENCED BY SEQ ID NO: 5700
ttcacggacctagggttttgctcccgccgccgccgcagccgccgccgacgccgaagccgccgctgcgtcttcgtctccgccgcgacgatgccgtcccacaagaccttccgcatcaagcagaagctggccaagaagcagcgccagaaccgccccatcccctactggatccgcatgcggaccgacaacaccatcaggtacaacgcgaagcgcaggcactggcgccgcaccaagctcgggttctagatccggcccgcccggccgcggcgtggtggagccatggctcaagagttatctgcattttgttttatggacgtttcagtgtttgttatgcaagctaggaagtgattccaggatatgtctctgttatcaatttcgtcgtgttatgaggatattgcttgtactctggtgtactcatgttaccatgctgtgccaagtaaagaacctttgctatatgcaaaaaaaaaaaaaaaa

SEQ ID NO: 5700 - protein, 51 aa, Zea mays; identical to SEQ ID NO: 2442
  misc_feature: Ceres CLONE ID no. 1065977
  misc_feature: Ceres CDNA ID no. 40351624
  misc_feature (9)..(51): Pfam Name: Ribosomal_L39 PFAM Desc: Ribosomal L39 protein

SEQ ID NO: 5701 - DNA, 920 bp, Glycine max
  misc_feature: Ceres CLONE ID no. 1066114
  misc_feature: Ceres CDNA ID no. 25447437
  CDS (51)..(761): REFERENCED BY SEQ ID NO: 5702
agagtactaaacggaatttgaaaaccaaggctcaagttttaataagagacatggagctctctgtggttgcaagaaacatggaagaagttgtgttgctggttgatgatttgagatcactttctgggatttctcgctgtagaatatgtcatgaagaagaatttgagagctccaaaaccttggaagctccttgtgcttgttctgggacagttaagtttgctcacagagattgcattcagacttggtgcaatgagaaaggaaatacaacttgtgaaatatgtctccagcaatatgaatccggatatacagcagccccaaagaaatcgcaagtagctgatgcagcaatgaccattagggatagcatgcaaatttcaaggactgaacaagaaccgttaaatacaagaatagtgggtatagttgaaggaaacaattactctgaatgcacgtatgcttcggatagaaccgcagcttgttgtcgatccctggctttagcatttacactcatcttgcttgtaagacatcttttcgcactccttacagatggaatggaagattatccatttacaattcttacggtctttttcctaagggccagtggaattattatacccatgtacataattattaaggcgatcggagccattcatgacaatattaagcgtcaccatcatcaggattctgacgatgactcatcgatatctgatggagatgatgaagaaaatgagacaccaaatgatgaaattttaagacattcacaatcataggtcgttatttgatttaacttgtatcagagcattatactgatgctctgtcaagttctaccattttggaggcataaatttattgttgtaaaaaaagaaagaataattcatttattgaaatgcatatagctttgctgtaaaaaaaaaaaacaaaaaaaaaaa

SEQ ID NO: 5702 - protein, 227 aa, Glycine max
  misc_feature: Ceres CLONE ID no. 1066114
  misc_feature: Ceres CDNA ID no. 25447437
  misc_feature (20)..(67): Pfam Name: zf PFAM Desc: Zinc finger
  misc_feature: Homolog of GI Number: 4741923 NR Desc: PIT1
  misc_feature: Homolog of GI Number: 34905532 NR Desc: B1146F03.23
  misc_feature: Homolog of GI Number: 52077476 NR Desc: zinc finger protein
  misc_feature: Homolog of GI Number: 46931308 NR Desc: At2g01275
  misc_feature: Homolog of GI Number: 15223693 NR Desc: zinc finger
  misc_feature: Homolog of GI Number: 49533771 NR Desc: putative zinc finger protein
  misc_feature: Homolog of GI Number: 50946099 NR Desc: zinc finger protein
  misc_feature: Homolog of GI Number: 42570667 NR Desc: zinc finger
  misc_feature: Homolog of GI Number: 15217818 NR Desc: zinc finger
MEEVVLLVDDLRSLSGISRCRICHEEEFESSKTLEAPCACSGTVKFAHRDCIQTWCNEKGNTTCEICLQQYESGYTAAPKKSQVADAAMTIRDSMQISRTEQEPLNTRIVGIVEGNNYSECTYASDRTAACCRSLALAFTLILLVRHLFALLTDGMEDYPFTILTVFFLRASGIIIPMYIIIKAIGAIHDNIKRHHHQDSDDDSSISDGDDEENETPNDEILRHSQS

SEQ ID NO: 5703 - DNA, 689 bp, Glycine max
  misc_feature: Ceres CLONE ID no. 1066189
  misc_feature: Ceres CDNA ID no. 40351625
  CDS (3)..(506): REFERENCED BY SEQ ID NO: 5704
ctacagaatccgtcgcctttcacttcaagttccccaacccgcagcgcgcgcaagcagaagcccagttcgaattcccggcggcggaggagagaccgatggcgcgtacgaagcagacggcccggaagtcgaccggcggcaaggcgccccgcaagcagctggccaccaaggcggcgaggaagtcggcgccgaccacgggcggcgtgaagaagccccaccgctacaggcccgggaccgtggcgctgcgtgatatccgcaagtaccagaagagcacggagctgctcatccgcaagctgccgttccagcgcctggtgcgggagatcgcccaggacttcaagacggacctccggttccagagccacgccgtgctggcgctccaggaggccgccgaggcgtacctcgtcgggctcttcgaggacaccaacctctgcgccatccacgccaagcgcgtcaccatcatgcccaaggacatccagctcgcccgccgcatccgcggggagcgcgcatagattgcccaaggaaaagcaatgtagagctgtccgttcgtcgcctctggtttcagatcgtgttagcaataggcaagaggcgacttttattttgttgtagaaaaaactctggttggctacattgttacaatgacacgtttcttatttcgtctatattgttggtttgtgccaaaaaaaaaaaaaaaa

SEQ ID NO: 5704 - protein, 136 aa, Glycine max
  misc_feature: Ceres CLONE ID no. 1066189
  misc_feature: Ceres CDNA ID no. 40351625
  misc_feature (58)..(134): Pfam Name: Histone PFAM Desc: Core histone H2A/H2B/H3/H4
MARTKQTARKSTGGKAPRKQLATKAARKSAPTTGGVKKPHRYRPGTVALRDIRKYQKSTELLIRKLPFQRLVREIAQDFKTDLRFQSHAVLALQEAAEAYLVGLFEDTNLCAIHAKRVTIMPKDIQLARRIRGERA

SEQ ID NO: 5705 - DNA, 584 bp, Glycine max
  misc_feature: Ceres CLONE ID no. 1066263
  misc_feature: Ceres CDNA ID no. 29191752
  CDS (47)..(457): REFERENCED BY SEQ ID NO: 5706
acatcaacaagaatcaaaaacttctcttagctttcaataaatcaaaatggctcgtaccaagcagacggcaagaaaatccaccggaggaaaggcaccacggaagcaactcgcgacgaaggctgcgagaaaatcggctccggcgaccggaggagtgaagaagccgcacagattccgtcccggaacggtggcgctaagggagatcaggaagtaccagaagagcaccgagcttctgatccgcaagcttccgttccagcgtctggtccgcgagatcgcgcaggatttcaaaacggatctgcgtttccagagcagcgccgtcgcggctctccaggaagcggcggaagcttacctcgtcgggctgttcgaggacacgaacctttgcgcgattcacgccaagagagtgacgataatgcctaaggacatccagcttgcgaggaggatcagaggcgagagagcttaaggagaatgcagaagactagtttaagatctagttgtttccgtttcgtttatgtatatcttttgttttgatggtgttcgatgaattgcctcaatgctaactatgcttatgaccaaaaaaaaaaaaaaaa

SEQ ID NO: 5706 - protein, 136 aa, Glycine max; identical to SEQ ID NO: 358
  misc_feature: Ceres CLONE ID no. 1066263
  misc_feature: Ceres CDNA ID no. 29191752
  misc_feature (58)..(134): Pfam Name: Histone PFAM Desc: Core histone H2A/H2B/H3/H4
  misc_feature: Homolog of GI Number: 62286642 NR Desc: Histone H3
  misc_feature: Homolog of GI Number: 1362108 NR Desc: histone H3 homolog
  misc_feature: Homolog of GI Number: 55775689 NR Desc: histone 3
  misc_feature: Homolog of GI Number: 166384 NR Desc: histone H3
  misc_feature: Homolog of GI Number: 122083 NR Desc: Histone H3
  misc_feature: Homolog of GI Number: 70753 NR Desc: histone H3
  misc_feature: Homolog of GI Number: 68441481 NR Desc:  similar to CG31613
  misc_feature: Homolog of GI Number: 57110433 NR Desc:  similar to histone 1
  misc_feature: Homolog of GI Number: 74004208 NR Desc:  similar to histone 1
  misc_feature: Homolog of GI Number: 68441431 NR Desc:  similar to CG31613

SEQ ID NO: 5707 - DNA, 693 bp, Glycine max
  misc_feature: Ceres CLONE ID no. 1066330
  misc_feature: Ceres CDNA ID no. 35383339
  CDS (70)..(453): REFERENCED BY SEQ ID NO: 5708
ccactcccctcctcgcgccccaagaagcaccagctctcctcctccccacactcgccgccgcccgcagccatggcgaccgagctggcgtacgcgccgccgatgaagtccggcaaggccggcttcgagggcccgcaggaggcgcagcaccgcatccgcatcaccctctcctccaagagcgtcaagaacctcgagaaggtgtgctccgatctggtgaggggcgccaaggacaagctgctccgggtcaagggccccgtcaggatgcccaccaaggtgctcaacatcaccaccaggaagtcgccgtgcggagaaggtaccaacacctgggatcggtttgagatgcgggtacacaagcgggtgatcgacctcgtcagctccccggacgttgtcaagcagatcacctcgatcaccatcgagcccggcgttgaggtcgaggtgaccatcagcgaccagtagagagctatgccttctttttttacaagtggagagacaccagcgaaccaagacataattttgaacgtttggtagtatgtgaactgggttttgtatggcttattaggttcttcgccttgtgattctgagtacctcttgtcgtctgagatatcatcttgaatttttgtcgccctttggtgtgttgcgctggattggatatttatacatggcttggtattcatgtgttcgaaaaaaaaaaaaaaa

SEQ ID NO: 5708 - protein, 127 aa, Glycine max
  misc_feature: Ceres CLONE ID no. 1066330
  misc_feature: Ceres CDNA ID no. 35383339
  misc_feature: The plant flowers significantly late compared to wild-type.
  misc_feature: The plant is abnormally large.
  misc_feature: null
  misc_feature: Useful for making plants with modulated biomass
  misc_feature: Useful for making plants with modulated flowering time
  misc_feature: Useful for making plants with modulated phosphate use efficiency
  misc_feature (27)..(122): Pfam Name: Ribosomal_S10 PFAM Desc: Ribosomal protein S10p/S20e
  misc_feature: Homolog of GI Number: 55775376 NR Desc: 40S subunit ribosomal protein
  misc_feature: Homolog of GI Number: 50933555 NR Desc: 40S ribosomal protein S20
  misc_feature: Homolog of GI Number: 21281054 NR Desc: putative 40S ribsomomal protein
  misc_feature: Homolog of GI Number: 21617905 NR Desc: 40S ribosomal protein S20
  misc_feature: Homolog of GI Number: 23198348 NR Desc: 40S ribosomal protein S20
  misc_feature: Homolog of GI Number: 31430421 NR Desc: putative ribosomal protein S10p/S20e
  misc_feature: Homolog of GI Number: 54208698 NR Desc: ribosomal protein S10p/S20e
  misc_feature: Homolog of GI Number: 15294053 NR Desc: 40S ribosomal protein S20
  misc_feature: Homolog of GI Number: 20805825 NR Desc: ribosomal protein S20
  misc_feature: Homolog of GI Number: 55630698 NR Desc:  similar to 40S ribosomal protein S20
  misc_feature: Useful for making shorter plants
  misc_feature: Useful for sterility
  misc_feature: Useful for sterility
MATELAYAPPMKSGKAGFEGPQEAQHRIRITLSSKSVKNLEKVCSDLVRGAKDKLLRVKGPVRMPTKVLNITTRKSPCGEGTNTWDRFEMRVHKRVIDLVSSPDVVKQITSITIEPGVEVEVTISDQ

SEQ ID NO: 5709 - DNA, 922 bp, Glycine max
  misc_feature: Ceres CLONE ID no. 1066359
  misc_feature: Ceres CDNA ID no. 29191319
  CDS (60)..(809): REFERENCED BY SEQ ID NO: 5710
acacattcaaactaataactctcaaaaactgagagcagaagagagtagaggagaaacaaatgtccatatccatggcgctattctctccgccgatctcttcttcagttcaaaaccccaagatctcgttccctctcctctccaccaagcgcttctctctcctctccgtcactcgcgcttcctccgattctgctgcagtctctgcaaccaccgtagagattccgaagcccgcgtcggtttctgtagaggaggtgccatctaaacctcctgcggaaagctcctccgacgagactgatctgccaaccacggcgacgggaatcaagtttcaggatgcgaagtgggttaatggaacctgggatctgaaacagttcgagaaagacgggaaaaccgattgggattctattatcgtcgctgaggcaaagaggagaaagtggcttgaagataacccagaaacaactactaacgctgagcctgttcttttcgacacctcgatcattccatggtgggcgtggatgaagagataccatctaccagaagctgaactcctcaatggtcgtgctgcgatgatagggttcttcatggcttactttgttgacagccttaccggagtaggacttgttgatcaaatgggaaacttcttctgcaaaacactcttgtttgtggctgtagctggagttcttttcatccgcaagaacgaagatttagataagctcaaggttctgatcgaagagacgacgctatatgacaagcaatggcaagcggcttggaaagagccggaatcatcatcatcgacgctttcttcaaagaagtgaacaaaatctttctcgctttttgtttcctcttttctcatgtgatgtttgtgatcagtgaaaaaagtctcaagataaacgcaaaatctatttggctttgaaaaaaaaaaaaaaaa

SEQ ID NO: 5710 - protein, 249 aa, Glycine max
  misc_feature: Ceres CLONE ID no. 1066359
  misc_feature: Ceres CDNA ID no. 29191319
  misc_feature: The leaves start out wild-type green and gradually turn yellow-green in color, while the cotyledons stay wild-type green.
  misc_feature: The plant is abnormally small.
  misc_feature: Useful for biocontainment applications
  misc_feature: Useful for making plants with modulated biomass
  misc_feature: Homolog of GI Number: 38566672 NR Desc: At5g47110
  misc_feature: Homolog of GI Number: 8978078 NR Desc: Lil3 protein
  misc_feature: Homolog of GI Number: 21555799 NR Desc: Lil3 protein
  misc_feature: Homolog of GI Number: 23306350 NR Desc: Lil3 protein
  misc_feature: Homolog of GI Number: 51963834 NR Desc: PREDICTED P0482F12.6 gene product
  misc_feature: Homolog of GI Number: 50904941 NR Desc: putative Lil3 protein
  misc_feature: Homolog of GI Number: 54649970 NR Desc: Lhc
  misc_feature: Useful for making lethal plants for genetic confinement systems
MSISMALFSPPISSSVQNPKISFPLLSTKRFSLLSVTRASSDSAAVSATTVEIPKPASVSVEEVPSKPPAESSSDETDLPTTATGIKFQDAKWVNGTWDLKQFEKDGKTDWDSIIVAEAKRRKWLEDNPETTTNAEPVLFDTSIIPWWAWMKRYHLPEAELLNGRAAMIGFFMAYFVDSLTGVGLVDQMGNFFCKTLLFVAVAGVLFIRKNEDLDKLKVLIEETTLYDKQWQAAWKEPESSSSTLSSKK

SEQ ID NO: 5711 - DNA, 607 bp, Glycine max
  misc_feature: Ceres CLONE ID no. 1066513
  misc_feature: Ceres CDNA ID no. 25446504
  CDS (39)..(500): REFERENCED BY SEQ ID NO: 5712
gagactgttcgaatgttggaatcaaagcaagagagaagatggaaaacagtgaggaacaaaagtacagagtccggagattagagatctcagacaagggaaaaggcttcatcgagttactgcagcaactcagcgtatgcgattccgtctccgacaaggaattcgaggatcgattccgagacctcagtgttctcggcgacgagcacgtgatcggcgtgatcgaagacgaggcttccggaaagatcattgcgacggggagcgtgtttatcgagaagaagtttttgaggaattgcggcaaagttgggcacattgaggatgttgttgtggattctagcatacgcgggaagcatttggggaagagaatgatcgagtccctaacggagcatgcgcgggatatgggatgctacaaggtcattcttgattgcagcgtcgagaacaaggcgttctacgagaaatgtggcttccagcagaaatctgttcagatggctatgtattttgcttgaacattagtatttttttctttacttcctttccttttgcttatgaatatttacctaacgccattgatgatctatctatgagtacattccttgcaaaaaaaaaaaaaaaa

SEQ ID NO: 5712 - protein, 153 aa, Glycine max
  misc_feature: Ceres CLONE ID no. 1066513
  misc_feature: Ceres CDNA ID no. 25446504
  misc_feature (60)..(142): Pfam Name: Acetyltransf_1 PFAM Desc: Acetyltransferase
  misc_feature: Homolog of GI Number: 9755622 NR Desc: acetyltransferase
  misc_feature: Homolog of GI Number: 54873449 NR Desc: glucosamine
  misc_feature: Homolog of GI Number: 46442984 NR Desc: potential glucosamine phosphate N
  misc_feature: Homolog of GI Number: 19074597 NR Desc: GLUCOSAMINE PHOSPHATE N
  misc_feature: Homolog of GI Number: 9296975 NR Desc: Glucosamine 6
  misc_feature: Homolog of GI Number: 66845458 NR Desc: glucosamine 6
  misc_feature: Homolog of GI Number: 28261215 NR Desc: glucose 6
  misc_feature: Homolog of GI Number: 55640879 NR Desc:  similar to glucosamine
  misc_feature: Homolog of GI Number: 50748960 NR Desc:  similar to glucosamine
  misc_feature: Homolog of GI Number: 14277746 NR Desc: Chain D
MENSEEQKYRVRRLEISDKGKGFIELLQQLSVCDSVSDKEFEDRFRDLSVLGDEHVIGVIEDEASGKIIATGSVFIEKKFLRNCGKVGHIEDVVVDSSIRGKHLGKRMIESLTEHARDMGCYKVILDCSVENKAFYEKCGFQQKSVQMAMYFA

SEQ ID NO: 5713 - DNA, 804 bp, Glycine max
  misc_feature: Ceres CLONE ID no. 1066562
  misc_feature: Ceres CDNA ID no. 29191320
  CDS (79)..(492): REFERENCED BY SEQ ID NO: 5714
aaaccaagcagataagcagctgtcctactgtcgcatacacacacaagtgctagctagctaatcgatcagccggcggccatggcggaggagaagcaccaccaccacctgttccaccacaaggagggcgaggacttccagcccgccgctgacggcggcgtcgacacgtacgggtactcgaccgagacggtggtgaccgccaccggcaacgagggggagtacgagcggatcaccaaggaggagaagcaccacaagcacaaggagcacctcggcgagatgggcgccgccgccgccggagccttcgccctctacgagaagcacgaggcgaagaaggacccggagcacgcgcacaagcacaagatcgaggaggaggtggccgccgctgcagccgtcggcgccggcggcttcgtcttccacgagcaccacgagaagaagcaggaccacaaggaggccaaggaggccagcggcgagaagaagcaccaccacttcggctagatcaccgttgacgtgcggtggccggcctcgccgccggccgtgcgtgtgcttacgttacgtgtgttccatagtgagagaggctgggacgtgggcctggtctcgtgctcgcctgtgcgtgattttctctgcgtgcttagcttccgagtgctgaataagtggggctgctgttcatgcagtggctcccacacctcatgcgtcggtgtgtgtcgtgtgtcggtgtgtgtttcaattctaccggcgccctgtatttgtaatttcactttattatgcaagtcctcacgaaactttttgtggccaaaaaaaaaaaaaaaa

SEQ ID NO: 5714 - protein, 137 aa, Glycine max
  misc_feature: Ceres CLONE ID no. 1066562
  misc_feature: Ceres CDNA ID no. 29191320
  misc_feature (50)..(103): Pfam Name: ABA_WDS PFAM Desc: ABA/WDS induced protein
  misc_feature: Homolog of GI Number: 49234816 NR Desc: 22 kDa drought
  misc_feature: Homolog of GI Number: 62701926 NR Desc: abscisic acid
  misc_feature: Homolog of GI Number: 47575681 NR Desc: abscisic stress ripening protein
  misc_feature: Homolog of GI Number: 7484489 NR Desc: abscisic acid
  misc_feature: Homolog of GI Number: 2677824 NR Desc: abscisic stress ripening protein homolog
  misc_feature: Homolog of GI Number: 14582465 NR Desc: putative transcription factor
  misc_feature: Homolog of GI Number: 3064035 NR Desc: ABA stress ripening protein
  misc_feature: Homolog of GI Number: 7484497 NR Desc: water
  misc_feature: Homolog of GI Number: 38532363 NR Desc: ASR protein
  misc_feature: Homolog of GI Number: 37544365 NR Desc: pollen
MAEEKHHHHLFHHKEGEDFQPAADGGVDTYGYSTETVVTATGNEGEYERITKEEKHHKHKEHLGEMGAAAAGAFALYEKHEAKKDPEHAHKHKIEEEVAAAAAVGAGGFVFHEHHEKKQDHKEAKEASGEKKHHHFG

SEQ ID NO: 5715 - DNA, 648 bp, Glycine max
  misc_feature: Ceres CLONE ID no. 1069127
  misc_feature: Ceres CDNA ID no. 24766114
  CDS (44)..(490): REFERENCED BY SEQ ID NO: 5716
ataggtatcgccgactagtaagtaacatcaaaaagaatcgacaatggagcaaactttcatcatgatcaagcccgacggcgtccaaaggggtctggtcggtcaaatcatctgcaggttcgagcagaagggtttcactttgaaaggtctaaagctgatcacagtggaccgtccttttgctgagaaacactaccaagacttgtcagccaagcccttcttcagtggtcttgttgattacataatctctggcccagtcgttgcaatgatctgggagggaaagaatgttgtgttgacaggaaggaagatcatcggagcaacgaaccctgcagcatctgagccaggaaccatccgtggggattttgcaattgacattgggaggaacattatccatgggagtgactcggtggagagtgctaacaaggagtgtgcgttgtggttccctgatggacctgtgaactggcagagcagccttcattcttggatctacgaatgattctctatcgttctgtgatcctttgtttcggttgttgtttatgagtcaaaacatgtttctctcctttgtttttgttgcaagctctgttgctttccgcctctttgcatctttttttttgaagtttgaatctcagaacatgactaaaaaaaaaaaaaaaa

SEQ ID NO: 5716 - protein, 148 aa, Glycine max
  misc_feature: Ceres CLONE ID no. 1069127
  misc_feature: Ceres CDNA ID no. 24766114
  misc_feature (2)..(136): Pfam Name: NDK PFAM Desc: Nucleoside diphosphate kinase
  misc_feature: Homolog of GI Number: 19744165 NR Desc: NDPK I
  misc_feature: Homolog of GI Number: 18413214 NR Desc: nucleoside diphosphate kinase 1
  misc_feature: Homolog of GI Number: 7267574 NR Desc: nucleoside
  misc_feature: Homolog of GI Number: 16396 NR Desc: nucleoside diphosphate kinase
  misc_feature: Homolog of GI Number: 1236951 NR Desc: nucleoside diphosphate kinase
  misc_feature: Homolog of GI Number: 71040669 NR Desc: nucleoside diphosphate kinase I
  misc_feature: Homolog of GI Number: 3309053 NR Desc: nucleoside diphosphate kinase I
  misc_feature: Homolog of GI Number: 1389640 NR Desc: PNDKN1
  misc_feature: Homolog of GI Number: 26245403 NR Desc: nucleoside diphosphate kinase
  misc_feature: Homolog of GI Number: 296174 NR Desc: nucleoside
MEQTFIMIKPDGVQRGLVGQIICRFEQKGFTLKGLKLITVDRPFAEKHYQDLSAKPFFSGLVDYIISGPVVAMIWEGKNVVLTGRKIIGATNPAASEPGTIRGDFAIDIGRNIIHGSDSVESANKECALWFPDGPVNWQSSLHSWIYE

SEQ ID NO: 5717 - DNA, 778 bp, Glycine max
  misc_feature: Ceres CLONE ID no. 1069260
  misc_feature: Ceres CDNA ID no. 25446722
  CDS (97)..(369): REFERENCED BY SEQ ID NO: 5718
atcttcaacttatattctccataaacacatcaaactattagcaatttagcaccttctactactttgcaatcgttcaagagttgtgaactgtgaagaatgagttcaacaagccgtgcttggacttggagcgtggcagcaagtgttggagtggtggaggccttgaaggaccagggtatatgcaggtggaacagtgtgatgagatcagcacaacaacatgctaaacataatatgaggtctttgtctcaaaccaagaagttttcttttcaatcatctgcgatggcttctgccaaattgaaagatgagaaagctaagcagtcagaggagtctttgagaacagttatgtacttgagttgctggggtcccaactaaacaaagatgctaagacttcatgcaattttggatttccctttttttttcgctcggaatatgatgaggaatgaaagagccagaaggtgcaccaatcacagaagtgtctcaactcccaactaacatgttatgttacatgcatgctgttgatttgatccgatcgaatcagaagcttaattaattgagaaatgagtctgaagcatgcattttgctgccttggagagacatgaaatggatttggaagaggggtcatcattggaatgatgaaatttcagacagaaattgctattatgtataggattttttatatgatgacaccaaggttatgtattatgctgaataactgtaagatgtaatttataaagctaaacaagtcttgagaaatgacttttctccaaaaaaaaaaaaaaaa

SEQ ID NO: 5718 - protein, 90 aa, Glycine max
  misc_feature: Ceres CLONE ID no. 1069260
  misc_feature: Ceres CDNA ID no. 25446722
  misc_feature: Homolog of GI Number: 6688818 NR Desc: putative wound
  misc_feature: Homolog of GI Number: 21553934 NR Desc: probable wound
  misc_feature: Homolog of GI Number: 19320 NR Desc: wound induced protein
  misc_feature: Homolog of GI Number: 50928991 NR Desc: OSJNBa0043L09.19
  misc_feature: Homolog of GI Number: 50928999 NR Desc: OSJNBa0043L09.23
  misc_feature: Homolog of GI Number: 50929003 NR Desc: OSJNBa0043L09.25
  misc_feature: Homolog of GI Number: 50929001 NR Desc: OSJNBa0043L09.24
  misc_feature: Homolog of GI Number: 50928989 NR Desc: OSJNBa0043L09.18
  misc_feature: Homolog of GI Number: 37724583 NR Desc: wound induced protein
MSSTSRAWTWSVAASVGVVEALKDQGICRWNSVMRSAQQHAKHNMRSLSQTKKFSFQSSAMASAKLKDEKAKQSEESLRTVMYLSCWGPN

SEQ ID NO: 5719 - DNA, 746 bp, Glycine max
  misc_feature: Ceres CLONE ID no. 1069478
  misc_feature: Ceres CDNA ID no. 25893154
  CDS (65)..(610): REFERENCED BY SEQ ID NO: 5720
ttttgaccaaaaaaaatcaaaagctctgtgcccctttgcagcgaaaactctatcaacaaagacgatgattatctcagagaccaaccgcagagagatctgcaagtacctcttcaaagaaggagtattgtttgcgaagaaagatttcaatctccctaagcatccgttgattgagtcagtgcccaacttgcaagtgatcaagctcatgcagagtttcaaatccaaggagtacgttagggagacgttcgcgtggatgcactactattggttcctgaccaatgaagggattgagttcttgagaacttatcttaaccttccgtctgatgttgttcctgcgactttgaagaagtctgctaagcccattggtcgtccctttggtggcccacctggtgatcgcccaagaggaccacctcgctttgatggagaccgtccaagatatggtgaccgtgatgggtaccgtggagggcaacgtggtggggatgttggaggtgaaaagggtggagctcctgctgattaccagccctctttccaaggaggtggtggtaggcctggatttggccgtggtgcaggtggtttcagcgcagcagcaccatctggctctggtttaccttgaaagaattgttgttatcgttaagcaatggaaagacagcttttattttttttgggctttagttttgtttttgtaatacaaatcgggaatctataatctatctatttctatgacttttggtctaaaaaaaaaaaaaaaa

SEQ ID NO: 5720 - protein, 181 aa, Glycine max
  misc_feature: Ceres CLONE ID no. 1069478
  misc_feature: Ceres CDNA ID no. 25893154
  misc_feature (3)..(99): Pfam Name: S10_plectin PFAM Desc: Plectin/S10 domain
  misc_feature: Homolog of GI Number: 21281207 NR Desc: putative ribosomal protein S10
  misc_feature: Homolog of GI Number: 81074037 NR Desc: 40S ribosomal protein S10
  misc_feature: Homolog of GI Number: 81076822 NR Desc: 40S ribosomal protein S10
  misc_feature: Homolog of GI Number: 50909311 NR Desc: 40S ribosomal protein S10
  misc_feature: Homolog of GI Number: 20140213 NR Desc: 40S ribosomal protein S10
  misc_feature: Homolog of GI Number: 34905824 NR Desc: putative ribosomal protein S10
  misc_feature: Homolog of GI Number: 79325265 NR Desc: structural constituent of ribosome
  misc_feature: Homolog of GI Number: 61654720 NR Desc: S10
  misc_feature: Homolog of GI Number: 40642980 NR Desc: ribosomal protein S10
  misc_feature: Homolog of GI Number: 50344474 NR Desc: S10e ribosomal protein
MIISETNRREICKYLFKEGVLFAKKDFNLPKHPLIESVPNLQVIKLMQSFKSKEYVRETFAWMHYYWFLTNEGIEFLRTYLNLPSDVVPATLKKSAKPIGRPFGGPPGDRPRGPPRFDGDRPRYGDRDGYRGGQRGGDVGGEKGGAPADYQPSFQGGGGRPGFGRGAGGFSAAAPSGSGLP

SEQ ID NO: 5721 - DNA, 825 bp, Glycine max
  misc_feature: Ceres CLONE ID no. 1069514
  misc_feature: Ceres CDNA ID no. 25893155
  CDS (44)..(748): REFERENCED BY SEQ ID NO: 5722
gagagtttgttttgtcacagaaaaaaaagaacagagaaaaaagatgccggcggcgaagcagaggaccccgaaagttagccgtaaccctgatctgatcaggggtgtaggcaaatactctcgctcgcaaatgtaccacaagagaggtttgtgggcaatcaaggccaagaacggcggcgttttccctcgccacgacgctaagtccaaggttgcagctcccgttgagaagccggccaagttttatccggcggaagacgttaagaagccgctcgctaacagacgcaaacctaagcctaccaagctcaaagcaagcataactccaggaacggtgttgatcatccttgctggtagattcaagggaaagagagttgtcttcctcaagcaacttgcttctggtttgcttttggttacaggaccattcaagatcaatggtgttccattgagacgtgttaaccagtcctatgtgatcggaacctccaccaaggttgacatttctggagtcagcattgagaagttcgatgacaagtacttcggaaaggttgctgagaagaaaaccaagaaaggagaaggcgagttctttgaagcagataaagaggtgaagaaagagatcccacaggagaagaaagaagaccagaagaccgtggatgcagctctgatcaaagccattgaagcagtgccagagctcaagacttacctcggcgccaggttctcattgtcacaaggaatgaaaccccatgagcttgttttctagatttcatcatcgtatcttgtttcccatcatatcacatttcaagaatctgttttcccccaagaaaaaaaaaaaaaaaa

SEQ ID NO: 5722 - protein, 234 aa, Glycine max
  misc_feature: Ceres CLONE ID no. 1069514
  misc_feature: Ceres CDNA ID no. 25893155
  misc_feature (127)..(234): Pfam Name: Ribosomal_L6e PFAM Desc: Ribosomal protein L6e
  misc_feature (2)..(59): Pfam Name: Ribosomal_L6e_N PFAM Desc: Ribosomal protein L6
  misc_feature: Homolog of GI Number: 9795602 NR Desc: Putative  60S ribosomal protein L6
  misc_feature: Homolog of GI Number: 21593910 NR Desc: 60S ribosomal protein L6
  misc_feature: Homolog of GI Number: 21592925 NR Desc: putative 60S ribosomal protein L6
  misc_feature: Homolog of GI Number: 27311965 NR Desc: putative 60S ribosomal protein L6
  misc_feature: Homolog of GI Number: 19539 NR Desc: ribosomal protein YL16
  misc_feature: Homolog of GI Number: 7208784 NR Desc: 60S ribosomal protein L6
  misc_feature: Homolog of GI Number: 50925014 NR Desc: OSJNBb0022F23.11
  misc_feature: Homolog of GI Number: 50909993 NR Desc: putative 60S ribosomal protein L6
  misc_feature: Homolog of GI Number: 57471700 NR Desc: ribosomal protein L6
  misc_feature: Homolog of GI Number: 57999636 NR Desc: 60S ribosomal protein L6 CgRPL6
MPAAKQRTPKVSRNPDLIRGVGKYSRSQMYHKRGLWAIKAKNGGVFPRHDAKSKVAAPVEKPAKFYPAEDVKKPLANRRKPKPTKLKASITPGTVLIILAGRFKGKRVVFLKQLASGLLLVTGPFKINGVPLRRVNQSYVIGTSTKVDISGVSIEKFDDKYFGKVAEKKTKKGEGEFFEADKEVKKEIPQEKKEDQKTVDAALIKAIEAVPELKTYLGARFSLSQGMKPHELVF

SEQ ID NO: 5723 - DNA, 1251 bp, Glycine max
  misc_feature: Ceres CLONE ID no. 1069582
  misc_feature: Ceres CDNA ID no. 35383340
  CDS (72)..(926): REFERENCED BY SEQ ID NO: 5724
tcacactccaccaccccaacccatccatccatcacagaagagagagagagagagagagacagaggagagccatggccaaggaggtgagtgaggagccggagcacgccgcgccggcgcacaaggactactccgacccgccgccggcgccgctgttcgacatgggggagctccggatgtggtccttctaccgggccctcatcgccgagttcgtcgccacgctgctcttcctctacatcaccgtcgccaccgtcatcggctacaaggtgcagtcggcggccgacccgtgcggcggcgtcggcgtgctcggcatcgcctgggccttcggcggcatgatcttcgtcctcgtctactgcaccgccggcatctcggggggccacatcaaccctgccgtcaccttcgggctgctgctggcgcggaaggtgtcgctgctgcgcgcggtgatgtacatcgtggcgcagtgcgcgggcggcatcgtgggggccggcatcgtcaagggcatcatgaaggacgcgtaccaggccaacggcggcggcgccaacatggtcgcctcggggttctcccgcggcacggccctaggggcggagatcgtcggcaccttcgtgctggtgtacaccgtcttctcagccaccgaccccaagcgcagcgcccgcgactcccacgtccccgtgctggccccgctccccatcgggttcgccgtcttcatggtgcacctcgccaccatccccatcaccggcaccggcatcaaccccgccaggagcctcggcgccgcagtcatctacaacaagaaggccgcatgggacaaccactggatcttctgggtcggcccgttggtgggagcgctggcggcggcggcgtaccaccagtacatcctccgggcggcggccatcaaggcgctcggctccttccggagcagccggagcaactgagccggccggccaataatttaatgcaacggtcacccaccgcgctagctagcgtgttggcagtagtgcatgctcctcctcgtgtcgttcagtgtcctctctgtgcatgcatgtgagtgagagaaagaccaccatggatcgctgttttcacttgctcttcaattattactccttgtcaccgttaatgttgtccaattatattagttactgttagtgttggtgttggatggatgatcgaacctgtgtaaaaccgctgtgagtgagttggaacatggattaatttattgtgtgatgcatgcgtgtttgattgaataaaaaaaaaaaaaaa

SEQ ID NO: 5724 - protein, 284 aa, Glycine max
  misc_feature: Ceres CLONE ID no. 1069582
  misc_feature: Ceres CDNA ID no. 35383340
  misc_feature (32)..(263): Pfam Name: MIP PFAM Desc: Major intrinsic protein
  misc_feature: Homolog of GI Number: 50931003 NR Desc: OSJNBb0093G06.10
  misc_feature: Homolog of GI Number: 38198154 NR Desc: aquaporin
  misc_feature: Homolog of GI Number: 8071628 NR Desc: putative aquaporin PIP2
  misc_feature: Homolog of GI Number: 1657950 NR Desc: MipE
  misc_feature: Homolog of GI Number: 28950709 NR Desc: At2g16850
  misc_feature: Homolog of GI Number: 11119335 NR Desc: aquaporin
  misc_feature: Homolog of GI Number: 1168480 NR Desc: Aquaporin PIP
  misc_feature: Homolog of GI Number: 60498693 NR Desc: plasma membrane intrinsic protein 2
  misc_feature: Homolog of GI Number: 1402835 NR Desc: plasma membrane major intrinsic protein 2
  misc_feature: Homolog of GI Number: 21594556 NR Desc: plasma membrane intrinsic protein SIMIP
MAKEVSEEPEHAAPAHKDYSDPPPAPLFDMGELRMWSFYRALIAEFVATLLFLYITVATVIGYKVQSAADPCGGVGVLGIAWAFGGMIFVLVYCTAGISGGHINPAVTFGLLLARKVSLLRAVMYIVAQCAGGIVGAGIVKGIMKDAYQANGGGANMVASGFSRGTALGAEIVGTFVLVYTVFSATDPKRSARDSHVPVLAPLPIGFAVFMVHLATIPITGTGINPARSLGAAVIYNKKAAWDNHWIFWVGPLVGALAAAAYHQYILRAAAIKALGSFRSSRSN

SEQ ID NO: 5725 - DNA, 436 bp, Glycine max
  misc_feature: Ceres CLONE ID no. 1069623
  misc_feature: Ceres CDNA ID no. 25446505
  CDS (16)..(357): REFERENCED BY SEQ ID NO: 5726
acacaaaaattaagaatggtgtttaagctttatggtctaccaatgtccacaaacactacacgtgccatgatctgtctccatgagaaagaggtcgattttgaacttgttccggtcaatgtgttcgctgctgagcacaagcagcctccttttctctccaagaatccctttggtttcattccagtactggaagatggtgatctcactctttttgagtccagggccattaccgcatacgtggctgaaaaattcaaggaaacagaacccgatctgataaggcacaaggatgcaaaagaagcctttctgtcatttctgtatccaattttgggtgttcgacagcttggtttttcttcacaataatcttgctagccaagacctttttccgattttgcgcttgctccaataaagttcattaatcaggaaaaaaaaaaaaaaaaaa

SEQ ID NO: 5726 - protein, 113 aa, Glycine max
  misc_feature: Ceres CLONE ID no. 1069623
  misc_feature: Ceres CDNA ID no. 25446505
  misc_feature (3)..(76): Pfam Name: GST_N PFAM Desc: Glutathione S
  misc_feature: Homolog of GI Number: 11385457 NR Desc: glutathione S
  misc_feature: Homolog of GI Number: 7362756 NR Desc: Glutathione transferase III
  misc_feature: Homolog of GI Number: 676880 NR Desc: The expression is induced by aluminium treatment and Pi starvation.
  misc_feature: Homolog of GI Number: 18150415 NR Desc: glutathione S
  misc_feature: Homolog of GI Number: 285295 NR Desc: glutathione transferase
  misc_feature: Homolog of GI Number: 18655397 NR Desc: At2g47730/F17A22.12
  misc_feature: Homolog of GI Number: 20197312 NR Desc: glutathione S
  misc_feature: Homolog of GI Number: 11128454 NR Desc: glutathione S
  misc_feature: Homolog of GI Number: 1279588 NR Desc: glutathione S
  misc_feature: Homolog of GI Number: 23572872 NR Desc: glutathione transferase
MVFKLYGLPMSTNTTRAMICLHEKEVDFELVPVNVFAAEHKQPPFLSKNPFGFIPVLEDGDLTLFESRAITAYVAEKFKETEPDLIRHKDAKEAFLSFLYPILGVRQLGFSSQ

SEQ ID NO: 5727 - DNA, 592 bp, Glycine max
  misc_feature: Ceres CLONE ID no. 1069682
  misc_feature: Ceres CDNA ID no. 29191832
  CDS (2)..(442): REFERENCED BY SEQ ID NO: 5728
gtcgtccacctctctctctctctctagcggcgcagatggatcccgatgcagtggcgaaggccttcgtggaacactactactcaaccttcgacaccaaccgcgccggtctagccggtttctaccaggaggcttccatgctcaccttcgagggccagaagatccaaggagtccagagcatcgtcgccaagctcacctctctccccttccagcagtgcaagcacaatatctccactgtcgattgccagccttctggtcccgcctccggtatgctcgttttcgtctccggcaacctccagctcgccggcgaggagcacgccctcaagttcagccagatgtttcacttgatgccgactccacaaggaagcttttacgtgttcaacgatatcttcaggctcaactactcctgatcacactatcacattgttgttgcattcctatttgagcaatccttttatcatatccctctttgtctttttttatttttcttcgttcatatatgatttgtcttgcgaacagaggaaaaaactctttgtctattgtgtttggtttggtttggtttggtcattttccgtttacaaaaaaaaaaaaaaaa

SEQ ID NO: 5728 - protein, 123 aa, Glycine max
  misc_feature: Ceres CLONE ID no. 1069682
  misc_feature: Ceres CDNA ID no. 29191832
  misc_feature (6)..(120): Pfam Name: NTF2 PFAM Desc: Nuclear transport factor 2
  misc_feature: Homolog of GI Number: 12323001 NR Desc: nuclear transport factor 2
  misc_feature: Homolog of GI Number: 21555203 NR Desc: nuclear transport factor 2
  misc_feature: Homolog of GI Number: 18377444 NR Desc: similar to nuclear transport factor 2
  misc_feature: Homolog of GI Number: 50947933 NR Desc: nuclear transport factor 2
  misc_feature: Homolog of GI Number: 34908774 NR Desc: putative Nuclear transport factor 2
  misc_feature: Homolog of GI Number: 25402667 NR Desc: protein T23J18.22
  misc_feature: Homolog of GI Number: 45187886 NR Desc: ADR013Wp
  misc_feature: Homolog of GI Number: 19114665 NR Desc: nuclear transport factor
  misc_feature: Homolog of GI Number: 46226690 NR Desc: similar to NTF2
  misc_feature: Homolog of GI Number: 62651812 NR Desc:  similar to Chain A
  misc_feature: Useful for delaying flowering time
  misc_feature: Useful for increasing chlorophyll and photosynthetic capacity
  misc_feature: Useful for making ornamental plants with modified leaves
  misc_feature: Useful for making plants with increased biomass and foliage
  misc_feature: Useful for making plants with increased biomass and foliage
  misc_feature: Useful for making plants with increased biomass and foliage
  misc_feature: Useful for making shorter plants
MDPDAVAKAFVEHYYSTFDTNRAGLAGFYQEASMLTFEGQKIQGVQSIVAKLTSLPFQQCKHNISTVDCQPSGPASGMLVFVSGNLQLAGEEHALKFSQMFHLMPTPQGSFYVFNDIFRLNYS

SEQ ID NO: 5729 - DNA, 576 bp, Glycine max
  misc_feature: Ceres CLONE ID no. 1069684
  misc_feature: Ceres CDNA ID no. 25445747
  CDS (2)..(355): REFERENCED BY SEQ ID NO: 5730
accgcctcctcgcaccgcagaacaatctcctcgacgccgccaagcctccaacagagccctacaactttcctcgccagcatctccgcgaaggacgaaagggtgtgatggctccccgcgccgccgtgctgctcctggccatggccgtggcctccgtcttcttcgcctccgcgtcggcgcagggcatcatggcgccttcgtcggctccttcatcggcgccggcgcccgcgccagacaccggagcggcagctggcctcgccccggtctccgccgtggccgtggtcgcctccgcgctggtgtccctgctcgcggcgatgctcctgcagtagagatgatggctgcgcttcgccctgggtgatcggtttctatacataccgtcttcgttagtgctaggctagatcggtggtggtttgatgagtctttgttgcagagtttggtcgatcggttgatctgttaggcattctttctctctgtcatacatatatccgctacattatactgctgtgtgccctgatttatatgagattgtgttgctatgaataaagcatgatgatcccgtgaacaaaaaaaaaaaaaaaa

SEQ ID NO: 5730 - protein, 73 aa, Glycine max
  misc_feature: Ceres CLONE ID no. 1069684
  misc_feature: Ceres CDNA ID no. 25445747
MAPRAAVLLLAMAVASVFFASASAQGIMAPSSAPSSAPAPAPDTGAAAGLAPVSAVAVVASALVSLLAAMLLQ

SEQ ID NO: 5731 - DNA, 802 bp, Glycine max
  misc_feature: Ceres CLONE ID no. 1069761
  misc_feature: Ceres CDNA ID no. 29191202
  CDS (58)..(672): REFERENCED BY SEQ ID NO: 5732
aaaaaagcaaaataggaatcgaacctgagctaaacagatctttaagcatagaagaagatggagtgcgtattcggtctggttgggaaaggattcgccatcgtggcggcggatacatcggcggtgcacagtatccttctccacaaaaacaacgaggacaagatcatggtccttgactcccacaagctcgtcgctgccagcggcgagcctggtgatcgggttcagttcacggagtacgttcagaagaacgtgtcgctgtacaagttccgcaacgggatccctttgactaccgccgccgctgccaacttcactcgcggagagctcgccaccgccttgaggaagaacccgtattctgtgaatatcctgatggctggctacgacgaagagagcggtgcatccctttactacatcgactacattgcaacccttcacaaagttgacaagggagcgtttggttatggatcttacttctccctctccaccatggacaggcattaccgcgaggatatgtctgtcgaagaagccattgaactggtggacaagtgcatacttgagatccggtcaagactggtcgttgcgccaccaaactttgtgatcaagattgttgacaaagatggagctcgtgattacgcttggcgtcagtccgtacaggacgtcacaactgcggctgtctgagttgttgtgtttggttccagaattttaagtttcttcagctgtgacatttgcttttgttgggatatttgtgtttttgacattttttatttagtttgagaatcaacattaatcatcaaaaaaaaaaaaaaaa

SEQ ID NO: 5732 - protein, 204 aa, Glycine max
  misc_feature: Ceres CLONE ID no. 1069761
  misc_feature: Ceres CDNA ID no. 29191202
  misc_feature (1)..(182): Pfam Name: Proteasome PFAM Desc: Proteasome A
  misc_feature: Homolog of GI Number: 23505793 NR Desc: At3g22630/F16J14_20
  misc_feature: Homolog of GI Number: 21592467 NR Desc: proteasome chain protein
  misc_feature: Homolog of GI Number: 52548238 NR Desc: 20S proteasome beta 4 subunit
  misc_feature: Homolog of GI Number: 53771821 NR Desc: putative beta 4 proteasome subunit
  misc_feature: Homolog of GI Number: 50917941 NR Desc: 20S proteasome beta 4 subunit
  misc_feature: Homolog of GI Number: 17380213 NR Desc: Proteasome subunit beta type 2
  misc_feature: Homolog of GI Number: 14594929 NR Desc: putative beta4 proteasome subunit
  misc_feature: Homolog of GI Number: 49119183 NR Desc: MGC80364 protein
  misc_feature: Homolog of GI Number: 47125243 NR Desc: MGC84496 protein
MECVFGLVGKGFAIVAADTSAVHSILLHKNNEDKIMVLDSHKLVAASGEPGDRVQFTEYVQKNVSLYKFRNGIPLTTAAAANFTRGELATALRKNPYSVNILMAGYDEESGASLYYIDYIATLHKVDKGAFGYGSYFSLSTMDRHYREDMSVEEAIELVDKCILEIRSRLVVAPPNFVIKIVDKDGARDYAWRQSVQDVTTAAV

SEQ ID NO: 5733 - DNA, 599 bp, Glycine max
  misc_feature: Ceres CLONE ID no. 1069799
  misc_feature: Ceres CDNA ID no. 25446990
  CDS (93)..(410): REFERENCED BY SEQ ID NO: 5734
gtgggtttcaactttcaattcagaacgaacgattccttcatttcccgagtgattcaccgatctgataatcgattgaatttagggtttgggagatggcgtcgagtgtgttgaagagcctcctcctgagattttcctcatcgaggaacacgacgaccaccagaagtttcagcctcgttacccctcaaatcagcaaccacaccgccaagtggatgcaggatacaagcaagaaatctccgatggagctgattaatgaagttcctccaattaaggttgaaagcaggatagttgcttatgaaggagataccgatcctgcccttggacacccgattgaatttatatgccttgacttgcccgagccagctgtttgcaaatattgtggccttcgttatgttcaggatcatcaccattaggactgctttctacaagtattctggtgtgtgtgcatgtacggaatttctgctgaacattaatgttttgggttacaatgttttctgactaaatcatggtttaacaaatatactttgttacaatttgctaaataagatgttcatgtaccatatgctggtgatgttggtttcaaaaaaaaaaaaaaaaaaaaa

SEQ ID NO: 5734 - protein, 105 aa, Glycine max
  misc_feature: Ceres CLONE ID no. 1069799
  misc_feature: Ceres CDNA ID no. 25446990
  misc_feature: Homolog of GI Number: 34334024 NR Desc: NADH:ubiquinone oxidoreductase 13 kD
  misc_feature: Homolog of GI Number: 58393090 NR Desc: ENSANGP00000016606
  misc_feature: Homolog of GI Number: 20129243 NR Desc: CG8680
  misc_feature: Homolog of GI Number: 54644837 NR Desc: GA21258
MASSVLKSLLLRFSSSRNTTTTRSFSLVTPQISNHTAKWMQDTSKKSPMELINEVPPIKVESRIVAYEGDTDPALGHPIEFICLDLPEPAVCKYCGLRYVQDHHH

SEQ ID NO: 5735 - DNA, 975 bp, Glycine max
  misc_feature: Ceres CLONE ID no. 1069818
  misc_feature: Ceres CDNA ID no. 35383341
  CDS (79)..(837): REFERENCED BY SEQ ID NO: 5736
agacacgcgaaagcaaacacacagggagcgaagaagaaacccagctaggggcgtctggtgcattggcgcaggagaccaatggcgggcctcgggtttgaggagaccaagctccggctcggcctgccaggcggcagcaacgaggccgaggaggcggccgccgcggtgaggagctccggcaagaggggctacgccgagaccatcgacctcgtgctgaagctggagccagcgtcggcggccgcgccgccgtccgaggacgacgaggaagtggccgatggtgtcgcggaggcgcagccctctccggctgctgccgacgggcagttgaagcggtcgccgagccagtgcagcgtggtcaccgccgcgcagccggacgcggaccccgagaagccgcgcgcgcccaaggcgcaggcggtggggtggccgccggtgcggtcgttccggaggaacatgctggcggcgacggcggagagagggggggcggcgctggtgaaggtgagcatggacggcgcgccctacctgcgcaaggtggacatgggcacctacaagagctaccaggagctgtccaaggccctggagaagatgttcagctccttcaccatcggcaacgactgctcgcaggctcaggggatgacgggcatgaacgagagcaagctggtggacctgctcaacggctccgactatgtgcccacctacgaggacaaggacggcgactggatgctcgtcggcgacgtcccctgggagatgttcgtcgcgtcctgcaagcgcctccggataatgaaaggatcagaagccatcggcctggcaccaagggcaatggagaaatgcaagagcaggagctgaccgtttgctaccaattcaagattatggctctgcttgcccaactatgtaccatactatactgcgtactcctacttcctatgttttatcttgttgttatatatgtgtagtatgtatacgtgaggaaaaaaaaaaaaaaaa

SEQ ID NO: 5736 - protein, 252 aa, Glycine max
  misc_feature: Ceres CLONE ID no. 1069818
  misc_feature: Ceres CDNA ID no. 35383341
  misc_feature (4)..(17): Pfam Name: AUX_IAA PFAM Desc: AUX/IAA family
  misc_feature: Homolog of GI Number: 77556997 NR Desc: aux/IAA protein
  misc_feature: Homolog of GI Number: 50917147 NR Desc: putative auxin
  misc_feature: Homolog of GI Number: 55416169 NR Desc: auxin
  misc_feature: Homolog of GI Number: 20385508 NR Desc: auxin
  misc_feature: Homolog of GI Number: 20269059 NR Desc: aux/IAA protein
  misc_feature: Homolog of GI Number: 114734 NR Desc: Auxin
  misc_feature: Homolog of GI Number: 4887022 NR Desc: Nt
  misc_feature: Homolog of GI Number: 53748471 NR Desc: auxin resistance protein
  misc_feature: Homolog of GI Number: 4887020 NR Desc: Nt
  misc_feature: Homolog of GI Number: 6175173 NR Desc: auxin
  misc_feature: Useful for making ornamental plants with modified flowers
  misc_feature: Useful for making plants with increased biomass and foliage
  misc_feature: Useful for making shorter plants and plants with modified flowers
  misc_feature: Useful for making smaller plants
  misc_feature: Useful for sterility
  misc_feature: Utility: pH Useful for making plants tolerant to high pH or low phosphate
  misc_feature: Utility: LNABA Useful for making plants tolerant to low nitrogen
  misc_feature: Utility: MSX Useful for making plants tolerant to low nitrogen
MAGLGFEETKLRLGLPGGSNEAEEAAAAVRSSGKRGYAETIDLVLKLEPASAAAPPSEDDEEVADGVAEAQPSPAAADGQLKRSPSQCSVVTAAQPDADPEKPRAPKAQAVGWPPVRSFRRNMLAATAERGGAALVKVSMDGAPYLRKVDMGTYKSYQELSKALEKMFSSFTIGNDCSQAQGMTGMNESKLVDLLNGSDYVPTYEDKDGDWMLVGDVPWEMFVASCKRLRIMKGSEAIGLAPRAMEKCKSRS

SEQ ID NO: 5737 - DNA, 442 bp, Glycine max
  misc_feature: Ceres CLONE ID no. 1069911
  misc_feature: Ceres CDNA ID no. 35383342
  CDS (126)..(314): REFERENCED BY SEQ ID NO: 5738
aagtttagtgtgtttagttgaagacttcacaaccctagctagcagtccctcagcattgtgtgcccacaaagcagctccttttcctgttccgtcgagagaagatgggattttgggggacgcgggtgatggagattgtgaagaagcatgattctggagggctggtttggaagagaatcaagctcaccaccacccgaaaagccaatgctaagaagcgtcttcttcgggtttggcagaatgaagctgtcctcaaagcctgttctgccactcccaacgaacctcaacctacaccagtggctacaccagtggctagttaagttcaagcccacccatctcaatttcattacttttcttttcccttcccttcaaaaatattgtcactacttttagggcttcatttacataattaaaaatcatctggaggaggttatgccaaaaaaaaaaa

SEQ ID NO: 5738 - protein, 70 aa, Glycine max
  misc_feature: Ceres CLONE ID no. 1069911
  misc_feature: Ceres CDNA ID no. 35383342
MGFWGTRVMEIVKKHDSGGLVWKRIKLTTTRKANAKKRLLRVWQNEAVLKACSATPNEPQPTPVATPVAS

SEQ ID NO: 5739 - DNA, 722 bp, Glycine max
  misc_feature: Ceres CLONE ID no. 1069961
  misc_feature: Ceres CDNA ID no. 29191670
  CDS (43)..(573): REFERENCED BY SEQ ID NO: 5740
cttcagtcacttctcctccgtcgactcacctgtttcgccgccatggtgaagtactcccaggaacccgacaattccaccaaatcttgcaaggctaggggagctgatctcagggtccacttcaagaacactagggagacagcgcacgccataagaaggctaccattgaacaaggccaagaggtacttggaagatgtgatagctcacaagcaagcaatccccttcacacgtttctgtcgtggtgttggtcgtactgctcaggctaagaacaggcactcaaatggtcaaggtcgatggcctgctaaatctgctcagttcgttcttgatctcctcaagaatgctgagagcaatgctgaggtcaaaggtttggatgttgatgcacttttcatatctcacatccaagtgaaccaagcagcaaaacaaaggcgtaggacataccgtgctcatggaagaatcaatccttacatgtcaaacccgtgccacattgagttgatattgtcagagaaggaagagcctgttaagaaagagccagagactcagttggcagcgaagtcaaagaaaggagcctcgtcttgagcctatagacaagtaactttttcgtggtcacctctgttacaagaaccgcttgatacattttgttcacttatcgttctgtaagacaaggagccaacattttcaaagacataataatatgattctttgtttctggaaaaaaaaaaaaaaaa

SEQ ID NO: 5740 - protein, 176 aa, Glycine max
  misc_feature: Ceres CLONE ID no. 1069961
  misc_feature: Ceres CDNA ID no. 29191670
  misc_feature (17)..(153): Pfam Name: Ribosomal_L22 PFAM Desc: Ribosomal protein L22p/L17e
  misc_feature: Homolog of GI Number: 21594923 NR Desc: putative 60S ribosomal protein L17
  misc_feature: Homolog of GI Number: 9802532 NR Desc: F17L21.19
  misc_feature: Homolog of GI Number: 15824574 NR Desc: ribosomal protein
  misc_feature: Homolog of GI Number: 78191466 NR Desc: ribosomal protein PETRP
  misc_feature: Homolog of GI Number: 40287468 NR Desc: ribosomal protein PETRP
  misc_feature: Homolog of GI Number: 12240036 NR Desc: ribosomal protein L17
  misc_feature: Homolog of GI Number: 50899126 NR Desc: putative ribosomal protein L17
  misc_feature: Homolog of GI Number: 421985 NR Desc: ribosomal protein L17.1
  misc_feature: Homolog of GI Number: 19102 NR Desc: ribosomal protein L17
  misc_feature: Homolog of GI Number: 2668748 NR Desc: ribosomal protein L17
MVKYSQEPDNSTKSCKARGADLRVHFKNTRETAHAIRRLPLNKAKRYLEDVIAHKQAIPFTRFCRGVGRTAQAKNRHSNGQGRWPAKSAQFVLDLLKNAESNAEVKGLDVDALFISHIQVNQAAKQRRRTYRAHGRINPYMSNPCHIELILSEKEEPVKKEPETQLAAKSKKGASS

SEQ ID NO: 5741 - DNA, 715 bp, Glycine max
  misc_feature: Ceres CLONE ID no. 1070289
  misc_feature: Ceres CDNA ID no. 29191833
  CDS (1)..(534): REFERENCED BY SEQ ID NO: 5742
ctcgaaaaaggaagcagcatcactctccgccgcgccgcgagaactagccgagcccatcgtgtatcctcgtcgccgccaggagcacggagcgacaccgccgccgcagccagcgcttcctctccaaggttagcatctgaccagccatggcgaagcatcatcctgatctcatcatgtgccggaagcagcctggcattgctattggtcgcctgtgtgagaagtgtgatggcaagtgcgtcatctgtgactcgtacgtgcgcccatgtacgcttgtccgggtctgcgacgagtgcaactacggctcgttccagggaaggtgcgtcatctgcggcggagttggcatctcagacgcctactactgcaaagagtgcacgcagcaggagaaggaccgagatgggtgccccaagattgtcaaccttggaagcgccaagaccgatctcttctacgagcgcaagaagtacggttttaagaagagatgaattacatacatggatttgtcgggtcctccgggcctctcattctgtgccgttacgctaataccagaagcaggttgctggggcagcggcattgtgtccgtgttatcgtttgatccttatatacaagaatgcatccctgatatgctctgttgtatggttcaaaactctagactgcatatgcagtatgcacttgatgtgaatgaccatgaatgtttgacttgaaaacaaaaaaaaaaaaaaaa

SEQ ID NO: 5742 - protein, 110 aa, Glycine max
  misc_feature: Ceres CLONE ID no. 1070289
  misc_feature: Ceres CDNA ID no. 29191833
  misc_feature (1)..(106): Pfam Name: PHF5 PFAM Desc: PHF5
  misc_feature: Homolog of GI Number: 72032358 NR Desc:  similar to transcription factor INI
  misc_feature: Homolog of GI Number: 31234226 NR Desc: ENSANGP00000013177
  misc_feature: Homolog of GI Number: 57092723 NR Desc:  similar to transcription factor INI
  misc_feature: Homolog of GI Number: 54645620 NR Desc: GA21871
  misc_feature: Homolog of GI Number: 21711783 NR Desc: RH02789p
  misc_feature: Homolog of GI Number: 32564382 NR Desc: PHd Finger protein
  misc_feature: Homolog of GI Number: 61871038 NR Desc:  similar to transcription factor INI
  misc_feature: Homolog of GI Number: 62655406 NR Desc:  similar to transcription factor INI
  misc_feature: Useful for increasing seed/fruit yield or modifying fruit content
MAKHHPDLIMCRKQPGIAIGRLCEKCDGKCVICDSYVRPCTLVRVCDECNYGSFQGRCVICGGVGISDAYYCKECTQQEKDRDGCPKIVNLGSAKTDLFYERKKYGFKKR

SEQ ID NO: 5743 - DNA, 1299 bp, Glycine max
  misc_feature: Ceres CLONE ID no. 1070302
  misc_feature: Ceres CDNA ID no. 24766116
  CDS (147)..(1052): REFERENCED BY SEQ ID NO: 5744
ctttttcttcagaaacagtaaaccaaaaactatccattgctttccccctagcgttttcttctcggtcgatcttcttctccaactcacactccggcgtctcttagtcgaccgaccgctccttcagcagagaaagtcattccggaaacatgccgggtcagaagattgaaacaggtcatgaggacatggtccatgatgtgcagatggactactacggaaagagagttgcaactgcctcatctgactgcaccatcaagataaccggcgtcagcaacaacggtggatcccagcacctagctacattaaccggccaccgtggtcccgtctggcaggtcgcgtgggcccaccctaagtttggatcattccttgcttcatgctcctatgacggtcaggtcatactctggaaagaaggcagccaaaaccagtggacccaagctcatgtcttcacggaccataaatcttcggtcaactccatcgcttgggctcctcatgacctcggactgtccttggcttgtgggtcatccgacggaaacatttcggtattcacaggccgtgctgatggtggttgggacacgacgaagatcgaccaagcgcatccggttggagtcacttctgtctcatgggcaccagccactgcgcctggtgctcttgtcagctctggattgcttgatccggtttacaagctggcttccggtgggtgtgataatactgtgaaagtgtggaagctctcaaatgggtcgtggaagatggattgctttccggctcttcagaagcatactgattgggttcgtgatgtggcttgggcaccgaacttgggtctccctaagtccaccatagccagtggctcacaggatgggaaagtgatcatatggacagtggggaaagaaggtgagcagtgggaaggtaaggttctgaaggactttatgaccccggtgtggcgggtatcgtggtcgttgacaggtaacatgttggctgtgtccgatgggaacaacaacatgacggtgtggaaagaggctgttgatggagagtgggaacaggtcaccgttatggaatgatacgtttcgctatttactttactgaattaaagtctttttaaaaggatcctttttctcaggctggtttggtggtctatctgtgagggaatgtggatgtgtttttttcttcttcttaatttgggtttcggaacattttggtcattttcatctttcctagcgactttttcttttgtttttcctttttaaaaacactatcttcgtgaaatataatatcttagttttaaactggacaaaaaaaaaaaaaaaa

SEQ ID NO: 5744 - protein, 301 aa, Glycine max
  misc_feature: Ceres CLONE ID no. 1070302
  misc_feature: Ceres CDNA ID no. 24766116
  misc_feature (2)..(39): Pfam Name: WD40 PFAM Desc: WD domain
  misc_feature: Homolog of GI Number: 51963858 NR Desc: PREDICTED OSJNBa0081C13.10 gene product
  misc_feature: Homolog of GI Number: 83283979 NR Desc: protein transport SEC13
  misc_feature: Homolog of GI Number: 21593236 NR Desc: transport protein SEC13
  misc_feature: Homolog of GI Number: 50935451 NR Desc: putative Sec13p
  misc_feature: Homolog of GI Number: 47086987 NR Desc: zgc:63980
  misc_feature: Homolog of GI Number: 50754630 NR Desc:  similar to Sec13l1 protein
  misc_feature: Homolog of GI Number: 73984696 NR Desc:  similar to SEC13
  misc_feature: Homolog of GI Number: 62897599 NR Desc: SEC13
  misc_feature: Homolog of GI Number: 34932115 NR Desc: similar to Da1
  misc_feature: Useful for making bigger plants
MPGQKIETGHEDMVHDVQMDYYGKRVATASSDCTIKITGVSNNGGSQHLATLTGHRGPVWQVAWAHPKFGSFLASCSYDGQVILWKEGSQNQWTQAHVFTDHKSSVNSIAWAPHDLGLSLACGSSDGNISVFTGRADGGWDTTKIDQAHPVGVTSVSWAPATAPGALVSSGLLDPVYKLASGGCDNTVKVWKLSNGSWKMDCFPALQKHTDWVRDVAWAPNLGLPKSTIASGSQDGKVIIWTVGKEGEQWEGKVLKDFMTPVWRVSWSLTGNMLAVSDGNNNMTVWKEAVDGEWEQVTVME

SEQ ID NO: 5745 - DNA, 902 bp, Glycine max
  misc_feature: Ceres CLONE ID no. 1070316
  misc_feature: Ceres CDNA ID no. 29191630
  CDS (139)..(693): REFERENCED BY SEQ ID NO: 5746
attagtaagcgacggaggaggaggaggagaagaagaagcttctgacctctcaaaagagatccgtgacgagagttgttggcaggcggatctgacatctgtttcagaatctctgcctgagctcttcagtgaatcaattcaatgggtttatgggaagctttcctcaattggcttcgtagcctcttcttcaagcaagaaatggagctttctttgatagggcttcagaatgcaggaaagacatcacttgtcaatgttgttgcaactggtggttatagtgaggacatgattcctacggtgggttttaacatgaggaaagtgacaaaaggaaatgttacaatcaagctatgggatcttggtggtcaacctagattccgcagtatgtgggaacgttattgccgcgctgtttccgctattgtgtatgtagttgatgctgcggatcctgacaacctaagtgtctccaaaagcgaactccatgatttgttgagcaagacttctctcaacggtatccctcttctggttcttgggaacaagatcgacaaacctggagctctctctaaagaagccttaacccacgaaatggagcttcagtcgcttacggatagagaagtttgctgtttcatgatatcttgcaagaactctaccaacattgatcaggtcattgattggctggtaaagcattccaaatcaaagaactaaaacttcacacattctctcttcttagtcttcttcatgtattgtgtgcctgcgtgacaatgatgatggttgaagagtttgtctctattttcttgtctctgctgctggtccagtcttgtctctgtatattagatgtggattgtattctattctaaaccatttgcaattttggaaactcaaaaacaaaaaatgtttcaaaaaaaaaaaaaaaa

SEQ ID NO: 5746 - protein, 184 aa, Glycine max
  misc_feature: Ceres CLONE ID no. 1070316
  misc_feature: Ceres CDNA ID no. 29191630
  misc_feature: null
  misc_feature: Useful for making plants with altered terpenoid content
  misc_feature: Homolog of GI Number: 21389677 NR Desc: ADP
  misc_feature: Homolog of GI Number: 21593081 NR Desc: ADP
  misc_feature: Homolog of GI Number: 9757877 NR Desc: ADP
  misc_feature: Homolog of GI Number: 21553410 NR Desc: ADP
  misc_feature: Homolog of GI Number: 50912455 NR Desc: putative ADP
  misc_feature: Homolog of GI Number: 6723432 NR Desc: ADP
  misc_feature: Homolog of GI Number: 9757978 NR Desc: ADP
  misc_feature: Homolog of GI Number: 38174393 NR Desc: ADP
  misc_feature: Homolog of GI Number: 76648606 NR Desc:  similar to ADP
  misc_feature: Homolog of GI Number: 55619743 NR Desc:  similar to ADP
  misc_feature: Useful for increasing chlorophyll and photosynthetic capacity
  misc_feature: Useful for making plants with increased biomass and foliage
  misc_feature: Useful for making shorter plants
  misc_feature: Useful for making smaller plants
  misc_feature: Useful for making stronger plants
MGLWEAFLNWLRSLFFKQEMELSLIGLQNAGKTSLVNVVATGGYSEDMIPTVGFNMRKVTKGNVTIKLWDLGGQPRFRSMWERYCRAVSAIVYVVDAADPDNLSVSKSELHDLLSKTSLNGIPLLVLGNKIDKPGALSKEALTHEMELQSLTDREVCCFMISCKNSTNIDQVIDWLVKHSKSKN

SEQ ID NO: 5747 - DNA, 594 bp, Glycine max
  misc_feature: Ceres CLONE ID no. 1070341
  misc_feature: Ceres CDNA ID no. 29191834
  CDS (68)..(436): REFERENCED BY SEQ ID NO: 5748
aatatttattttcgttgctttcatcgccgtcgtgtcgcaggtttcttcacttttgaattttgaaaacatggcgtatgcagcaatgaagcccacgaaggctggtttggaagagccactcgagcagattcacaagatcaggatcacactctcctccaagaacgtcaagaaccttgagaaagtgtgtgctgatttggttcgtggagccaaagacaagagactcagaacgaaaggaccagtgagaatgcccaccaaggttcttaagatcactacccgtaaagctccttgtggtgaaggaactaacacgtgggatagattcgagttgagggttcataagcgagtaattgatctcttcagctctcctgatgtggtgaagcaaatcacttccatcaccattgaacctggtgttgaggtcgaggtcaccatcgccgactcttagatttcttttttttttttttttctgcaaaaaaacaatctcttacacttctgtctcttgggttgaactggtgttaaccaatgttttgttgtagtgaaacttagctcatgtgttttcttagttgaaaggagattttgttttgtccaaaaaaaaaaaaaaaa

SEQ ID NO: 5748 - protein, 122 aa, Glycine max
  misc_feature: Ceres CLONE ID no. 1070341
  misc_feature: Ceres CDNA ID no. 29191834
  misc_feature: The plant flowers significantly late compared to wild-type.
  misc_feature: The plant is abnormally large.
  misc_feature: null
  misc_feature: Useful for making plants with modulated biomass
  misc_feature: Useful for making plants with modulated flowering time
  misc_feature: Useful for making plants with modulated phosphate use efficiency
  misc_feature (22)..(117): Pfam Name: Ribosomal_S10 PFAM Desc: Ribosomal protein S10p/S20e
  misc_feature: Homolog of GI Number: 21617905 NR Desc: 40S ribosomal protein S20
  misc_feature: Homolog of GI Number: 21281054 NR Desc: putative 40S ribsomomal protein
  misc_feature: Homolog of GI Number: 23198348 NR Desc: 40S ribosomal protein S20
  misc_feature: Homolog of GI Number: 31430421 NR Desc: putative ribosomal protein S10p/S20e
  misc_feature: Homolog of GI Number: 55775376 NR Desc: 40S subunit ribosomal protein
  misc_feature: Homolog of GI Number: 54208698 NR Desc: ribosomal protein S10p/S20e
  misc_feature: Homolog of GI Number: 50933555 NR Desc: 40S ribosomal protein S20
  misc_feature: Homolog of GI Number: 22203726 NR Desc: ribosomal protein S20
  misc_feature: Homolog of GI Number: 62651870 NR Desc:  similar to 40S ribosomal protein S20
  misc_feature: Homolog of GI Number: 20805825 NR Desc: ribosomal protein S20
  misc_feature: Useful for making shorter plants
  misc_feature: Useful for sterility
  misc_feature: Useful for sterility
MAYAAMKPTKAGLEEPLEQIHKIRITLSSKNVKNLEKVCADLVRGAKDKRLRTKGPVRMPTKVLKITTRKAPCGEGTNTWDRFELRVHKRVIDLFSSPDVVKQITSITIEPGVEVEVTIADS

SEQ ID NO: 5749 - DNA, 619 bp, Glycine max
  misc_feature: Ceres CLONE ID no. 1070380
  misc_feature: Ceres CDNA ID no. 36705228
  CDS (55)..(465): REFERENCED BY SEQ ID NO: 5750
acatcaattcacattctctcagaaaccaaacagcaaaaagagtaataaacccaaatggctcgtaccaagcaaaccgctagaaaatccaccggaggaaaggctccgaggaagcagctggcgacgaaagcggcgaggaagtcggctccggccacgggaggagtgaagaagccgcacagattccgtcccggaaccgtcgcccttcgtgagatcaggaagtaccagaagagcaccgagcttctcatccgcaagcttcccttccagcgtctggtccgtgagatcgctcaggacttcaagatggatctgaggttccagagcagcgccgtcgcggctttgcaagaggctgctgaggcttaccttgttggtttgttcgaagacaccaatctctgcgcgattcacgccaaaagagtgacgatcatgcccaaggatatccagctcgctaggagaatccgtggtgaaagagcttgaagacttatctagctttgtctagttcgttaatgtgtactttgatccatggtgaattttctaaaggtttagtctttgttaagatagtctttaaggtgttcgacgaaatacctcaatgaatatgatctcttgtttaatattaaaaaaaaaaaaaaaa

SEQ ID NO: 5750 - protein, 136 aa, Glycine max
  misc_feature: Ceres CLONE ID no. 1070380
  misc_feature: Ceres CDNA ID no. 36705228
  misc_feature (58)..(134): Pfam Name: Histone PFAM Desc: Core histone H2A/H2B/H3/H4
  misc_feature: Homolog of GI Number: 59799581 NR Desc: Histone H3
  misc_feature: Homolog of GI Number: 1362108 NR Desc: histone H3 homolog
  misc_feature: Homolog of GI Number: 55775689 NR Desc: histone 3
  misc_feature: Homolog of GI Number: 73808028 NR Desc: histone H3
  misc_feature: Homolog of GI Number: 166384 NR Desc: histone H3
  misc_feature: Homolog of GI Number: 122083 NR Desc: Histone H3
  misc_feature: Homolog of GI Number: 122070 NR Desc: Histone H3
  misc_feature: Homolog of GI Number: 68441481 NR Desc:  similar to CG31613
  misc_feature: Homolog of GI Number: 24585677 NR Desc: CG31613
  misc_feature: Homolog of GI Number: 61839509 NR Desc:  similar to histone 1
MARTKQTARKSTGGKAPRKQLATKAARKSAPATGGVKKPHRFRPGTVALREIRKYQKSTELLIRKLPFQRLVREIAQDFKMDLRFQSSAVAALQEAAEAYLVGLFEDTNLCAIHAKRVTIMPKDIQLARRIRGERA

SEQ ID NO: 5751 - DNA, 679 bp, Glycine max
  misc_feature: Ceres CLONE ID no. 1070442
  misc_feature: Ceres CDNA ID no. 25446506
  CDS (51)..(419): REFERENCED BY SEQ ID NO: 5752
agcgattgttcgagaaactctaacgaaagagcgagaaagcgaagacagccatggcgtcgtttcttcaatcgtttctggatccgaagaagaactggttcgccgctcagcacatgaaatccctctccaaacgcctccgcaaatatgggctccgatacgacgatttgtacgatccttactacgatctggatgtgaaggaggcgctgaatcggcttccgaaagaggtggtggacgctcgccacgcgcgtcttaaacgcgccatcgatctttccatgaagcacgagtacctccctgacaatctgcagtcaatgcaaacaccattcaggggctaccttcaggatatgctgactcttgtgaagagagagagagcagaacgtgaagcattgggaggtttgcccctatatcaacgatccattccttgagtgcatcaagtatttcatgaagaggtggagcttgtgggaagaaccaatttggagaaggaaagagaacgttgggagaatggaaggcaattgtttgcatgcgtgtttagattggaaccgatatagaagttaccaattgtagctgcatttttatttcagatttggcataattttacagagattcacacctcaacgtggttttcaatttcttgttagaggaagttggcaaggaattcgatgtagcaacaaaaaaaaaaaaaaaa

SEQ ID NO: 5752 - protein, 122 aa, Glycine max
  misc_feature: Ceres CLONE ID no. 1070442
  misc_feature: Ceres CDNA ID no. 25446506
  misc_feature (27)..(110): Pfam Name: UCR_14kD PFAM Desc: Ubiquinol
  misc_feature: Homolog of GI Number: 15239430 NR Desc: ubiquinol
  misc_feature: Homolog of GI Number: 12642870 NR Desc: putative ubiquinol
  misc_feature: Homolog of GI Number: 633681 NR Desc: ubiquinol
  misc_feature: Homolog of GI Number: 50919263 NR Desc: putative ubiquinol
  misc_feature: Homolog of GI Number: 30689398 NR Desc: ubiquinol
  misc_feature: Homolog of GI Number: 50731732 NR Desc:  similar to Ubiquinol
  misc_feature: Homolog of GI Number: 30583843 NR Desc: Homo sapiens ubiquinol
  misc_feature: Homolog of GI Number: 55630988 NR Desc:  similar to Ubiquinol
  misc_feature: Homolog of GI Number: 190804 NR Desc: ubiquinone
MASFLQSFLDPKKNWFAAQHMKSLSKRLRKYGLRYDDLYDPYYDLDVKEALNRLPKEVVDARHARLKRAIDLSMKHEYLPDNLQSMQTPFRGYLQDMLTLVKRERAEREALGGLPLYQRSIP

SEQ ID NO: 5753 - DNA, 1362 bp, Glycine max
  misc_feature: Ceres CLONE ID no. 1070490
  misc_feature: Ceres CDNA ID no. 36705535
  CDS (50)..(961): REFERENCED BY SEQ ID NO: 5754
tatttgcttcttcgagtttcacagccaagtcgtaaaagggtttcaagggatggaaaacatgcagagcttctggcaattgggtgatgaactccgtgggcactcaaaagcatcggaggatcacaagtggttaatggttgcctcgaaactggccgaacagacaagattgaagggggagcgtgtgaacaaccttgatctttcaaagggacccattgaaacaaggtcaagggataaatttgggttccaggaagagaacaaatttgattctcttaacttgagcatgttgaacctggactctaaatttactgagaatgtgagcaaaagctcacttcgaaatggtgtttatggtatgaatgcagtgtatcagaaaaacaatgcaaacttggtgagtaatgtgatcagtaacaagtacaatggcagtattcagcataacaaagagatcaacaacaacactggcaacaacatcaacaccaatgaaagcaacaacacaaatgcaactgacaaaaggtttaagaccttgcctgctgcggagacactcccccgcaatgaggtgcttggaggatacatctttgtctgtaacaatgacacaatgcaggaagacttgaaacgtcagctatttggtttgcctccaaggtatcgagattctgttagggcaataacaccagggctacctttatttctttataactatactactcatcagctgcatggtatttttgaggcagcaagttttggtggctctaacatagatccaactgcctgggaggataaaaaatgcaaaggggaatcaaggtttccagctcaggtaagaatccgtgtcaggaagctctgcaaggcattggaagaagattctttcaggccagtattgcatcattatgacgggccaaagtttcgtcttgaactgtcagttccagagactctggatctgttggacctatgtgaacaagctggttcagcagcataagcaagaatcaaacaaagaatgaatgtgcaaaataggtaggttttggtgtgccagctgtgtggttttggcagattttccgtgaagcgtaagcttggaaagtgaatcatcatcatgttttgggggaagtaaagggagcgtgttgttgagagtgagagaccctttgttggtgaataaatggttgttgtggtatctatcccctggaagatgctttgtagctgttacatgacatttaatacctttgtatgattaagtaaagtacagactactgtttgtactgctaaagtatgtatctgttgaaccaagaaaaaaattaaagttaaaaagcttcatgtattactaaactctatgttgagttggttgaagtgatcttttattttattggtaaaaaaaaaaaaaaaaaa

SEQ ID NO: 5754 - protein, 300 aa, Glycine max
  misc_feature: Ceres CLONE ID no. 1070490
  misc_feature: Ceres CDNA ID no. 36705535
  misc_feature: Homolog of GI Number: 21592623 NR Desc: gda
  misc_feature: Homolog of GI Number: 21665866 NR Desc: GDA2 protein
  misc_feature: Homolog of GI Number: 297889 NR Desc: B2 protein
  misc_feature: Homolog of GI Number: 57900057 NR Desc: putative GDA2 protein
  misc_feature: Homolog of GI Number: 57898928 NR Desc: N
  misc_feature: Homolog of GI Number: 57900056 NR Desc: putative GDA2 protein
  misc_feature: Homolog of GI Number: 34913876 NR Desc: B1156H12.22
  misc_feature: Homolog of GI Number: 2765418 NR Desc: gda
  misc_feature: Homolog of GI Number: 33243058 NR Desc: KEAP1
MQSFWQLGDELRGHSKASEDHKWLMVASKLAEQTRLKGERVNNLDLSKGPIETRSRDKFGFQEENKFDSLNLSMLNLDSKFTENVSKSSLRNGVYGMNAVYQKNNANLVSNVISNKYNGSIQHNKEINNNTGNNINTNESNNTNATDKRFKTLPAAETLPRNEVLGGYIFVCNNDTMQEDLKRQLFGLPPRYRDSVRAITPGLPLFLYNYTTHQLHGIFEAASFGGSNIDPTAWEDKKCKGESRFPAQVRIRVRKLCKALEEDSFRPVLHHYDGPKFRLELSVPETLDLLDLCEQAGSAA

SEQ ID NO: 5755 - DNA, 1029 bp, Glycine max
  misc_feature: Ceres CLONE ID no. 1070574
  misc_feature: Ceres CDNA ID no. 24766117
  CDS (154)..(840): REFERENCED BY SEQ ID NO: 5756
aaaatcgccttcgtctttccccgtcgtctccaccaacgccagtttttccccgtcgtctccaccaacgccagtccaaatccaaacccgaaggaggaagagaggctagctagctagggttccgcctcccgccggccggagagagggagagagaggatgacgacggcggcgcggccaacgtgggcgccagcgaagggcgggaacgagcagggcggcacgcgtatcttcgggccctccgggaagtactcctcccgcgacctcgccgcacacacctccctcaagcccagaaaagagggacaacaaactcaagaggaggtacagaagaggaatcttagggatgaacttgaggagcgtgaacgcaagcacttctcatccaaggataagtcctatgttgacgagagggaccggcgaaaaagttcaggcctgctcttagaaggttcaaaacgggatgaggataagatagttccacgtgaaattgatgcagatgactctgacgtggaactaaaaagtgatgatgaaagcgacgatgatgacgacgacgatgacactgaggcactaatggcagagcttgaaaggattaaaaaagaaagagccgaggacaggcttagaaaggagcgtcagcaagcagaagaagaggccaagatgaaggaggctgagctgatgcgaggaaacccactgatcaatatgaataattctggctccttcaatgtgaagagaaggtgggatgatgatgttgtattcaagaaccaggctcgtggagagactaagacaccgaaacggttcatcaatgacaccatcagaagtgatttccaccgcaagtttctgcataggtacatgaaatgatgctgctgtatgctttatgttgtctggacagtatgcatgctgaaagagcctgtgatgtttctgtattctgaagatcgatttgtatgacataactgtaacagctacgttatcttaatggtgatatgtttaccctgttcctaagagtaaagaaaagaacccactgcttgtgtattaaaaaaaaaaaaaaaa

SEQ ID NO: 5756 - protein, 228 aa, Glycine max; identical to SEQ ID NO: 2258
  misc_feature: Ceres CLONE ID no. 1070574
  misc_feature: Ceres CDNA ID no. 24766117
  misc_feature (1)..(228): Pfam Name: Cwf_Cwc_15 PFAM Desc: Cwf15/Cwc15 cell cycle control protein
  misc_feature: Homolog of GI Number: 34897750 NR Desc: ESTs AU032852
  misc_feature: Homolog of GI Number: 46329463 NR Desc: MGC81091 protein
  misc_feature: Homolog of GI Number: 61868546 NR Desc:  similar to RIKEN cDNA 0610040D20
  misc_feature: Homolog of GI Number: 28829868 NR Desc: similar to T10C6.5.p
  misc_feature: Homolog of GI Number: 23612595 NR Desc: cell cycle control protein cwf15 homologue
  misc_feature: Homolog of GI Number: 23489775 NR Desc: Dictyostelium discoideum HSPC148. 10/100

SEQ ID NO: 5757 - DNA, 759 bp, Glycine max
  misc_feature: Ceres CLONE ID no. 1070586
  misc_feature: Ceres CDNA ID no. 25446507
  CDS (219)..(467): REFERENCED BY SEQ ID NO: 5758
atttctaggctgtgctgtgcctgtgtcttccgctgactccaccttgtattgtatcttcttccagcactgcgttacgttgcgtttggaaactctgattagagccttcgagttggatctcaaattttgatttcatgctgtttggtactgtgaagggaacataacagtggcgtggttgtagtgcaagagaaggtattgcagattgatttggttgtcggaagatgcatcctcctttaacattgcacaaacacccaatgtgtgctgaaattattgaacagtttcaaaagtgtcatatagaacatcctattgcaaaattctttggtgaatgtactgatttgaaaataaaattggatcgttgtttcagagaagagaaagctttgaagcggaaggctaactttgaagagagcaaaaagttgaaggaacagttgcgagctttgaggaaagaaaatgctacaagcagtggtcaatagaagaatcttttgaaatgttgaaaatacaaaattgttttgcaaattacaatccgtaattttgtacaatggctggatacgatatgtatcttgcagcctcaaaaaagcgggttattacacataatattgtttggagtatatctgatgctcttgccttcagtgctctatctttatgatgctcatttactgatttgatgaatcactatgtatgctgctcacttacatgttattgcctctggtcctttttataagaaacaagtgattgtttatttttacacgaaaaaaaaaaaaaaaa

SEQ ID NO: 5758 - protein, 82 aa, Glycine max; identical to SEQ ID NO: 2342
  misc_feature: Ceres CLONE ID no. 1070586
  misc_feature: Ceres CDNA ID no. 25446507
  misc_feature: Homolog of GI Number: 50540296 NR Desc: DC13 protein
  misc_feature: Homolog of GI Number: 57092605 NR Desc:  similar to UPF0287 protein DC13
  misc_feature: Homolog of GI Number: 50795800 NR Desc:  similar to RIKEN cDNA 1110046L09
  misc_feature: Homolog of GI Number: 50795795 NR Desc:  similar to RIKEN cDNA 1110046L09

SEQ ID NO: 5759 - DNA, 576 bp, Glycine max
  misc_feature: Ceres CLONE ID no. 1070600
  misc_feature: Ceres CDNA ID no. 25446991
  CDS (60)..(470): REFERENCED BY SEQ ID NO: 5760
aaaaaaccatcgagaaaccaaaaaccaaaatcaatttagaggaaaaagttggaagaagcatggattctaggcggcgtggtaaaaacgcatctatgcaacgcaagttgcaacaacttcgatcggttacaaattccagtgctgtgaacaaagcctcaattattgtggatgccaccagatacatagaggagctgaagcaaaaagtggatggattgaactcagagctaggaaccgcggaatcatcaatctcccaagacgaactacccatggtcactgtagaaaccctagaaaggggattcctcattaatgtgttttcagaaaggaattgtcccggtatgcttggggcaatactcgatgcatttgaagaactgggacttgatgtgcttgatgctagggtttcttgcgaagacactttccagcttgaagcagtcggaggagaagtaagagaatacactaagatatacaatgtctaatcccttcttatcttagtatatatttgtccttcttttgtttttcctttggaataattttaagcgtctaaaatcaggtcacaattattgacaaaaaaaaaaaaaaaaa

SEQ ID NO: 5760 - protein, 136 aa, Glycine max
  misc_feature: Ceres CLONE ID no. 1070600
  misc_feature: Ceres CDNA ID no. 25446991
  misc_feature: Homolog of GI Number: 49333372 NR Desc: predicted protein
  misc_feature: Homolog of GI Number: 49333386 NR Desc: predicted protein
MDSRRRGKNASMQRKLQQLRSVTNSSAVNKASIIVDATRYIEELKQKVDGLNSELGTAESSISQDELPMVTVETLERGFLINVFSERNCPGMLGAILDAFEELGLDVLDARVSCEDTFQLEAVGGEVREYTKIYNV

SEQ ID NO: 5761 - DNA, 849 bp, Glycine max
  misc_feature: Ceres CLONE ID no. 1070609
  misc_feature: Ceres CDNA ID no. 25892488
  CDS (139)..(621): REFERENCED BY SEQ ID NO: 5762
attcaaaagccgaacccaaataacacaacacaaaacgatcttttatttctctgtctagagaagaatctagcaagccttgctcgtcacaaaatcaaaggttgcaactgagaactcactccttcgaatcaaaatcaaaaaatgtcggtgactctgcacacaaacctaggcgacatcaagtgtgaaatcttctgcgacgaggtccctaaaacctccgagaattttttagcgctatgtgcaagtggttactatgatgggactatatttcaccgcaacattaagggttttatgattcaaggtggagatccaactggaactggcaaagggggaaccagtatatggggcaagaaatttaacgatgagataagagaatctctgaagcacaatgcaagaggaatattagcaatggccaatagtggtccaaatactaatggaagccaatttttcttgacttatgcaaagcagcctcatttaaatgggctatacaccgtgtttggcaaagtaattcatggatttgaagttcttgatctcatggagaagacacaaacaggggcaggggaccgaccgcttgcagagataaggctcaatcgtgtaacaatacatgctaatccacttgctggttagccttttgtctcaacagttttttatgtaaaatttaactttttgttttccaagtgatctagcttaaaggggaggagaaagtgagttcttatgtactaatttgagtacttgttcgtacctactgattcaaagaagcattttgattgatcaagtagtaaagtgtatattgatttgtgagatatgcatggaatacgataaacacatctttatggatcaaaaaaaaaaaaaaaa

SEQ ID NO: 5762 - protein, 160 aa, Glycine max
  misc_feature: Ceres CLONE ID no. 1070609
  misc_feature: Ceres CDNA ID no. 25892488
  misc_feature (2)..(153): Pfam Name: Pro_isomerase PFAM Desc: Cyclophilin type peptidyl
  misc_feature: Homolog of GI Number: 50948681 NR Desc: putative CYP10L
  misc_feature: Homolog of GI Number: 14043400 NR Desc: Peptidylprolyl isomerase
  misc_feature: Homolog of GI Number: 50344948 NR Desc: zgc:86715
  misc_feature: Homolog of GI Number: 62738560 NR Desc: Chain A
  misc_feature: Homolog of GI Number: 56388565 NR Desc: Peptidylprolyl isomerase
  misc_feature: Homolog of GI Number: 66534975 NR Desc:  similar to Peptidylprolyl isomerase
  misc_feature: Homolog of GI Number: 57110927 NR Desc:  similar to peptidylprolyl isomerase
  misc_feature: Homolog of GI Number: 55614513 NR Desc:  similar to peptidylprolyl isomerase
  misc_feature: Homolog of GI Number: 56523050 NR Desc: cyclophilin
  misc_feature: Homolog of GI Number: 58386054 NR Desc: ENSANGP00000016027
MSVTLHTNLGDIKCEIFCDEVPKTSENFLALCASGYYDGTIFHRNIKGFMIQGGDPTGTGKGGTSIWGKKFNDEIRESLKHNARGILAMANSGPNTNGSQFFLTYAKQPHLNGLYTVFGKVIHGFEVLDLMEKTQTGAGDRPLAEIRLNRVTIHANPLAG

SEQ ID NO: 5763 - DNA, 916 bp, Glycine max
  misc_feature: Ceres CLONE ID no. 1070743
  misc_feature: Ceres CDNA ID no. 29191753
  CDS (1)..(675): REFERENCED BY SEQ ID NO: 5764
cttgcgccacaaccagaccggaggaggaggagagcggcggcgaagatggtgtcgctgaagctgcagaagcgcctggcctcgagcgtcctcaagtgcggcaagggcaaggtctggctcgaccccaatgaggtcaacgagatctccatggccaactcccggcagaatatccggaagctggtgaaggatggtttcatcatcaggaagcctcagaagatccactccaggtctcgtgcaaggagggcacatgaggccaagcagaagggccgtcactctggatatggtaagcgtaggggtaccagggaggctaggctccccaccaagatcctgtggatgcggaggatgcgtgtcctgaggcgccttctgcgcaagtaccgtgaggccaagaagatcgacaagcacatgtaccatgacatgtacctgaaggtcaagggtaacatgttcaagaacaagagggtcctcatggagagtatccacaagtccaaggctgagaaggcaagagagaagaccctctctgaccagtttgaggccaagcgcgccaagagcaaggcaagcagggagaggaagattgccaggagggaggagagattggctcagggcccgagagatcatgcaccagcaccagcggctgcagctcccgctcaggcagcagctgcacctaagaaggccaagaagtgaaggtctgataagaagctttatctttctggtaatatcaagggttagcctaattttggaacatcagaagttcagaactgttttctgtgcaatatcttgtttgtgtcagcgtgtcagataccttaaatatcatatcgtgtttgttctgttggatgtttcaatcagagatgcttatgcagagtttgttaaaccatttgggttaatggtattatattatgcttttgaaccaaaaaaaaaaaaaaaa

SEQ ID NO: 5764 - protein, 209 aa, Glycine max
  misc_feature: Ceres CLONE ID no. 1070743
  misc_feature: Ceres CDNA ID no. 29191753
  misc_feature (2)..(149): Pfam Name: Ribosomal_L19e PFAM Desc: Ribosomal protein L19e
  misc_feature: Homolog of GI Number: 29837764 NR Desc: putative ribosomal protein L19
  misc_feature: Homolog of GI Number: 32401377 NR Desc: ribosomal protein L19
  misc_feature: Homolog of GI Number: 47026900 NR Desc: ribosomal protein L19
  misc_feature: Homolog of GI Number: 40287526 NR Desc: 60S ribosomal protein L19
  misc_feature: Homolog of GI Number: 83284003 NR Desc: 60S ribosomal protein L19
  misc_feature: Homolog of GI Number: 33589762 NR Desc: At1g02780/T14P4_3
  misc_feature: Homolog of GI Number: 7268983 NR Desc: putative ribosomal protein L19
  misc_feature: Homolog of GI Number: 18087585 NR Desc: At1g02780/T14P4_3
  misc_feature: Homolog of GI Number: 19699260 NR Desc: AT3g16780/MGL6_23
  misc_feature: Homolog of GI Number: 3377797 NR Desc: Similar to 60S ribosome protein L19
MVSLKLQKRLASSVLKCGKGKVWLDPNEVNEISMANSRQNIRKLVKDGFIIRKPQKIHSRSRARRAHEAKQKGRHSGYGKRRGTREARLPTKILWMRRMRVLRRLLRKYREAKKIDKHMYHDMYLKVKGNMFKNKRVLMESIHKSKAEKAREKTLSDQFEAKRAKSKASRERKIARREERLAQGPRDHAPAPAAAAPAQAAAAPKKAKK

SEQ ID NO: 5765 - DNA, 987 bp, Glycine max
  misc_feature: Ceres CLONE ID no. 1070770
  misc_feature: Ceres CDNA ID no. 29191671
  CDS (33)..(743): REFERENCED BY SEQ ID NO: 5766
gagcagatcaacaaacaaaccctagagttccgatgatgatgatgatgaggggcctcttatcaactgcgacgagcagcgcaggaggtgggagaagaagctacagtctgattccgatggtgattgagcactcgtcgcgaggagagagagcttacgacatcttctctcggctgctcaaggagcgtatcatctgcatcaacggcccgatcaacgacgacacctcccacgtcgtcgtcgcccagcttctcttcctcgagtccgagaatccttccaagccgatccatatgtatctcaactcacccggaggccacgtcaccgccggtcttgcaatttacgatacgatgcagtacattcgttctccgataagcacaatctgtctaggccaggctgcatcaatggcctctctcctcttggcagctggtgccaagggacaaaggcggtcgcttcctaacgctaccgttatgattcatcagccttcaggtgggtatagcggccaggccaaggatttgacgattcataccaagcagattgttcgtgtgtgggatgccttgaatggtctgtactcgaaacacacgggtcagcctatcgacgtggttgccgagaacatggatagggataacttcatgactccccaagaggctaaggcgtttgggatcatcgatgaggtgattgatgagagacccttggagttggtgaaagatgcagttgggggtggtgaaagcaaagataagaagagttccagttaaggaagtcactctggtaatcaaaagtattttctttttttttctttgcttcggttagatcacactggatgaaattgatgctctgcagggcgggcttaatctctctttaaaactgtttttattctttaataaatcgtgttcatgtttcggaactcttttccttgagtgttttagttacacagcttcatatctgattcgagttaaatgaataattggattaagtttcatggtaaaaaaaaaaaaaaaa

SEQ ID NO: 5766 - protein, 232 aa, Glycine max
  misc_feature: Ceres CLONE ID no. 1070770
  misc_feature: Ceres CDNA ID no. 29191671
  misc_feature (30)..(211): Pfam Name: CLP_protease PFAM Desc: Clp protease
  misc_feature: Homolog of GI Number: 28950803 NR Desc: At5g23140
  misc_feature: Homolog of GI Number: 50926576 NR Desc: OSJNBa0038O10.7
  misc_feature: Homolog of GI Number: 54640279 NR Desc: GA18618
  misc_feature: Homolog of GI Number: 83751206 NR Desc: COG0740: Protease subunit of ATP
  misc_feature: Homolog of GI Number: 49475380 NR Desc: ATP
  misc_feature: Homolog of GI Number: 20129427 NR Desc: CG5045
  misc_feature: Homolog of GI Number: 66515781 NR Desc:  similar to novel protein similar to human and and mouse ClpP caseinolytic protease
  misc_feature: Homolog of GI Number: 5002357 NR Desc: heat
  misc_feature: Homolog of GI Number: 83841306 NR Desc: Protease subunit of ATP
  misc_feature: Homolog of GI Number: 49474139 NR Desc: ATP
  misc_feature: Useful for making bigger plants
MRGLLSTATSSAGGGRRSYSLIPMVIEHSSRGERAYDIFSRLLKERIICINGPINDDTSHVVVAQLLFLESENPSKPIHMYLNSPGGHVTAGLAIYDTMQYIRSPISTICLGQAASMASLLLAAGAKGQRRSLPNATVMIHQPSGGYSGQAKDLTIHTKQIVRVWDALNGLYSKHTGQPIDVVAENMDRDNFMTPQEAKAFGIIDEVIDERPLELVKDAVGGGESKDKKSSS

SEQ ID NO: 5767 - DNA, 696 bp, Glycine max
  misc_feature: Ceres CLONE ID no. 1070832
  misc_feature: Ceres CDNA ID no. 29191631
  CDS (57)..(497): REFERENCED BY SEQ ID NO: 5768
attcattagggttttctcttcttctcatctatcacttcggctgctgcaagtgagccatggcgacgaaaccagctaaacaatccgtgcaatgcttcgggaggaagaagacggccgtcgccgtcacccactgcaagcccgggtgcggtatgatcaagctcaacggttccccgatcgagctcttccagcccgagatcctccggttcaagatctacgagccggtccttctcctagggaagcaccgtttcgcgggtgtcgacatgaggatccgtgttaacggtggtggtcacacttcacaggtctacgcgattcgtcagagcatcgccaaggcgttagttgctttctaccagaagtacgttgacgagcagtcgaagaaggaggtcaaggatatcttgataaggtacgataggactcttctcgtggcggatccgaggaggtgcgagccgaagaagtttggtgggcgtggtgctcgttctcgtttccagaagagttaccgttaatcaaaatctggtttgttcattgctcaaaatgagacgttagactctcatttgcgttttttttttattattgttatgtgataatggttaatttgccaaagaacttttgtttttttttacaatgtctgctcgtttaatgtctttactccgtttactattttatttttgttaattgattggtcgctcaaaaaaaaaaaaaaaa

SEQ ID NO: 5768 - protein, 146 aa, Glycine max
  misc_feature: Ceres CLONE ID no. 1070832
  misc_feature: Ceres CDNA ID no. 29191631
  misc_feature (14)..(146): Pfam Name: Ribosomal_S9 PFAM Desc: Ribosomal protein S9/S16
  misc_feature: Homolog of GI Number: 16323500 NR Desc: putative 40S ribosomal protein S16
  misc_feature: Homolog of GI Number: 21555842 NR Desc: 40S ribosomal protein S16
  misc_feature: Homolog of GI Number: 6721162 NR Desc: putative 40S ribosomal protein S16
  misc_feature: Homolog of GI Number: 6984222 NR Desc: 40S ribosomal protein S16
  misc_feature: Homolog of GI Number: 2641209 NR Desc: ribosomal protein S16
  misc_feature: Homolog of GI Number: 439654 NR Desc: RS16 protein
  misc_feature: Homolog of GI Number: 4574242 NR Desc: ribosomal protein S16
  misc_feature: Homolog of GI Number: 77552917 NR Desc: ribosomal protein S9
  misc_feature: Homolog of GI Number: 7440266 NR Desc: probable ribosomal protein S16
  misc_feature: Homolog of GI Number: 62639239 NR Desc:  similar to 40S ribosomal protein S16
MATKPAKQSVQCFGRKKTAVAVTHCKPGCGMIKLNGSPIELFQPEILRFKIYEPVLLLGKHRFAGVDMRIRVNGGGHTSQVYAIRQSIAKALVAFYQKYVDEQSKKEVKDILIRYDRTLLVADPRRCEPKKFGGRGARSRFQKSYR

SEQ ID NO: 5769 - DNA, 577 bp, Glycine max
  misc_feature: Ceres CLONE ID no. 1070894
  misc_feature: Ceres CDNA ID no. 25446508
  CDS (2)..(373): REFERENCED BY SEQ ID NO: 5770
atcaccacacaaccccatacacacacggttcctcagattacgactacgatcgaggaagaggaagaagatacaatatggccctgggagacgactctccggcctcctacatccgcatggttcaccatctgatagagaagtgcatgacgttcgggatgagcatggaggagtgcatggaggcgctgtccaagcgcgccgacgttcagccggtcgtcacctccacagtatggaaagagctggagaaggagaacaaggagttcttcgacagatacaacaagcagttgagatcagaaaagggaggccgaagcagctgcagcagcagcagcgacagcagctcctaatgatcaacaggagatgcgtgctgcttagatgttagccattctgcacttagtagaacgaataattagaagatcgatggggcgggaagtcagctaacgcgacacgatctatgtgtgctggtgcatgtacaggaatcacaagccatctcgtactgttgccatattcttcagatgtaattgtactcatcatgtatccatctcccacagctctcggttcagactttccaaaaaaaaaaaaaaaa

SEQ ID NO: 5770 - protein, 87 aa, Glycine max
  misc_feature: Ceres CLONE ID no. 1070894
  misc_feature: Ceres CDNA ID no. 25446508
  misc_feature: Homolog of GI Number: 34908092 NR Desc: P0031D11.2
MALGDDSPASYIRMVHHLIEKCMTFGMSMEECMEALSKRADVQPVVTSTVWKELEKENKEFFDRYNKQLRSEKGGRSSCSSSSDSSS

SEQ ID NO: 5771 - DNA, 693 bp, Glycine max
  misc_feature: Ceres CLONE ID no. 1070919
  misc_feature: Ceres CDNA ID no. 40351626
  CDS (52)..(552): REFERENCED BY SEQ ID NO: 5772
accaattcactctttttcttctcgccctctgccgtgggaggagtttgtaacatggctgctctaccaacggcggagcttagtgacgcaaatgcaacacatgtagcaagttgtgatgtgagggtgatgcatccagtgttcaaggtttacggtggggccactgcgttctccggccccgttgtcaccgtgaaggtgtttgaagacaacgtgttggtgagggagcttcttgagacgaaaggcgaaggaagagtattggttgttgatggaggaggaagcttgaggtgtgcattggtgggagggaatttggtactgattgcacataacatgggttgggctgggattgtggtgaatggctgcatcagagatgtggatgagatcaatgcaagtgatattggcgtcagagccttggcttctcatccactcagatccaacaaaaagcgcactggtgaaaagaatgtccctgtttatgttggtggaacatttattcgagaaggagaatggttgtatgctgataatgatggcatcctcgtatcaaaatttgagttgtcaaactaaaatagtttgccttcagttcaatattattgccattgggatgccattttagatttttaggtcaggctctttctggttgttttagtttgtggggaagtgaataaaattttaagaatttcttgtgtacaaaaaaaaaaaaaaaaa

SEQ ID NO: 5772 - protein, 166 aa, Glycine max
  misc_feature: Ceres CLONE ID no. 1070919
  misc_feature: Ceres CDNA ID no. 40351626
  misc_feature (2)..(159): Pfam Name: Methyltransf_6 PFAM Desc: Demethylmenaquinone methyltransferase
MAALPTAELSDANATHVASCDVRVMHPVFKVYGGATAFSGPVVTVKVFEDNVLVRELLETKGEGRVLVVDGGGSLRCALVGGNLVLIAHNMGWAGIVVNGCIRDVDEINASDIGVRALASHPLRSNKKRTGEKNVPVYVGGTFIREGEWLYADNDGILVSKFELSN

SEQ ID NO: 5773 - DNA, 707 bp, Glycine max
  misc_feature: Ceres CLONE ID no. 1070936
  misc_feature: Ceres CDNA ID no. 29191203
  CDS (43)..(555): REFERENCED BY SEQ ID NO: 5774
atatctcacagagcaaaatcgaaaacgcatagttgataagaaatggtgaagtcagagaagaaagccacggtagagcggaagaagaggaaagcatcgcgacccgccgctaatatctcaaatttacgcgccagtgtcgagaagaagaaaggtttcgcggagctgcgcgacgatctattccgcgaagcagcgaaactcgtcgcggaagatccctcccagagaatcgcgatcctcatcaaacctcccgcctccgaatcgagcgtcgctatgcaatcgttcgggtatccgtctgcggaaggagtggttcgacagttcctcaaggattctgctcctcatgttcctttaccagaggacgacgctgagaaggacgaaggagaggacgaggattggtctaagtattactggtgggaagatgacaagctgcttaattcgaaggatccggtggagattatggcggcgatggaggagatgaagaaacttcaaaagcaactcgagcattttgttccacgtgaaacaggtcaaggctctgggactcaggacgatggatcaaaaccctaattgcaagatgggattcatgttcaagtcttccatctccagcgacgtcgttttaggttttaattataactatgatcatttgctttttccctgagttatattgtaagttgctaatttcgaatcaagactgtgtttttgctaaaaaaaaaaaaaaa

SEQ ID NO: 5774 - protein, 170 aa, Glycine max
  misc_feature: Ceres CLONE ID no. 1070936
  misc_feature: Ceres CDNA ID no. 29191203
  misc_feature: Homolog of GI Number: 32402442 NR Desc: MADS
  misc_feature: Homolog of GI Number: 32402438 NR Desc: MADS
MVKSEKKATVERKKRKASRPAANISNLRASVEKKKGFAELRDDLFREAAKLVAEDPSQRIAILIKPPASESSVAMQSFGYPSAEGVVRQFLKDSAPHVPLPEDDAEKDEGEDEDWSKYYWWEDDKLLNSKDPVEIMAAMEEMKKLQKQLEHFVPRETGQGSGTQDDGSKP

SEQ ID NO: 5775 - DNA, 719 bp, Glycine max
  misc_feature: Ceres CLONE ID no. 1070982
  misc_feature: Ceres CDNA ID no. 29191672
  CDS (77)..(484): REFERENCED BY SEQ ID NO: 5776
ctaatcttgctgcgatccctctctcgctctcgctctcgctctctacagcgcaaagtgtgagacttttggcgggaaaatgtcggggaaaggagcgaagggtttgataatggggaaacccagtggtagcgagaaggacaaggacaagaagaaacaacccatcacccgttctgctcgagctggtcttcagttccctgttggaagggtgcataggctgttgaagacaaggtccactgctcacggaagagttggagcaactgcagctgtttacacagcagccatactggagtatctgaccgcagaagttttggagctggctggcaacgccagcaaggacctcaaggtgaaacgtatctccccgaggcacttgcagcttgcgattcgtggagatgaagagctcgatactctcatcaaaggaactatagctggtggtggtgtcatccctcacatccacaagtctctcatcaacaaatccgccaaggaatagattcttaccactctttgggccttgcttctctgtttctttaagtatctctctctctcgagagagagtttgtattttgataaaagaagacgctagagagctcttttgttatgcgtatgtatttgatgatttatctaaaactcattttctgactagaagcttgtaagcaaatcaatgtgtttttcactgaacatgaatcgtatttgcatttacatgatacataaaaaaaaaaaaaaaa

SEQ ID NO: 5776 - protein, 135 aa, Glycine max
  misc_feature: Ceres CLONE ID no. 1070982
  misc_feature: Ceres CDNA ID no. 29191672
  misc_feature (30)..(106): Pfam Name: Histone PFAM Desc: Core histone H2A/H2B/H3/H4
  misc_feature: Homolog of GI Number: 21536635 NR Desc: putative histone H2A
  misc_feature: Homolog of GI Number: 21592838 NR Desc: histone H2A.F/Z
  misc_feature: Homolog of GI Number: 34902610 NR Desc: Putative histone H2A
  misc_feature: Homolog of GI Number: 31432099 NR Desc: putative histone H2A
  misc_feature: Homolog of GI Number: 30024110 NR Desc: putative histone H2A
  misc_feature: Homolog of GI Number: 50918585 NR Desc: putative histone H2A protein
  misc_feature: Homolog of GI Number: 6319146 NR Desc: H2A protein
  misc_feature: Homolog of GI Number: 62319094 NR Desc: histone H2A
  misc_feature: Homolog of GI Number: 56500163 NR Desc: histone H2A variant
  misc_feature: Homolog of GI Number: 63615089 NR Desc:  histone H2A.F/Z variant
  misc_feature: Useful for making ornamental plants with modified flowers
MSGKGAKGLIMGKPSGSEKDKDKKKQPITRSARAGLQFPVGRVHRLLKTRSTAHGRVGATAAVYTAAILEYLTAEVLELAGNASKDLKVKRISPRHLQLAIRGDEELDTLIKGTIAGGGVIPHIHKSLINKSAKE

SEQ ID NO: 5777 - DNA, 817 bp, Glycine max
  misc_feature: Ceres CLONE ID no. 1071018
  misc_feature: Ceres CDNA ID no. 25445593
  CDS (207)..(644): REFERENCED BY SEQ ID NO: 5778
atattattccactcttaccctttctggctcagtcgctctcctctcaagtctcacttcaccgtaacgcgcatgcctttgtttgaagctagccttcgtcgaattcaatttgttttccctctcacgcggtcctaagtgctaacctgtatctgagtataacgtgggggaattgacccttagatgtcatatcttcctttaacagatacaaaatgccaaaagtaaagacaaaccgtgttacatacccagagggctgggaattaattgagcctactctccatgaacttcaagcaaagatgagggaagctgagaacgatccacatgatggcaagagaaactgtgagacattatggcctatatttaagattgcacaccagaagagccgctacatatttgacctctatcatcaaaggaaggagatttctaaagaattgtatgaattctgtttagatcaaggatatgctgaccacaatctaattgcaaaatggaagaagcctggttatgaacgtctatgctgcttggggtgtatgcagccacgcaatcacaattttgccaccacttgtgtttgcagagttcccaagaaccttagggaggagaaggttatagagtgtgttcattgtggttgcaagggctgtgctagcggggactgagtggacatcaattctattatcagttgccaaaaagggggtttcttaggattattttgttggtgtttttagcattctccagattgtgttaactatttactacatgaatactatactatgtaatgaaaaatattagttaattgttaactatctgcacaaaaaaaaaaaaaaaaaaa

SEQ ID NO: 5778 - protein, 145 aa, Glycine max
  misc_feature: Ceres CLONE ID no. 1071018
  misc_feature: Ceres CDNA ID no. 25445593
  misc_feature (1)..(143): Pfam Name: G10 PFAM Desc: G10 protein
  misc_feature: Homolog of GI Number: 52353717 NR Desc: putative G10 protein
  misc_feature: Homolog of GI Number: 50929151 NR Desc: OSJNBa0070O11.6
  misc_feature: Homolog of GI Number: 23308281 NR Desc: At4g21110/F7J7_50
  misc_feature: Homolog of GI Number: 77553013 NR Desc: g10 protein homolog
  misc_feature: Homolog of GI Number: 303847 NR Desc: Maternal G10 like protein
  misc_feature: Homolog of GI Number: 5852181 NR Desc: zhb0011.1
  misc_feature: Homolog of GI Number: 72133045 NR Desc:  similar to G10 protein homolog
  misc_feature: Homolog of GI Number: 15029378 NR Desc: G10 protein
  misc_feature: Homolog of GI Number: 15128111 NR Desc: G10
MPKVKTNRVTYPEGWELIEPTLHELQAKMREAENDPHDGKRNCETLWPIFKIAHQKSRYIFDLYHQRKEISKELYEFCLDQGYADHNLIAKWKKPGYERLCCLGCMQPRNHNFATTCVCRVPKNLREEKVIECVHCGCKGCASGD

SEQ ID NO: 5779 - DNA, 641 bp, Glycine max
  misc_feature: Ceres CLONE ID no. 1071065
  misc_feature: Ceres CDNA ID no. 25446607
  CDS (93)..(395): REFERENCED BY SEQ ID NO: 5780
agaatctaatgttaaaggtactatgctttatagttatatttaatttaatctataggagctagcaggagttaaggatagtggtgatactttctatgttatctttgtttcttcttcgtcttcttcccttatggcaggttttactaaaccagattgtgttaggtccatgtgtcattgctgttgtttttgcatggaataatttatggctaaggaagctctctcagcttccagaaaaatacagaagagatgcttttccaacgttactttatggatttagattctggatcccagtcactgtattaaatttctgggtggttcctcttcaagcccgagtggctttcatgtcaatgggctcagtattttggaatttctacttgtcatcaacaataaccaagtaaaatgcattgtgtacaatttttacattgagattaatcaaaagtctaatagcttttggtgaggaaagttgtggtggatagtagcggctggccaaaatagctgaagataaatttgtttagttcttattttttacattacctgttcatttctgacaaagaacagtgctttgacaatgccaagggtacatgcgctgataattctcactgaatgaagtaacttttggtacttggtcaaaaaaaaaaaaaaaa

SEQ ID NO: 5780 - protein, 100 aa, Glycine max
  misc_feature: Ceres CLONE ID no. 1071065
  misc_feature: Ceres CDNA ID no. 25446607
  misc_feature (36)..(100): Pfam Name: Mpv17_PMP22 PFAM Desc: Mpv17 / PMP22 family
  misc_feature: Homolog of GI Number: 34910856 NR Desc: P0435H01.24
MLSLFLLRLLPLWQVLLNQIVLGPCVIAVVFAWNNLWLRKLSQLPEKYRRDAFPTLLYGFRFWIPVTVLNFWVVPLQARVAFMSMGSVFWNFYLSSTITK

SEQ ID NO: 5781 - DNA, 591 bp, Glycine max
  misc_feature: Ceres CLONE ID no. 1071070
  misc_feature: Ceres CDNA ID no. 25446509
  CDS (15)..(443): REFERENCED BY SEQ ID NO: 5782
atacgttcaaatccatgattgttaggatggatccctctcatcatattgaacaacaagaagacgacgagtgggacactgaaggatttgtgattccaagtttgggaattgaagactcagatcaagataaacctcatgttcttgatatagaatcttctgattctgcatcaaaggctaagaaggatgaaaacatctatttgggtccgcatggagcgcatccttcactagcaaagcagcaagagctaaattcatctaaccggaagcagaagttcaagcaaaagctgaaagaagctgacaagagaattagtgggacgggtagggagaataaggtggataacctgagggagcttgtgggtgggggaaaattaagtgtcaacaatgcaaaggaatctcccaaggactggttagatccacattgtcaagaatctgagtttgagaggaggtaatgccctccacatacatttggtattatagaaatgacatgggagattttggtttttttgatctgttgtattcctggagatgctccacttaagcaccttttgttacatagtttgatgtcatctttgagactcgaaaaaaaaaaaaaaaaaa

SEQ ID NO: 5782 - protein, 142 aa, Glycine max
  misc_feature: Ceres CLONE ID no. 1071070
  misc_feature: Ceres CDNA ID no. 25446509
MIVRMDPSHHIEQQEDDEWDTEGFVIPSLGIEDSDQDKPHVLDIESSDSASKAKKDENIYLGPHGAHPSLAKQQELNSSNRKQKFKQKLKEADKRISGTGRENKVDNLRELVGGGKLSVNNAKESPKDWLDPHCQESEFERR

SEQ ID NO: 5783 - DNA, 598 bp, Glycine max
  misc_feature: Ceres CLONE ID no. 1071125
  misc_feature: Ceres CDNA ID no. 29191204
  CDS (132)..(374): REFERENCED BY SEQ ID NO: 5784
aagtcaggaggaggtccgtgcggtgcgggagagcggctcggcggcggagaaacctcggcgacccgacgacggcgcaggctgactccggttcggcgtggtaaatctgcagcgacagtcagatcaaggcaaggatgggtcggaaagctgggttgtacataaactcaaagaagtttggcggcgtcgttaagccgtgcatgctggagatgacggccttcctcaactgcctcgccttgaacaagcagatcgatgagaagtgcacgaggcagaaggagctcttgatcacctgtacccaggctcagaagggcaggccgaagaacgcggccaagaccatcaattaccatcttcagaggcttgggcgggacaagttccactagttggagcggaaactctttccctatttttattgccctgatgtctgggtagcaataatttcttccaagtagcttttgctaaatgagcagtgatctttagacaatggtcaggtttgaatcaattttggatgtcagacttgtaaggcatcagcacaatatcagtatggttttcttctcatgatataatacgcactgcactactttttgtttcaaaaaaaaaaaaaaaa

SEQ ID NO: 5784 - protein, 80 aa, Glycine max
  misc_feature: Ceres CLONE ID no. 1071125
  misc_feature: Ceres CDNA ID no. 29191204
MGRKAGLYINSKKFGGVVKPCMLEMTAFLNCLALNKQIDEKCTRQKELLITCTQAQKGRPKNAAKTINYHLQRLGRDKFH

SEQ ID NO: 5785 - DNA, 669 bp, Glycine max
  misc_feature: Ceres CLONE ID no. 1071236
  misc_feature: Ceres CDNA ID no. 24766118
  CDS (93)..(425): REFERENCED BY SEQ ID NO: 5786
agatcggattgattttgattgtgtatcgcttctctctctctctctctctccgctgtcggaacaagccaaaagcaaaggataaaaaaaaaacaatggagtccagcagaggtcaaggtggtatccagcagttgcttgctgctgaacaggaagctcaacacattgtcaatgctgccaggaccgcaaagatggcaaggctgaagcaggccaaggaggaggctgagaaggagattgctgaatacaaagctaaaacagagcaagacttccagaggaaacttgaggagacaagtggagactcgggtgcgaatgtgaagaggctggagcaggagactgatgccaaaatcgaacagctgaagaacgaagcttccaggatctccaatgatgttgtggagatgctcctcaaacatgtcaccactgtcaagaactgagagagattcgattccattcctctgtaataatcaaaagccatttatgagtttatttctttctttatctcatttcacgcgtgtggtgttgttactggattgaatctcagagactcaaatctcatatgaaatgtgtttcttgtaatttattcttctttttcttcttgtttgttgtattcatcatttccttttgaggattgtaataaaattgagagctggattatcctttacaaaaaaaaaaaaaaaa

SEQ ID NO: 5786 - protein, 110 aa, Glycine max
  misc_feature: Ceres CLONE ID no. 1071236
  misc_feature: Ceres CDNA ID no. 24766118
  misc_feature (2)..(109): Pfam Name: V PFAM Desc: Vacuolar
  misc_feature: Homolog of GI Number: 6692259 NR Desc: vacuolar membrane ATPase subunit G
  misc_feature: Homolog of GI Number: 3717987 NR Desc: G subunit of Vacuolar
  misc_feature: Homolog of GI Number: 58578266 NR Desc: ATPase
  misc_feature: Homolog of GI Number: 82621172 NR Desc: ATPase
  misc_feature: Homolog of GI Number: 5917785 NR Desc: vacuolar membrane ATPase subunit G
  misc_feature: Homolog of GI Number: 3717989 NR Desc: vag2
  misc_feature: Homolog of GI Number: 26986108 NR Desc: vacuolar ATPase subunit G
  misc_feature: Homolog of GI Number: 20259599 NR Desc: putative V
  misc_feature: Homolog of GI Number: 50911849 NR Desc: putative Vacuolar ATP synthase subunit G 1
  misc_feature: Homolog of GI Number: 48113487 NR Desc: similar to ENSANGP00000016262
MESSRGQGGIQQLLAAEQEAQHIVNAARTAKMARLKQAKEEAEKEIAEYKAKTEQDFQRKLEETSGDSGANVKRLEQETDAKIEQLKNEASRISNDVVEMLLKHVTTVKN

SEQ ID NO: 5787 - DNA, 646 bp, Glycine max
  misc_feature: Ceres CLONE ID no. 1071348
  misc_feature: Ceres CDNA ID no. 40351627
  CDS (25)..(336): REFERENCED BY SEQ ID NO: 5788
accttgttaaggagagaatatagtatggcacaatctagtggcaaaaaattggttgagtggctggttgcagcattattgttcattgccttgttgagtggtagtgcacatgctgttgcaatatgtaacattgactcaagtcaactgaacttgtgtcgtgctgcagttactggtcaaaaccctccaccacctgatgagaaatgctgtgcagttattcgccaggccaatttgcgttgcctctgcagttacaagtctatcctaccttcatttggaattaaccccaaaaatgctttggccttgcctgctaaatgtggtccacaattgcctcctaattgttgagtgctgtgaagcagttaacgaaggtcaagttcattacaagcaccttaattagtagtcttcaattgctttcaggtgttttactaacactgaagataaattttaagacaggatttgatgcccctcaaataacggtgcagttggttttaatcagtgtcttgtgtccaaaagtttgtgagtagatgtgtagagtattagtgtttgatgtacaggaatactttgtatctgtactttttttccctccatgtctatgtctacattataatatgtttaataaagtttctggttttggggctcaaaaaaaaaaaaaaaa

SEQ ID NO: 5788 - protein, 103 aa, Glycine max
  misc_feature: Ceres CLONE ID no. 1071348
  misc_feature: Ceres CDNA ID no. 40351627
  misc_feature (33)..(103): Pfam Name: Tryp_alpha_amyl PFAM Desc: Protease inhibitor/seed storage/LTP family
MAQSSGKKLVEWLVAALLFIALLSGSAHAVAICNIDSSQLNLCRAAVTGQNPPPPDEKCCAVIRQANLRCLCSYKSILPSFGINPKNALALPAKCGPQLPPNC

SEQ ID NO: 5789 - DNA, 495 bp, Glycine max
  misc_feature: Ceres CLONE ID no. 1071380
  misc_feature: Ceres CDNA ID no. 25446100
  CDS (153)..(323): REFERENCED BY SEQ ID NO: 5790
ctttttctgcgatcaattcttcgttttcgtataatttttcaaacaaaattgaattgaatgatgtgatgttataataggtttgcttggcttgtttgctgcccctctttctcgtcccaatcgtcaacatcctccctcttctcttccattttatcatggggaaaatctatcgggtttttggttgggagtacaggaaaccggagagggctcctcctgcatgtccattcaagcctccagccaacagggttagtgaagctgaggcagatgttgaaccagttccagcagatcctgttaagcctggaaatgtagatgtcaagcaagattaatctggcgtacctattgtataagatttgagtttgacaggagtaaaatgtatgataacatctgatggtttatgtatgtttgtaacttatattaaatatcttgtcttgtcatgaccattgtttcaaaaaataaaaaataaaaaagatgtttggttggttaaaaaaaaaaaaaaaa

SEQ ID NO: 5790 - protein, 56 aa, Glycine max
  misc_feature: Ceres CLONE ID no. 1071380
  misc_feature: Ceres CDNA ID no. 25446100
  misc_feature: Homolog of GI Number: 42565409 NR Desc: F12E4.230
MGKIYRVFGWEYRKPERAPPACPFKPPANRVSEAEADVEPVPADPVKPGNVDVKQD

SEQ ID NO: 5791 - DNA, 734 bp, Glycine max
  misc_feature: Ceres CLONE ID no. 1071407
  misc_feature: Ceres CDNA ID no. 24766119
  CDS (53)..(490): REFERENCED BY SEQ ID NO: 5792
aaataataaaagaaggacagttgagattttaggagagagagagagagagaggatggagaatctctggcgaatcgctacaggccaggacccgaaccggcaagattacgaaggaatagagttctggtcgaacccggagcgatcggggtggctcacaaagcaaggcgattacatcaagacctggcgcagacggtggttcgtgctcaagcgagggaagctcctgtggttcaaggatcaatcctccgccttaacccgcggatctatcccgcgtggggtgatctcggtgggagattgtctcaccgtgaaaggagctgaggacgtggtgaacaagcctttcgccttcgagatttcgagcgggaacatcaccatgttcttcatagctgataacgagaaggagaaggaagagtggatcaactctattggaaggtccatcgtgcagcactcgagatcggttactgattctgaagtccttgattatgatcaaaggcggtgacttctttttttagctctatgctatgtttgattccgtttattgtacctgtgtatgtatgtatgcctttctcaagttcttgatccgactctctgtctcttgtgttatggttttgttctgtatctgattctattccacttttgtctttccagcttctatatttgctttttcaacaagttgttagactatatgattgatgttttcgttaagaagaatgaattggtatctatcaaaaaaaaaaaaaaaa

SEQ ID NO: 5792 - protein, 145 aa, Glycine max
  misc_feature: Ceres CLONE ID no. 1071407
  misc_feature: Ceres CDNA ID no. 24766119
  misc_feature (27)..(127): Pfam Name: PH PFAM Desc: PH domain
  misc_feature: Homolog of GI Number: 21536721 NR Desc: AtPH1
  misc_feature: Homolog of GI Number: 9759096 NR Desc: AtPH1
  misc_feature: Homolog of GI Number: 34908422 NR Desc: OJ1402_H07.10
  misc_feature: Homolog of GI Number: 56785355 NR Desc: pleckstrin homology
  misc_feature: Homolog of GI Number: 46227285 NR Desc: AtPH1 like protein with a pleckstrin homology
  misc_feature: Homolog of GI Number: 50405130 NR Desc: Pleckstrin homology domain protein
  misc_feature: Homolog of GI Number: 14198263 NR Desc: PSCD3 protein
  misc_feature: Homolog of GI Number: 47550685 NR Desc: cytohesin 1
  misc_feature: Homolog of GI Number: 28972660 NR Desc: mKIAA1200 protein
  misc_feature: Homolog of GI Number: 51766901 NR Desc: pleckstrin homology domain containing
MENLWRIATGQDPNRQDYEGIEFWSNPERSGWLTKQGDYIKTWRRRWFVLKRGKLLWFKDQSSALTRGSIPRGVISVGDCLTVKGAEDVVNKPFAFEISSGNITMFFIADNEKEKEEWINSIGRSIVQHSRSVTDSEVLDYDQRR

SEQ ID NO: 5793 - DNA, 656 bp, Glycine max
  misc_feature: Ceres CLONE ID no. 1071454
  misc_feature: Ceres CDNA ID no. 25446510
  CDS (205)..(597): REFERENCED BY SEQ ID NO: 5794
gaatcgacgaaactgaggcaaaacctacatagggaaggttgccccaatatcagcatgcttcccattgcactgcactcatcccatgcgaattaagctttccgattcgtttggacctaaaaaacaacacctggtttgattgtcaccttgggtcgcacagttattactacccttctcttgtgaattggtcgaatatatgctccaactatggataatatgaagaaagatgaaccccaaaatcggaagcaagatgaacttgctgaatcgcttgatggtctattcagtagtgtttccaccatgatcaaatcagagcttcaggggacaaataatcatctagagctcttggagaagatgaatgtaagagtagcagaagagtacaaagggtttggtgacttggcttcagggttgagggtttttgtggagcagttgaaatgcaagagtggtagctttaacgagtatgtcgagcagattgatagcattgagaagcaggtaactgagtttgaagctgtggtctctatgcttgataagtacatcgtgttgttggaatcaagagtgcaatctgtgtaccaaaccaaaatccatcttcccagtcaacaatgatgtaaaatttttacttttcatgatacatttaccttgtttccttgtcacaaaaaaaaaaa

SEQ ID NO: 5794 - protein, 127 aa, Glycine max
  misc_feature: Ceres CLONE ID no. 1071454
  misc_feature: Ceres CDNA ID no. 25446510
  misc_feature: Homolog of GI Number: 50905847 NR Desc: phytoene dehydrogenase
  misc_feature: Homolog of GI Number: 10177621 NR Desc: phytoene dehydrogenase
  misc_feature: Homolog of GI Number: 24662431 NR Desc: CG14145
  misc_feature: Homolog of GI Number: 54642397 NR Desc: GA12787
  misc_feature: Homolog of GI Number: 50749448 NR Desc:  similar to biogenesis of lysosome
  misc_feature: Homolog of GI Number: 51513494 NR Desc: Bloc1s2
  misc_feature: Homolog of GI Number: 46852398 NR Desc: biogenesis of lysosome
MKKDEPQNRKQDELAESLDGLFSSVSTMIKSELQGTNNHLELLEKMNVRVAEEYKGFGDLASGLRVFVEQLKCKSGSFNEYVEQIDSIEKQVTEFEAVVSMLDKYIVLLESRVQSVYQTKIHLPSQQ

SEQ ID NO: 5795 - DNA, 829 bp, Glycine max
  misc_feature: Ceres CLONE ID no. 1071488
  misc_feature: Ceres CDNA ID no. 29191205
  CDS (3)..(689): REFERENCED BY SEQ ID NO: 5796
atcttcttcctcctcctcctcctcctcctcacaactcaactagcatcaccactgctggggattttcttcctcctcctcctcctgacaactcaactagcatcaccactgctggagatcaagaaagaaagagtagccatggcggccaagaaccccaaggtcttcttcgacatcctcatcggccaggccaaggcgggccgggtcatcatggagctctacgccgacaaggtgcccaagacggcggccaacttccggcagctctgcacgggcgagaagggcctgggcaagagcggcaagccgctccactacaaggggtcggccttccaccgcatcatcccgggctccatgtgccagggcggcgacttcacccgcggcaacggcaccggcggcgagtcggtctacggccaaaagttcgccgacgagaacttcctgctccgccacacgggccccggggtcctctccatggccaacgccgggcccggcaccaacggctcccagttcttcatctgcaccgccaagacgccgtggctcgacggcaagcacgtcgtgttcgggcaggttgtcgatggataccgcgtcgtggagaagatggaggccgtcggctcgtccggtggcgccaccgccgagcccgtcgtcatcgaggactgcggccagctccccgacggcgagtaaccagtgcctggctgatctgatgattcattcagcttgtttttttacttactactgaagctgagacagttgatatggatccgatggactactagtttgtttaggcgtgtgtaatgactgaatgaatgaataaatttacagattcgcaaaaaaaaaaaaaaaa

SEQ ID NO: 5796 - protein, 177 aa, Glycine max
  misc_feature: Ceres CLONE ID no. 1071488
  misc_feature: Ceres CDNA ID no. 29191205
  misc_feature (7)..(173): Pfam Name: Pro_isomerase PFAM Desc: Cyclophilin type peptidyl
  misc_feature: Homolog of GI Number: 52076094 NR Desc: peptidylprolyl isomerase
  misc_feature: Homolog of GI Number: 68406 NR Desc: peptidylprolyl isomerase
  misc_feature: Homolog of GI Number: 62728587 NR Desc: cyclophilin
  misc_feature: Homolog of GI Number: 1563719 NR Desc: cyclophylin
  misc_feature: Homolog of GI Number: 118103 NR Desc: Peptidyl
  misc_feature: Homolog of GI Number: 18076088 NR Desc: cyclophilin
  misc_feature: Homolog of GI Number: 1561575 NR Desc: cyclophilin
  misc_feature: Homolog of GI Number: 1305457 NR Desc: cytosolic cyclophilin
  misc_feature: Homolog of GI Number: 20465725 NR Desc: putative peptidylprolyl isomerase
  misc_feature: Homolog of GI Number: 52788398 NR Desc: cyclophilin
  misc_feature: Useful for delaying flowering time
  misc_feature: Useful for making larger plants
  misc_feature: Useful for making ornamental plants with modified leaves
  misc_feature: Useful for making plants with increased biomass and foliage
MAAKNPKVFFDILIGQAKAGRVIMELYADKVPKTAANFRQLCTGEKGLGKSGKPLHYKGSAFHRIIPGSMCQGGDFTRGNGTGGESVYGQKFADENFLLRHTGPGVLSMANAGPGTNGSQFFICTAKTPWLDGKHVVFGQVVDGYRVVEKMEAVGSSGGATAEPVVIEDCGQLPDGE

SEQ ID NO: 5797 - DNA, 661 bp, Glycine max
  misc_feature: Ceres CLONE ID no. 1071507
  misc_feature: Ceres CDNA ID no. 29191754
  CDS (69)..(470): REFERENCED BY SEQ ID NO: 5798
cccgccgccgctcttcttcctcctctcttcgtgttagggttagggccgttcgctcccgaagatcagagatggcggtgccgcttctgacgaagaagatcgtgaagaagagggtcaagcacttcaagagggcccatagcgaccgctacattggcctcaagcaaagctggcgcaggccaaagggtattgattcccgtgtcaggagaaagttcaagggatgcaccttgatgcccaacattggctacggttctgacaagaagaccaggcactaccttcccaacaagttcaagaagtttgttgtccacaatgtgtctgagctggagctgcttatgatgcacaacaggacctactgtgcggagatcgcccacaacgtctccaccaagaagcgcaaggacatcgttgagcgtgctgcgcagctcgacatcgtggttaccaacaagcttgccaggctccgcagccaggaggatgagtagactgtcaggtgctatgttttggtctggttcgtatgtaggaaagtactccgctgttctttgttgtgtgactgtcagggatatctgttattccaacctttttgctaccagtgccgactgtaatgtgtcaaagatctactattgcctttataatctagatcccattgccaattgctgtaaaaaaaaaaaaaaaa

SEQ ID NO: 5798 - protein, 133 aa, Glycine max
  misc_feature: Ceres CLONE ID no. 1071507
  misc_feature: Ceres CDNA ID no. 29191754
  misc_feature (14)..(123): Pfam Name: Ribosomal_L32e PFAM Desc: Ribosomal protein L32
  misc_feature: Homolog of GI Number: 76057835 NR Desc: ribosomal L32
  misc_feature: Homolog of GI Number: 50947773 NR Desc: putative ribosomal protein L32
  misc_feature: Homolog of GI Number: 13899057 NR Desc: ribosomal protein L32
  misc_feature: Homolog of GI Number: 40287540 NR Desc: ly200 protein
  misc_feature: Homolog of GI Number: 71534997 NR Desc: ribosomal protein L32
  misc_feature: Homolog of GI Number: 77745481 NR Desc: ly200
  misc_feature: Homolog of GI Number: 23198054 NR Desc: ribosomal protein L32
  misc_feature: Homolog of GI Number: 21555143 NR Desc: ribosomal protein L32
  misc_feature: Homolog of GI Number: 10177580 NR Desc: ribosomal protein L32
  misc_feature: Homolog of GI Number: 50754636 NR Desc:  similar to 60S ribosomal protein L32
MAVPLLTKKIVKKRVKHFKRAHSDRYIGLKQSWRRPKGIDSRVRRKFKGCTLMPNIGYGSDKKTRHYLPNKFKKFVVHNVSELELLMMHNRTYCAEIAHNVSTKKRKDIVERAAQLDIVVTNKLARLRSQEDE

SEQ ID NO: 5799 - DNA, 912 bp, Glycine max
  misc_feature: Ceres CLONE ID no. 1071544
  misc_feature: Ceres CDNA ID no. 29191835
  CDS (115)..(645): REFERENCED BY SEQ ID NO: 5800
accaaagctcccagcttttcccccttcctccgccgccgccgacgccgacgcttcctagggtttcgtcccccgatccggatccggcggcggcagcagcagcagcagcagcgagcgatggcggccgcgggagacgccggcgagaagaagatgatcacgctcaagagctcggacggcgaggagttcgaggtggaggaggcggtggccatggagtcgcagacgatccgccacatgatcgaggacgactgcgccgacaacggcatcccgctccccaacgtcaactccaagatcctctccaaggtcatcgagtactgcaacaagcacgtccaggccaagcccgccgacggggccgcggccggagccggagcctcggacgcctccgccgccgcccccgccgcccccgccgaggacctcaagaactgggacgccgagttcgtcaaggtcgaccaggccaccctcttcgacctcatcctggctgccaactacctcaacatcaaggggctgctggacctgacctgccagactgttgccgacatgatcaagggcaagaccccagaggagatccgcaagaccttcaacatcaagaatgactttacccccgaggaggaggaggagatccgcagggagaaccagtgggcctttgagtaggggagcatctaggcgatgccgccgccgccgccgcgttgaatgaacgaacaatgcttagtattggtcatgtctgcatttcagcgctcttctttatgtctgtcctaatggcttgtaattatcctggagtctatgagtgaacatgttcggtcagtggttatgtttgcgacaacaagaaaaacctatcgtggtcagtggtcatcacttgtcaaactgaatcttaatcgtcaagtggaatgctttgcttgtttatcaaaaaaaaaaaaaaaa

SEQ ID NO: 5800 - protein, 176 aa, Glycine max; identical to SEQ ID NO: 4538
  misc_feature: Ceres CLONE ID no. 1071544
  misc_feature: Ceres CDNA ID no. 29191835
  misc_feature (11)..(71): Pfam Name: Skp1_POZ PFAM Desc: Skp1 family
  misc_feature (99)..(176): Pfam Name: Skp1 PFAM Desc: Skp1 family
  misc_feature: Homolog of GI Number: 40644754 NR Desc: putative SKP1 protein
  misc_feature: Homolog of GI Number: 32330695 NR Desc: SKP1/ASK1
  misc_feature: Homolog of GI Number: 7378764 NR Desc: putative kinetochore protein
  misc_feature: Homolog of GI Number: 47054182 NR Desc: skp1 protein
  misc_feature: Homolog of GI Number: 77550711 NR Desc: Skp1 family
  misc_feature: Homolog of GI Number: 28466911 NR Desc: At5g42190
  misc_feature: Homolog of GI Number: 3719211 NR Desc: UIP2
  misc_feature: Homolog of GI Number: 52076056 NR Desc: putative UIP2
  misc_feature: Homolog of GI Number: 18958257 NR Desc: kinetochore protein
  misc_feature: Homolog of GI Number: 21281127 NR Desc: putative SKP1/ASK1 protein At1

SEQ ID NO: 5801 - DNA, 1029 bp, Glycine max
  misc_feature: Ceres CLONE ID no. 1071555
  misc_feature: Ceres CDNA ID no. 25445665
  CDS (2)..(745): REFERENCED BY SEQ ID NO: 5802
cgttctccgctcgccgccgcgccgcaatatcgtcgggaacatgagcggcgcgacgggcaccgccgacttcttctaccgggaggcgctgcgcctcggctacgtcgcccgctctgccttcaagctgatccagatacagaagcagcacaagctcatcgccccgggcgccgccgtgctcgacctcgggtgcgcccccggcgcgtggctccaggtggcctgccagaaccttggcccgctcgagaagggcggcctggtcgtcggcgtcgatgtcaagaaggtgaaggtcccctcagcgcactgcgactggcgggtcaggacggtctgcaccgatgtgatggctttgatgaagcagcaagccagggcgatgtcgccgcaggaacggggattttctgtgatattatccgacatgtgtccggtagtttcagggatcacaaccagagacgaagctatatcttgtgagctgggcatgcgtgcgctctcgttggcagttggtaagataaaggtcaaagaatcggccgactatcgtgagactatggagaggtttcagagctccacaggcccagatcctgatgaggacggtgttcttagacgtggaggcagcctagtaatcaagtttcttgagaacgaggatataccagggtttaacaaattttgcaaagagaagtttaagaaagtatctctcctgaggcctaaggcgacgaggtctagttcgagggagatctacatgatctgcgaagggttgcggtagaagattggccaccactcacctcccatgagatcttgcaagcttgtgctgagcagagtggctggaccaagaactctacaaatttgccggtgagctgtaggcgtgtaggcctgagatgatgctaacttcatcggcaattcatgattactgagttgaggaaactccgatggtatctctcctggaggtgatttggtttggtgcctttgttaaagaacagccgtattggctttgcgttcgtgcttttagaagaaaaaaggttgtacctgtctcgaaaaaaaaaaaaaaaa

SEQ ID NO: 5802 - protein, 234 aa, Glycine max
  misc_feature: Ceres CLONE ID no. 1071555
  misc_feature: Ceres CDNA ID no. 25445665
  misc_feature (20)..(232): Pfam Name: FtsJ PFAM Desc: FtsJ
  misc_feature: Homolog of GI Number: 34897416 NR Desc: putative FtsJ cell division protein
  misc_feature: Homolog of GI Number: 10177649 NR Desc: FtsJ
  misc_feature: Homolog of GI Number: 71546830 NR Desc: Ribosomal RNA methyltransferase RrmJ/FtsJ
  misc_feature: Homolog of GI Number: 15669566 NR Desc: cell division protein FtsJ
  misc_feature: Homolog of GI Number: 66779717 NR Desc: Ribosomal RNA methyltransferase RrmJ/FtsJ
  misc_feature: Homolog of GI Number: 48839260 NR Desc: COG0293: 23S rRNA methylase
  misc_feature: Homolog of GI Number: 72397868 NR Desc: 23S RNA methyltransferase J
  misc_feature: Homolog of GI Number: 48861825 NR Desc: COG0293: 23S rRNA methylase
  misc_feature: Homolog of GI Number: 42522939 NR Desc: cell division protein FtsJ
  misc_feature: Homolog of GI Number: 68348629 NR Desc: ribosomal RNA large subunit methyltransferase J
MSGATGTADFFYREALRLGYVARSAFKLIQIQKQHKLIAPGAAVLDLGCAPGAWLQVACQNLGPLEKGGLVVGVDVKKVKVPSAHCDWRVRTVCTDVMALMKQQARAMSPQERGFSVILSDMCPVVSGITTRDEAISCELGMRALSLAVGKIKVKESADYRETMERFQSSTGPDPDEDGVLRRGGSLVIKFLENEDIPGFNKFCKEKFKKVSLLRPKATRSSSREIYMICEGLR

SEQ ID NO: 5803 - DNA, 643 bp, Glycine max
  misc_feature: Ceres CLONE ID no. 1071631
  misc_feature: Ceres CDNA ID no. 29191755
  CDS (32)..(406): REFERENCED BY SEQ ID NO: 5804
ataagcatcttcgtgttgttgcagagggaaaatgagtcgaggaggtgcagcagcagcgaagggaaagaagaagggtgctacattcaccattgactgtgcaaagccagtagaagacaagatcatggacattgcttctctcgagaagtttcttcaagagaggatcaaggttggtggcaaagctggtgctcttggtgactctgttaccgttacacgtgagatgactaagattattctcacctctgactgtaacttttccaaacggtatttgaagtacttgacgaagaagtacttgaagaaacacaatgtgcgagactggctcagagtgattgcttcaaacaaggatagaagtgtttacgaactgaggtacttcaacattgctgagaatgagggagaggaagaagattagttgtctgatagccttatttgcttaagtgttttgtttacccttttcctatacctagcttcctttttggcaaatattgcttgagatacgatgctttgttttgatcggttgcaatttaacggttttgatcatttaagaattgcggtactattggtgttgaattgggaacagagtttacaaattattctctgttgtttcagtttttaaattgcattatgtttcttgcaaaaaaaaaaaaaa

SEQ ID NO: 5804 - protein, 124 aa, Glycine max
  misc_feature: Ceres CLONE ID no. 1071631
  misc_feature: Ceres CDNA ID no. 29191755
  misc_feature (9)..(124): Pfam Name: Ribosomal_L22e PFAM Desc: Ribosomal L22e protein family
  misc_feature: Homolog of GI Number: 6714454 NR Desc: putative 60S ribosomal protein  L22
  misc_feature: Homolog of GI Number: 12642842 NR Desc: putative 60S ribosomal protein L22
  misc_feature: Homolog of GI Number: 50939919 NR Desc: putative 60S ribosomal protein L22
  misc_feature: Homolog of GI Number: 42733478 NR Desc: BRI1
  misc_feature: Homolog of GI Number: 6056419 NR Desc: 60S ribosomal protein  L22
  misc_feature: Homolog of GI Number: 85392 NR Desc: development
  misc_feature: Homolog of GI Number: 72012073 NR Desc:  similar to 60S ribosomal protein L22
  misc_feature: Homolog of GI Number: 73956651 NR Desc:  similar to 60S ribosomal protein L22
  misc_feature: Homolog of GI Number: 57086899 NR Desc:  similar to ribosomal protein L22
MSRGGAAAAKGKKKGATFTIDCAKPVEDKIMDIASLEKFLQERIKVGGKAGALGDSVTVTREMTKIILTSDCNFSKRYLKYLTKKYLKKHNVRDWLRVIASNKDRSVYELRYFNIAENEGEEED

SEQ ID NO: 5805 - DNA, 713 bp, Glycine max
  misc_feature: Ceres CLONE ID no. 1071690
  misc_feature: Ceres CDNA ID no. 24766120
  CDS (84)..(389): REFERENCED BY SEQ ID NO: 5806
atgcctatctagcatccttttatcaacaaagcctgtgccaaatctctctctctctctctctctcaagatctgaaatcactctgatggagcagagtaaggagaaaaatgctccttggttatcagtgccacagtttggggactgggatcagaagggacaagtgccggactactcgctagatttctctaaaattcgggaaacgaggaagcaaaacaagacaaatatttcaagggcaagtcttggtaacgaagaggagctcacggcttctgccactaacaatgcaaacactgtccacagtgatgagcaccagcacccccactacaaccaaaccaactctccaacttccaggaggagcttcctgagctacttcaactgttgcgtaaaagcttgattctcaagggaatctagaaccttttcgtgtctgcctaacctcatggacagggacaataattatggttttgcgcttggtgatcattacttcgcacttgttttttatttaggaaagcaaatgtttcatttaagccataatcttcaatagtgattctattacgcttccgtcttagtttgaaatttttgtatttaattagaggtataaagatggtaagcatgtaaatggcgcttaggacgtttgaacctgtaaaccagctccaagatacgatgaattaatccagcaaagtaatgctgttgaccttgaaaattacaaaaaaaaaaaaaa

SEQ ID NO: 5806 - protein, 101 aa, Glycine max
  misc_feature: Ceres CLONE ID no. 1071690
  misc_feature: Ceres CDNA ID no. 24766120
  misc_feature: Homolog of GI Number: 72384402 NR Desc: 4D11_4
  misc_feature: Homolog of GI Number: 71834736 NR Desc: 80C09_15
MEQSKEKNAPWLSVPQFGDWDQKGQVPDYSLDFSKIRETRKQNKTNISRASLGNEEELTASATNNANTVHSDEHQHPHYNQTNSPTSRRSFLSYFNCCVKA

SEQ ID NO: 5807 - DNA, 963 bp, Glycine max
  misc_feature: Ceres CLONE ID no. 1071710
  misc_feature: Ceres CDNA ID no. 29191756
  CDS (23)..(772): REFERENCED BY SEQ ID NO: 5808
ctagggtttcagcgacttgaagatggcgacgcaaatcagcaagaagaggaagtttgtcgccgacggtgtgttctacgccgagttgaacgaggttctaactagggagctagcagaggatggttactcaggtgtggaggttagggttactcccatgaggactgagattatcattagagctacccgtacccaaaatgttctcggtgagaaggggaggagattcagggagttgacatctcttgtgcagaagagattcagattccctcaagacagtgttgagctttacgctgagaaggttgctaacagaggcctctgtgccattgctcaggctgagtctctccgttacaagctcctcggtggtcttgctgttcgcagggcttgctatggtgtcttgagattcgtcatggagagtggcgctaagggatgtgaggtgattgtgagtggaaagctccgtgcagcacgtgccaagtccatgaaattcaaggacggttacatggtttcctctggtcaacctaccaaggagtacatcgactctgcagtcagacatgttctcctcagacagggtgtgcttggaatcaaggtcaaggtcatgcttgactgggaccctaagggtgtacttggaccaaagacaccactacctgatgttgtcatcattcatactcccaaggaagaagatgtcaactccgcaccagctcaggttgctgctccggctgctcttctaccagaagctcccctcacagccgtagattaccctgagatgatccctgtcgcctagaagaaaactcattgggatgcctctgtttttggttaaacgttatcagcttctttttaagatgcttgttgtttaaatgtcctcgaagcagacaagttttttctcatgttgtttttaaaatctatgtcaagtatttttggatgttgaatgcgtttagctcaatggaatttttggtcataaaaaaaaaaaaaaaa

SEQ ID NO: 5808 - protein, 249 aa, Glycine max
  misc_feature: Ceres CLONE ID no. 1071710
  misc_feature: Ceres CDNA ID no. 29191756
  misc_feature: There is no branching.
  misc_feature: Useful for making plants with modulated biomass
  misc_feature (104)..(188): Pfam Name: Ribosomal_S3_C PFAM Desc: Ribosomal protein S3
  misc_feature (45)..(102): Pfam Name: KH_2 PFAM Desc: KH domain
  misc_feature: Homolog of GI Number: 16323404 NR Desc: putative ribosomal protein S3a homolog
  misc_feature: Homolog of GI Number: 20466075 NR Desc: AT5g35530/MOK9_14
  misc_feature: Homolog of GI Number: 20258907 NR Desc: putative 40S ribosomal protein
  misc_feature: Homolog of GI Number: 38093738 NR Desc: putative ribosomal protein
  misc_feature: Homolog of GI Number: 22204124 NR Desc: putative 40S ribosomal protein S3
  misc_feature: Homolog of GI Number: 50939157 NR Desc: putative 40S ribosomal protein
  misc_feature: Homolog of GI Number: 83283961 NR Desc: 40S ribosomal protein
  misc_feature: Homolog of GI Number: 46811251 NR Desc: 40S ribosomal protein S3
  misc_feature: Homolog of GI Number: 38512247 NR Desc: Ribosomal protein S3
  misc_feature: Useful for delaying flowering time
  misc_feature: Useful for making lethal plants for genetic confinement systems
  misc_feature: Useful for making ornamental plants with modified flowers
  misc_feature: Useful for making ornamental plants with modified leaves
  misc_feature: Useful for making plants with altered leaf shape eg curled leaves
  misc_feature: Useful for making plants with altered leaf shape eg curled leaves
  misc_feature: Useful for making plants with increased biomass
  misc_feature: Useful for making plants with increased biomass and foliage
  misc_feature: Useful for making plants with modified flowers
  misc_feature: Useful for making shorter plants
MATQISKKRKFVADGVFYAELNEVLTRELAEDGYSGVEVRVTPMRTEIIIRATRTQNVLGEKGRRFRELTSLVQKRFRFPQDSVELYAEKVANRGLCAIAQAESLRYKLLGGLAVRRACYGVLRFVMESGAKGCEVIVSGKLRAARAKSMKFKDGYMVSSGQPTKEYIDSAVRHVLLRQGVLGIKVKVMLDWDPKGVLGPKTPLPDVVIIHTPKEEDVNSAPAQVAAPAALLPEAPLTAVDYPEMIPVA

SEQ ID NO: 5809 - DNA, 650 bp, Glycine max
  misc_feature: Ceres CLONE ID no. 1071798
  misc_feature: Ceres CDNA ID no. 25446608
  CDS (54)..(338): REFERENCED BY SEQ ID NO: 5810
accggaattgttttttctatcctcgttaaaagacacatcttctcagactgaaaatgggaggtgaagaaaatgtaaagcatctcgaagactgctctgtttccaatgcgctaggcacttgggtattctcagttgcaggagctttgctggctattccagtggggataaagcgcaaatctctggcaccccttgtattttttggcaccactggtactatgttggatattattatgggaattagtgcttgcgaaagggaacatgcagagcgccaaatgaagctacttgaagcacaaaatgctgctgctgagactcctttgggtgaaactgaaattgattcataaactgccatcattaagttgtcagcattgtcaaattttgtttggtcatgattgtaacaaactgaatgcactttttatggtaacccaaggtcagatgttcttctaattgttgctttttcattggcctttttctggtttttcttccagcagggtcgaacaaagaaggtggatatgcaggatttctttgttataatttattactataaggattgcagggatgtttggtacattatgtttccaatataatggtaattgaaaaacgcccttgttgggatatagctacaacacccaaaaggattcgcaaaaaaaaaaaaa

SEQ ID NO: 5810 - protein, 94 aa, Glycine max
  misc_feature: Ceres CLONE ID no. 1071798
  misc_feature: Ceres CDNA ID no. 25446608
MGGEENVKHLEDCSVSNALGTWVFSVAGALLAIPVGIKRKSLAPLVFFGTTGTMLDIIMGISACEREHAERQMKLLEAQNAAAETPLGETEIDS

SEQ ID NO: 5811 - DNA, 938 bp, Glycine max
  misc_feature: Ceres CLONE ID no. 1071947
  misc_feature: Ceres CDNA ID no. 29191757
  CDS (1)..(681): REFERENCED BY SEQ ID NO: 5812
atgcccccatatcacaccaccacctgtcctcccccttcctctctctctctctctctctctctctctccctctctgcaaacctacaagcagggcaaggaggaggaggaagaagaagaagaagcaaacatgtcttccccaagcaagcgcagggagatggatctcatgaagctgatgatgagtgactacaaggtggacatgatcaacgacgggatgcacgagttcttcgtccacttccacggacccaaagacagtatttaccagggtggtgtgtggaaggtcagggttgaactcaccgaagcttacccttacaaatccccttccattggcttcaccaacaagatctatcaccccaatgtcgatgagatgtctggttctgtctgcttggatgtgatcaatcagacatggagcccgatgtttgaccttgtgaatatctttgaggtgttcctgccccagcttctcctgtacccgaacccctcggaccccttgaacggcgaggcggcttcgctcatgatgcgcgacaagaatgcctatgaaaataaagtcaaagaatattgtgagagatatgccaagcctgaagatatatccccagaggaggaagaggaggagagtgatgaggagctgagcgacgccgagggctacgactccggcgacgaggccatcatgggccacgcagacccttaactggtggatggatgcaaggatggttagctcagtcagtaactcagtaatgcaggtgatcatgatgtatctctgtctgtcagtctgtacatagctgcggcgatcactgatgaatgccgccatggcagatgctgaagaaagttatcagccatctcaactcagctccactagttcttgtgtgtcccgctgtgaataacttgccatttgtttgtgttggttccatttgcagttcatgtttccattcaaaaaaaaaaaaaaaa

SEQ ID NO: 5812 - protein, 184 aa, Glycine max
  misc_feature: Ceres CLONE ID no. 1071947
  misc_feature: Ceres CDNA ID no. 29191757
  misc_feature (7)..(143): Pfam Name: UQ_con PFAM Desc: Ubiquitin
  misc_feature: Homolog of GI Number: 100765 NR Desc: 23K ubiquitin carrier protein E2
  misc_feature: Homolog of GI Number: 6066285 NR Desc: ubiquitin carrier protein 4
  misc_feature: Homolog of GI Number: 31432369 NR Desc: putative acetohydroxyacid isomeroreductase
  misc_feature: Homolog of GI Number: 66354411 NR Desc: ubiquitinating enzyme
  misc_feature: Homolog of GI Number: 66354409 NR Desc: ubiquitinating enzyme
  misc_feature: Homolog of GI Number: 431266 NR Desc: ubiquitin conjugating enzyme
  misc_feature: Homolog of GI Number: 1076427 NR Desc: ubiquitin
  misc_feature: Homolog of GI Number: 629564 NR Desc: ubiquitin
  misc_feature: Homolog of GI Number: 66354415 NR Desc: ubiquitinating enzyme
  misc_feature: Homolog of GI Number: 1076428 NR Desc: ubiquitin
MSSPSKRREMDLMKLMMSDYKVDMINDGMHEFFVHFHGPKDSIYQGGVWKVRVELTEAYPYKSPSIGFTNKIYHPNVDEMSGSVCLDVINQTWSPMFDLVNIFEVFLPQLLLYPNPSDPLNGEAASLMMRDKNAYENKVKEYCERYAKPEDISPEEEEEESDEELSDAEGYDSGDEAIMGHADP

SEQ ID NO: 5813 - DNA, 848 bp, Glycine max
  misc_feature: Ceres CLONE ID no. 1072003
  misc_feature: Ceres CDNA ID no. 35383343
  CDS (122)..(598): REFERENCED BY SEQ ID NO: 5814
aagaaagtctgaagaaagcaccgatcaaaagagctaccacaaatcaatcgctcacccttccgcttccaacactaatcaaatcgtcgattccttccaccagcagctcgaatccccatcaacaatgtcgctgatccgccgcagcaacgtgttcgaccccttctccctcgacttcttcgacccttttgacggcttccccttcggctccggcagcagcaacagcggcggcagcctcgtcccgcgcacctcctccgacacggcggccttcgcgggcgcgcgcatcgactggaaggagacgcccgaggcgcacgtgttcaaggcggacgtccccgggctgaagaaggaggaggtgaaggtggaggtggaggacggcaacatcctccagatcagcggcgagcggaacaaggagcaggaggagaagaccgacacctggcacagggtggagcgcagcagcggcaagttcctccgcaggttccggctcccggagaacgccaaggcggagcaggtgaaggcgtcgatggagaacggcgtgctcaccgtcaccgtgcccaaggaggaggccaagaagcccgacgtcaagtccatccagatctccggctaggcgtctgcgtgctcgctgcgcgatgaggtggactgcagagcagaggtgtggagtttcgccccggtggtagtgatgaaattaaaaaaaaccagagtccggctgtccgtgcgtgcgctgtgtgtctagtactctagcgttgtgtgcgaataaatctcgtctgtgtttcgagtccagtttgctcatccatctgtatttcatcagcaactgagtaaatccattagtatattctctgctaaaaaaaaaaaaaaaa

SEQ ID NO: 5814 - protein, 158 aa, Glycine max
  misc_feature: Ceres CLONE ID no. 1072003
  misc_feature: Ceres CDNA ID no. 35383343
  misc_feature (54)..(157): Pfam Name: HSP20 PFAM Desc: Hsp20/alpha crystallin family
  misc_feature: Homolog of GI Number: 34902016 NR Desc: putative class I low
  misc_feature: Homolog of GI Number: 1122317 NR Desc: heat shock protein 17.9
  misc_feature: Homolog of GI Number: 34902028 NR Desc: shock protein
  misc_feature: Homolog of GI Number: 218251 NR Desc: low molecular weight heat shock protein
  misc_feature: Homolog of GI Number: 1815662 NR Desc: low molecular mass heat shock protein Oshsp18.0
  misc_feature: Homolog of GI Number: 169801 NR Desc: LMW heat shock protein
  misc_feature: Homolog of GI Number: 1213073 NR Desc: heat shock protein 17.8
  misc_feature: Homolog of GI Number: 25044839 NR Desc: class
  misc_feature: Homolog of GI Number: 8671873 NR Desc: Contains similarity to 17.6 KD class I heat shock protein from Arabidopsis thaliana giP13853
  misc_feature: Homolog of GI Number: 16930753 NR Desc: small heat shock protein
  misc_feature: Useful for delaying flowering time
  misc_feature: Useful for increasing chlorophyll and photosynthetic capacity
  misc_feature: Useful for making ornamental plants with modified flowers
  misc_feature: Useful for making ornamental plants with modified leaves
  misc_feature: Useful for making plants with increased biomass
  misc_feature: Useful for making plants with increased biomass and foliage
  misc_feature: Useful for making plants with increased biomass and foliage
  misc_feature: Useful for making plants with increased biomass and foliage
  misc_feature: Useful for making shorter plants
  misc_feature: Useful for making stronger plants
MSLIRRSNVFDPFSLDFFDPFDGFPFGSGSSNSGGSLVPRTSSDTAAFAGARIDWKETPEAHVFKADVPGLKKEEVKVEVEDGNILQISGERNKEQEEKTDTWHRVERSSGKFLRRFRLPENAKAEQVKASMENGVLTVTVPKEEAKKPDVKSIQISG

SEQ ID NO: 5815 - DNA, 918 bp, Glycine max
  misc_feature: Ceres CLONE ID no. 1072038
  misc_feature: Ceres CDNA ID no. 35383344
  CDS (53)..(748): REFERENCED BY SEQ ID NO: 5816
aatctcgatttgtggttgatttgggaatttagggttttttttcttcttgaagatgacgactgcagctagaccaacgtgggctccggcgaagggaggcaacgagcagggcggtgctcggatcttcggcgcttctcagaagtattcgtctcgcgatgtcgccgctcacacgactctaaagccaaggagagaagggcaacacacgcaagaggaagtggagaagaagaatcttcgtgatgagcttgaagagcgtgagaggaggcacttctcttccaaagacaaatcctacagtgatgatagagaccgcaggagagggaatcagctgttactcgaaggctcgaagagggaccctgaagatcggattgttcctcgcagtgtcgatgctgatgattctgatgttgatctcaaaagtgatgatgatagtgatgacgaaagtgacgatgatgacgaagacgacactgaagctctcatggctgaactcgaccagattaagaaggaaagagtggaggagaggcttaggaaggaaaagcagcagcagatggaggagctaaacgccaaagaagaagagcttctcaaaggaaacccactgcttaacaacgctccaacctcgtttagcgtcaaaaggaggtgggatgacgatgtggtgttcaagaatcaggctcgtggtgaaatgaaagcacctaagcgcttcatcaatgatacaataaggaatgacttccacagaaaattcctgcacagatacatgaagtgattgaacaagagtgttacttgttgctacttgtctgtatgatgaatgatctaaggcttttattctgtgtgggattttataatctctcttgtactaatacataagccaaacaacgcatgttttatgctttatatcaaaagcttatgcacttgactccaaaaaaaaaaaaaaaa

SEQ ID NO: 5816 - protein, 231 aa, Glycine max
  misc_feature: Ceres CLONE ID no. 1072038
  misc_feature: Ceres CDNA ID no. 35383344
  misc_feature (1)..(231): Pfam Name: Cwf_Cwc_15 PFAM Desc: Cwf15/Cwc15 cell cycle control protein
  misc_feature: Homolog of GI Number: 46329463 NR Desc: MGC81091 protein
  misc_feature: Homolog of GI Number: 49522089 NR Desc: MGC81909 protein
  misc_feature: Homolog of GI Number: 28829868 NR Desc: similar to T10C6.5.p
  misc_feature: Homolog of GI Number: 23612595 NR Desc: cell cycle control protein cwf15 homologue
  misc_feature: Homolog of GI Number: 23489775 NR Desc: Dictyostelium discoideum HSPC148. 10/100
  misc_feature: Homolog of GI Number: 62640840 NR Desc:  similar to RIKEN cDNA 0610040D20
  misc_feature: Homolog of GI Number: 73974033 NR Desc:  similar to RIKEN cDNA 0610040D20
MTTAARPTWAPAKGGNEQGGARIFGASQKYSSRDVAAHTTLKPRREGQHTQEEVEKKNLRDELEERERRHFSSKDKSYSDDRDRRRGNQLLLEGSKRDPEDRIVPRSVDADDSDVDLKSDDDSDDESDDDDEDDTEALMAELDQIKKERVEERLRKEKQQQMEELNAKEEELLKGNPLLNNAPTSFSVKRRWDDDVVFKNQARGEMKAPKRFINDTIRNDFHRKFLHRYMK

SEQ ID NO: 5817 - DNA, 650 bp, Glycine max
  misc_feature: Ceres CLONE ID no. 1072171
  misc_feature: Ceres CDNA ID no. 25447147
  CDS (14)..(361): REFERENCED BY SEQ ID NO: 5818
gtgagcgtcaacaatggcttcttcgtcttcagaatcggcggtgtcggagcgaagaggaataccagggactcagttcgtagaggatgtccaaacttacctcactcaatcgggtctcgatgttggttcagccctggcttttctccaagagagacttcagcagtacaaggtagtagaaatgaagcttcttgctcagcaaagggatcttcaggcaaagataccagatattgaaaagtgcttagacgttgttgctacattgaaagctaagaagggtactggtgaggttacaattgctcgtgtgtataattgggatgttcatcaacggagagttcaacaagctgttgctacaactgctcaagactagttaaaaaggagagtttattcaaacctagatccaaaattgaaaactcataccttttgcttagagtatgatttttatctcttgccaatttctgatttagataaattgtgggttgctccctttctctagttccggttttaccacagtagacactagtaggagctttttcgtatatttatgttattattgtcttggtctcttgtaaaatgcccatatgttaggttgatgggaaagttttggtttggtgtgatcatatggatatattctactctgcaaaaaaaaaaaaaaaaaa

SEQ ID NO: 5818 - protein, 115 aa, Glycine max
  misc_feature: Ceres CLONE ID no. 1072171
  misc_feature: Ceres CDNA ID no. 25447147
  misc_feature (50)..(87): Pfam Name: Prefoldin PFAM Desc: Prefoldin subunit
  misc_feature: Homolog of GI Number: 16323366 NR Desc: putative von Hippel
  misc_feature: Homolog of GI Number: 77556159 NR Desc: prefoldin subunit 3
  misc_feature: Homolog of GI Number: 72133249 NR Desc:  similar to Prefoldin subunit 3 Von Hippel-Lindau binding protein 1 VHL binding protein
  misc_feature: Homolog of GI Number: 66846989 NR Desc: pac10 protein
  misc_feature: Homolog of GI Number: 68439749 NR Desc:  similar to Vbp1
  misc_feature: Homolog of GI Number: 32450618 NR Desc: Vbp1
MASSSSESAVSERRGIPGTQFVEDVQTYLTQSGLDVGSALAFLQERLQQYKVVEMKLLAQQRDLQAKIPDIEKCLDVVATLKAKKGTGEVTIARVYNWDVHQRRVQQAVATTAQD

SEQ ID NO: 5819 - DNA, 730 bp, Glycine max
  misc_feature: Ceres CLONE ID no. 1072239
  misc_feature: Ceres CDNA ID no. 29191206
  CDS (149)..(577): REFERENCED BY SEQ ID NO: 5820
atttttcgaaaaatggcctgaaaaataataattaaattgagaccattccaataagtgttaattaactgggagaaccaacccgcaaggctgccgaagatcttacggaaccttggatgcgtttgcttgtgttgtgtgattccgggaataaatgatccgattcatattgttgcagaacagacaaggcaagactcgtcttgcaaagtactatgttcctctcgaggagtccgagaaacacaaggttgaatacgaggttcatagattggtggtcaatcgcgactcgaagttcaccaatttcgtcgagtttagaacgcataaggttatataccggagatatgcagggttgtttttctcattgtgcgttgacataacagacaatgagttggcttaccttgaatgcatccacttgttcgttgagattttggaccatttcttcagcaatgtctgtgagcttgatttggttttcaacttccacaaggtgtacttaatactggatgaattcattcttgctggagagcttcaagaaacaagcaagcgggcgatcattgagaggatgtcagaactggagaagctcgagtaatgaggttgggatattatatgatagtcaagaatgaaaatgagcagtatgagtcttcctttttgctcctctctgttatgttctgtctaccttaaacacacaccttttcattttgatttattaaaactctaatgataaacaaaaaaaaaaaaaaaa

SEQ ID NO: 5820 - protein, 142 aa, Glycine max
  misc_feature: Ceres CLONE ID no. 1072239
  misc_feature: Ceres CDNA ID no. 29191206
  misc_feature (1)..(142): Pfam Name: Clat_adaptor_s PFAM Desc: Clathrin adaptor complex small chain
  misc_feature: Homolog of GI Number: 17149110 NR Desc: clathrin assembly protein AP17
  misc_feature: Homolog of GI Number: 27764984 NR Desc: At1g47830
  misc_feature: Homolog of GI Number: 30983940 NR Desc: clathrin coat assembly protein
  misc_feature: Homolog of GI Number: 2959358 NR Desc: clathrin coat assembly protein AP17
  misc_feature: Homolog of GI Number: 57230864 NR Desc: vesicle
  misc_feature: Homolog of GI Number: 66850406 NR Desc: AP
  misc_feature: Homolog of GI Number: 76641811 NR Desc:  similar to Clathrin coat assembly protein AP17
  misc_feature: Homolog of GI Number: 72016543 NR Desc:  similar to CG6056
  misc_feature: Homolog of GI Number: 72078433 NR Desc:  similar to Clathrin coat assembly protein AP17
  misc_feature: Homolog of GI Number: 46228854 NR Desc: Aps1p/AP17 like clathrin adaptor protein
  misc_feature: Useful for making stronger plants
MIRFILLQNRQGKTRLAKYYVPLEESEKHKVEYEVHRLVVNRDSKFTNFVEFRTHKVIYRRYAGLFFSLCVDITDNELAYLECIHLFVEILDHFFSNVCELDLVFNFHKVYLILDEFILAGELQETSKRAIIERMSELEKLE

SEQ ID NO: 5821 - DNA, 707 bp, Glycine max
  misc_feature: Ceres CLONE ID no. 1072322
  misc_feature: Ceres CDNA ID no. 25447148
  CDS (117)..(458): REFERENCED BY SEQ ID NO: 5822
aaaaaattaaaaacaatagtcacagcgagtgtggttgcgtttctccgttctgagaaggttttggtcggcgaagtgaagtcttctccttcaacaacaacaaggggttgccgtgaagcatggatgaagctgaatttcaacgccttctccaacttttccccgttgttcgttctcgcgattacaccgcagaagcaacatcatccagacaaattgcatctgggtcagcacagaatgagctaaaggaatggcaagatgcatgggacgaaagggataaggattttgagaagcaaggaattaatcaacaagattcattttggagcaagctaaagtcagaggctgctaggaaggtgggtgcagaagaagcggagagattttgcaagtcattccaacaaatccataagaaactagtcaatgaagagttgagtttagatgctgctcgaagcttcctaaattcatcctagagttctaaagaatcacgcatgctttcgacatttcttgtgattaaacaatcagccgttgtaacattgtaattcttttgtactgtatcaaagtattttataatttaatatctgcgagattttgatttgtagttatttattattattgtattagtaagaactaatattcttcccccattaaccctcgcccctttttcttcatttcaaatgaagctgaagtttgcatcaaaaaaaaaaaaaaaaaaaaaaaaa

SEQ ID NO: 5822 - protein, 113 aa, Glycine max
  misc_feature: Ceres CLONE ID no. 1072322
  misc_feature: Ceres CDNA ID no. 25447148
  misc_feature: Homolog of GI Number: 33329190 NR Desc: S3 self
  misc_feature: Homolog of GI Number: 33329188 NR Desc: S2 self
  misc_feature: Homolog of GI Number: 33329186 NR Desc: S1 self
MDEAEFQRLLQLFPVVRSRDYTAEATSSRQIASGSAQNELKEWQDAWDERDKDFEKQGINQQDSFWSKLKSEAARKVGAEEAERFCKSFQQIHKKLVNEELSLDAARSFLNSS

SEQ ID NO: 5823 - DNA, 692 bp, Glycine max
  misc_feature: Ceres CLONE ID no. 1072324
  misc_feature: Ceres CDNA ID no. 25446609
  CDS (142)..(489): REFERENCED BY SEQ ID NO: 5824
attttacaactacctaaaaacacataattctaaatcccctcaaaatagttctggatcgaaaggcgaggcggaccttcgggcgttgctcgctctcgacaccagcactctctctgtgagaaggaacacaaggaatcaacaaccatggattcacagggccagacaacttcattgcagagacttcagaatgtagaaaagagaattgtgaaggttttggagcttgcaggaggagtcatggatgagcttgcaagccctgttggtcctaggaaggatgtggtccaaaaccactgccttgagttcatgcaattaatcaaggacattcaggttgcattgcgggatgaaatcaaaagtgcttgtgaatatcgtccatttgagaaatgtgactatggttcaagaatcgccaatgagatttgtcacaagaaagtggaatttattatgtcacagttagatgcaatgaaacaaactatagatgagtatcatgcagcagtttgaaaatgtagcttagttccctgtagaagcctgggttaccacccggtaattgacttatttgggattgcttattactagttagcgtgttgttttggatggggtaacaattacccttgtagcgataggaaatcagtgtatttatttggatgattatatagtagaatatccaatgagtgtggattattttgttcaaaaaaaaaaaaaaa

SEQ ID NO: 5824 - protein, 115 aa, Glycine max
  misc_feature: Ceres CLONE ID no. 1072324
  misc_feature: Ceres CDNA ID no. 25446609
MDSQGQTTSLQRLQNVEKRIVKVLELAGGVMDELASPVGPRKDVVQNHCLEFMQLIKDIQVALRDEIKSACEYRPFEKCDYGSRIANEICHKKVEFIMSQLDAMKQTIDEYHAAV

SEQ ID NO: 5825 - DNA, 988 bp, Glycine max
  misc_feature: Ceres CLONE ID no. 1072331
  misc_feature: Ceres CDNA ID no. 29191673
  CDS (217)..(741): REFERENCED BY SEQ ID NO: 5826
acaccaaacccacgggccgcggcagccttccaagttccctttgccctcgtcgcagatccgaaccatcctagccgtacatcgcaggaacctccttcctggttccaacttccaacccgacccgcacaaacgaataggaaatccggatagagcgccgcccccgccccgccagattccgttccgccgccgccgccggaagccgaggacgggagggagaccatgacgaccattcgccggttctgctgcgacgatctgctccgcttcgcctccgtcaacctcgaccacctcaccgagaccttcaacatgtccttctacatgacgtacctggctcgctggcccgactacttccacaccgccgtcaaccccggcgaccgcgtcatgggatacatcatgggaaaggttgaaggacaaggtgaatcttggcatggacatgttacggcagtgtccgttgcctcagaattccgcagacagaaattagccaagacgcttatgcacttgctggaggaaatcagtgataagatggataaggcctattttgtggatctctttgtaagggcatccaacatgccggctataaggatgtatgaaaagctgggctatgtggtttatcgaagggtgcttcggtactactcaggggaagaagatggccttgatatgagaaaggcattatcacaagatgttgacaagaagtccatcataccactcaagagaccaattacaccggacgaacttgaatacgactgatgctaatttctaactaccgctcttgcgtagttctgttcccattgatctgcacttctatggcagctcaacaagttattgtctctagtgttattgaatgagtgatcgtgaattttatttgcacattcctgttaagatttgacgcagttttcatggtgggcactgatgagccagctggtgcatgctgaaggagaacaccagtgatttctactagcttgctatttttatccttacaaaaaaaaaaaaaaaa

SEQ ID NO: 5826 - protein, 174 aa, Glycine max
  misc_feature: Ceres CLONE ID no. 1072331
  misc_feature: Ceres CDNA ID no. 29191673
  misc_feature (45)..(128): Pfam Name: Acetyltransf_1 PFAM Desc: Acetyltransferase
  misc_feature: Homolog of GI Number: 14550118 NR Desc: silencing group B protein
  misc_feature: Homolog of GI Number: 50918003 NR Desc: silencing group B protein
  misc_feature: Homolog of GI Number: 55233495 NR Desc: ENSANGP00000020842
  misc_feature: Homolog of GI Number: 72009889 NR Desc:  similar to N
  misc_feature: Homolog of GI Number: 66517612 NR Desc:  similar to ENSANGP00000020842
  misc_feature: Homolog of GI Number: 50750860 NR Desc:  similar to N
  misc_feature: Homolog of GI Number: 7705823 NR Desc: N
  misc_feature: Homolog of GI Number: 68126821 NR Desc: n
  misc_feature: Homolog of GI Number: 70872918 NR Desc: N
MTTIRRFCCDDLLRFASVNLDHLTETFNMSFYMTYLARWPDYFHTAVNPGDRVMGYIMGKVEGQGESWHGHVTAVSVASEFRRQKLAKTLMHLLEEISDKMDKAYFVDLFVRASNMPAIRMYEKLGYVVYRRVLRYYSGEEDGLDMRKALSQDVDKKSIIPLKRPITPDELEYD

SEQ ID NO: 5827 - DNA, 1209 bp, Glycine max
  misc_feature: Ceres CLONE ID no. 1072407
  misc_feature: Ceres CDNA ID no. 36705626
  CDS (1)..(1011): REFERENCED BY SEQ ID NO: 5828
gccgttctaaaccctcccttctcccacttctccacccctctccctcggcaagaaaagccgccgccgccgcatccgcagcagccgcatccgcagcaggcgagcgagatggtgtttgtgaagaaccagaagaccagggcctactccaagcggttccaagtgaagttcaagagaaggagacaggggaagaccgattacagggccaggctcaggctcaccaaccaagacaagaacaagtacaacacgcccaagtaccggtttgttgtacgatttaccaacaaagatgtcactgcccaaattgtgtacgctaccattgctggtgatatcgtgatggctgctgcctattcccatgagcttcctcggtatggtcttgaagttggcctcaccaactatgctgcagcgtactgcactggtctgcttttggcccgccgtgtgctcaagtgccgtgatttggatcaggaatatgagggcaatgttgaggccactggggaggacttctctgttgagccggctgatgagaggaggcctttccgcgcgctcttggatgttggccttattaggaccactactggaaaccgtgtgtttggtgcccttaagggagctttggatggtggtcttgatattccgcacagtgacaagagatttgctggcttcaagaaggatgagaagcagctggacgctgagattcaccgcaaatacatctatggagggcatgttgctgactacatgaagtcactggctgatgaggaacctgagaagtaccaatctcacttcagtgagtacatcaagaaggggattgaggctgataacatggaagcactgtacaagaaggttcatgctgccattcgtgctgatcctaccatggcaaagtcaaccaaggaacctccaaagacgcacaagaggtacaaccccaagaagctgacctacgagcagaggaaggccagtctcgtggagcggctcaacgccctcaactcatctgctggtgctgatgtcgatgaggacgacgacgaatgagtgtaatcgaccctaggcccctatagtgctgtcttcatgcttccaaatgaacttgctccatgcattaaagagtagtatcgcgagagagacatatatgcacattgtacctgcccttggttttgagtaccatgctggagttctggatcatcttacattatacaaggtgctggcattttgacgtcaaaaaaaaaaaaaaaa

SEQ ID NO: 5828 - protein, 301 aa, Glycine max
  misc_feature: Ceres CLONE ID no. 1072407
  misc_feature: Ceres CDNA ID no. 36705626
  misc_feature (26)..(172): Pfam Name: Ribosomal_L18p PFAM Desc: Ribosomal L18p/L5e family
  misc_feature: Homolog of GI Number: 34907622 NR Desc: putative 60S ribosomal protein L5
  misc_feature: Homolog of GI Number: 34907624 NR Desc: putative 60S ribosomal protein L5
  misc_feature: Homolog of GI Number: 56785264 NR Desc: putative ribosomal protein L5
  misc_feature: Homolog of GI Number: 56785265 NR Desc: putative ribosomal protein L5
  misc_feature: Homolog of GI Number: 34484312 NR Desc: 60S ribosomal protein L5
  misc_feature: Homolog of GI Number: 30984510 NR Desc: At3g25520
  misc_feature: Homolog of GI Number: 30984512 NR Desc: At5g39740
  misc_feature: Homolog of GI Number: 21592804 NR Desc: ribosomal protein
  misc_feature: Homolog of GI Number: 13359453 NR Desc: putative senescence
MVFVKNQKTRAYSKRFQVKFKRRRQGKTDYRARLRLTNQDKNKYNTPKYRFVVRFTNKDVTAQIVYATIAGDIVMAAAYSHELPRYGLEVGLTNYAAAYCTGLLLARRVLKCRDLDQEYEGNVEATGEDFSVEPADERRPFRALLDVGLIRTTTGNRVFGALKGALDGGLDIPHSDKRFAGFKKDEKQLDAEIHRKYIYGGHVADYMKSLADEEPEKYQSHFSEYIKKGIEADNMEALYKKVHAAIRADPTMAKSTKEPPKTHKRYNPKKLTYEQRKASLVERLNALNSSAGADVDEDDDE

SEQ ID NO: 5829 - DNA, 673 bp, Glycine max
  misc_feature: Ceres CLONE ID no. 1072438
  misc_feature: Ceres CDNA ID no. 29191758
  CDS (88)..(516): REFERENCED BY SEQ ID NO: 5830
agggttagggttttcgcagccgctttaaaactacttatcctccttactgcttctctttgctgttgatcatcatctccatccacaaacatgggtaagacaaggggaatgggagcagggcgcaagctcaaaaggcttaggattaatcagaggtgggctgacaagcagtacaagaagtcccatcagggcaacgagtggaagaagccttttgctggttcttcccacgccaagggtatcgttcttgagaaaataggtattgaggctaagcagcctaactctgctatccgtaagtgtgctagagttcagcttatcaagaacggaaagaagattgccgcttttgtccccaacgatggttgcttgaactacattgaggaaaatgacgaggtgttgattgctggatttgggcgtaaaggtcatgccgtgggagatattcctggagttcggttcaaggtcgtcaaggtctctggtgtttcacttttggccctcttcaaggagaagaaggagaagccaagatcttaagcttttgaatttgtttttgatttttataactatcttttgaaaacaaactcatattgttctgttctattctactttaaaattccagaactgagtttaaacatttattttctaggagtcttatgtttagttttccaacaagttaaaaaaaaaaaaaaaa

SEQ ID NO: 5830 - protein, 142 aa, Glycine max; identical to SEQ ID NO: 5580
  misc_feature: Ceres CLONE ID no. 1072438
  misc_feature: Ceres CDNA ID no. 29191758
  misc_feature (9)..(141): Pfam Name: Ribosomal_S12 PFAM Desc: Ribosomal protein S12
  misc_feature: Homolog of GI Number: 21536723 NR Desc: putative 40S ribosomal protein S23
  misc_feature: Homolog of GI Number: 50919443 NR Desc: 40S ribosomal protein S23
  misc_feature: Homolog of GI Number: 1362041 NR Desc: ribosomal protein S23.e
  misc_feature: Homolog of GI Number: 6716785 NR Desc: 40s ribosomal protein S23
  misc_feature: Homolog of GI Number: 6682246 NR Desc: putative 40S ribosomal protein S23
  misc_feature: Homolog of GI Number: 55233795 NR Desc: ENSANGP00000012229
  misc_feature: Homolog of GI Number: 11121260 NR Desc: 40S ribosomal protein S23
  misc_feature: Homolog of GI Number: 30025641 NR Desc: 40S ribosomal protein S23
  misc_feature: Homolog of GI Number: 50344514 NR Desc: S23e ribosomal protein
  misc_feature: Useful for increasing chlorophyll and photosynthetic capacity
  misc_feature: Useful for making plants with altered leaf shape eg curled leaves
  misc_feature: Useful for making shorter plants
  misc_feature: Useful for sterility

SEQ ID NO: 5831 - DNA, 698 bp, Glycine max
  misc_feature: Ceres CLONE ID no. 1072453
  misc_feature: Ceres CDNA ID no. 25892489
  CDS (102)..(440): REFERENCED BY SEQ ID NO: 5832
gtctgtggtatccatccgcgcatattctcatttcaatttgcatttgcatttgcgtttcatttggcgttttgtttctttctggaagcttcgttcgggcatcaatggcgtccttcgatgaagctcctcccggaaactccaagaacggcgagaagatcttcaaaaccaagtgcgctcagtgccacaccgtcgacaaaggtgccggccacaaacaaggacccaatctgaatggtttgtttggaagacaatctggtacaactcctggatattcctattctactgctaacaaaaacatggccgtgatttgggaggaaaagaccctctatgattacttgctcaaccccaaaaagtatattccaggaacgaagatggtatttcctggtcttaagaaacctcaggaacgtgcagatcttattgcatatcttaaagaatctactgcttaatgattaaattttcatacagttatgcactttgcttcaaagttctggagatttagttttcagacatttaattctgtggtgcagtaaatactgtatcaacaaataaagtagacttgattggtttgcaatgctattttgttcgttttgcattgcttcttaagaggctgccatatattggctactgttcaattaatttggttgttgaaagtttaaacattgttattgatataagttaagctgggagcaaaaaaaaaaaaaaaa

SEQ ID NO: 5832 - protein, 112 aa, Glycine max
  misc_feature: Ceres CLONE ID no. 1072453
  misc_feature: Ceres CDNA ID no. 25892489
  misc_feature (13)..(111): Pfam Name: Cytochrom_C PFAM Desc: Cytochrome c
  misc_feature: Homolog of GI Number: 118013 NR Desc: Cytochrome c
  misc_feature: Homolog of GI Number: 117976 NR Desc: Cytochrome c
  misc_feature: Homolog of GI Number: 53982673 NR Desc: putative cytochrome c
  misc_feature: Homolog of GI Number: 118022 NR Desc: Cytochrome c
  misc_feature: Homolog of GI Number: 229737 NR Desc: Cytochrome c
  misc_feature: Homolog of GI Number: 19310747 NR Desc: putative cytochrome c protein
  misc_feature: Homolog of GI Number: 51317000 NR Desc: Cytochrome c
  misc_feature: Homolog of GI Number: 476418 NR Desc: cytochrome c
  misc_feature: Homolog of GI Number: 117952 NR Desc: Cytochrome c
  misc_feature: Homolog of GI Number: 21592717 NR Desc: putative cytochrome C
MASFDEAPPGNSKNGEKIFKTKCAQCHTVDKGAGHKQGPNLNGLFGRQSGTTPGYSYSTANKNMAVIWEEKTLYDYLLNPKKYIPGTKMVFPGLKKPQERADLIAYLKESTA

SEQ ID NO: 5833 - DNA, 540 bp, Glycine max
  misc_feature: Ceres CLONE ID no. 1072510
  misc_feature: Ceres CDNA ID no. 25446511
  CDS (44)..(277): REFERENCED BY SEQ ID NO: 5834
tttatttagcggaggccaagagggaagaagagaagaagcgaaaatgaacagcaacagcaacgttggagggggattcaggtcaaggttgaatcactacctctatagcggtgacaagaaacatgtcttcgttggtttaactctcatcaccgctgtctttaccatcccatggtactttatgagcagagggaccaaacaccagtctcatcaagattacttggaaaaagctgataaagccaggagccaaagactctcatccagttctgcttctgccaaatgatcttcatcaacattctgttgaagagcatactttttccagtaacacttaattaaaaggtttcaaatatgtttgttggatgtccttttctctctagttttattcaatgggatggagatccatcttcctttttccatattcgcatactgttaaattagtcttttatttgggaaacaaaaaagaactaatgatgtataagaaaatttccttatataataaaattggttaggtatgattttcctgttcaaaaaaaaaaaaaaaaaaaa

SEQ ID NO: 5834 - protein, 77 aa, Glycine max
  misc_feature: Ceres CLONE ID no. 1072510
  misc_feature: Ceres CDNA ID no. 25446511
  misc_feature: Homolog of GI Number: 38603894 NR Desc: At1g80890
MNSNSNVGGGFRSRLNHYLYSGDKKHVFVGLTLITAVFTIPWYFMSRGTKHQSHQDYLEKADKARSQRLSSSSASAK

SEQ ID NO: 5835 - DNA, 997 bp, Glycine max
  misc_feature: Ceres CLONE ID no. 1072525
  misc_feature: Ceres CDNA ID no. 36582138
  CDS (116)..(661): REFERENCED BY SEQ ID NO: 5836
aacgaagcacgacgtgagagagattgtgaagtagaaatcggtgcaagaaattctccactttatctaaaaaaattcggtgagtttgtgaagacaaaaaatcactagctactcaaaaatggccacagtaggaaggaacgttgcagctcctttgctgtttcttaacttgatcatgtattttattgttcttggctttgctagttggtgcctcaacaggttcatcaatggccaaacttaccaccctagttttggtggaaatggtgcaaccatgtttttcttaaccttctccatactagcagctgttctgggcatcgtgtccaaacttttgggtgggaatcacatgaggacatggaggagtgacagtttagcatctgcaggagccacatcaatggttgcttgggcagtcacagctctagcatttgggttggcttgcaagcaaatacacttaggagggcatagagggtggaggctgagggtagtggaggcattcataataatactaacattcacacagttgttgtacctgatactgatccacgcggggctatatagcagcagatatggtcccgggtaccatgacactgactatggtcatggacatggtgtgggagggactacaggagatccaatgcacaagcctgctactgcaggaactcgtgtctaagtgccactgcactgcaccacctttgttaatttcttctcttcaatcatgttctactttaccttttgttggaactttctttttttcattgtctttggtttagatcacttggattgtgtaatgtctttgttggcttgttgttttcttacacatgatagtcactttgtagcatgacattgtgtggtgtatatgaatggctgtaattgattttgtatcagccctctatcatgtgtatctatgtttgtggttccacatctcagacatgaatttttcatgcttactgagaagttaataaatttcttagacgtaaccttttacttctcaaaaaaaaaaaaaaaa

SEQ ID NO: 5836 - protein, 181 aa, Glycine max
  misc_feature: Ceres CLONE ID no. 1072525
  misc_feature: Ceres CDNA ID no. 36582138
  misc_feature (14)..(143): Pfam Name: AWPM PFAM Desc: AWPM
  misc_feature: Homolog of GI Number: 310570 NR Desc: a Lea protein with hydrophobic domain
  misc_feature: Homolog of GI Number: 50936401 NR Desc: putative plasma membrane associated protein
  misc_feature: Homolog of GI Number: 1724112 NR Desc: ABA induced plasma membrane protein PM 19
  misc_feature: Homolog of GI Number: 6851373 NR Desc: plasma membrane associated protein
  misc_feature: Homolog of GI Number: 50931285 NR Desc: putative plasma membrane associated protein
  misc_feature: Homolog of GI Number: 50912431 NR Desc: putative ABA
  misc_feature: Homolog of GI Number: 56784019 NR Desc: putative ABA induced plasma membrane protein PM 19
  misc_feature: Homolog of GI Number: 34911480 NR Desc: putative plasma membrane associated protein
  misc_feature: Homolog of GI Number: 20465529 NR Desc: putative plasma membrane associated protein
  misc_feature: Homolog of GI Number: 34904644 NR Desc: putative ABA
MATVGRNVAAPLLFLNLIMYFIVLGFASWCLNRFINGQTYHPSFGGNGATMFFLTFSILAAVLGIVSKLLGGNHMRTWRSDSLASAGATSMVAWAVTALAFGLACKQIHLGGHRGWRLRVVEAFIIILTFTQLLYLILIHAGLYSSRYGPGYHDTDYGHGHGVGGTTGDPMHKPATAGTRV

SEQ ID NO: 5837 - DNA, 824 bp, Glycine max
  misc_feature: Ceres CLONE ID no. 1072538
  misc_feature: Ceres CDNA ID no. 25446091
  CDS (81)..(629): REFERENCED BY SEQ ID NO: 5838
atttgaccgttggtccaaattgggggtggtatgcacaagtttctcatgtcacttgaatccggccatagtagctgtccacaatgttttctcgcagatcaagtggaagagtggctagtggtagagttgcattagaaaatggagtcccattaccactgttgcctgatcctaaagcaaatttacaatgggatgaggttaaaccactttcaggaaaaccatactggcatagtgttctttcgcctacaaatcttcaaccccgttataacttgatgccggggatgaacttgcggtcaaaacttccttctaatgaggtccctactattctcatctatgggggcaagagctgggacatggtgtattatggacaaagcaaacagaaggcttttggtgtcacaggctggaaaaaatttgttattgataattgtttgagggttggagatgcttgcatttttgagctcatggaaagcagtgacaagaaagtcatacttgaagttcaaattcttagaggtgacatcccatctgaatggcttggaaatgaaatgatcataggtcaagggaatgaaatgatcataggtcaagagaatgaaatgatcataggtcacagtcgggaaaatccaattgtccttaactagtattctaaccatttatgtatttcattttccttttcattctgcgatggttcagggttattggataactttagtatgttagtatatggatgttgtccctgcctcaacttgttaggagtagtgaatttacgtgctatgttgaatgtctaaattctaaataccagttgaattttattattgtcaaaaaaaaaaaaaaaa

SEQ ID NO: 5838 - protein, 182 aa, Glycine max
  misc_feature: Ceres CLONE ID no. 1072538
  misc_feature: Ceres CDNA ID no. 25446091
  misc_feature (84)..(135): Pfam Name: B3 PFAM Desc: B3 DNA binding domain
  misc_feature: Homolog of GI Number: 50923835 NR Desc: OSJNBa0044M19.12
MFSRRSSGRVASGRVALENGVPLPLLPDPKANLQWDEVKPLSGKPYWHSVLSPTNLQPRYNLMPGMNLRSKLPSNEVPTILIYGGKSWDMVYYGQSKQKAFGVTGWKKFVIDNCLRVGDACIFELMESSDKKVILEVQILRGDIPSEWLGNEMIIGQGNEMIIGQENEMIIGHSRENPIVLN

SEQ ID NO: 5839 - DNA, 1450 bp, Glycine max
  misc_feature: Ceres CLONE ID no. 1072570
  misc_feature: Ceres CDNA ID no. 35383345
  CDS (183)..(1079): REFERENCED BY SEQ ID NO: 5840
acgcacgcacgcctaaccctaaccctagctaagaatcccctcccgcaaccaggtcgtgtctcagggcgcatcgccgaaggccaagccctccctcccctagcagcgggccgcccgttcccggcgggacgcgccggcgccggcgcccccaggctcaagctccgtcgcgctttcgacggcgagggatggatccgatggacatcgtgggcaagtccaaggaggacgtctccctccccaaatcaacaatgaccaagattattaaggagatgctaccgcctgatgttcgagtagcaagagatacacaggatcttcttgttgaatgctgtgtagagttcatcaatcttctttcttcggaatccaatgacgtgtgcagccgggacgacaagaaaactattgcccctgaacatgttattagggctttgcaggatcttggcttcaaggagtatgttgaagaagtttatgcagcctacgaacagcacaagcttgaaaccctggactctccaaaagcaaccaagttcactggcatagagatgacagaagaagaagctgttgctgaacagcagagaatgtttgctgaagcccgagcaaggatgaacaatggagctgccaaaccaaaggagcctgcattagaaccacagaatcaaccccaacagcccccacaacctcatctgcagctgcatcctcaagcacagcagcctccacaacctcaaccgcaactgcatcatcctcaatcacagcagcccctgcatcctcaactgcaaccgtatactcaggctccaccacagcagcccctgcatcctcaactgcaaccgtatactcaggctccaccacagcaacccctacaacctccactgcagctgtatcctcaggctcaacctgagcaacccctgcagcctcaatcctcaggatcaaccacaggaacctgtgtaatctcaactgccgctccatctgcaaccggcaccactgctgctgcaacctccgccccagcaatccccgcaatctcaactgcagctccatcagcaaccccagccgatgcaagtgccgctgccgccgctgccgcaacctcaaccccagccacctgaactgcagcagccccagccgctaacacaactgcaagcggaacatggcctgaactggacagttagtggttcggaacatgtagcgtcactataagttaagactctgcctcctttaaaattgtgcgttaggtttgcctgcatcttgtacaatgtaaatcgtgtgtgatttcagccaccgtgtctctaataatctgaagctctctagtaagcgatgtacttactgcgctggatactgtgtttatgactgttgtagtctcatggtattgtgtgtgacgtgtcagaagctactccattaccagtgtaatcaattgcctgacttaatgttcacccgtgatgatagtaattgatttcagtgtgcaaaaaaaaaaaaaaaa

SEQ ID NO: 5840 - protein, 298 aa, Glycine max
  misc_feature: Ceres CLONE ID no. 1072570
  misc_feature: Ceres CDNA ID no. 35383345
  misc_feature: Useful for making plants with modulated growth and phenotype characteristics
  misc_feature: The sequence is a functional homolog of  SEQ ID NO 2190 in the  10/374,780 US patent application
  misc_feature: The sequence is a functional homolog of  SEQ ID NO 24 in the  11/375,241 US patent application
  misc_feature: The sequence is a functional homolog of  SEQ ID NO 715 in the  11/479,226 US patent application
  misc_feature: The sequence is a functional homolog of  SEQ ID NO 824 in the  10/374,780 US patent application
  misc_feature: The sequence is a functional homolog of  SEQ ID NO 92 in the  10/374,780 US patent application
  misc_feature (14)..(79): Pfam Name: CBFD_NFYB_HMF PFAM Desc: Histone
  misc_feature: Homolog of GI Number: 18481622 NR Desc: repressor protein
  misc_feature: Homolog of GI Number: 18481620 NR Desc: repressor protein
  misc_feature: Homolog of GI Number: 8346556 NR Desc: DR1
  misc_feature: Homolog of GI Number: 21592629 NR Desc: DR1
  misc_feature: Homolog of GI Number: 21436033 NR Desc: AT5g23090/MYJ24_8
  misc_feature: Homolog of GI Number: 2129748 NR Desc: TATA
  misc_feature: Homolog of GI Number: 18481628 NR Desc: repressor protein
  misc_feature: Homolog of GI Number: 30688817 NR Desc: TATA
  misc_feature: Homolog of GI Number: 60474232 NR Desc: putative histone
  misc_feature: Homolog of GI Number: 51964864 NR Desc: PREDICTED B1090H08.28 gene product
MDPMDIVGKSKEDVSLPKSTMTKIIKEMLPPDVRVARDTQDLLVECCVEFINLLSSESNDVCSRDDKKTIAPEHVIRALQDLGFKEYVEEVYAAYEQHKLETLDSPKATKFTGIEMTEEEAVAEQQRMFAEARARMNNGAAKPKEPALEPQNQPQQPPQPHLQLHPQAQQPPQPQPQLHHPQSQQPLHPQLQPYTQAPPQQPLHPQLQPYTQAPPQQPLQPPLQLYPQAQPEQPLQPQSSGSTTGTCVISTAAPSATGTTAAATSAPAIPAISTAAPSATPADASAAAAAAATSTPAT

SEQ ID NO: 5841 - DNA, 890 bp, Glycine max
  misc_feature: Ceres CLONE ID no. 1072703
  misc_feature: Ceres CDNA ID no. 29191759
  CDS (91)..(531): REFERENCED BY SEQ ID NO: 5842
atcgattttcaacccacggacgaagggcagcttggttgcggcttcagtatcggcttaccaaacccttactcatctgggatttaaagaatcatggccaaagctgaaggtggcaaggaaccagtaaatgaacaagcagttgcaaatatgtatgctgcaatgaggtctgagctcaaccaaatttactccaaaataactgaactggagatggaagttagtgagcacacattggttaccaatgccattcaaccacttgaccaatctagacgatgctatcgtatgattggaggggtgcttgtggagagaaccatcaaagaggtcttgcctgctgtgcagcgaaataaagaaggactcgaagaggttgtggcaaggcttaacgaggcattggaaaagaagaaaaaggaaatttctgagtttgaggctaaatataaaatcaggataaggaaggctgatgctgaggtgaaggatgaatctggtaggaaggaagggtctgctcaaggggttcttgtgggtcctgcaggtggaagtgaatgatttgtctatttttattttgtttcctcaaactagtagccagaacttgtcttacaatggggtgcaggcagtttgatgatttgttttttatgtagactaagtgcgtgtttgaattagattcatgttccatccatatagaagcaagtaaatgtaacttctgcatctttttgacgtggttttgctgcttgaacgtggatccaagacgtgtttccaaccacgctcattagcaagtataccttgatatgaccttaagtttaattgctttgggctgaaaaaaacttatcttcattggtttgtgtttatgtagatttttgtatgcaagactagagcatataatcgtgtgatcaaaaaaaaaaaaaaaa

SEQ ID NO: 5842 - protein, 146 aa, Glycine max
  misc_feature: Ceres CLONE ID no. 1072703
  misc_feature: Ceres CDNA ID no. 29191759
  misc_feature (14)..(119): Pfam Name: KE2 PFAM Desc: KE2 family protein
  misc_feature: Homolog of GI Number: 77555734 NR Desc: prefoldin subunit 2
  misc_feature: Homolog of GI Number: 77551518 NR Desc: prefoldin subunit 2
  misc_feature: Homolog of GI Number: 62320962 NR Desc: prefoldin like protein
  misc_feature: Homolog of GI Number: 68362860 NR Desc:  similar to prefoldin 2
  misc_feature: Homolog of GI Number: 74006277 NR Desc:  similar to prefoldin 2
  misc_feature: Homolog of GI Number: 55588600 NR Desc:  similar to prefoldin 2
  misc_feature: Homolog of GI Number: 60811895 NR Desc: prefoldin 2
  misc_feature: Homolog of GI Number: 62901934 NR Desc: prefoldin subunit 2
  misc_feature: Homolog of GI Number: 28189659 NR Desc: similar to prefoldin subunit 2
  misc_feature: Useful for increasing chlorophyll and photosynthetic capacity
  misc_feature: Useful for making ornamental plants with modified leaves
MAKAEGGKEPVNEQAVANMYAAMRSELNQIYSKITELEMEVSEHTLVTNAIQPLDQSRRCYRMIGGVLVERTIKEVLPAVQRNKEGLEEVVARLNEALEKKKKEISEFEAKYKIRIRKADAEVKDESGRKEGSAQGVLVGPAGGSE

SEQ ID NO: 5843 - DNA, 931 bp, Glycine max
  misc_feature: Ceres CLONE ID no. 1072795
  misc_feature: Ceres CDNA ID no. 29191674
  CDS (73)..(744): REFERENCED BY SEQ ID NO: 5844
ttaagctccaatctcctcttcttcctctttgctaacaaagcatcctttttttcctgaagacggagaagctccatgacgaagcagcacgcgaactggtctccttacgataacaatggaggaacatgtgtagcaatcgctggatcggattactgcgttatcgccgccgatactcggatgtctaccggttacagcattctcactcgcgactactccaaaatccataaactagcagacaaagctgtgctttcttcctctggctttcaggctgatgtcaaagcgttgcagaaagttttgaaatcaaggcacttggtttatcagcatcagcataacaagcagatgagctgtcctgcgatggctcagcttctctccaacacgctttacttcaagcgcttttttccttactatgcattcaatgttctaggcgggcttgacgagcagggtaaaggatgtgttttcacgtatgatgctgttggttcctatgagaaggttggatacagtgctcaaggttctggttccactctaatcatgcctttccttgacaatcaactcaagagtcccagccctcttctgctacctgcacaggatgccatcacacccctttccgaacctgaagcagttgacctggtcaagaccgtattcgcatctgccactgagagggatatctacactggagacaagcttgagatcatgattcttaaggccgatggcatcaggaccgaagtcatggagttgaggaaagactaagcaggcatatgagtgttggggacacaactttgttcgtttttcttattcgcatctcaacattaggtcccctcggttatcttgaactatgttattggcttggatgtattgcagttatcaactcatgcttgaagtttcctttatgacaaagttcttttcaagagattttataacaaaaaaaaaaaaaaaa

SEQ ID NO: 5844 - protein, 223 aa, Glycine max
  misc_feature: Ceres CLONE ID no. 1072795
  misc_feature: Ceres CDNA ID no. 29191674
  misc_feature (12)..(208): Pfam Name: Proteasome PFAM Desc: Proteasome A
  misc_feature: Homolog of GI Number: 600387 NR Desc: proteosome subunit
  misc_feature: Homolog of GI Number: 21554745 NR Desc: proteasome component C5
  misc_feature: Homolog of GI Number: 79315846 NR Desc: PBF1
  misc_feature: Homolog of GI Number: 3608485 NR Desc: proteasome beta subunit
  misc_feature: Homolog of GI Number: 17380182 NR Desc: Proteasome subunit beta type 1
  misc_feature: Homolog of GI Number: 14594933 NR Desc: putative beta6 proteasome subunit
  misc_feature: Homolog of GI Number: 50947863 NR Desc: putative proteasome subunit beta type 1
  misc_feature: Homolog of GI Number: 66512107 NR Desc:  similar to GA17955
  misc_feature: Homolog of GI Number: 7768841 NR Desc: 20S proteasome beta 6 subunit
  misc_feature: Homolog of GI Number: 7768839 NR Desc: 20S proteasome beta 6 subunit
MTKQHANWSPYDNNGGTCVAIAGSDYCVIAADTRMSTGYSILTRDYSKIHKLADKAVLSSSGFQADVKALQKVLKSRHLVYQHQHNKQMSCPAMAQLLSNTLYFKRFFPYYAFNVLGGLDEQGKGCVFTYDAVGSYEKVGYSAQGSGSTLIMPFLDNQLKSPSPLLLPAQDAITPLSEPEAVDLVKTVFASATERDIYTGDKLEIMILKADGIRTEVMELRKD

SEQ ID NO: 5845 - DNA, 456 bp, Glycine max
  misc_feature: Ceres CLONE ID no. 1072873
  misc_feature: Ceres CDNA ID no. 25446512
  CDS (110)..(283): REFERENCED BY SEQ ID NO: 5846
attctcctccttcaaaaataaaacctcatatttttaaaattcgaaaccctaaattcccgactcctcccaacccattcggttcactccctgcaacaccgaagagtaaagaatgggagacaaaaagaagaaggctcagatgtttgtaaagctagtgtctgctgctgggactggatttttctatgttaagaggaagccaaggcagttcacagagaagcttgagttccgaaaatatgatcctagggttaatcgtcacgttctgtttacagaggctaaaatgaaatgatattgtacctttcatggctgcctttgcattgtaactggatcaatcttgtatttctccttgagacaattatctcatttggtattagattttgaatcatgccaatctttttactgtctctgcctcttcttagctattcagattttgtatttgtaaaaaaaaaaaaaaaaaaaaaa

SEQ ID NO: 5846 - protein, 57 aa, Glycine max
  misc_feature: Ceres CLONE ID no. 1072873
  misc_feature: Ceres CDNA ID no. 25446512
  misc_feature (9)..(55): Pfam Name: Ribosomal_L33 PFAM Desc: Ribosomal protein L33
  misc_feature: Homolog of GI Number: 38566500 NR Desc: At5g18790
  misc_feature: Homolog of GI Number: 53801500 NR Desc: 50S ribosomal protein L33
  misc_feature: Homolog of GI Number: 23016261 NR Desc: COG0267: Ribosomal protein L33
  misc_feature: Homolog of GI Number: 19112900 NR Desc: ribosomal protein l33
  misc_feature: Homolog of GI Number: 67999308 NR Desc: Ribosomal protein L33
  misc_feature: Homolog of GI Number: 46308542 NR Desc: COG0267: Ribosomal protein L33
  misc_feature: Homolog of GI Number: 72393994 NR Desc: Ribosomal protein L33
  misc_feature: Homolog of GI Number: 56416603 NR Desc: 50S ribosomal protein L33
  misc_feature: Homolog of GI Number: 57238952 NR Desc: 50S ribosomal protein L33
  misc_feature: Homolog of GI Number: 58417511 NR Desc: 50S ribosomal protein L33
MGDKKKKAQMFVKLVSAAGTGFFYVKRKPRQFTEKLEFRKYDPRVNRHVLFTEAKMK

SEQ ID NO: 5847 - DNA, 604 bp, Glycine max
  misc_feature: Ceres CLONE ID no. 1072934
  misc_feature: Ceres CDNA ID no. 29191675
  CDS (2)..(409): REFERENCED BY SEQ ID NO: 5848
acccaagcgccgccattctcccccttccccttttcctcaccgccgcaggagaagaagcagacgcgcggaggagagcttccaggcggcgaccatggtgaacgttccaaagaccaagaagacctactgcaagaacaaggagtgcaagaagcacaccctccacaaggttacacaatacaagaaaggcaaggatagtctttctgctcagggcaagcgtcgttatgaccgcaaacagtcaggatatggtggccagacaaagcctgttttccacaagaaggccaagacaacaaagaagattgtgctgaagctgcagtgccagagctgcaagcattactcgcaacgtgccatcaagaggtgcaagcacttcgaaatcggtggagacaagaagggcaagggaacctctctcttctaagctgatgatacccctgttatgttcagagtgttgtgccagaacttcccactcgaacaatgtattatctcgttaatttctgggtatgaactctatgggctatggagcatatgttttgcctttgtgtcaagtgtcaactactctcgtcagatccatgagacaagtaaaatgttctttatgccaaaaaaaaaaaaaaaa

SEQ ID NO: 5848 - protein, 105 aa, Glycine max; identical to SEQ ID NO: 1996
  misc_feature: Ceres CLONE ID no. 1072934
  misc_feature: Ceres CDNA ID no. 29191675
  misc_feature (19)..(95): Pfam Name: Ribosomal_L44 PFAM Desc: Ribosomal protein L44
  misc_feature: Homolog of GI Number: 15281775 NR Desc: 60S ribosomal protein L144
  misc_feature: Homolog of GI Number: 34901296 NR Desc: putative 60S ribosomal protein L44
  misc_feature: Homolog of GI Number: 41152660 NR Desc: 60S ribosomal protein L44
  misc_feature: Homolog of GI Number: 21553918 NR Desc: ribosomal protein
  misc_feature: Homolog of GI Number: 170920 NR Desc: ribosomal protein L41
  misc_feature: Homolog of GI Number: 1553131 NR Desc: ribosomal protein L44 isoform b
  misc_feature: Homolog of GI Number: 82621114 NR Desc: ribosomal protein L41
  misc_feature: Homolog of GI Number: 66852786 NR Desc: ribosomal protein L41
  misc_feature: Homolog of GI Number: 3128243 NR Desc: ribosomal protein L41
  misc_feature: Homolog of GI Number: 12083868 NR Desc: ribosomal protein L41

SEQ ID NO: 5849 - DNA, 942 bp, Glycine max
  misc_feature: Ceres CLONE ID no. 1072942
  misc_feature: Ceres CDNA ID no. 29191207
  CDS (308)..(655): REFERENCED BY SEQ ID NO: 5850
aataatcaatcagccaactgacggtggagaacggcttgctttgcggccaaaagaggggaggagaggagaggaaaagggggccaagaaacccagagtcgtccccctcctcccgtctataaattcccctccttccctcgtctttatataggaggcatccaacccaaagaggaggaagaacaccaaggactgactgccagcgcctctccgcgatccaaatcctcccgggaaagttcttggttgatctcttcctcctcgaccgcctcccaggttcttggtgtagcttttgccactctcaccaggagatttcatgtctgatcttgacgttcagatcccaactgcctttgacccctttgccgaggcgaatgctggggacgctggtgcagctgccggatcaaaagactacgttcatgtacgcatccagcagcgtaatggtcgcaagagcctgaccactgtccagggcctgaagaaggagttcagctacagcaagatcctcaaagacctcaagaaagagttttgctgcaatggtacagttgtccaggacacagaacttggacaggtcattcaactccagggtgatcagaggaagaacgtctcaaacttccttgtccaggccggcattgtgaagaaggaacacatcaagattcatggtttctgaacaactgccagctccatatcagagtctacatgcaaagcagctatatattggtggtgcagtatatttagttgtgtgctagcgcaagcaggcgttaccagcttgcgcgctctgagtatacggaaaatctagcatagcccacctctctgcgtgtatgcttgttacccttgtgttgaaactttgtaaggagcaccatcgttagatggcttgttaccctctcccatcaaggttgaataataatatatgctttcttaaatgtggtgtccttcgtatcaaaaaaaaaaaaaaaa

SEQ ID NO: 5850 - protein, 115 aa, Glycine max
  misc_feature: Ceres CLONE ID no. 1072942
  misc_feature: Ceres CDNA ID no. 29191207
  misc_feature: The plant flowers significantly earllier than wild-type.
  misc_feature: The plant is abnormally small.
  misc_feature: null
  misc_feature: Useful for making plants with modulated biomass
  misc_feature: Useful for making plants with modulated flowering time
  misc_feature (27)..(108): Pfam Name: SUI1 PFAM Desc: Translation initiation factor SUI1
  misc_feature: Homolog of GI Number: 21070377 NR Desc: translation initiation factor
  misc_feature: Homolog of GI Number: 2668740 NR Desc: translation initiation factor
  misc_feature: Homolog of GI Number: 50937977 NR Desc: translational initiation factor eIF1
  misc_feature: Homolog of GI Number: 6478142 NR Desc: putative translation initiation factor eIF
  misc_feature: Homolog of GI Number: 53791638 NR Desc: putative translation initiation factor
  misc_feature: Homolog of GI Number: 20218809 NR Desc: putative translation factor
  misc_feature: Homolog of GI Number: 4585973 NR Desc: translation initiation factor
  misc_feature: Homolog of GI Number: 28193048 NR Desc: SUI1 protein
  misc_feature: Homolog of GI Number: 21593860 NR Desc: translation initiation factor
  misc_feature: Useful for accelerating flowering time
  misc_feature: Useful for increasing chlorophyll and photosynthetic capacity
MSDLDVQIPTAFDPFAEANAGDAGAAAGSKDYVHVRIQQRNGRKSLTTVQGLKKEFSYSKILKDLKKEFCCNGTVVQDTELGQVIQLQGDQRKNVSNFLVQAGIVKKEHIKIHGF

SEQ ID NO: 5851 - DNA, 833 bp, Glycine max
  misc_feature: Ceres CLONE ID no. 1072964
  misc_feature: Ceres CDNA ID no. 29191760
  CDS (48)..(668): REFERENCED BY SEQ ID NO: 5852
tttttgggaaggaggaagcagcccgagagagtcgaatcaatcgagagatggtgtctggttcagggatatgcgcaaagcgcgtcgtggtcgatgcaaggcaccacatgttggggcgtcttgcttccatcatcgctaaggagttgctcaacggacagagagtggttgttgtccgatgtgaggagatttgtctgtcaggtggattggttcgacagaagatgaagtacatgaggtttctcaggaagcgcatgaacactaagccttctcacggtcccattcacttcagggctccctctaagatcttctggcgtaccgttcgtgggatgattccacacaagaccaagcgtggagctgctgctcttgaccgtttgaaggtttttgaaggagtccctcctccttacgacaaggttaagagaatggtcattcctgatgctctcaaggtcttgaggctccaggctggtcacaagtactgcttattgggccgtctttcttctgaggttggctggaatcactacgacaccatcaaggagcttgaggtcaagagaaaggagaggtcacaagctgtgtatgagcgtaagaaacagctcatcaagctcaggactaaggccgagaaggttgcagaggagaaacttggagcccagctcgatgttcttgcacccattaagtactgagaattcgcatctgtcttttggtttaatacttgctgcgtttgtgctcgtctcgattctaccctttgaatttcggttttgcatttggtagcttgtaaacgtaaagattggaatgagacattttggttttctgattggagcttcgtttttgtcaaaaaaaaaaaaaaa

SEQ ID NO: 5852 - protein, 206 aa, Glycine max
  misc_feature: Ceres CLONE ID no. 1072964
  misc_feature: Ceres CDNA ID no. 29191760
  misc_feature (11)..(127): Pfam Name: Ribosomal_L13 PFAM Desc: Ribosomal protein L13
  misc_feature: Homolog of GI Number: 23297306 NR Desc: putative 60S ribosomal protein
  misc_feature: Homolog of GI Number: 19423912 NR Desc: putative 60S ribosomal protein
  misc_feature: Homolog of GI Number: 4753651 NR Desc: ribosomal protein L13a like protein
  misc_feature: Homolog of GI Number: 6642654 NR Desc: putative 60S ribosomal protein L13A
  misc_feature: Homolog of GI Number: 21593767 NR Desc: 60S ribosomal protein L13a
  misc_feature: Homolog of GI Number: 79313149 NR Desc: structural constituent of ribosome
  misc_feature: Homolog of GI Number: 76573371 NR Desc: 60S ribosomal protein L13a
  misc_feature: Homolog of GI Number: 21326116 NR Desc: putative 60S ribosomal protein
  misc_feature: Homolog of GI Number: 37718812 NR Desc: putative ribosomal protein L13a
  misc_feature: Homolog of GI Number: 2791948 NR Desc: ribosomal protein L13a
MVSGSGICAKRVVVDARHHMLGRLASIIAKELLNGQRVVVVRCEEICLSGGLVRQKMKYMRFLRKRMNTKPSHGPIHFRAPSKIFWRTVRGMIPHKTKRGAAALDRLKVFEGVPPPYDKVKRMVIPDALKVLRLQAGHKYCLLGRLSSEVGWNHYDTIKELEVKRKERSQAVYERKKQLIKLRTKAEKVAEEKLGAQLDVLAPIKY

SEQ ID NO: 5853 - DNA, 1039 bp, Glycine max
  misc_feature: Ceres CLONE ID no. 1073004
  misc_feature: Ceres CDNA ID no. 29191208
  CDS (138)..(818): REFERENCED BY SEQ ID NO: 5854
ctgttttaaggccccaaaccctctcgaatccgcccctctcctgcgccgtcgtcctcctcctcctcctcgcctccccgcggccacacctcgactcgctccctccctcgagatcatctgtgtcatccttttgaggcgagatggcggctacattcaatgttaacgctgaggcaggccttcaaaagcttgatggctaccttctgtctcgcagttacatctctggataccaagcttccaaggatgacttggctgtgtattctgagttctcagttgctccaccatcgacctgcaccaatgttgcaaggtggtacaatcacattgatgcgctcctgaagctgagcggggttactgcggccggtcaaggtgtgaaggttctgtcatcagttgtccctgaaacctcaactactgatgttgctgaggctcctgcagctgatgatgacgatgacagtgatgttgacctttttggagaggaaaccgaagaggagaagaaggcagctgaagagcgtgctgccaaagcaaaggcttctaccaagaagaaagaatctggcaagtcgtcagttttgcttgatgttaagccatgggatgatgagactgacatggtcaagcttgaggaagctgtccgaagcatcaagatggagggccttctgtggggcgcttccaagctcatgccagttggatatggcatcaagaagcttcagattatgatgaccatcattgatgaccttgtgtctgttgacactctgattgaagaccatctctgcgtcgagccagccaacgagtacatccagagctgtgacattgttgccttcaacaaaatctaaatcttcctgaggcaagtgatggcggtcggtggacaatgcagcagcacaaacaatatatctacagttttccgttgccgtagctaaagcagcataacatattctgccctgtgaggtttttggaccttaggttgagttgggtcgtagtattactactgagtgctatttgcttcgtatgaaatgagacaatgtggttgattcctgttgcaaaaaaaaaaaaaaaa

SEQ ID NO: 5854 - protein, 226 aa, Glycine max
  misc_feature: Ceres CLONE ID no. 1073004
  misc_feature: Ceres CDNA ID no. 29191208
  misc_feature (137)..(226): Pfam Name: EF1_GNE PFAM Desc: EF
  misc_feature: Homolog of GI Number: 7711024 NR Desc: putative elongation factor 1 beta
  misc_feature: Homolog of GI Number: 50939251 NR Desc: elongation factor 1 beta
  misc_feature: Homolog of GI Number: 53370742 NR Desc: elongation factor 1 beta 2
  misc_feature: Homolog of GI Number: 1841870 NR Desc: elongation factor 1
  misc_feature: Homolog of GI Number: 38232568 NR Desc: translational elongation factor 1 subunit Bbeta
  misc_feature: Homolog of GI Number: 13124717 NR Desc: Elongation factor 1
  misc_feature: Homolog of GI Number: 12320854 NR Desc: elongation factor 1
  misc_feature: Homolog of GI Number: 4874292 NR Desc: putative  elongation factor beta
  misc_feature: Homolog of GI Number: 21593028 NR Desc: putative  elongation factor beta
  misc_feature: Homolog of GI Number: 78191406 NR Desc: ripening regulated protein DDTFR10
MAATFNVNAEAGLQKLDGYLLSRSYISGYQASKDDLAVYSEFSVAPPSTCTNVARWYNHIDALLKLSGVTAAGQGVKVLSSVVPETSTTDVAEAPAADDDDDSDVDLFGEETEEEKKAAEERAAKAKASTKKKESGKSSVLLDVKPWDDETDMVKLEEAVRSIKMEGLLWGASKLMPVGYGIKKLQIMMTIIDDLVSVDTLIEDHLCVEPANEYIQSCDIVAFNKI

SEQ ID NO: 5855 - DNA, 952 bp, Glycine max
  misc_feature: Ceres CLONE ID no. 1073073
  misc_feature: Ceres CDNA ID no. 29191676
  CDS (2)..(697): REFERENCED BY SEQ ID NO: 5856
acgtcaccagtcgatcccttccttctgccggtgcgcgtcgagatccgttaacaggcgcccccctccggctccggcgacagagagggaggccaccgacggcggccggcgaccgaagatgttccttgtggactggttctacggggtgctcgcgtcgctcggactgtggcagaaggaggccaagatcctcttcctcggcctcgacaacgccggcaagaccacgctcctccacatgctcaaggacgagaggttggttcagcatcagcctacacagtatccaacttctgaagagctgagcatcggaaagatcaagttcaaggcatttgatttaggaggccatcagattgcccgccgtgtgtggaaggattactatgccaaggttgatgcagtggtgtaccttgtggacgcgtatgacaaagagaggtttgccgaatccaagaaggagctcgacgccctcctctcagacgattcgctggccaccgtccccttcctgatcctgggcaacaagatcgacatcccctatgccgcctcagaggaagagctccgctaccacatgggtcttagcaacttcacgactggcaagggcaaggtgagcctcagcgagtccaatgtccgccccctggaggtcttcatgtgcagcatcgtccgcaagatgggctatggcgaagggttcaagtggatgtcgcagtatatcaagtaggtcaggcaggggggagtggtgaaagaaacaaaagagttataactagtcatggtgataatcctgttttaccttgtcacaagagtgttagggagctagctggtcatggtgccagtacatatgtgatgtaatggatgtagttcaaagtctggggactccgtcctagatttttttggttgagttattacaatgtgatgtcgaaaaggtgatatgctttggactccattgctggtaaaaaaaacaaaaaaaaaaaaaaaa

SEQ ID NO: 5856 - protein, 193 aa, Glycine max
  misc_feature: Ceres CLONE ID no. 1073073
  misc_feature: Ceres CDNA ID no. 29191676
  misc_feature: Homolog of GI Number: 77556132 NR Desc: ADP
  misc_feature: Homolog of GI Number: 34894960 NR Desc: putative GTP
  misc_feature: Homolog of GI Number: 20465729 NR Desc: putative SAR1/GTP
  misc_feature: Homolog of GI Number: 2108345 NR Desc: small GTP
  misc_feature: Homolog of GI Number: 76573331 NR Desc: small GTP
  misc_feature: Homolog of GI Number: 3450893 NR Desc: ras
  misc_feature: Homolog of GI Number: 46946656 NR Desc: putative ras
  misc_feature: Homolog of GI Number: 6563322 NR Desc: small GTP
  misc_feature: Homolog of GI Number: 77416955 NR Desc: NtSar1 protein
  misc_feature: Homolog of GI Number: 20465533 NR Desc: putative GTP
MFLVDWFYGVLASLGLWQKEAKILFLGLDNAGKTTLLHMLKDERLVQHQPTQYPTSEELSIGKIKFKAFDLGGHQIARRVWKDYYAKVDAVVYLVDAYDKERFAESKKELDALLSDDSLATVPFLILGNKIDIPYAASEEELRYHMGLSNFTTGKGKVSLSESNVRPLEVFMCSIVRKMGYGEGFKWMSQYIK

SEQ ID NO: 5857 - DNA, 663 bp, Glycine max
  misc_feature: Ceres CLONE ID no. 1073143
  misc_feature: Ceres CDNA ID no. 25446610
  CDS (155)..(439): REFERENCED BY SEQ ID NO: 5858
gagtttattaaaaaacaaatctaccaaacaggcccgtaaatgtcatatacaatttcgaccctcttcttttgtgcttcgccatcgcaaagtttgtggttttagtttctgaatcaatttcgaagtcatccaaccagccactggattcttggagagcatggacactcagaaaagtcaacctgagaagcagtcttcatccactgcaactgccccatctgttacttcatgtcgaaagaagaagaatgaagaagctgctttcttgggcgatttgaaggaccacattgatgagtttattaatgcttctatggatgaacacaaaacttgttttaagaaaacaattcagaagatgtttggtatgtccaaggctgttgcagaaggtcagtccaatgcttccaaagaagttgaaagttctctgccgcttcagacaactgtacaagactagatttcttgcttttgaaccactaggttttaaccgaggcgtgtggttataccacccagatatttagttatattaggctatttgaaactaaattttgtttgtgaaaactacattcatgggttgttttttgtttttactagtatggtttctatgcttaagtattgttgaattatggtagctgatccaatttctaaagtgagtcccaaccacaaaaaacaaaaaaaaaa

SEQ ID NO: 5858 - protein, 94 aa, Glycine max
  misc_feature: Ceres CLONE ID no. 1073143
  misc_feature: Ceres CDNA ID no. 25446610
MDTQKSQPEKQSSSTATAPSVTSCRKKKNEEAAFLGDLKDHIDEFINASMDEHKTCFKKTIQKMFGMSKAVAEGQSNASKEVESSLPLQTTVQD

SEQ ID NO: 5859 - DNA, 670 bp, Glycine max
  misc_feature: Ceres CLONE ID no. 1073165
  misc_feature: Ceres CDNA ID no. 25446513
  CDS (126)..(404): REFERENCED BY SEQ ID NO: 5860
ctctgttctctctctactgtatgtttgttacgggtaacgtaatattttgatgcgcgtaagatcgaagctccgtcaagtagcttctgcgtcttttctgaatatttaacgccaaaccatagaaaaagatgcctctgggactcatcttaggaataggaagggcatttcgaaggaagcggccatcttcactcgatattctatcatcaaaacgtgctcctcgtggttattataagggaaagaattgcaagcctactggtttccacactcgcaaaggtgggtatgtggtgatgcaagaaaaattgccaaattatgtagttcctgatttgactgatttcaagctcaaaccatacgtatctcagtgtcctatagaagcgaatacctctgaagcttcccaaacggctaaataaccaaattgagtagtgtaagatactttctttgtaactacagatgtttttccatgaagaggagttggcatgcccttcgttttgttgtttgttctctccttttgaactacgccttgagtaattattgaccggcacaaatatttgatagttcaataggatattaacctatcaatcaatatcattaacatatgtagtgcgctgaatgatttggactatcaaaactatcaataattttcatctgttgttccccgacaaaaaaaaaaaaaaaa

SEQ ID NO: 5860 - protein, 92 aa, Glycine max
  misc_feature: Ceres CLONE ID no. 1073165
  misc_feature: Ceres CDNA ID no. 25446513
  misc_feature: Homolog of GI Number: 50910555 NR Desc: 60S ribosomal protein
  misc_feature: Homolog of GI Number: 57092137 NR Desc:  similar to mitochondrial ribosomal protein L41
  misc_feature: Homolog of GI Number: 76646691 NR Desc:  similar to mitochondrial ribosomal protein L41
  misc_feature: Homolog of GI Number: 73967437 NR Desc:  similar to mitochondrial ribosomal protein L41
  misc_feature: Homolog of GI Number: 62858839 NR Desc: LOC549033
  misc_feature: Homolog of GI Number: 61809965 NR Desc:  similar to mitochondrial ribosomal protein L41
  misc_feature: Homolog of GI Number: 50757492 NR Desc:  similar to mitochondrial ribosomal protein L41
  misc_feature: Homolog of GI Number: 49670436 NR Desc: Mrpl41
  misc_feature: Homolog of GI Number: 48735076 NR Desc: MGC83146 protein
  misc_feature: Useful for delaying flowering time
  misc_feature: Useful for making plants with increased biomass and foliage
  misc_feature: Useful for making smaller plants
MPLGLILGIGRAFRRKRPSSLDILSSKRAPRGYYKGKNCKPTGFHTRKGGYVVMQEKLPNYVVPDLTDFKLKPYVSQCPIEANTSEASQTAK

SEQ ID NO: 5861 - DNA, 840 bp, Glycine max
  misc_feature: Ceres CLONE ID no. 1073272
  misc_feature: Ceres CDNA ID no. 40351628
  CDS (1)..(525): REFERENCED BY SEQ ID NO: 5862
ctctacgcgccgccacccaaaaccctaacctgtgccgccgcgctcacagcaaccaagcacaccgccgcagccaccatggcagccgttctcacccgcccgacgccgggcaccgtccagtgcttcggccggaataagaccgccgtcgccgttgcctactgcaagcccgggcgcggcctcatcaaggtcaacggcgcgccgatcgagctcatccgccccgagatgctccgcctgaaggccttcgagccgatcctgctcgccggcaggtcccgcttcaaggacatcgacatgcgcatccgcgttcgcggcggcgggaagacgagccagatctactccatccgccaggccatcgccaagtctctcgtcgcctactaccagaagtacgtcgacgaggcggccaagaaggaggtgaaggagatcttcggccgctacgaccggacgctcctcgtcgccgacccgcgccgttgcgaacccaaaaagtttggcggtcgcggtgcccgagcgcgtttccagaagtcgtaccgttgagctccggcgagatctcttgttgggtatggcggcggtggcctactgcttgcctgcctatctatctaccttttaccgctagtagtttgttttcttttggaccaatgaattggatatgatctcgaagaactatgagttgtctgcagtatcatgcctagttgacgaaggggttttgttatcataatcttatgttaatgatgaaactgaatgttctgtttgagcataactgtttgcgatttgatatttagttgaataggtaaaatgcagctttatttagaatctgtgaatgaaatgtttctagcaaaaaaaaaaaaaaaa

SEQ ID NO: 5862 - protein, 149 aa, Glycine max
  misc_feature: Ceres CLONE ID no. 1073272
  misc_feature: Ceres CDNA ID no. 40351628
  misc_feature (17)..(149): Pfam Name: Ribosomal_S9 PFAM Desc: Ribosomal protein S9/S16
MAAVLTRPTPGTVQCFGRNKTAVAVAYCKPGRGLIKVNGAPIELIRPEMLRLKAFEPILLAGRSRFKDIDMRIRVRGGGKTSQIYSIRQAIAKSLVAYYQKYVDEAAKKEVKEIFGRYDRTLLVADPRRCEPKKFGGRGARARFQKSYR

SEQ ID NO: 5863 - DNA, 1087 bp, Glycine max
  misc_feature: Ceres CLONE ID no. 1073620
  misc_feature: Ceres CDNA ID no. 29191761
  CDS (58)..(918): REFERENCED BY SEQ ID NO: 5864
acattacccactcacatagaaagaaacactcttaagagagagagaaaggacttggagatggaaggcaaggaagaagatgttagggtcggagctaacaagtttccggagagacaacccatcggaacatcggctcagagcgacaaggactacaaggagccacctcctgctcccctgttcgagccaggcgagcttgcttcctggtccttctggagagccggtatcgctgagttcatcgccacgtttctcttcctttacattactgtgttgaccgtcatgggcgtgaagagggcaccgaacatgtgtgcttctgtcggaatccaaggtatcgcttgggccttcggtggtatgatcttcgctcttgtctactgcaccgctggtatctccggtggacacatcaacccagctgtcacgtttggtcttttcttggccaggaagctttcgcttacaagagctgtgtactacatagtgatgcagtgcttaggagccatctgtggagctggtgtggtgaagggtttccaacctaagcaataccaagctctaggaggtggagccaacactgtagctcctggttacaccaaaggaagtggtcttggagctgagattattggaacctttgtcctcgtttacaccgtcttttccgccactgacgccaagagaaacgctcgggactcccatgttcccattcttgcacctctcccaattggattcgctgtgttcttggtccacttagccaccatccccatcactggaactggaatcaacccagcaaggagtcttggagctgccatcatcttcaacaaggacaacgcttgggacgaccattgggtcttttgggttggaccattcatcggtgctgcacttgccgctctataccacgtgatagtcatcagagccatcccattcaagtccagaagctgatcgaatcactcttaaaaaattatagctttgtgctattattagtttgctttcttttgtgaattgtgtgaagcgtcgtgtgtgtatttgatgttcctcttctttgcctaatgtaaaacaaagacattcccctgaaaaattcgtaatctctcttctaaaaaaaaaaaaaaaa

SEQ ID NO: 5864 - protein, 286 aa, Glycine max
  misc_feature: Ceres CLONE ID no. 1073620
  misc_feature: Ceres CDNA ID no. 29191761
  misc_feature (44)..(273): Pfam Name: MIP PFAM Desc: Major intrinsic protein
  misc_feature: Homolog of GI Number: 20453351 NR Desc: AT3g61430/F2A19_30
  misc_feature: Homolog of GI Number: 4467357 NR Desc: PIP1b protein
  misc_feature: Homolog of GI Number: 21536709 NR Desc: aquaporin
  misc_feature: Homolog of GI Number: 10799093 NR Desc: aquaporin PIP1b1
  misc_feature: Homolog of GI Number: 10799095 NR Desc: aquaporin PIP1b2
  misc_feature: Homolog of GI Number: 2199574 NR Desc: aquaporin
  misc_feature: Homolog of GI Number: 7209556 NR Desc: plasma membrane aquaporin 1b
  misc_feature: Homolog of GI Number: 20258955 NR Desc: putative aquaporin protein
  misc_feature: Homolog of GI Number: 1199804 NR Desc: transmembrane channel protein
  misc_feature: Homolog of GI Number: 1199503 NR Desc: transmembrane channel protein
  misc_feature: Useful for making smaller plants
MEGKEEDVRVGANKFPERQPIGTSAQSDKDYKEPPPAPLFEPGELASWSFWRAGIAEFIATFLFLYITVLTVMGVKRAPNMCASVGIQGIAWAFGGMIFALVYCTAGISGGHINPAVTFGLFLARKLSLTRAVYYIVMQCLGAICGAGVVKGFQPKQYQALGGGANTVAPGYTKGSGLGAEIIGTFVLVYTVFSATDAKRNARDSHVPILAPLPIGFAVFLVHLATIPITGTGINPARSLGAAIIFNKDNAWDDHWVFWVGPFIGAALAALYHVIVIRAIPFKSRS

SEQ ID NO: 5865 - DNA, 793 bp, Glycine max
  misc_feature: Ceres CLONE ID no. 1073621
  misc_feature: Ceres CDNA ID no. 29191677
  CDS (125)..(574): REFERENCED BY SEQ ID NO: 5866
aaaagtcgttaagcatccgataaagacggtttgtctcttgttttctcttcttcttcctctgtattctcctccatctgagagaaaacaattgaaaagaaggaaaacaaaagaaacaatctcaacaatggcggatcagctcaccgacgatcagatctctgagttcaaggaagccttcagcttattcgacaaggatggtgacggttgtattaccaccaaggagctgggaactgtgatgcgttctctaggacagaacccaaccgaagcagagcttcaagacatgatcaatgaagttgacgctgatggaaacggaaccattgatttccctgagtttttgaacctcatggctcgtaagatgaaggatactgactccgaggaagagctcaaggaggcattccgggtgtttgacaaggaccagaacggtttcatctcagctgctgagctccgtcatgtgatgacaaacttaggtgagaagctcacagatgaagaggttgatgagatgatcaaggaagctgatgttgatggtgatggccagattaactatgaggagtttgtcaaggtcatgatggctaagtgattaaggttttggtttactaatactcttttatgtgattcttatatttactattatggttctaatgttttttattcatgggacttggttctgttttatggctgtctaagacgccaatgttatctcttttatgttctgttttgtgtctgaaaatttcaagtcttgctctttgtaagttgtaacttggtctagttttgtggtttgttaaaaaaaaaaaaaaaa

SEQ ID NO: 5866 - protein, 149 aa, Glycine max
  misc_feature: Ceres CLONE ID no. 1073621
  misc_feature: Ceres CDNA ID no. 29191677
  misc_feature (12)..(40): Pfam Name: efhand PFAM Desc: EF hand
  misc_feature: Homolog of GI Number: 30683369 NR Desc: calmodulin
  misc_feature: Homolog of GI Number: 20259049 NR Desc: putative calmodulin
  misc_feature: Homolog of GI Number: 62286560 NR Desc: Calmodulin
  misc_feature: Homolog of GI Number: 34304717 NR Desc: calmodulin 8
  misc_feature: Homolog of GI Number: 50299519 NR Desc: calmodulin cam
  misc_feature: Homolog of GI Number: 42374718 NR Desc: calmodulin
  misc_feature: Homolog of GI Number: 60729721 NR Desc: calmodulin
  misc_feature: Homolog of GI Number: 29294049 NR Desc: calmodulin
  misc_feature: Homolog of GI Number: 50748592 NR Desc:  similar to calmodulin 1
  misc_feature: Homolog of GI Number: 76628526 NR Desc:  similar to calmodulin 1
MADQLTDDQISEFKEAFSLFDKDGDGCITTKELGTVMRSLGQNPTEAELQDMINEVDADGNGTIDFPEFLNLMARKMKDTDSEEELKEAFRVFDKDQNGFISAAELRHVMTNLGEKLTDEEVDEMIKEADVDGDGQINYEEFVKVMMAK

SEQ ID NO: 5867 - DNA, 1055 bp, Glycine max
  misc_feature: Ceres CLONE ID no. 1073639
  misc_feature: Ceres CDNA ID no. 29191209
  CDS (235)..(816): REFERENCED BY SEQ ID NO: 5868
atagtttctagaagcaagtgcacgccgcgccagcgaagaatctagaacagaacacatagcctcacgaaggagaggagcgagggataaaatcctttctctccgacgcaaagccagccagcgagccagcgagggggagagagagagagagagaggaagaggcgagcgtcgaccggtcgttcggtgtgaggaggaagaggaagagatcgccggagaagaggaggcggacgagaagagatgtttctggtggattggttctacggggtgctggcgtcgctggggctgtggcagaaggaggccaagatcctcttcctcggcctggacaacgccggcaagaccaccctcctccacatgctcaaggacgagcggctggtgcagcaccagccgacgcagtacccgacgtcggaggagctgagcatcggccagatcaagttcaagaccttcgatctcggtggccaccagatcgcccgccgagtctggaaggactactacgccaaggtggatgcggttgtttacttggtggacgctgctgacaaggaacggtttgcagagtcgaagaaggagctggacggccttctttcagatgactccctagcgaatgtgcctttcctcgtactgggtaacaagattgacatacctatcgcagcatccgaggaggagctgcgctactaccttgggctgagcaacttcaccactgggaagggcaacgtgaacttgtcggattcaaatgtgcggcccctggaggtgttcatgtgcagcattgtccgcaagatgggctatggcgaaggtttcaaatggatgtcccagtacatcaagtgaggggccttcctgctgtccagcgtggcagtactcaggtcctggttctttgtccctctcctcacccttgatgctctggggaaaactgctgctgtaagaaaaggtttatcttagtgatagggaaagcctgtaagttgacgataatcctagatatatggttgcgtaaatttgtttgactgttggtgtgtaaggtgattttattagttacaatgtggttgctgggatcaaaaaaaaaaaaaaaa

SEQ ID NO: 5868 - protein, 193 aa, Glycine max
  misc_feature: Ceres CLONE ID no. 1073639
  misc_feature: Ceres CDNA ID no. 29191209
  misc_feature: Homolog of GI Number: 46946656 NR Desc: putative ras
  misc_feature: Homolog of GI Number: 20465729 NR Desc: putative SAR1/GTP
  misc_feature: Homolog of GI Number: 77556132 NR Desc: ADP
  misc_feature: Homolog of GI Number: 3450893 NR Desc: ras
  misc_feature: Homolog of GI Number: 34894960 NR Desc: putative GTP
  misc_feature: Homolog of GI Number: 2108345 NR Desc: small GTP
  misc_feature: Homolog of GI Number: 21436475 NR Desc: putative Sar1 GTP binding protein
  misc_feature: Homolog of GI Number: 76573331 NR Desc: small GTP
  misc_feature: Homolog of GI Number: 6563322 NR Desc: small GTP
  misc_feature: Homolog of GI Number: 77416955 NR Desc: NtSar1 protein
MFLVDWFYGVLASLGLWQKEAKILFLGLDNAGKTTLLHMLKDERLVQHQPTQYPTSEELSIGQIKFKTFDLGGHQIARRVWKDYYAKVDAVVYLVDAADKERFAESKKELDGLLSDDSLANVPFLVLGNKIDIPIAASEEELRYYLGLSNFTTGKGNVNLSDSNVRPLEVFMCSIVRKMGYGEGFKWMSQYIK

SEQ ID NO: 5869 - DNA, 680 bp, Glycine max
  misc_feature: Ceres CLONE ID no. 1073733
  misc_feature: Ceres CDNA ID no. 29191762
  CDS (147)..(488): REFERENCED BY SEQ ID NO: 5870
atcatttttgccgccgcctccttcatcttcactcgcaggtataagtcaaaacagtttttaaaacataaaactgaaagatggggcgtgtccgaaccaagaccgtgaagaaatcatcacgtcaagtgatcgagaagtactactctcgcatgacgctcgacttccacaccaacaagaagatcctcgaagaggtcgcaatcatcccttcgaagcgtctccgcaacaagattgctggattctccacccatttgatgaagaggatccagaagggaccggtgcgtggtatctcgctcaagcttcaggaggaagagcgtgagcgccgcatggactttgtgcccgatgagtctgctatcaagaccgatgagattaaggttgataaagagactcttgagatgcttgcttcccttgggatgtctgacgttcccggcgtctctgtggttgagcctcaggctgtggcacctgcttttggcaggccaccgagaaggtactgagaggaaccttgctgttcttagagtgtttattgtttcttttgtttggatatttctgaaagtaaagactctttttctattacatgagttttgagtttttgatgaatcattgatattcgagttaaaaggtgcaactattgtagttcatgcgttcttagttctaaaaatttcacaacttcaaaaaaaaaaaaaaaa

SEQ ID NO: 5870 - protein, 136 aa, Glycine max
  misc_feature: Ceres CLONE ID no. 1073733
  misc_feature: Ceres CDNA ID no. 29191762
  misc_feature (2)..(122): Pfam Name: Ribosomal_S17e PFAM Desc: Ribosomal S17
  misc_feature: Homolog of GI Number: 23507769 NR Desc: At5g04800/MUK11_12
  misc_feature: Homolog of GI Number: 25295117 NR Desc: 40S ribosomal protein S17
  misc_feature: Homolog of GI Number: 30102846 NR Desc: At2g05220
  misc_feature: Homolog of GI Number: 21593447 NR Desc: 40S ribosomal protein S17
  misc_feature: Homolog of GI Number: 21595522 NR Desc: 40S ribosomal protein S17
  misc_feature: Homolog of GI Number: 8567795 NR Desc: 40S ribosomal protein S17
  misc_feature: Homolog of GI Number: 76573345 NR Desc: 40S ribosomal protein S17
  misc_feature: Homolog of GI Number: 5758304 NR Desc: 40S ribosomal protein S17
  misc_feature: Homolog of GI Number: 40287504 NR Desc: 40S ribosomal protein S17
  misc_feature: Homolog of GI Number: 31432043 NR Desc: contains similarity to 40S ribosomal protein S17
MGRVRTKTVKKSSRQVIEKYYSRMTLDFHTNKKILEEVAIIPSKRLRNKIAGFSTHLMKRIQKGPVRGISLKLQEEERERRMDFVPDESAIKTDEIKVDKETLEMLASLGMSDVPGVSVVEPQAVAPAFGRPPRRY

SEQ ID NO: 5871 - DNA, 1050 bp, Glycine max
  misc_feature: Ceres CLONE ID no. 1073766
  misc_feature: Ceres CDNA ID no. 29191763
  CDS (90)..(872): REFERENCED BY SEQ ID NO: 5872
gcttcacctacacaacgattctcaaatcgattcgtcaagaataatcaatcacataagatcagatctcagatctctgaagaaggaagaagatggcggtttctgcgcgtgaggagttcgtgtacatggccaagctcgccgagcaagcggagaggtacgaggaaatggtagagttcatggagaaagtctccgccgccgtcgacggcgatgaactcaccgtcgaggagcgaaacctcctctccgtcgcttacaaaaacgtgatcggcgcccgccgtgcctcgtggcgcatcatttcgtcgatcgagcagaaggaagagagccgcggcaacgacgaccacgtcacggcgatccgcgattacagatctaagatcgagacggagctctctggaatctgcgacgggatccttaagctcctcgattcgaggctcgtccctgccgctgcttctggcgattccaaggtgttttacctcaagatgaaaggtgattaccacaggtacttggctgagttcaagactggtcaggagaggaaagacgccgccgaaaacactctctccgcctacaaagctgctcaggatattgcgaatgcagagctcgcaccaactcacccaatccgtctaggtctggcattgaacttctctgtgttctactacgagatccttaactctcctgatcgtgcctgcagcctcgccaaacaggcctttgatgacgcgatagcagagttggacactctaggtgaagagtcatacaaagacagcaccttgatcatgcagcttctccgtgacaacctcactctctggacatccgacatgcaggatgatgctgcggatgagatcaaggaagcatcagctccaaaaccaacagaggaacagcagtaacaatcttttgagtgaactgctaagtttctaggggtttgaaactttcttctctttcgtccatatgtttcttaggtcgtcgcttgctgattcgcttatctccaagcttttttattcattcatcataactctggcaagtctgaactatcaatcatcttctatctcaaaaaaaaaaaaaaaa
